United States Patent Application Publication US 2023/0026259 A1 - sequence listing, part 32

SEQ ID NO: 116516 - DNA, 2156 bp, Homo sapiens
  Payload ID: 2731
  Gene Symbol: CEP250
  Gene Name: centrosomal protein 250kDa
  ENST ID: ENST00000425934
  CDS Start-End: 104-2156
ttcaagaggaggttgaagtggcatggcaatggttagagaccctgctgggcgtgaacaccctctggctacctagggacctgtgggcctaccacctggtgccctcatggagacaagaagccctgggttgaacaacatgaagccccagtcactgcagctggtactggaagagcaggtgctggcactacagcagcagatggcagagaatcaggcagcctcctggcggaagctgaagaactcccaggaggcccagcagagacaagcaacccttgtgaggaagctgcaggccaaggtgctgcagtaccgaagctggtgccaagagctggagaagcggctagaagccactggaggaccaatcccccagaggtgggaaaatgtggaggagccaaacctggatgagctgctggtccgattggaggaggagcaacagaggtgtgagagtctagcagaggtgaacacccagcttcgactgcacatggaaaaagctgacgtggtgaataaagcccttagggaagatgtggaaaaactgacagtggactggagccgggcccgggatgagctaatgaggaaggagagccagtggcagatggagcaggagttcttcaagggctacctgaaaggggagcacggtcgccttctcagtctatggcgggaggttgtgacattccgacgccacttcctggaaatgaagtcagctactgacagagatctgatggagctaaaagctgagcatgtgaggctttcagggtctctgttgacctgttgtctgcgcttgactgtgggagcacagtctcgggaacccaacggatctggaagaatggatgggcgggagccggcccagctgctgctgctactagccaagacccaggagctggagaaggaagcccatgaaaggagccaggagttaatacagctgaagagtcaaggggatctggagaaggctgaacttcaggaccgggtgaccgagctctctgctctgttgacccagtctcagaagcaaaatgaagattatgaaaagatgataaaggctctgagagagacagtggagatcctgacaaatcacacagaattaatggaacatgaagcatctcttagtaggaatgcgcaagaggagaagttgtctttacagcaggtgatcaaggatataacccaggtcatggtggaagaaggggacaatatagcccaaggctctggtcatgagaactctttggaattggactctagtatcttctcccagtttgattaccaggatgcagacaaggctcttactctggtgcgttcagtgctgactcggagacgccaggctgtgcaggacctaaggcagcagcttgcaggctgtcaagaggctgtgaacttgttgcaacagcagcatgatcagtgggaggaagagggcaaagccttgagacagcggctgcagaagctcactggggagcgggacactctggcagggcagactgtggacctccagggagaggtggactctctcagcaaggagcgagagctgctgcagaaggccagggaagagctgcggcagcagctggaggtgctagagcaggaggcatggcgcctgcgaagggtaaatgtggagcttcagctgcagggggactctgcccagggccagaaggaggaacagcaggaggagctgcacctggctgtccgggagagggagcgtcttcaggagatgctgatgggcctggaagccaaacagtcagaatcactcagtgaactgatcactcttcgggaagccctggagtcaagtcacctggaaggggagttactgaggcaagagcaaacggaagtgaccgcagcgctggctagggcagagcagtcaattgcagagctgtcgagttctgaaaacaccctgaagacagaagtagctgatcttcgggctgcagctgtcaagctcagtgccttaaatgaggctttggcgttagataaagttgggctgaaccagcagcttctccagttagaggaggagaaccagtctgtgtgcagcagaatggaggccgcagagcaggcgagaaatgctttgcaggtcgacctggcggaggcagagaagaggagggaagccctgtgggaaaagaacactcacctggaggctcagctgcagaaagctgaggaggctggggctgagctgcaggcagatctcagggacatcc

SEQ ID NO: 116517 - DNA, 702 bp, Homo sapiens
  Payload ID: 2731
  Gene Symbol: CEP250
  Gene Name: centrosomal protein 250kDa
  ENST ID: ENST00000420564
  CDS Start-End: 361-702
agcagcggctgccgcagctcaatcgcggagcaactagccgggcgtctgcgggagccgagcgtggttcacaggtggctgttggtctttagtaagggtgctgtcttccctgtctgatccttagcaaaagtaggaaggtagagttgttggcagaaatcctgggataagagaatagtttcctggaagatctgtgcctccaaccagcagagagggattgagcttcattgaactcaacagagccaacatttcatagcaccatgttcaagaggaggttgaagtggcatggcaatggttagagaccctgctgggcgtgaacaccctctggctacctagggacctgtgggcctaccacctggtgccctcatggagacaagaagccctgggttgaacaacatgaagccccagtcactgcagctggtactggaagagcaggtgctggcactacagcagcagatggcagagaatcaggcagcctcctggcggaagctgaagaactcccaggaggcccagcagagacaagcaacccttgtgaggaagctgcaggccaaggtgctgcagtaccgaagctggtgccaagagctggagaagcggctagaagccactggaggaccaatcccccagaggtgggaaaatgtggaggagccaaacctggatgagctgctggtccgattggaggaggagcaacagaggtgtgagagtctagca

SEQ ID NO: 116518 - DNA, 2295 bp, Homo sapiens
  Payload ID: 2731
  Gene Symbol: CEP250
  Gene Name: centrosomal protein 250kDa
  ENST ID: ENST00000461386
  CDS Start-End: 382-1998
cagtcccacccgccacccgactctggagctcccattcttcaggaccctgctgaagtatcgcttctcagccgccttctccaggcgcagctgcattcgcttctcggtttttgcactcgctgtgcaccgagttactttcccggcccctcgttgacaccgtagagttgttggcagaaatcctgggataagagaatagtttcctggaagatctgtgcctccaaccagcagagagggattgagcttcattgaactcaacagagccaacatttcatagcaccatgttcaagaggaggttgaagtggcatggcaatggttagagaccctgctgggcgtgaacaccctctggctacctagggacctgtgggcctaccacctggtgccctcatggagacaagaagccctgggttgaacaacatgaagccccagtcactgcagctggtactggaagagcaggtgctggcactacagcagcagatggcagagaatcaggcagcctcctggcggaagctgaagaactcccaggaggcccagcagagacaagcaacccttgtgaggaagctgcaggccaaggtgctgcagtaccgaagctggtgccaagagctggagaagcggctagaagccactggaggaccaatcccccagaggtgggaaaatgtggaggagccaaacctggatgagctgctggtccgattggaggaggagcaacagaggtgtgagagtctagcagaggtgaacacccagcttcgactgcacatggaaaaagctgacgtggtgaataaagcccttagggaagatgtggaaaaactgacagtggactggagccgggcccgggatgagctaatgaggaaggagagccagtggcagatggagcaggagttcttcaagggctacctgaaaggggagcacggtcgccttctcagtctatggcgggaggttgtgacattccgacgccacttcctggaaatgaagtcagctactgacagagatctgatggagctaaaagctgagcatgtgaggctttcagggtctctgttgacctgttgtctgcgcttgactgtgggagcacagtctcgggaacccaacggatctggaagaatggatgggcgggagccggcccagctgctgctgctactagccaagacccaggagctggagaaggaagcccatgaaaggagccaggagttaatacagctgaagagtcaaggggatctggagaaggctgaacttcaggaccgggtgaccgagctctctgctctgttgacccagtctcagaagcaaaatgaagattatgaaaagatgataaaggctctgagagagacagtggagatcctggagacaaatcacacagaattaatggaacatgaagcatctcttagtaggaatgcgcaagaggagaagttgtctttacagcaggtgatcaaggatataacccaggtcatggtggaagaaggggacaatatagcccaaggctctggtcatgagaactctttggaattggactctagtatcttctcccagtttgattaccaggatgcagacaaggctcttactctggtgcgttcagtgctgactcggagacgccaggctgtgcaggacctaaggcagcagcttgcaggctgtcaagaggctgtgaacttgttgcaacagcagcatgatcagtgggaggaagagggcaaagccttgagacagcggctgcagaagctcactggggagcgggacactctggcagggcagactgtggacctccagggagaggtggactctctcagcaaggagcgagagctgctgcagaaggccagggaagagctgcggcagcagctggaggtgctagagcaggaggcatggcgcctgcgaagggtaaatgtggagcttcagctgcagggggactctgcccagggccagaaggaggaacagcaggaggagctgcacctggctgtccgggagagggagcgtctgcagagcagtcaattgcagagctgtcgagttctgaaaacaccctgaagacagaagtagctgatcttcgggctgcagctgtcaagctcagtgccttaaatgaggctttggcgttagataaagttgggctgaaccagcagcttctccagttagaggaggagaaccagtctgtgtgcagcagaatggaggccgcagagcaggcgagaaatgctttgcaggtcgacctggcggaggcagagaagaggagggaagccctgtgggaaaagaacactcacctggaggctcagctgcagaaagctgaggaggctggggctgagctgcaggcagatctcagggacatccaag

SEQ ID NO: 116519 - DNA, 607 bp, Homo sapiens
  Payload ID: 2731
  Gene Symbol: CEP250
  Gene Name: centrosomal protein 250kDa
  ENST ID: ENST00000621352
  CDS Start-End: 1-105
gatgggagaggacagaagaactcagatgccaagtgtgtggctgaactgcagaaagagggcagagcacatggcaagtggcatgctgactcagacaccgggcactgagaaaagtgggaagccatggtcacagactctacattcccctctcctgttggcctccatcccttcctcaaccgtccgcagaacacctccttccagcaccttagctcctgcctccctctggacctattcagtcctcaagggtgccctgctaaaggctgggctgaaagctaagaggagaggtggcattcaatgtgtcctgtgtcctccctggggttgattaaggggtcgatgcccaatagagtccttcatcttggtgttcagcccagggtccagctgccaagggaaggcttggcaatcaagggtgatggagataagaatgaaaaggggcaccaccctgtgccaaagctggcatgttgtatatctgagagaggagctgcctattcacagtgtagggttgtcaagctggaggcagggagagaaaagcaagagctttttggttcctcttgaggatagaatctataggaaaatgtaagagggttaaaaataaatttcccatgcatccaaa

SEQ ID NO: 116520 - DNA, 7616 bp, Homo sapiens
  Payload ID: 2732
  Gene Symbol: CEP290
  Gene Name: centrosomal protein 290kDa
  ENST ID: ENST00000309041
  CDS Start-End: 1-7446
atgccacctaatataaactggaaagaaataatgaaagttgacccagatgacctgccccgtcaagaagaactggcagataatttattgatttccttatccaaggtggaagtaaatgagctaaaaagtgaaaagcaagaaaatgtgatacaccttttcagaattactcagtcactaatgaagatgaaagctcaagaagtggagctggctttggaagaagtagaaaaagctggagaagaacaagcaaaatttgaaaatcaattaaaaactaaagtaatgaaactggaaaatgaactggagatggctcagcagtctgcaggtggacgagatactcggtttttacgtaatgaaatttgccaacttgaaaaacaattagaacaaaaagatagagaattggaggacatggaaaaggagttggagaaagagaagaaagttaatgagcaattggctcttcgaaatgaggaggcagaaaatgaaaacagcaaattaagaagagagaacaaacgtctaaagaaaaagaatgaacaactttgtcaggatattattgactaccagaaacaaatagattcacagaaagaaacacttttatcaagaagaggggaagacagtgactaccgatcacagttgtctaaaaaaaactatgagcttatccaatatcttgatgaaattcagactttaacagaagctaatgagaaaattgaagttcagaatcaagaaatgagaaaaaatttagaagagtctgtacaggaaatggagaagatgactgatgaatataatagaatgaaagctattgtgcatcagacagataatgtaatagatcagttaaaaaaagaaaacgatcattatcaacttcaagtgcaggagcttacagatcttctgaaatcaaaaaatgaagaagatgatccaattatggtagctgtcaatgcaaaagtagaagaatggaagctaattttgtcttctaaagatgatgaaattattgagtatcagcaaatgttacataacctaagggagaaacttaagaatgctcagcttgatgctgataaaagtaatgttatggctctacagcagggtatacaggaacgagacagtcaaattaagatgctcaccgaacaagtagaacaatatacaaaagaaatggaaaagaatacttgtattattgaagatttgaaaaatgagctccaaagaaacaaaggtgcttcaaccctttctcaacagactcatatgaaaattcagtcaacgttagacattttaaaagagaaaactaaagaggctgagagaacagctgaactggctgaggctgatgctagggaaaaggataaagaattagttgaggctctgaagaggttaaaagattatgaatcgggagtatatggtttagaagatgctgtcgttgaaataaagaattgtaaaaaccaaattaaaataagagatcgagagattgaaatattaacaaaggaaatcaataaacttgaattgaagatcagtgatttccttgatgaaaatgaggcacttagagagcgtgtgggccttgaaccaaagacaatgattgatttaactgaatttagaaatagcaaacacttaaaacagcagcagtacagagctgaaaaccagattcttttgaaagaggcaagtattgaaagtctagaggaagaacgacttgatctgaaaaaaaaaattcgtcaaatggctcaagaaagaggaaaaagaagtgcaacttcaggattaaccactgaggacctgaacctaactgaaaacatttctcaaggagatagaataagtgaaagaaaattggatttattgagcctcaaaaatatgagtgaagcacaatcaaagaatgaatttctttcaagagaactaattgaaaaagaaagagatttagaaaggagtaggacagtgatagccaaatttcagaataaattaaaagaattagttgaagaaaataagcaacttgaagaaggtatgaaagaaatattgcaagcaattaaggaaatgcagaaagatcctgatgttaaaggaggagaaacatctctaattatccctagccttgaaagactagttaatgctatagaatcaaagaatgcagaaggaatctttgatgcgagtctgcatttgaaagcccaagttgatcagcttaccggaagaaatgaagaattaagacaggagctcagggaatctcggaaagaggctataaattattcacagcagttggcaaaagctaatttaaagatagaccatcttgaaaaagaaactagtcttttacgacaatcagaaggatcaaatgttgtttttaaaggaattgacttacctgatgggatagcaccatctagtgccagtatcattaattctcagaatgaatatttaatacatttgttacaggaactagaaaataaagaaaaaaagttaaagaatttagaagattctcttgaagattacaacagaaaatttgctgtaattcgtcatcaacaaagtttgttgtataaagaatacctaagtgaaaaggagacctggaaaacagaatctaaaacaataaaagaggaaaagagaaaacttgaggatcaagtccaacaagatgctataaaagtaaaagaatataataatttgctcaatgctcttcagatggattcggatgaaatgaaaaaaatacttgcagaaaatagtaggaaaattactgttttgcaagtgaatgaaaaatcacttataaggcaatatacaaccttagtagaattggagcgacaacttagaaaagaaaatgagaagcaaaagaatgaattgttgtcaatggaggctgaagtttgtgaaaaaattgggtgtttgcaaagatttaaggaaatggccattttcaagattgcagctctccaaaaagttgtagataatagtgtttctttgtctgaactagaactggctaataaacagtacaatgaactgactgctaagtacagggacatcttgcaaaaagataatatgcttgttcaaagaacaagtaacttggaacacctggagtgtgaaaacatctccttaaaagaacaagtggagtctataaataaagaactggagattaccaaggaaaaacttcacactattgaacaagcctgggaacaggaaactaaattaggtaatgaatctagcatggataaggcaaagaaatcaataaccaacagtgacattgtttccatttcaaaaaaaataactatgctggaaatgaaggaattaaatgaaaggcagcgggctgaacattgtcaaaaaatgtatgaacacttacggacttcgttaaagcaaatggaggaacgtaattttgaattggaaaccaaatttgctgagcttaccaaaatcaatttggatgcacagaaggtggaacagatgttaagagatgaattagctgatagtgtgagcaaggcagtaagtgatgctgataggcaacggattctagaattagagaagaatgaaatggaactaaaagttgaagtgtcaaaactgagagagatttctgatattgccagaagacaagttgaaattttgaatgcacaacaacaatctagggacaaggaagtagagtccctcagaatgcaactgctagactatcaggcacagtctgatgaaaagtcgctcattgccaagttgcaccaacataatgtctctcttcaactgagtgaggctactgctcttggtaagttggagtcaattacatctaaactgcagaagatggaggcctacaacttgcgcttagagcagaaacttgatgaaaaagaacaggctctctattatgctcgtttggagggaagaaacagagcaaaacatctgcgccaaacaattcagtctctacgacgacagtttagtggagctttacccttggcacaacaggaaaagttctccaaaacaatgattcaactacaaaatgacaaacttaagataatgcaagaaatgaaaaattctcaacaagaacatagaaatatggagaacaaaacattggagatggaattaaaattaaagggcctggaagagttaataagcactttaaaggataccaaaggagcccaaaaggtaatcaactggcatatgaaaatagaagaacttcgtcttcaagaacttaaactaaatcgggaattagtcaaggataaagaagaaataaaatatttgaataacataatttctgaatatgaacgtacaatcagcagtcttgaagaagaaattgtgcaacagaacaagtttcatgaagaaagacaaatggcctgggatcaaagagaagttgacctggaacgccaactagacatttttgaccgtcagcaaaatgaaatactaaatgcggcacaaaagtttgaagaagctacaggatcaatccctgaccctagtttgccccttccaaatcaacttgagatcgctctaaggaaaattaaggagaacattcgaataattctagaaacacgggcaacttgcaaatcactagaagagaaactaaaagagaaagaatctgctttaaggttagcagaacaaaatatactgtcaagagacaaagtaatcaatgaactgaggcttcgattgcctgccactgcagaaagagaaaagctcatagctgagctaggcagaaaagagatggaaccaaaatctcaccacacattgaaaattgctcatcaaaccattgcaaacatgcaagcaaggttaaatcaaaaagaagaagtattaaagaagtatcaacgtcttctagaaaaagccagagaggagcaaagagaaattgtgaagaaacatgaggaagaccttcatattcttcatcacagattagaactacaggctgatagttcactaaataaattcaaacaaacggcttgggatttaatgaaacagtctcccactccagttcctaccaacaagcattttattcgtctggctgagatggaacagacagtagcagaacaagatgactctctttcctcactcttggtcaaactaaagaaagtatcacaagatttggagagacaaagagaaatcactgaattaaaagtaaaagaatttgaaaatatcaaattacagcttcaagaaaaccatgaagatgaagtgaaaaaagtaaaagcggaagtagaggatttaaagtatcttctggaccagtcacaaaaggagtcacagtgtttaaaatctgaacttcaggctcaaaaagaagcaaattcaagagctccaacaactacaatgagaaatctagtagaacggctaaagagccaattagccttgaaggagaaacaacagaaagcacttagtcgggcacttttagaactccgggcagaaatgacagcagctgctgaagaacgtattatttctgcaacttctcaaaaagaggcccatctcaatgttcaacaaatcgttgatcgacatactagagagctaaagacacaagttgaagatttaaatgaaaatcttttaaaattgaaagaagcacttaaaacaagtaaaaacagagaaaactcactaactgataatttgaatgacttaaataatgaactgcaaaagaaacaaaaagcctataataaaatacttagagagaaagaggaaattgatcaagagaatgatgaactgaaaaggcaaattaaaagactaaccagtggattacagggcaaacccctgacagataataaacaaagtctaattgaagaactccaaaggaaagttaaaaaactagagaaccaattagagggaaaggtggaggaagtagacctaaaacctatgaaagaaaagaatgctaaagaagaattaattaggtgggaagaaggtaaaaagtggcaagccaaaatagaaggaattcgaaacaagttaaaagagaaagagggggaagtctttactttaacaaagcagttgaatactttgaaggatctttttgccaaagccgataaagagaaacttactttgcagaggaaactaaaaacaactggcatgactgttgatcaggttttgggaatacgagctttggagtcagaaaaagaattggaagaattaaaaaagagaaatcttgacttagaaaatgatatattgtatatgagggcccaccaagctcttcctcgagattctgttgtagaagatttacatttacaaaatagatacctccaagaaaaacttcatgctttagaaaaacagttttcaaaggatacatattctaagccttcaatttcaggaatagagtcagatgatcattgtcagagagaacaggagcttcagaaggaaaacttgaagttgtcatctgaaaatattgaactgaaatttcagcttgaacaagcaaataaagatttgccaagattaaagaatcaagtcagagatttgaaggaaatgtgtgaatttcttaagaaagaaaaagcagaagttcagcggaaacttggccatgttagagggtctggtagaagtggaaagacaatcccagaactggaaaaaaccattggtttaatgaaaaaagtagttgaaaaagtccagagagaaaatgaacagttgaaaaaagcatcaggaatattgactagtgaaaaaatggctaatattgagcaggaaaatgaaaaattgaaggctgaattagaaaaacttaaagctcatcttgggcatcagttgagcatgcactatgaatccaagaccaaaggcacagaaaaaattattgctgaaaatgaaaggcttcgtaaagaacttaaaaaagaaactgatgctgcagagaaattacggatagcaaagaataatttagagatattaaatgagaagatgacagttcaactagaagagactggtaagagattgcagtttgcagaaagcagaggtccacagcttgaaggtgctgacagtaagagctggaaatccattgtggttacaagaatgtatgaaaccaagttaaaagaattggaaactgatattgccaaaaaaaatcaaagcattactgaccttaaacagcttgtaaaagaagcaacagagagagaacaaaaagttaacaaatacaatgaagaccttgaacaacagattaagattcttaaacatgttcctgaaggtgctgagacagagcaaggccttaaacgggagcttcaagttcttagattagctaatcatcagctggataaagagaaagcagaattaatccatcagatagaagctaacaaggaccaaagtggagctgaaagcaccatacctgatgctgatcaactaaaggaaaaaataaaagatctagagacacagctcaaaatgtcagatctagaaaagcagcatttgaaggaggaaataaagaagctgaaaaaagaactggaaaattttgatccttcattttttgaagaaattgaagatcttaagtataattacaaggaagaagtgaagaagaatattctcttagaagagaaggtaaaaaaactttcagaacaattgggagttgaattaactagccctgttgctgcttctgaagagtttgaagatgaagaagaaagtcctgttaatttccccatttactaaaggtcacctataaactttgtttcatttaactatttattaactttataagttaaatatacttggaaataagcagttctccgaactgtagtatttccttctcactaccttgtacctttatacttagattggaattcttaataaataaaattatatgaaattttcaacttatt

SEQ ID NO: 116521 - DNA, 2421 bp, Homo sapiens
  Payload ID: 2732
  Gene Symbol: CEP290
  Gene Name: centrosomal protein 290kDa
  ENST ID: ENST00000397838
  CDS Start-End: 1-2421
atgccacctaatataaactggaaagaaataatgaaagttgacccagatgacctgccccgtcaagaagaactggcagataatttattgatttccttatccaaggtggaagtaaatgagctaaaaagtgaaaagcaagaaaatgtgatacaccttttcagaattactcagtcactaatgaagatgaaagctcaagaagtggagctggctttggaagaagtagaaaaagctggagaagaacaagcaaaatttgaaaatcaattaaaaactaaagtaatgaaactggaaaatgaactggagatggctcagcagtctgcaggtggacgagatactcggtttttacgtaatgaaatttgccaacttgaaaaacaattagaacaaaaagatagagaattggaggacatggaaaaggagttggagaaagagaagaaagttaatgagcaattggctcttcgaaatgaggaggcagaaaatgaaaacagcaaattaagaagagagaacaaacgtctaaagaaaaagaatgaacaactttgtcaggatattattgactaccagaaacaaatagattcacagaaagaaacacttttatcaagaagaggggaagacagtgactaccgatcacagttgtctaaaaaaaactatgagcttatccaatatcttgatgaaattcagactttaacagaagctaatgagaaaattgaagttcagaatcaagaaatgagaaaaaatttagaagagtctgtacaggaaatggagaagatgactgatgaatataatagaatgaaagctattgtgcatcagacagataatgtaatagatcagttaaaaaaagaaaacgatcattatcaacttcaagtgcaggagcttacagatcttctgaaatcaaaaaatgaagaagatgatccaattatggtagctgtcaatgcaaaagtagaagaatggaagctaattttgtcttctaaagatgatgaaattattgagtatcagcaaatgttacataacctaagggagaaacttaagaatgctcagcttgatgctgataaaagtaatgttatggctctacagcagggtatacaggaacgagacagtcaaattaagatgctcaccgaacaagtagaacaatatacaaaagaaatggaaaagaatacttgtattattgaagatttgaaaaatgagctccaaagaaacaaaggtgcttcaaccctttctcaacagactcatatgaaaattcagtcaacgttagacattttaaaagagaaaactaaagaggctgagagaacagctgaactggctgaggctgatgctagggaaaaggataaagaattagttgaggctctgaagaggttaaaagattatgaatcgggagtatatggtttagaagatgctgtcgttgaaataaagaattgtaaaaaccaaattaaaataagagatcgagagattgaaatattaacaaaggaaatcaataaacttgaattgaagatcagtgatttccttgatgaaaatgaggcacttagagagcgtgtgggccttgaaccaaagacaatgattgatttaactgaatttagaaatagcaaacacttaaaacagcagcagtacagagctgaaaaccagattcttttgaaagaggcaagtattgaaagtctagaggaagaacgacttgatctgaaaaaaaaaattcgtcaaatggctcaagaaagaggaaaaagaagtgcaacttcaggattaaccactgaggacctgaacctaactgaaaacatttctcaaggagatagaataagtgaaagaaaattggatttattgagcctcaaaaatatgagtgaagcacaatcaaagaatgaatttctttcaagagaactaattgaaaaagaaagagatttagaaaggagtaggacagtgatagccaaatttcagaataaattaaaagaattagttgaagaaaataagcaacttgaagaaggtatgaaagaaatattgcaagcaattaaggaaatgcagaaagatcctgatgttaaaggaggagaaacatctctaattatccctagccttgaaagactagttaatgctatagaatcaaagaatgcagaaggaatctttgatgcgagtctgcatttgaaagcccaagttgatcagcttaccggaagaaatgaagaattaagacaggagctcagggaatctcggaaagaggctataaattattcacagcagttggcaaaagctaatttaaagatagaccatcttgaaaaagaaactagtcttttacgacaatcagaaggatcaaatgttgtttttaaaggaattgacttacctgatgggatagcaccatctagtgccagtatcattaattctcagaatgaatatttaatacatttgttacaggaactagaaaataaagaaaaagttaaagaatttagaagattctcttga

SEQ ID NO: 116522 - DNA, 5968 bp, Homo sapiens
  Payload ID: 2732
  Gene Symbol: CEP290
  Gene Name: centrosomal protein 290kDa
  Uniprot ID: O15078
  ENST ID: ENST00000547691
  CDS Start-End: 1181-5800
aagcttaatactgagcatcaagaaattctttaataaatataagtgatatttattcagacatgtaataaggaaatgttcatgtcttatttttgtgttagatttttttagaatctacttttgttagagttttataaatacagttagtgtttgagatagaaagagaaaagaattagttttcttcctcttctacctgctcatgaacttgatttttttctcccaacaattgaagagccaagaaaaagggagattcttaagagatgggaaatagaatctcatctacccctgtttcccccagaacagtgaaactgaatcttaagggtaagatagaatagtgtgtacttaacttagatggagaagaaaggctgccaaaatgagatctgaagcgctattacaaatatttccatcgttactgtacttcagaatgaattacaaccgtaagtttttttacttcctcattcataaatttgattattccttataccacttctcagctttcatcattctttattgtacttttctatgtaatgtttgcctattatacagcaacttaagagaactgtaagtttggacatttcattttggtgttgataatagaatatctttgaatagttctatagttgatgagtagaaccatgaaccaagtaacttaaagtccttgatgttatttattacagagaactataatagaagctctcccgctaatgtttccatcatgtgtacaaaaagttttcttgttattaaagctagtccgtttaacttacaataagcataaatagctaagctgtgaaagttacctgtgataatgctaattttcccatttattaaaaggcaagttgttttccgatcataagaaatttagaaaagccatccaaagataaattccgagtgatatattcctgctgtttgttatgttttctcaaattaattgagttttattttacaatgacaggagttattaaagtattttatttttattatgattaagattttcaaagtaacatttcttatatgaaagaaattatgttaatgcatgtttttcttacatgggaaatcatatattttaaaaatgattttaaaattcgttttactttaagttgtattatctttctcaaaagtggctagtgcttgaccagaaaaaaagacaccagcataactcagtgtatctttatttacataggaaatggccattttcaagattgcagctctccaaaaagttgtagataatagtgtttctttgtctgaactagaactggctaataaacagtacaatgaactgactgctaagtacagggacatcttgcaaaaagataatatgcttgttcaaagaacaagtaacttggaacacctggagtgtgaaaacatctccttaaaagaacaagtggagtctataaataaagaactggagattaccaaggaaaaacttcacactattgaacaagcctgggaacaggaaactaaattaggtaatgaatctagcatggataaggcaaagaaatcaataaccaacagtgacattgtttccatttcaaaaaaaataactatgctggaaatgaaggaattaaatgaaaggcagcgggctgaacattgtcaaaaaatgtatgaacacttacggacttcgttaaagcaaatggaggaacgtaattttgaattggaaaccaaatttgctgagcttaccaaaatcaatttggatgcacagaaggtggaacagatgttaagagatgaattagctgatagtgtgagcaaggcagtaagtgatgctgataggcaacggattctagaattagagaagaatgaaatggaactaaaagttgaagtgtcaaaactgagagagatttctgatattgccagaagacaagttgaaattttgaatgcacaacaacaatctagggacaaggaagtagagtccctcagaatgcaactgctagactatcaggcacagtctgatgaaaagtcgctcattgccaagttgcaccaacataatgtctctcttcaactgagtgaggctactgctcttggtaagttggagtcaattacatctaaactgcagaagatggaggcctacaacttgcgcttagagcagaaacttgatgaaaaagaacaggctctctattatgctcgtttggagggaagaaacagagcaaaacatctgcgccaaacaattcagtctctacgacgacagtttagtggagctttacccttggcacaacaggaaaagttctccaaaacaatgattcaactacaaaatgacaaacttaagataatgcaagaaatgaaaaattctcaacaagaacatagaaatatggagaacaaaacattggagatggaattaaaattaaagggcctggaagagttaataagcactttaaaggataccaaaggagcccaaaaggtaatcaactggcatatgaaaatagaagaacttcgtcttcaagaacttaaactaaatcgggaattagtcaaggataaagaagaaataaaatatttgaataacataatttctgaatatgaacgtacaatcagcagtcttgaagaagaaattgtgcaacagaacaagtttcatgaagaaagacaaatggcctgggatcaaagagaagttgacctggaacgccaactagacatttttgaccgtcagcaaaatgaaatactaaatgcggcacaaaagtttgaagaagctacaggatcaatccctgaccctagtttgccccttccaaatcaacttgagatcgctctaaggaaaattaaggagaacattcgaataattctagaaacacgggcaacttgcaaatcactagaagagaaactaaaagagaaagaatctgctttaaggttagcagaacaaaatatactgtcaagagacaaagtaatcaatgaactgaggcttcgattgcctgccactgcagaaagagaaaagctcatagctgagctaggcagaaaagagatggaaccaaaatctcaccacacattgaaaattgctcatcaaaccattgcaaacatgcaagcaaggttaaatcaaaaagaagaagtattaaagaagtatcaacgtcttctagaaaaagccagagaggagcaaagagaaattgtgaagaaacatgaggaagaccttcatattcttcatcacagattagaactacaggctgatagttcactaaataaattcaaacaaacggcttgggatttaatgaaacagtctcccactccagttcctaccaacaagcattttattcgtctggctgagatggaacagacagtagcagaacaagatgactctctttcctcactcttggtcaaactaaagaaagtatcacaagatttggagagacaaagagaaatcactgaattaaaagtaaaagaatttgaaaatatcaaattacagcttcaagaaaaccatgaagatgaagtgaaaaaagtaaaagcggaagtagaggatttaaagtatcttctggaccagtcacaaaaggagtcacagtgtttaaaatctgaacttcaggctcaaaaagaagcaaattcaagagctccaacaactacaatgagaaatctagtagaacggctaaagagccaattagccttgaaggagaaacaacagaaagcacttagtcgggcacttttagaactccgggcagaaatgacagcagctgctgaagaacgtattatttctgcaacttctcaaaaagaggcccatctcaatgttcaacaaatcgttgatcgacatactagagagctaaagacacaagttgaagatttaaatgaaaatcttttaaaattgaaagaagcacttaaaacaagtaaaaacagagaaaactcactaactgataatttgaatgacttaaataatgaactgcaaaagaaacaaaaagcctataataaaatacttagagagaaagaggaaattgatcaagagaatgatgaactgaaaaggcaaattaaaagactaaccagtggattacagggcaaacccctgacagataataaacaaagtctaattgaagaactccaaaggaaagttaaaaaactagagaaccaattagagggaaaggtggaggaagtagacctaaaacctatgaaagaaaagaatgctaaagaagaattaattaggtgggaagaaggtaaaaagtggcaagccaaaatagaaggaattcgaaacaagttaaaagagaaagagggggaagtctttactttaacaaagcagttgaatactttgaaggatctttttgccaaagccgataaagagaaacttactttgcagaggaaactaaaaacaactggcatgactgttgatcaggttttgggaatacgagctttggagtcagaaaaagaattggaagaattaaaaaagagaaatcttgacttagaaaatgatatattgtatatgagggcccaccaagctcttcctcgagattctgttgtagaagatttacatttacaaaatagatacctccaagaaaaacttcatgctttagaaaaacagttttcaaaggatacatattctaagccttcaatttcaggaatagagtcagatgatcattgtcagagagaacaggagcttcagaaggaaaacttgaagttgtcatctgaaaatattgaactgaaatttcagcttgaacaagcaaataaagatttgccaagattaaagaatcaagtcagagatttgaaggaaatgtgtgaatttcttaagaaagaaaaagcagaagttcagcggaaacttggccatgttagagggtctggtagaagtggaaagacaatcccagaactggaaaaaaccattggtttaatgaaaaaagtagttgaaaaagtccagagagaaaatgaacagttgaaaaaagcatcaggaatattgactagtgaaaaaatggctaatattgagcaggaaaatgaaaaattgaaggctgaattagaaaaacttaaagctcatcttgggcatcagttgagcatgcactatgaatccaagaccaaaggcacagaaaaaattattgctgaaaatgaaaggcttcgtaaagaacttaaaaaagaaactgatgctgcagagaaattacggatagcaaagaataatttagagatattaaatgagaagatgacagttcaactagaagagactggtaagagattgcagtttgcagaaagcagaggtccacagcttgaaggtgctgacagtaagagctggaaatccattgtggttacaagaatgtatgaaaccaagttaaaagaattggaaactgatattgccaaaaaaaatcaaagcattactgaccttaaacagcttgtaaaagaagcaacagagagagaacaaaaagttaacaaatacaatgaagaccttgaacaacagattaagattcttaaacatgttcctgaaggtgctgagacagagcaaggccttaaacgggagcttcaagttcttagattagctaatcatcagctggataaagagaaagcagaattaatccatcagatagaagctaacaaggaccaaagtggagctgaaagcaccatacctgatgctgatcaactaaaggaaaaaataaaagatctagagacacagctcaaaatgtcagatctagaaaagcagcatttgaaggaggaaataaagaagctgaaaaaagaactggaaaattttgatccttcattttttgaagaaattgaagatcttaagtataattacaaggaagaagtgaagaagaatattctcttagaagagaaggtaaaaaaactttcagaacaattgggagttgaattaactagccctgttgctgcttctgaagagtttgaagatgaagaagaaagtcctgttaatttccccatttactaaaggtcacctataaactttgtttcatttaactatttattaactttataagttaaatatacttggaaataagcagttctccgaactgtagtatttccttctcactaccttgtacctttatacttagattggaattcttaataaataaaattatatgaaattttcaactta

SEQ ID NO: 116523 - DNA, 1285 bp, Homo sapiens
  Payload ID: 2732
  Gene Symbol: CEP290
  Gene Name: centrosomal protein 290kDa
  ENST ID: ENST00000552770
  CDS Start-End: 1-324
gtgatacaccttttcagaattactcagtcactaatgaagatgaaagctcaagaagtggagctggctttggaagaagtagaaaaagctggagaagaacaagcaaaatttgaaaatcaattaaaaactaaagtaatgaaactggaaaatgaactggagatggctcagcagtctgcaggtggacgagatactcggtttttacgtaatgaaatttgccaacttgaaaaacaattagaacaaaaagatagagaattggaggacatggaaaaggagttggagaaagagaagaaagttaatgagcaagtaaagcactttttttttccatgaatcttcactgttcaagttacctggctttttattattattggtaacaatatcaatttttatattgtatgttatatttgaaaaatgatgtacacttatctctaaggttttatatcactgttcattttgtcatcaccaattttaaaatataatggtacttctagtgaatatgacttgaagattaattctttatatttggaagtacatttttctcaggacatcaaacttgttacctaaaattaatgcttttgtctggaagattggtatcaagtaactaatagattttcataaagaagtgatctttctagtgccatagtttattttgggtaaaagttatatttgttcatttcaatgtatttatatgattagtagattcgcaaatgaatctttcgatatattcaataatggttaattaaatatcttgtttttggttgtaccttattttatgtgagatatatatatatatgtatagtttttgaaaagttgtgttcatgtcagcagtttataaatcacatatttaaaataacatttttaatgcatagtttttattacctcgttattccttgttataaactaataattcttgcagtgttcacttgaatttagttttaggaaaaaagttttttgcagatcaacttgtatttcctggaagaaaatttcctattttacctcagcttcctatttaatgtattatttatttatttacttaacatttatttgttttttatttcacctgaactgttagtaaacttagtaaaatttggtgcctacatgtggtaactgtcctgtcccttatactcagaaacgttttccacctttgtgtcctttaggtcattgttgtgttatattccatttattttattttgtccattgttctctcagaaattgagggtcatacattttaagaaaacaatgatatgctatttaagagaatgtatcataaattgatttgtaaggaaaagta

SEQ ID NO: 116524 - DNA, 697 bp, Homo sapiens
  Payload ID: 2732
  Gene Symbol: CEP290
  Gene Name: centrosomal protein 290kDa
  ENST ID: ENST00000550962
  CDS Start-End: 206-697
ggcggagttggggatggtgtcgcctagcagccgctgccgctttggcttgctcgggaccatttggctggacccagagtccgcgtggaaccgcgatagggatctgtcagggcccgcggccgggtccagcttggtggttgcggtagtgagaggcctccgctggttgccaggcttggtctagaggtggagcacagtgaaagaattcaagatgccacctaatataaactggaaagaaataatgaaagttgacccagatgacctgccccgtcaagaagaactggcagataatttattgatttccttatccaaggtggaagtaaatgagctaaaaagtgaaaagcaagaaaatgtgatacaccttttcagaattactcagtcactaatgaagatgaaagctcaagaagtggagctggctttggaagaagtagaaaaagctggagaagaacaagcaaaatttgaaaatcaattaaaaactaaagtaatgaaactggaaaatgaactggagatggctcagcagtctgcaggtggacgagatactcggtttttacgtaatgaaatttgccaacttgaaaaacaattagaacaaaaagatagagaattggaggacatggaaaaggagttggagaaagagaagaaagttaatgagcaaaacaaacgtctaaagaaaaagaatgaacaactttgtcaggatattattgac

SEQ ID NO: 116525 - DNA, 7948 bp, Homo sapiens
  Payload ID: 2732
  Gene Symbol: CEP290
  Gene Name: centrosomal protein 290kDa
  Uniprot ID: O15078
  ENST ID: ENST00000552810
  CDS Start-End: 345-7784
atttgaagtcctcgttccacgccttctcatcatcctgaacaccgagctctgggactccggcggagaatctaaacgtaaagcatcacccacggtcgtgaactgtaggctctcctggcatccgggatcttattctggccttggcggagttggggatggtgtcgcctagcagccgctgccgctttggcttgctcgggaccatttggctggacccagagtccgcgtggaaccgcgatagggatctgtcagggcccgcggccgggtccagcttggtggttgcggtagtgagaggcctccgctggttgccaggcttggtctagaggtggagcacagtgaaagaattcaagatgccacctaatataaactggaaagaaataatgaaagttgacccagatgacctgccccgtcaagaagaactggcagataatttattgatttccttatccaaggtggaagtaaatgagctaaaaagtgaaaagcaagaaaatgtgatacaccttttcagaattactcagtcactaatgaagatgaaagctcaagaagtggagctggctttggaagaagtagaaaaagctggagaagaacaagcaaaatttgaaaatcaattaaaaactaaagtaatgaaactggaaaatgaactggagatggctcagcagtctgcaggtggacgagatactcggtttttacgtaatgaaatttgccaacttgaaaaacaattagaacaaaaagatagagaattggaggacatggaaaaggagttggagaaagagaagaaagttaatgagcaattggctcttcgaaatgaggaggcagaaaatgaaaacagcaaattaagaagagagaacaaacgtctaaagaaaaagaatgaacaactttgtcaggatattattgactaccagaaacaaatagattcacagaaagaaacacttttatcaagaagaggggaagacagtgactaccgatcacagttgtctaaaaaaaactatgagcttatccaatatcttgatgaaattcagactttaacagaagctaatgagaaaattgaagttcagaatcaagaaatgagaaaaaatttagaagagtctgtacaggaaatggagaagatgactgatgaatataatagaatgaaagctattgtgcatcagacagataatgtaatagatcagttaaaaaaagaaaacgatcattatcaacttcaagtgcaggagcttacagatcttctgaaatcaaaaaatgaagaagatgatccaattatggtagctgtcaatgcaaaagtagaagaatggaagctaattttgtcttctaaagatgatgaaattattgagtatcagcaaatgttacataacctaagggagaaacttaagaatgctcagcttgatgctgataaaagtaatgttatggctctacagcagggtatacaggaacgagacagtcaaattaagatgctcaccgaacaagtagaacaatatacaaaagaaatggaaaagaatacttgtattattgaagatttgaaaaatgagctccaaagaaacaaaggtgcttcaaccctttctcaacagactcatatgaaaattcagtcaacgttagacattttaaaagagaaaactaaagaggctgagagaacagctgaactggctgaggctgatgctagggaaaaggataaagaattagttgaggctctgaagaggttaaaagattatgaatcgggagtatatggtttagaagatgctgtcgttgaaataaagaattgtaaaaaccaaattaaaataagagatcgagagattgaaatattaacaaaggaaatcaataaacttgaattgaagatcagtgatttccttgatgaaaatgaggcacttagagagcgtgtgggccttgaaccaaagacaatgattgatttaactgaatttagaaatagcaaacacttaaaacagcagcagtacagagctgaaaaccagattcttttgaaagagattgaaagtctagaggaagaacgacttgatctgaaaaaaaaaattcgtcaaatggctcaagaaagaggaaaaagaagtgcaacttcaggattaaccactgaggacctgaacctaactgaaaacatttctcaaggagatagaataagtgaaagaaaattggatttattgagcctcaaaaatatgagtgaagcacaatcaaagaatgaatttctttcaagagaactaattgaaaaagaaagagatttagaaaggagtaggacagtgatagccaaatttcagaataaattaaaagaattagttgaagaaaataagcaacttgaagaaggtatgaaagaaatattgcaagcaattaaggaaatgcagaaagatcctgatgttaaaggaggagaaacatctctaattatccctagccttgaaagactagttaatgctatagaatcaaagaatgcagaaggaatctttgatgcgagtctgcatttgaaagcccaagttgatcagcttaccggaagaaatgaagaattaagacaggagctcagggaatctcggaaagaggctataaattattcacagcagttggcaaaagctaatttaaagatagaccatcttgaaaaagaaactagtcttttacgacaatcagaaggatcaaatgttgtttttaaaggaattgacttacctgatgggatagcaccatctagtgccagtatcattaattctcagaatgaatatttaatacatttgttacaggaactagaaaataaagaaaaaaagttaaagaatttagaagattctcttgaagattacaacagaaaatttgctgtaattcgtcatcaacaaagtttgttgtataaagaatacctaagtgaaaaggagacctggaaaacagaatctaaaacaataaaagaggaaaagagaaaacttgaggatcaagtccaacaagatgctataaaagtaaaagaatataataatttgctcaatgctcttcagatggattcggatgaaatgaaaaaaatacttgcagaaaatagtaggaaaattactgttttgcaagtgaatgaaaaatcacttataaggcaatatacaaccttagtagaattggagcgacaacttagaaaagaaaatgagaagcaaaagaatgaattgttgtcaatggaggctgaagtttgtgaaaaaattgggtgtttgcaaagatttaaggaaatggccattttcaagattgcagctctccaaaaagttgtagataatagtgtttctttgtctgaactagaactggctaataaacagtacaatgaactgactgctaagtacagggacatcttgcaaaaagataatatgcttgttcaaagaacaagtaacttggaacacctggagtgtgaaaacatctccttaaaagaacaagtggagtctataaataaagaactggagattaccaaggaaaaacttcacactattgaacaagcctgggaacaggaaactaaattaggtaatgaatctagcatggataaggcaaagaaatcaataaccaacagtgacattgtttccatttcaaaaaaaataactatgctggaaatgaaggaattaaatgaaaggcagcgggctgaacattgtcaaaaaatgtatgaacacttacggacttcgttaaagcaaatggaggaacgtaattttgaattggaaaccaaatttgctgagcttaccaaaatcaatttggatgcacagaaggtggaacagatgttaagagatgaattagctgatagtgtgagcaaggcagtaagtgatgctgataggcaacggattctagaattagagaagaatgaaatggaactaaaagttgaagtgtcaaaactgagagagatttctgatattgccagaagacaagttgaaattttgaatgcacaacaacaatctagggacaaggaagtagagtccctcagaatgcaactgctagactatcaggcacagtctgatgaaaagtcgctcattgccaagttgcaccaacataatgtctctcttcaactgagtgaggctactgctcttggtaagttggagtcaattacatctaaactgcagaagatggaggcctacaacttgcgcttagagcagaaacttgatgaaaaagaacaggctctctattatgctcgtttggagggaagaaacagagcaaaacatctgcgccaaacaattcagtctctacgacgacagtttagtggagctttacccttggcacaacaggaaaagttctccaaaacaatgattcaactacaaaatgacaaacttaagataatgcaagaaatgaaaaattctcaacaagaacatagaaatatggagaacaaaacattggagatggaattaaaattaaagggcctggaagagttaataagcactttaaaggataccaaaggagcccaaaaggtaatcaactggcatatgaaaatagaagaacttcgtcttcaagaacttaaactaaatcgggaattagtcaaggataaagaagaaataaaatatttgaataacataatttctgaatatgaacgtacaatcagcagtcttgaagaagaaattgtgcaacagaacaagtttcatgaagaaagacaaatggcctgggatcaaagagaagttgacctggaacgccaactagacatttttgaccgtcagcaaaatgaaatactaaatgcggcacaaaagtttgaagaagctacaggatcaatccctgaccctagtttgccccttccaaatcaacttgagatcgctctaaggaaaattaaggagaacattcgaataattctagaaacacgggcaacttgcaaatcactagaagagaaactaaaagagaaagaatctgctttaaggttagcagaacaaaatatactgtcaagagacaaagtaatcaatgaactgaggcttcgattgcctgccactgcagaaagagaaaagctcatagctgagctaggcagaaaagagatggaaccaaaatctcaccacacattgaaaattgctcatcaaaccattgcaaacatgcaagcaaggttaaatcaaaaagaagaagtattaaagaagtatcaacgtcttctagaaaaagccagagaggagcaaagagaaattgtgaagaaacatgaggaagaccttcatattcttcatcacagattagaactacaggctgatagttcactaaataaattcaaacaaacggcttgggatttaatgaaacagtctcccactccagttcctaccaacaagcattttattcgtctggctgagatggaacagacagtagcagaacaagatgactctctttcctcactcttggtcaaactaaagaaagtatcacaagatttggagagacaaagagaaatcactgaattaaaagtaaaagaatttgaaaatatcaaattacagcttcaagaaaaccatgaagatgaagtgaaaaaagtaaaagcggaagtagaggatttaaagtatcttctggaccagtcacaaaaggagtcacagtgtttaaaatctgaacttcaggctcaaaaagaagcaaattcaagagctccaacaactacaatgagaaatctagtagaacggctaaagagccaattagccttgaaggagaaacaacagaaagcacttagtcgggcacttttagaactccgggcagaaatgacagcagctgctgaagaacgtattatttctgcaacttctcaaaaagaggcccatctcaatgttcaacaaatcgttgatcgacatactagagagctaaagacacaagttgaagatttaaatgaaaatcttttaaaattgaaagaagcacttaaaacaagtaaaaacagagaaaactcactaactgataatttgaatgacttaaataatgaactgcaaaagaaacaaaaagcctataataaaatacttagagagaaagaggaaattgatcaagagaatgatgaactgaaaaggcaaattaaaagactaaccagtggattacagggcaaacccctgacagataataaacaaagtctaattgaagaactccaaaggaaagttaaaaaactagagaaccaattagagggaaaggtggaggaagtagacctaaaacctatgaaagaaaagaatgctaaagaagaattaattaggtgggaagaaggtaaaaagtggcaagccaaaatagaaggaattcgaaacaagttaaaagagaaagagggggaagtctttactttaacaaagcagttgaatactttgaaggatctttttgccaaagccgataaagagaaacttactttgcagaggaaactaaaaacaactggcatgactgttgatcaggttttgggaatacgagctttggagtcagaaaaagaattggaagaattaaaaaagagaaatcttgacttagaaaatgatatattgtatatgagggcccaccaagctcttcctcgagattctgttgtagaagatttacatttacaaaatagatacctccaagaaaaacttcatgctttagaaaaacagttttcaaaggatacatattctaagccttcaatttcaggaatagagtcagatgatcattgtcagagagaacaggagcttcagaaggaaaacttgaagttgtcatctgaaaatattgaactgaaatttcagcttgaacaagcaaataaagatttgccaagattaaagaatcaagtcagagatttgaaggaaatgtgtgaatttcttaagaaagaaaaagcagaagttcagcggaaacttggccatgttagagggtctggtagaagtggaaagacaatcccagaactggaaaaaaccattggtttaatgaaaaaagtagttgaaaaagtccagagagaaaatgaacagttgaaaaaagcatcaggaatattgactagtgaaaaaatggctaatattgagcaggaaaatgaaaaattgaaggctgaattagaaaaacttaaagctcatcttgggcatcagttgagcatgcactatgaatccaagaccaaaggcacagaaaaaattattgctgaaaatgaaaggcttcgtaaagaacttaaaaaagaaactgatgctgcagagaaattacggatagcaaagaataatttagagatattaaatgagaagatgacagttcaactagaagagactggtaagagattgcagtttgcagaaagcagaggtccacagcttgaaggtgctgacagtaagagctggaaatccattgtggttacaagaatgtatgaaaccaagttaaaagaattggaaactgatattgccaaaaaaaatcaaagcattactgaccttaaacagcttgtaaaagaagcaacagagagagaacaaaaagttaacaaatacaatgaagaccttgaacaacagattaagattcttaaacatgttcctgaaggtgctgagacagagcaaggccttaaacgggagcttcaagttcttagattagctaatcatcagctggataaagagaaagcagaattaatccatcagatagaagctaacaaggaccaaagtggagctgaaagcaccatacctgatgctgatcaactaaaggaaaaaataaaagatctagagacacagctcaaaatgtcagatctagaaaagcagcatttgaaggaggaaataaagaagctgaaaaaagaactggaaaattttgatccttcattttttgaagaaattgaagatcttaagtataattacaaggaagaagtgaagaagaatattctcttagaagagaaggtaaaaaaactttcagaacaattgggagttgaattaactagccctgttgctgcttctgaagagtttgaagatgaagaagaaagtcctgttaatttccccatttactaaaggtcacctataaactttgtttcatttaactatttattaactttataagttaaatatacttggaaataagcagttctccgaactgtagtatttccttctcactaccttgtacctttatacttagattggaattcttaataaataaaattatatgaaattttcaa

SEQ ID NO: 116526 - DNA, 2122 bp, Homo sapiens
  Payload ID: 2732
  Gene Symbol: CEP290
  Gene Name: centrosomal protein 290kDa
  ENST ID: ENST00000547926
  CDS Start-End: 1-1842
gtggaagtaaatgagctaaaaagtgaaaagcaagaaaatgtgatacaccttttcagaattactcagtcactaatgaagatgaaagctcaagaagtggagctggctttggaagaagtagaaaaagctggagaagaacaagcaaaatttgaaaatcaattaaaaactaaagtaatgaaactggaaaatgaactggagatggctcagcagtctgcaggtggacgagatactcggtttttacgtaatgaaatttgccaacttgaaaaacaattagaacaaaaagatagagaattggaggacatggaaaaggagttggagaaagagaagaaagttaatgagcaattggctcttcgaaatgaggaggcagaaaatgaaaacagcaaattaagaagagagaacaaacgtctaaagaaaaagaatgaacaactttgtcaggatattattgactaccagaaacaaatagattcacagaaagaaacacttttatcaagaagaggggaagacagtgactaccgatcacagttgtctaaaaaaaactatgagcttatccaatatcttgatgaaattcagactttaacagaagctaatgagaaaattgaagttcagaatcaagaaatgagaaaaaatttagaagagtctgtacaggaaatggagaagatgactgatgaatataatagaatgaaagctattgtgcatcagacagataatgtaatagatcagttaaaaaaagaaaacgatcattatcaacttcaagtgcaggagcttacagatcttctgaaatcaaaaaatgaagaagatgatccaattatggtagctgtcaatgcaaaagtagaagaatggaagctaattttgtcttctaaagatgatgaaattattgagtatcagcaaatgttacataacctaagggagaaacttaagaatgctcagcttgatgctgataaaagtaatgttatggctctacagcagggtatacaggaacgagacagtcaaattaagatgctcaccgaacaagtagaacaatatacaaaagaaatggaaaagaatacttgtattattgaagatttgaaaaatgagctccaaagaaacaaaggtgcttcaaccctttctcaacagactcatatgaaaattcagtcaacgttagacattttaaaagagaaaactaaagaggctgagagaacagctgaactggctgaggctgatgctagggaaaaggataaagaattagttgaggctctgaagaggttaaaagattatgaatcgggagtatatggtttagaagatgctgtcgttgaaataaagaattgtaaaaaccaaattaaaataagagatcgagagattgaaatattaacaaaggaaatcaataaacttgaattgaagatcagtgatttccttgatgaaaatgaggcacttagagagcgtgtgggccttgaaccaaagacaatgattgatttaactgaatttagaaatagcaaacacttaaaacagcagcagtacagagctgaaaaccagattcttttgaaagagattgaaagtctagaggaagaacgacttgatctgaaaaaaaaaattcgtcaaatggctcaagaaagaggaaaaagaagtgcaacttcaggattaaccactgaggacctgaacctaactgaaaacatttctcaaggagatagaataagtgaaagaaaattggatttattgagcctcaaaaatatgagtgaagcacaatcaaagaatgaatttctttcaagagaactaattgaaaaagaaagagatttagaaaggagtaggacagtgatagccaaatttcagaataaatgctatagaatcaaagaatgcagaaggaatctttgatgcgagtctgcatttgaaagcccaagttgatcagcttaccggaagaaatgaagaattaagacaggagctcagggaatctcggaaagaggctataaattattcacagcagttggcaaaagctaatttaaagatagaccatcttgaaaaagaaactagtcttttacgacaatcagaaggatcaaatgttgtttttaaaggaattgacttacctgatgggatagcaccatctagtgccagtatcattaattctcagaatgaatatttaatacatttgttacag

SEQ ID NO: 116527 - DNA, 2741 bp, Homo sapiens
  Payload ID: 2732
  Gene Symbol: CEP290
  Gene Name: centrosomal protein 290kDa
  ENST ID: ENST00000604024
  CDS Start-End: 1-2574
gatcattatcaacttcaagtgcaggagcttacagatcttctgaaatcaaaaaatgaagaagatgatccaattatggtagctgtcaatgcaaaagtagaagaatggaagctaattttgtcttctaaagatgatgaaattattgagtatcagcaaatgttacataacctaagggagaaacttaagaatgctcagcttgatgctgataaaagtaatgttatggctctacagcagggtatacaggaacgagacagtcaaattaagatgctcaccgaacaagtagaacaatatacaaaagaaatggaaaagaatacttgtattattgaagatttgaaaaatgagctccaaagaaacaaaggtgcttcaaccctttctcaacagactcatatgaaaattcagtcaacgttagacattttaaaagagaaaactaaagaggctgagagaacagctgaactggctgaggctgatgctagggaaaaggataaagaattagttgaggctctgaagaggttaaaagattatgaatcgggagtatatggtttagaagatgctgtcgttgaaataaagaattgtaaaaaccaaattaaaataagagatcgagagattgaaatattaacaaaggaaatcaataaacttgaattgaagatcagtgatttccttgatgaaaatgaggcacttagagagcgtgtgggccttgaaccaaagacaatgattgatttaactgaatttagaaatagcaaacacttaaaacagcagcagtacagagctgaaaaccagattcttttgaaagagattgaaagtctagaggaagaacgacttgatctgaaaaaaaaaattcgtcaaatggctcaagaaagaggaaaaagaagtgcaacttcaggattaaccactgaggacctgaacctaactgaaaacatttctcaaggagatagaataagtgaaagaaaattggatttattgagcctcaaaaatatgagtgaagcacaatcaaagaatgaaatcatagcacaggaattcttgatcaaagaagcagagtgtagaaatgcagatatagagcttgaacatcacagaagccaggcagaacagaatgaatttctttcaagagaactaattgaaaaagaaagagatttagaaaggagtaggacagtgatagccaaatttcagaataaattaaaagaattagttgaagaaaataagcaacttgaagaaggtatgaaagaaatattgcaagcaattaaggaaatgcagaaagatcctgatgttaaaggaggagaaacatctctaattatccctagccttgaaagactagttaatgctatagaatcaaagaatgcagaaggaatctttgatgcgagtctgcatttgaaagcccaagttgatcagcttaccggaagaaatgaagaattaagacaggagctcagggaatctcggaaagaggctataaattattcacagcagttggcaaaagctaatttaaagatagaccatcttgaaaaagaaactagtcttttacgacaatcagaaggatcaaatgttgtttttaaaggaattgacttacctgatgggatagcaccatctagtgccagtatcattaattctcagaatgaatatttaatacatttgttacaggaactagaaaataaagaaaaaaagttaaagaatttagaagattctcttgaagattacaacagaaaatttgctgtaattcgtcatcaacaaagtttgttgtataaagaatacctaagtgaaaaggagacctggaaaacagaatctaaaacaataaaagaggaaaagagaaaacttgaggatcaagtccaacaagatgctataaaagtaaaagaatataataatttgctcaatgctcttcagatggattcggatgaaatgaaaaaaatacttgcagaaaatagtaggaaaattactgttttgcaagtgaatgaaaaatcacttataaggcaatatacaaccttagtagaattggagcgacaacttagaaaagaaaatgagaagcaaaagaatgaattgttgtcaatggaggctgaagtttgtgaaaaaattgggtgtttgcaaagatttaaggaaatggccattttcaagattgcagctctccaaaaagttgtagataatagtgtttctttgtctgaactagaactggctaataaacagtacaatgaactgactgctaagtacagggacatcttgcaaaaagataatatgcttgttcaaagaacaagtaacttggaacacctggagtgtgaaaacatctccttaaaagaacaagtggagtctataaataaagaactggagattaccaaggaaaaacttcacactattgaacaagcctgggaacaggaaactaaattaggtaatgaatctagcatggataaggcaaagaaatcaataaccaacagtgacattgtttccatttcaaaaaaaataactatgctggaaatgaaggaattaaatgaaaggcagcgggctgaacattgtcaaaaaatgtatgaacacttacggacttcgttaaagcaaatggaggaacgtaattttgaattggaaaccaaatttgctgaggtttgatattataagttttatcatacaattatagaataaagaattagttttggtagacattgtattattgttaagtggtttgtctggatctctgaaatatcttattaatatagtgcctatgttttgtgtaataaataaataaaagatttaaatctgaattgtttaaaaggaaa

SEQ ID NO: 116528 - DNA, 8057 bp, Homo sapiens
  Payload ID: 2733
  Gene Symbol: CEP295
  Gene Name: centrosomal protein 295kDa
  Uniprot ID: Q9C0D2
  ENST ID: ENST00000325212
  CDS Start-End: 163-7968
atgacggaagtgacggcggctcggcgatggctctcccgcaggcgcagaaacggctgctgggcagctgatgggcaggagcttaccaggctggcttgctctgagctgcggttactgtgtccaggccccgggttctcagaactgtcatacataaagtacacagaaatgaagagaaaagtcgtgaatactcacaagctgagattgagtcctaatgaggaagccttcattttgaaggaagattatgaaagaaggcgaaaactaagattgctacaggttcgagaacaagaaagagatatcgccttacagataagagaagacataaaacagaggagaaatcaacaatttacacgtttggcagaggagctaagggcagaatgggaagaatcacaaactcagaaaatacagaacttggaaaaactgtatttggcaagtttaagaagtatgggagagggacatcgacaggccaaagaaaatgaacctgatttggatgctttggcacagcgggcagcagaaaggaaaagaaaagcagatttgaggcataaagaagccttgaaagtacagaaaaatcaaaaagaaatattactgaaacaaaaaacctggcatataaaagctcgaaaggaagcactgcttgtggaaaaagagagatcagccaaaattacaagtctgccacctcctcctccaactctttttgagaacatcgaagtaaaaagaatttctgcagtcaaaaccaatagttctacctaccatcatcttcacacttttgtgaatagagagacagacacaaaacggccagatgctcgtttggctgctgaagaggaagctaaacgattggaagaactacaaaaacaggcagcacaagagagaatggaacggtttgaaaaggcacatgtacggggattccaagcaatgaagaagatccatttggctcaaaatcaggagaaactaatgaaagaactcaaacagctacagcaagaggacctggcacgtaggagacagactgtagcacaaatgccaccacaactagttgaacttccatacaaacgcagtgaaatgaaagaagactggcagagagaattggaatttgcctttgaagatatgtacaatgcagacaggaaggtgaaagggaatctgattctgcaccttgaaccagagcccttgcccactgtgactaatcagatccaagatgaagagctggacctttcaatggaacaagaaaatttgggtgcagctgaagaccttccagtgacagaagctgaaatatgttctagtgaaacagatgttcccttggtaatgaagacccaacagattccttcaaaagttctttttaaaaaattattaaataagatccgaagccaaaaatctctctggacaattaaatctatgtctgaggatgaaagtgaaatgattacgactgttagtgaaattgagagtaaagcaccaacggttgagtcaggaacaattgccagcaaagagagaacgttatcctctgggcaggaacaagttgttgaaagtgatacactaacaattgagtctggaccacttgctagtgaagataaaccactttcgtgtggtacaaactctggaaaagaacaagaaataaatgagactctgcctatcacaactgtagctcagagttcagttctacttcatcctcaagaagcagcagccaggattagaatgtcagcaaggcagaaacagataatggaaatagaagagcagaagcaaaagcaattggaattacttgaacaaattgaacagcagaaattaagattagaaactgactgcttcagggctcagctggaagaagaaaaaagaaaaaaaactcaaccgactggggttggcattgctccagcatcatgccctgtaatttctgatgaagatagtcataggcagatgattcgtaactatcaacatcagcttttacaacaaaacaggttacacaggcagtctgttgaaacagccaggaaacaattacttgaatatcaaactatgttaaaaggaaggtgcccatcggtgtcagctccatcattgataactgattctgttatatcagtgccatcatggaaatctgagagaccgactgctatatcagagcattgggatcaaggtcagagactcaagttgagtcctaacaaataccaacccatacaacctatacagacctccaaattagaacaagatcattttcaggtagcgagacaaaatcactttccacaaagacaggtggaaacaacagaaacattacgcgcttcagatattttaaccaatcaagctttagaatcacaagaacatctaaggcaattctctcagactgaaacacaacagagagactataaattggtccccaaagattctgagacactttcaagggctttgtcacatgacaggcagctaatatcacaggatgctagaaaaatatctgaaacatttggggcaacaacttttcaaagtttagaatcccaacaattgttctcagagaatagtgaaaatatatcttaccatttaactgaaccttcttcatttgtaccactggtacctcagcattcttttagttctctgcctgttaaagttgagtcaggaaaaattcaagaacccttttcagccatgagcaaaagtacagtttccacaagccattctataatcagccaaatgcatgataggcctttgctgccgtcagagaatatcacagcccagcaaggtaatatgaaggccctccaagaacagttagacctacagaagaaagttcttcaggcaactcaggaagctcaggaacagttgcttttgtgcaaacagaaagaagtggaacagcaaacgggcctctcggtattccttcccttggtaactccagattcatctgctttattgccttctgccaaagcagatttggggagaatccaggaatcttcaccaaccaagaataatattgcagtttcctcagaccatcatgtgatctcacaacttcaggataagcgtttgagtctttcacagcctatcctatcacagcaaaataattttaaatttctccaagagcagttgaatattcagaaggatagccttcaggctaggcgagaagcccaggaagtattgtatgtacataaacagagtgaattggatagaagagtatgttccgaacaggctgagccctctttcccatttcaggtagctcagcatacatttacttcactaccatctgctgatacaaaatctggaaaaatacaggagcaacattcatctaagagcgagaaaggacttgtttcatgccaatctgacatccccatatctcaggatgggtctttgagtttcctacagcagttcctacctctacatgatagtttgaagttgctccaagaacagttgactaaacagagggatactcttcaggctaggcatgaagctcaggtggaattacttttacatagacaaagagatttgggggacagtaagtctgggctggtgagctcttcatcctcaccagtggttgttcagcattcagttgcttcacaagcttctgctaaagctgagcctaggagaattcaggagctttatttatctgagaaggagaatgtaggtccctcctgtcatttgataatcccaacatttcaggataagtctcttagttttccacagcatagcctggcacagcaagaaaatttgacaatactccaagaacagtcacaaatacaaagggtaatacttggtgctaaagaaggaactcaggaatttgtacacacagaaagtgaattggagaaaagaatttcttctgaacagactggcacctcctcatccctttcccaggtggatgaatctgagagattccaggaatgtatatcaatcaagagtgacagtaccattcccttaagccatcctaagatcccaagatgtcaggaaagacttttgagagtttcacaacatatgctacctctacaagataatttggaggaacaccaagcatggctagacactgagaaagaagcctttcatttcagccagaaaacccaagaaaatacatcttctgaacaaactggttcatcttcattcataccccagttggtacagctttcatttacttcgttagcttcagctgagtctggcacaatcctggaacctctttttacagagagtgaaagtaaaattttttcaagccaccttcagatcccacaattgcaggataggcttttgaggatatcgcaacttatccagcctcaacaagataatttgaaggcacttcaagaacagttagctacacagagagaagccatcattctagctagacaagaagctcgggaagaattacttttacatcagagtgaatgggagggaagaatatctcccgagcaggttgacacctcttccttacccctagtaccacagcattcattcgcctcattacctcttaatgaatctgaaagaaaccaagaaccatgttcaattaacagtgataatatagtatcctcaggtcactcagagataccaacattgcctgatgggctgttgggtttatcacatcttgttttacctcaacaagataatttgattgcacttgaagaacacttgcatgcacagacagatttccttccttctattgagaaaacccagaaagaattggttttgtcaaaaccatgtaaatttgaggaaaaggtatcttctgagcattttatccagtctcaccatggtgatttgcaggcacttcaacagcagttagatacacagaagaaagccattcgatctatacaggaagtccaagaagaattgcttttgcaaagattaagtgaattggagaaaagggtatcatctgaacaagtttgctcctcttcatttgtatcccaggtgcctgttgctgactctgaaagaacccagaagtctttcccaaccaaaagtaatgatactcttccctcaagtcatcgtgagattccaagattacaggatagacttttgagtttatcaaagcctattctgcctcagcaagataatatgacagcacaattggatgcacaaagggaagtgatgtattcttatgagaaaccccaggaagaactgtctttaaacaaacaaagaaagttgaacaaaagtgaatctgctgagcatactatcccctctttgtttctacccaaggaaacagagcattcgtttattccactaccttttgcagaagctaaacctaaaagcacttgtgaattgtattcatcccagaatgaacatgcagcccccccaagtaatcctgtgatcccagggtttcaagatagacttttgagtttttcacagtctgtcttaactcagcaagataacttgggacttcagaaacagttggatctacaaagagaagttctgcattatagccagaaagcccaggaaaaattgcttgtacagagacaaacagcattgcagcagcagatacagaaacatgaagagactttgaaggatttctttaaagacagtcagataagtaagcccacagttgaaaatgatttaaaaacccagaagatggggcagctcagagactggtttcctaatacacaagacctagcaggaaatgatcaagaaaatattaggcatgcagataggaacaactctgatgataatcatttggcttcagaagatactagtgccaagcaaagtggtgagcatctggagaaagatctggggagaagatcctcaaagccacctgtagcaaaagtcaaatgtggtttggacttaaaccagcatgaacttagtgctatacaagaagtagagtcaccagcaattggcagaacttctatactaggtaaaccaggtatttatgaagacagagaccccctgcgagtctcaataagccgagaacaaagtttctttgggagcccactggcccatgatccgtttagttgtcttcaactggttggccaagagaatgtctgtggtgatgactatgatgaagcagttaagctgaaggaatctgttgttgaaaatcatgcagtgttaagttatgctgtggaggaagaacatgcatatttgggtccaactgtgaagccagatgataaggctaaaacactgtcttatgaaccattatcttcagcaactgtttccactgggagccttttaagttatgaaaacacagatttgagccttacagatccagagtcattttcagagcacatggatgatagcaagcaagaatctaccaccagtaaagaagaggaaacaaatattataagttccatagttccttcaacacaagatatttatcagcggcagaactcttcagacgttcataaatctctgttgcctgcagtggatgaaactacatgtggtcacacacactttcagcaaatgatagacaagtacattaatgaagcaaatttgatacctgaaaaaacagatttgcaagaattggaacacatttttcctaatttgcatcatcagctgtttaaacccttagaaccacatccagattttgacttatcatcatcatcctctgggatttctccagacaacagagacttttaccagagatcagattcttcatctgaaagccactgtgctactggattatccaaaagtacagtttatttcacagcactgaggaggaccagcatgcattcttctcttaacacaagtccgaatcaacaacctgacactaacttggctcatgttggagctcacagttttgctacagaaaatattattgggggatctgaacaatgttttgaacagcttcagccagaatattcttcacaggaggagagccagcatgctgatctaccaagtatttttagcattgaagcaagagattcttcccaaggcatgaaaaatcagaactatccctctgaagaacatactgaaatattacaaaacaagaaaaaaattgttcatttccagctttctataggaaacttaagttcagtctacagttcatctgatgaagctaatgtatttgatcagttaaatgtacagcatagcactccatgtggttctaactctagtgagtgctcaacaaaacaccaactagaaagcagaaaggaaagtatgggctttgaagaactatcaaaaagaggggttgttacaatgttacaaagtcaaggactcattgaagataataaaaatgaaacctgtagggttttagacataaatccacaggtagaggaaactgactctcgattatgtgtaagaacagtggagatgggaacttcaattcaggcaccatattccttaactactcaaaatgaaaaatattttgagaattcagctgaaacagacattccaaaaatcaccaaaaaactatctcaactaggagaatcagagctttttgcaagttctggatcattttcattacagagctctataccagtctgggaaacagaaactggccatggtataatggaagaaccagaacttactttaataagcaccactgataccagtattgctgaaatggattttgcaaatttaaccctagaagagaagagcgagaatgaagcaaaatgcttctttcaggtgagtgagtttctgcctcttgtatcagcaacagaagcctcagattatccagctgtatcagaactttccatagaaaaaccaaggacagcatctacagaaacccctcgcaggcttacacctgtaccagggagcttacaagaagcatttataaagaggaaaaaatcatttatggagagatcccaccagaggcagaaagaaataaggaataaaattcatgtctctgaaaattctcaaatcaaaacagttaaagagaaaccatctataagttcatctgtgagtcgtctaaagggcgtgaataaagtcagagcatcttttcctgaagacagaaagactacacaggctctaaggcaccaaaggggtctaaggttatacaatcaactagctgaagtgaaacaacaaaaggaagaaaaaacaaaacaagaagcttatgcccaaaacagagcaagggcaaaagaattccataagaaaacactagagaaacttcgagccaaaaatacatgctgactttctagaaatagtgtaaaggttttttaattgtgtatatgtagcattagacaaaattatttaaagtcaataaattgttattcgaggaa

SEQ ID NO: 116529 - DNA, 1735 bp, Homo sapiens
  Payload ID: 2733
  Gene Symbol: CEP295
  Gene Name: centrosomal protein 295kDa
  ENST ID: ENST00000530425
  CDS Start-End: 1322-1735
attgcaggataggcttttgaggatatcgcaacttatccagcctcaacaagataatttgaaggcacttcaagaacagttagctacacagagagaagccatcattctagctagacaagaagctcgggaagaattacttttacatcagagtgaatgggagggaagaatatctcccgagcaggttgacacctcttccttacccctagtaccacagcattcattcgcctcattacctcttaatgaatctgaaagaaaccaagaaccatgttcaattaacagtgataatatagtatcctcaggtcactcagagataccaacattgcctgatgggctgttgggtttatcacatcttgttttacctcaacaagataatttgattgcacttgaagaacacttgcatgcacagacagatttccttccttctattgagaaaacccagaaagaattggttttgtcaaaaccatgtaaatttgaggaaaaggtatcttctgagcattttatccagtctcaccatggtgatttgcaggcacttcaacagcagttagatacacagaagaaagccattcgatctatacaggaagtccaagaagaattgcttttgcaaagattaagtgaattggagaaaagggtatcatctgaacaagtttgctcctcttcatttgtatcccaggtgcctgttgctgactctgaaagaacccagaagtctttcccaaccaaaagtaatgatactcttccctcaagtcatcgtgagattccaagattacaggatagacttttgagtttatcaaagcctattctgcctcagcaagataatatgacagcacaattggatgcacaaagggaagtgatgtattcttatgagaaaccccaggaagaactgtctttaaacaaacaaagaaagttgaacaaaagtgaatctgctgagcatactatcccctctttgtttctacccaaggaaacagagcattcgtttattccactaccttttgcagaagctaaacctaaaagcacttgtgaattgtattcatcccagaatgaacatgcagcccccccaagtaatcctgtgatcccagggtttcaagatagacttttgagtttttcacagtctgtcttaactcagcaagataacttgggacttcagaaacagttggatctacaaagagaagttctgcattatagccagaaagcccaggaaaaattgcttgtacagagacaaacagcattgcagcagcagatacagaaacatgaagagactttgaaggatttctttaaagacagtcagataagtaagcccacagttgaaaatgatttaaaaacccagaagatggggcagctcagagactggtttcctaatacacaagacctagcaggaaatgatcaagaaaatattaggcatgcagataggaacaactctgatgataatcatttggcttcagaagatactagtgccaagcaaagtggtaaaccaggtatttatgaagacagagaccccctgcgagtctcaataagccgagaacaaagtttctttgggagcccactggcccatgatccgtttagttgtcttcaactggttggccaagagaatgtctgtggtgatgactatgatgaagcagttaagctgaaggaatctgttgttgaaaatcatgcagtgttaagttatgctgtggaggaagaacatgcatatttgggtccaactgtgaagccagatgataagagtcattttcagagcacatggatg

SEQ ID NO: 116530 - DNA, 1298 bp, Homo sapiens
  Payload ID: 2733
  Gene Symbol: CEP295
  Gene Name: centrosomal protein 295kDa
  ENST ID: ENST00000529185
  CDS Start-End: 1062-1298
tgctacaacaccgttttaccacagaatatattgagggcatttagtgagaaaggggatctggaaccaattagactcactgaggcacatttataggagattaattagcaaatcttcctttgccattgcagagttagctattacggctgaggcggtattactgataaataagagcaggagctcagaaatcatacagttctggatttgagtcatagcctgaccatttcctagctgtaaaaccatgggcaagttactttttaatcttttataaaagaggaatattatagattaaatgagatagtgcacataaagcacaatgtctggcccatagtaacactgaatacagtgagcctttttccttttttaagcttatactgaagcagtggttacatatgtcctgttgatcctcattagcctcataaggctgtggaaatggaaattcgtatttgtcaaaagtttgttcatacctgtaatcgtagcactttgggaggctgaggcaggaggattgcttgagcccaggatttcaagaccagcctgggcaacactgagaccccatctctattttaaaaaaaaattttttaaatttaaaaaaattaaatttctctaaaaataaaacttaaaaagttttggtcactgagaggatccatattttggacctttgaaataatcatgataggacttaactttaaagcatctgctgatcatgggggaaaaactgaagtttttgttacactggagttacctgaaaataagcgtttatgaatatgttcttaatactccttttctagtgtttaccttaaaaataaatttatgatttttttccctcaaaaattctaacagttgaccttgactttccagaattggaacacatttttcctaatttgcatcatcagctgtttaaacccttagaaccacatccagattttgacttatcatcatcatcctctgggatttctccagacaacagagacttttaccagagatcagattcttcatctgaaagccactgtgctactggattatccaaaagtacagtttatttcacagcactgaggaggaccagcatgcattcttctcttaacacaagtccgaatcaacaacctgacactaacttggctcatgttggagctcacagttttgctacagaaaatattattgggggatctgaacaatgttttgaacagcttcagccagaatattcttcacaggaggagagccagcatgctgatctaccaagtatttttagcattgaagcaagagattcttcccaaggcatgaaaaatcagaactatccctctgaa

SEQ ID NO: 116531 - DNA, 2294 bp, Homo sapiens
  Payload ID: 2733
  Gene Symbol: CEP295
  Gene Name: centrosomal protein 295kDa
  ENST ID: ENST00000531404
  CDS Start-End: 557-2294
tggcgcatatggtattctaaatattactggaagtaacagggatgctctgtagatccccaacaatacttttgagaagcagttgctgatatatttttccattcagtggaaacctatccgagcaaatttcatggttgcactgatctcttaacaatatgtattaccatgcttctccactaaaatatgtctgtaaggaagtacccagtacagtatgtctgtaaggaatattccattaaaaggaatatagtgtcgctgtcaattacatttttttttcttttgagatggagtcttgctctgttgccaggctggagtgcaatggtgcaatctcggctctcccgagtagctgggactacaggtgtgcgccaccacgcccagctgatttttgtatttttagtagagatggggtttcaccatgttggcgagatggtctccatctcttgacctcgtgatccacccacctcggcctcccaaagtgctggtattacaggcgtgagccatcacgcctggcctatttacatattttcattaaactcaattttcagagtcattttcagagcacatggatgatagcaagcaagaatctaccaccagtaaagaagaggaaacaaatattataagttccatagttccttcaacacaagatatttatcagcggcagaactcttcagacgttcataaatctctgttgcctgcagtggatgaaactacatgtggtcacacacactttcagcaaatgatagacaagtacattaatgaagcaaatttgatacctgaaaaaacagatttgcaagaattggaacacatttttcctaatttgcatcatcagctgtttaaacccttagaaccacatccagattttgacttatcatcatcatcctctgggatttctccagacaacagagacttttaccagagatcagattcttcatctgaaagccactgtgctactggattatccaaaagtacagtttatttcacagcactgaggaggaccagcatgcattcttctcttaacacaagtccgaatcaacaacctgacactaacttggctcatgttggagctcacagttttgctacagaaaatattattgggggatctgaacaatgttttgaacagcttcagccagaatattcttcacaggaggagagccagcatgctgatctaccaagtatttttagcattgaagcaagagattcttcccaaggcatgaaaaatcagaactatccctctgaagaacatactgaaatattacaaaacaagaaaaaaattgttcatttccagctttctataggaaacttaagttcagtctacagttcatctgatgaagctaatgtatttgatcagttaaatgtacagcatagcactccatgtggttctaactctagtgagtgctcaacaaaacaccaactagaaagcagaaaggaaagtatgggctttgaagaactatcaaaaagaggggttgttacaatgttacaaagtcaaggactcattgaagataataaaaatgaaacctgtagggttttagacataaatccacaggtagaggaaactgactctcgattatgtgtaagaacagtggagatgggaacttcaattcaggcaccatattccttaactactcaaaatgaaaaatattttgagaattcagctgaaacagacattccaaaaatcaccaaaaaactatctcaactaggagaatcagagctttttgcaagttctggatcattttcattacagagctctataccagtctgggaaacagaaactggccatggtataatggaagaaccagaacttactttaataagcaccactgataccagtattgctgaaatggattttgcaaatttaaccctagaagagaagagcgagaatgaagcaaaatgcttctttcaggtgagtgagtttctgcctcttgtatcagcaacagaagcctcagattatccagctgtatcagaactttccatagaaaaaccaaggacagcatctacagcagaaacccctcgcaggcttacacctgtaccagggagcttacaagaagcatttataaagaggaaaaaatcatttatggagagatcccaccagaggcagaaagaaataaggaataaaattcatgtctctgaaaattctcaaatcaaaacagttaaagagaaaccatctataagttcatctgtgagtcgtctaaagggcgtgaataaagtcagagcatcttttcctgaagacagaaagactacacaggctctaaggcaccaaaggggtctaaggttatacaatcaactagctgaagtgaaacaac

SEQ ID NO: 116532 - DNA, 744 bp, Homo sapiens
  Payload ID: 2733
  Gene Symbol: CEP295
  Gene Name: centrosomal protein 295kDa
  ENST ID: ENST00000531877
  CDS Start-End: 1-744
aattgagtctggaccacttgctagtgaagataaaccactttcgtgtggtacaaactctggaaaagaacaagaaataaatgagactctgcctatcacaactgtagctcagagttcagttctacttcatcctcaagaagcagcagccaggattagaatgtcagcaaggcagaaacagataatggaaatagaagagcagaagcaaaagcaattggaattacttgaacaaattgaacagcagaaattaagattagaaactgactgcttcagggctcagctggaagaagaaaaaagaaaaaaaactcaaccgactggggtaggatgcagaaaatctcatcactacataaatcatttggttggcattgctccagcatcatgccctgtaatttctgatgaagatagtcataggcagatgattcgtaactatcaacatcagcttttacaacaaaacaggttacacaggcagtctgttgaaacagccaggaaacaattacttgaatatcaaactatgttaaaaggaaggtgcccatcggtgtcagctccatcattgataactgattctgttatatcagtgccatcatggaaatctgagagaccgactgctatatcagagcattgggatcaaggtcagagactcaagttgagtcctaacaaataccaacccatacaacctatacagacctccaaattagaacaagatcattttcaggtagcgagacaaaatcactttccacaaagacaggtgga

SEQ ID NO: 116533 - DNA, 2890 bp, Homo sapiens
  Payload ID: 2733
  Gene Symbol: CEP295
  Gene Name: centrosomal protein 295kDa
  Uniprot ID: Q9C0D2
  ENST ID: ENST00000531700
  CDS Start-End: 458-2803
ttggaattacttgaacaaattgaacagcagaaattaagattagaaactgactgcttcagggctcagctggaagaagaaaaaagaaaaaaaactcaaccgactggggtaggatgcagaaaatctcatcactacataaatcatttggttggcattgctccagcatcatgccctgtaatttctgatgaagatagtcataggcagatgattcgtaactatcaacatcagcttttacaacaaaacaggttacacaggcagtctgttgaaacagccaggaaacaattacttgaatatcaaactatgttaaaaggaaggtgcccatcggtgtcagctccatcattgataactgattctgttatatcagtgccatcatggaaatctgagagaccgactgctatatcagagcattgggatcaagataagtaagcccacagttgaaaatgatttaaaaacccagaagatggggcagctcagagactggtttcctaatacacaagacctagcaggaaatgatcaagaaaatattaggcatgcagataggaacaactctgatgataatcatttggcttcagaagatactagtgccaagcaaagtggtaaaccaggtatttatgaagacagagaccccctgcgagtctcaataagccgagaacaaagtttctttgggagcccactggcccatgatccgtttagttgtcttcaactggttggccaagagaatgtctgtggtgatgactatgatgaagcagttaagctgaaggaatctgttgttgaaaatcatgcagtgttaagttatgctgtggaggaagaacatgcatatttgggtccaactgtgaagccagatgataaggctaaaacactgtcttatgaaccattatcttcagcaactgtttccactgggagccttttaagttatgaaaacacagatttgagccttacagatccagagtcattttcagagcacatggatgatagcaagcaagaatctaccaccagtaaagaagaggaaacaaatattataagttccatagttccttcaacacaagatatttatcagcggcagaactcttcagacgttcataaatctctgttgcctgcagtggatgaaactacatgtggtcacacacactttcagcaaatgatagacaagtacattaatgaagcaaatttgatacctgaaaaaacagatttgcaagaattggaacacatttttcctaatttgcatcatcagctgtttaaacccttagaaccacatccagattttgacttatcatcatcatcctctgggatttctccagacaacagagacttttaccagagatcagattcttcatctgaaagccactgtgctactggattatccaaaagtacagtttatttcacagcactgaggaggaccagcatgcattcttctcttaacacaagtccgaatcaacaacctgacactaacttggctcatgttggagctcacagttttgctacagaaaatattattgggggatctgaacaatgttttgaacagcttcagccagaatattcttcacaggaggagagccagcatgctgatctaccaagtatttttagcattgaagcaagagattcttcccaaggcatgaaaaatcagaactatccctctgaagaacatactgaaatattacaaaacaagaaaaaaattgttcatttccagctttctataggaaacttaagttcagtctacagttcatctgatgaagctaatgtatttgatcagttaaatgtacagcatagcactccatgtggttctaactctagtgagtgctcaacaaaacaccaactagaaagcagaaaggaaagtatgggctttgaagaactatcaaaaagaggggttgttacaatgttacaaagtcaaggactcattgaagataataaaaatgaaacctgtagggttttagacataaatccacaggtagaggaaactgactctcgattatgtgtaagaacagtggagatgggaacttcaattcaggcaccatattccttaactactcaaaatgaaaaatattttgagaattcagctgaaacagacattccaaaaatcaccaaaaaactatctcaactaggagaatcagagctttttgcaagttctggatcattttcattacagagctctataccagtctgggaaacagaaactggccatggtataatggaagaaccagaacttactttaataagcaccactgataccagtattgctgaaatggattttgcaaatttaaccctagaagagaagagcgagaatgaagcaaaatgcttctttcaggtgagtgagtttctgcctcttgtatcagcaacagaagcctcagattatccagctgtatcagaactttccatagaaaaaccaaggacagcatctacagaaacccctcgcaggcttacacctgtaccagggagcttacaagaagcatttataaagaggaaaaaatcatttatggagagatcccaccagaggcagaaagaaataaggaataaaattcatgtctctgaaaattctcaaatcaaaacagttaaagagaaaccatctataagttcatctgtgagtcgtctaaagggcgtgaataaagtcagagcatcttttcctgaagacagaaagactacacaggctctaaggcaccaaaggggtctaaggttatacaatcaactagctgaagtgaaacaacaaaaggaagaaaaaacaaaacaagaagcttatgcccaaaacagagcaagggcaaaagaattccataagaaaacactagagaaacttcgagccaaaaatacatgctgactttctagaaatagtgtaaaggttttttaattgtgtatatgtagcattagacaaaattatttaaagtcaataaattgttattcgagg

SEQ ID NO: 116534 - DNA, 392 bp, Homo sapiens
  Payload ID: 2734
  Gene Symbol: CEP350
  Gene Name: centrosomal protein 350kDa
  ENST ID: ENST00000357434
  CDS Start-End: 1-392
atgaggagcagcaaatcaaaagaggtgcctttaccaaatccaaggaactctcaaagcaaggatactgttcaagatataaccacatcgtgggatgcactttctcaaaccaaggctgctctgagacacattgaaaataaattagaagtagcccctacaagtacagctgtgtgtgattctgtcatggataccaagaagtcttctacaagtgctactcgaaaaataagtagaaaagatggtagatacctggatgattcttgggttaatgctccaatctccaaatccactaaatcacgaaaagagaaatctcgtagtcctctcagggccaccaccctggagagtaatgtgaagaaaaataatcgtgtggaatttcgtgaacctttggtttcttatag

SEQ ID NO: 116535 - DNA, 13491 bp, Homo sapiens
  Payload ID: 2734
  Gene Symbol: CEP350
  Gene Name: centrosomal protein 350kDa
  Uniprot ID: Q5VT06
  ENST ID: ENST00000367607
  CDS Start-End: 419-9772
gcccgactgctcccgccctgcctcgcgccgccgccacagccgctgccgctggcgccgctcctcctccgtgtcagttgttgggctgtaatggcgactgggccgcccctgacgaagtgactcccgggccggggagcggggccagacctgcgccagagagaactgcagggagccgcagctcggggggtggcttgccctgagggaggggaggcagcctttccgccttgtcttccttcccagcggaccggcggatccccggagccggtgcgaggagggcacccggtgcgtccccggagcggggaggccaggccgggcagccctggggccggtcggggcggcgtcactgcaccctccgccaggctccgcgggatgcaccgtggtagccgagggcggaggcgacactctcaggtaaattggcaggatgaggagcagcaaatcaaaagaggtgcctttaccaaatccaaggaactctcaaagcaaggatactgttcaagcagatataaccacatcgtgggatgcactttctcaaaccaaggctgctctgagacacattgaaaataaattagaagtagcccctacaagtacagctgtgtgtgattctgtcatggataccaagaagtcttctacaagtgctactcgaaaaataagtagaaaagatggtagatacctggatgattcttgggttaatgctccaatctccaaatccactaaatcacgaaaagagaaatctcgtagtcctctcagggccaccaccctggagagtaatgtgaagaaaaataatcgtgtggaatttcgtgaacctttggtttcttatagggaaatccatggtgcaccttccaatttcagttccagccatctggaatcaaagcacgtatactgtgtagatgttaatgaagaaaagactgagagcggtaactggatgataggcagtcgagaagaacggaatatacggagctgtgattttgagagctcccaatcatctgtcatcaatgatacagttgttaggtttttaaatgatcgaccagcaattgatgcattgcaaaattctgaatgtttgattaggatgggagcttctatgagaactgaggaagaaatgcctaacagaacaaaaggaagtgagaataatttgaagctttctgtgaataacatggcccatgatactgatccaaaagcgttacgactaactgactcttctccatcctctactagtacttctaattcccaaagattagatattctaaagcggcgacaacatgatgtcaaactggaaaaacttaaggaacggattagaaaacagtgggaacactcagaagaaacaaatggccggggccagaagctgggtcatattgaccatccagtaatggttgttaatgttgataactcagtaacagcaaaagtcagaaaagtggcaacagcaccacctgctccagcatataaaggtttcaacccttcagagaccaagattcgaacacctgatgggaaagtgtggcaggaggctgagtttcaaaacatgagtagagaactgtatcgagatttagcacttcactttgcagatgatatttctataaaggagaaacctgctgaaaaaagtaaagagaagaaagtagtcaagccagtacgaaaagtccaaaaagtagcacagttatcaagtacagaatgcagaacaggtagtagtcatcttataagtacatcttcttggcgagatggacaaaaattagtaaagaagattctgggacctgctcccagaatggagccaaaagagcaaagaacagcatcaagtgacagaggtggaagagaaagaactgctaaatctgggggtcacattggaagagcagaatctgatcccaggttggacgttttacatagacatcttcaaagaaactcagaacgttcgagaagtaaatctcggtctgaaaataatataaagaaactagcttcatctcttccagataataagcaggaggaaaatactgccttaaataaggactttttacctattgaaattcgtggcattcttgatgacctacagctggattctacagctcacactgcaaagcaagatactgtagagttacagaaccagaagtcatcagcaccagtacatgctcctaggagtcacagcccagtaaaaagaaaacctgacaaaataacagctaatgaagatccccctgttatttccaaaaggcgccactatgacacagatgaggtacgacagtacattgttaggcagcaggaggaaaggaagagaaagcaaaatgaagagaagaaggctcaaaaggaggctacagaacagaaaaacaaacgattacaagagctctaccggaagcagaaggaagcctttactaaagtaaaaaatgtccctccttctgagccatcagcaactaggcgactacaggaaacttactccaaattgctactagaaaagaccttgcttgaagagccatctcatcaacatgttacgcaggaaacacaggccaaaccagggtatcagccatctggagaatctgacaaagaaaacaaagtacaggaacgtcccccaagtgcatcttccagtagtgacatgtctctctcagaacctccacagcctcttgcaagaaaagacttgatggaatctacatggatgcagcctgaaagattgagcccacaagttcaccattctcaaccacagccttttgctggaacagctggaagtttactctcccatctcttgagtttagagcatgtaggaattttgcataaggattttgaatctattttaccaaccaggaagaatcataatatggcttcaaggccattaacttttacacctcaaccatatgtgacctcaccagctgcttatacagatgccttgttaaaacctagtgccagccaatataagagtaaactggatcgtattgaagccttgaaagcaacagctgcttctttgtccagcagaattgaaagtgaagccaagaaattagctggggccagcattaactatgggtcagcatggaacactgagtatgatgtgcagcaggcacctcaagaagatggaccttggaccaaggctgtaactccacctgtgaaagatgataatgaagatgttttctctgccagaattcagaagatgctgggaagctgtgtatctcatgcaacttttgatgatgatcttcctggtgtaggcaatcttagtgaatttaaaaagcttcctgagatgataagaccacagagtgccatatcaagctttagagtgagatcccctggtcccaaaccagaagggctactggcacagttatgtaaaaggcagactgactcttctagctctgatatgcaagcctgttctcaagacaaagccaaaatatctcttggttccagcatagattcagtcagtgaagggcctcttcttagtgaggggagtctctctgaagaagagggagaccaggatggacagccccttttgaaagtagcagaaattttaaaagaaaaggaattttgtcctggagaaagaaatagttatgaacccatcaaagagtttcagaaagaagctgaaaaattcttgccactttttgggcacataggtggtacacaaagcaaaggaccatgggaagaattggcaaagggaagtccacatagcgtcattaatatttttacaaaatcctatcagttatatggaaaagggtttgaagacaagttggacagaggaacatcaacatcacggcctttgaatgccaccgcaactcctctaagtggtgtttcatatgaagatgattttgtctcctctccagggactgggacttcgacagaaaaaaaatcaactcttgaacctcatagcactttaagccctcaggaggaccattctaacagaaagtctgcctatgatccttcctctgtggatgttacctcccagcattcatcaggagcccagtctgctgcatcgtctcgttcatctacttcttctaaaggaaagaaaggaaaaaaggaaaagacagaatggttggattcattcactggaaatgttcagaactcacttcttgatgaggaaaaagcagaacgtggctcccatcaaggaaagaaatctgggaccagcagcaaactttctgttaaagattttgagcagactcttgatacagatagcactttggaggatctttctggacattctgtgagtgtctcatcagataagggaagatctcagaaaactccaacttctcccctgtcaccaagttcccagaaatcattgcagtttgacgttgcaggaacttcttcagaaagatctaagtcgtcagtaatgcctccaactataacaggatttaagcctaatgcacctctcactgatctgaacccggcagccagcagaacaacgacagagaacatggctccaataccaggttctaagcgcttttctcctgctggcctccatcatcgtatggcagcagaactcagttatctgaacgccattgaggagtcggtgcgccaactgtcagatgtagaaagagttagaggcatttcacttgctcagcaggagagtgtgtctctagctcagataataaaggcacaacagcaacgccatgaaagagacttggccctcttgaaactaaaggctgaacaagaggctctggagagtcagagacaattagaagaaacccgaaacaaagcagctcaggtccatgcagaatcattacagcaggtggttcaatcacaacgggaagtaactgaagtcctgcaggaagcaacgtgtaaaatagcagctcagcagtcagaaactgctcgcctcaccacagacgcagcacgtcaaatctgtgagatggcagagttgactagaactcatatctcagatgctgtcgtggcttcaggagctccccttgcaatactgtatgaccaccaacggcagcaccttccagactttgtgaaacagctgaggaccagaactgaaacagataggaaaagtccatctgtttcactctctcagagtaaagaagggacccttgactcaaagcatcagaagtattctgcttcatatgatagttattctgagtcttcaggatacaagaatcatgatagaagaagtagcagtggtagcagccgccaagaaagtccttcagttccatcttgtaaggaaaatgagaagaaacttaatggtgaaaagatagagagttccattgatgaacaggttcagactgctgcagatgattctctacgaagtgatagtgttccatctcttcctgatgaaaaagactcaacgtctattgcaacagaatattctctgaaatttgatgaatccatgacagaagatgaaatagaagaacaatcatttcgatcattactaccttcagagagtcaccgcagatttaacatggaaaagagaagaggtcatcatgatgactctgatgaagaagcttctccagaaaaaactacactgtctactgccaaggaactgaacatgccattctcaggaggacaagatagcttttctaaatttactatggagatggttcgacagtatatgaaagaggaagaaatgagggcagctcaccagtcttcactcctgcgtctccgtgaaaaggccttgaaggagaagactaaggctgaattggcctggttagagcatcaaaaaaaacatctacgagacaaaggagaggatgataaaatgcccccgctccggaagaaacagcgtggtttgcttttaaggttgcagcaagaaaaggcagaaataaaacgtcttcaagaagccaataaggcagctcggaaggaaagacagctgattcttaaacagcaggaggagatagaaaagatccgacagaccaccataaaactacaggagaaattgaagtctgcaggggagagtaaattggactctcatagtgatgatgatacaaaggataataaggcaaccagtcctggtccaactgacttggagacccgcagtccttctcccatttcaatctccagcagtgaaactagcagcattatgcagaaactgaagaaaatgagaagccgcatggatgaaaagtttctgacaaagcgggagcaaaaattaatgcaacggcgacaacatgcagaggagctcctagagtggaagcgacgtttagatgcagaagaagcagaaattcgtcaaatggaaaaacaagctttggctgcctgggacaaagaattaataaaacccaaaactcctaagaaagaactggaggaccagagaacagaacagaaagaaatagcaagtgaagaggaatctccagtacctctgtactctcatctaaacagtgaaagctccattccagaagaattaggcagccctgctgttgaatatgtaccatccgagtctataggacaggagcagccagggagtccagatcacagtatacttactgaagaaatgatttgttcacaggaactagaatcttctacctctcctagtaaacattcacttcccaaaagctgcacatctgtgtcaaagcaggagtctagcaaaggaagtcataggactggaggacaatgtcacctgcctatcaagtcccatcagcactgttatagttggtcagatgagtcattatctatgacacagtcagaaactacatctgaccagagtgatattgaaggtaggatcagagctctgaaggatgagttgcggaaaagaaaatcagttgtgaaccagctgaagaaggaacagaaaaaaaggcaaaaggaaagactgaaagcccaagaagccagtctgatcaagcagttagagtcatatgatgaatttattaagaaaactgaagccgagcttagccaagatttggaaacatcaccaacagccaagcctcagattaaaacgctctcctcagcttctgaaaaacccaagatcaaacccctcacaccactacacagatctgaaacggcaaagaattggaaatcactaacagagtcagaacgttccagaggatccctggagtctattgctgaacatgttgatgcttcactgtctggttctgagagatcagtatcagaaaggtctttatctgcatatgcaaagagagtaaatgaatgggacagtcgaacagaagattttcagaccccatctccagttctcagatcatcaaggaaaatcagagaagaatctggagattctctagaaaatgtacctgcattacatcttctcaaagaattaaatgccactagtagaattcttgatatgtcagatggcaaggttggagaatctagtaaaaaatcagaaataaaagaaatagagtatacaaaattgaagaagagtaagattgaagatgccttttctaaagaaggtaaatctgatgtcttactgaaattagtcctagaacagggagattcatctgaaattctttcaaagaaagatcttcctttagattctgaaaatgttcagaaagacctagttggattagctattgaaaatctccataaaagtgaggaaatgttgaaagagagacagtcagatcaagatatgaatcatagtccaaacatccaatcaggaaaagacattcacgaacaaaagaacacaaaggaaaaagatttgtcttggtcagaacatctttttgctcctaaagagataccatactctgaagattttgaagtgtcttctttcaagaaagaaatttcagctgaattgtacaaagatgattttgaggtgtcatctttgctgtcactcaggaaagactctcagtcttgcagagataagccacagccaatgaggagctctacaagtggagccactagctttggtagtaatgaggaaatcagtgagtgcctaagtgagaaaagcctttctatccatagcaatgttcattctgacaggctgttggaactcaagtcccctactgagctgatgaaaagtaaggagcgcagtgatgtggagcatgaacagcaagttactgaatccccttccttggcttcagttcctactgcagacgagttatttgatttccacattggtgatagggtgttgattggaaatgttcagccaggaattcttcgattcaaaggtgagactagttttgctaaaggattttgggccggagtggagttagataaacctgaaggaaataacaatggaacatatgatggtattgcatattttgagtgcaaagaaaagcatggtatttttgctcctcctcaaaaaatatctcacattccagaaaactttgatgactatgtagacattaatgaagatgaagactgttactcagatgaacgatatcagtgctataatcaagagcaaaatgatacagagggtccaaaagacagagaaaaggatgtcagtgaatatttttatgagaaatccctacctagtgtgaatgatatagaagcctcagttaatagaagtagaagccttaaaatagaaacagacaatgtacaggacatttctggggtacttgaagcccatgttcaccagcagtcttcagtggattcacagatttcttcaaaggaaaacaaagacctcatttctgatgccacagaaaaggtttccatcgctgcagaagatgacactttagacaataccttttccgaagaattggagaagcaacagcagtttacagaagaggaagacaacctatatgctgaagcttcagaaaagctttgtacaccacttctggatcttttaacaagagaaaaaaaccaactggaagcccagctgaagtcatcactaaatgaggaaaaaaagtcaaaacaacaactggaaaaaatcagcttactgacagacagtttactaaaagtctttgtaaaggacacagtcaatcaactacaacaaatcaaaaaaaccagggatgagaaaatccagcttagcaatcaggagcttcttggtgatgaccaaaagaaagtaacaccccaagacctatcccaaaatgttgaggaacagtcgccaagtatttcaggttgcttcttaagttctgaattggaagatgaaaaagaagagatttcctctccagatatgtgtcccagaccggagagcccagtatttggtgccagtgggcaggaagaacttgctaagagacttgctgaacttgaactcagccgggagttcctgagcgcgttaggagatgatcaagactggtttgatgaagactttggtttgagctcttctcacaagatccaaaaaaataaggcagaagaaaccattgtacctctaatggcagaacctaaaagagtaacccaacaaccatgtgaaacattattggcagtcccccatactgcagaagaagtagagattcttgtacataatgcagcagaagaactttggaaatggaaagaattaggccacgatcttcatagcatcagtattcctacaaaactgcttggctgtgccagtaaaggtctagatatagaaagcactagtaaaagggtctacaaacaggcggtttttgatttaacaaaagagatttttgaggaaatatttgctgaggatcccaacttaaatcaacctgtctggatgaagccatgtagaatcaactctagttatttccgacgagtgaaaaatccaaataaccttgatgaaatcaagagcttcatagcaagtgaagtactcaagttgttcagtcttaaaaaggagccaaaccacaaaacagattggcagaaaatgatgaaatttggaagaaagaaaagagaccgagtggatcatatcctggttcaggagctccatgaggaggaggcacagtgggtgaactatgatgaggatgagttgtgtgtgaaaatgcagctagccgacgggatctttgagaccctgatcaaagatactattgatgttctgaatcagatcagtgaaaagcaggggagaatgctacttgtgtgacatcttgcaaataaatcgaacgctgagtgctaatgtgagtcctgggcctttctgcctcctgatgtacacccatcgccatcatagcaagagtgcttctggaccttgtacttattcttaaagactaccagtatggagttcataggacaatgtggtacacctggtattacagcctttgcctttcgagactatccactggattaatgggttattttcagtgggcagggttgcacagtgtaatcctacaccttttgctaacacccctactaggtcccagagggccagaaacacctgacttacctctgagtttagactagggtatcacttctttgagtctgaagtcaagtgagagaggtatagataaatgcatcacatcacttttgaaatgtaattctggtctataccatggaagtcataaatggacattatagtctctaaacagtattaaacccttaaccacttctaaaataggcaagctcaataatgtctgccaacttcacattctggagtttatttcatttctttttgaagaccattttcttccattattgtagttgagcagcaccaagtggactgtcaggctaacaggaataagtggtagccttgctttctgagcaccatctaaagaattttaaacctctgcattatgtttagtgttctctgtgtgggcatgaaaacaaagaaatgcccctactgaagactgggctcaaaggaccaatgcagggctggttcttttaccccttggtttactcctgcacttgtcttactcattctgaatctctaccagctgctcccagaatcacagatactcaggaccatctcaggcatccaggcatggcaaagtggaaataattcattttggcctgcaaaccttcaactcccatctttccccaagaagtcagagatgctgttacttgaatgatttaggaaatgagtgtgtgcaccaaagacaaaaagatattgtctattgtttgtgtgcttgttttgcgctatggaacattttttaatttattttaagataaattattaagttgaaaatgtgtgtccctattcagaagtgaaagattcatcttgtaatagttaaacctccatcttgaagcttctatggttcatagtctttgcacaggaacctgtggttttaacaaaccaatacacatattgaagaagtcattttaattcagtgaaacgaagatgggcttttccagatcacctgcaatagcagcagtgggataaaatgatttaaaaacactgtacaatttaactctgcctctcttgcagcattgcttctcacaactattacctgcatctgaaaaaaaatctatagactccagctgctacattagagcataagagatgctctcctgggacctcagtaccctgccttcttgactggtttccgttcatcagtcctgtccctcttcaagtaatctagaagaatgtggatactcttaggcgtgaatgtaaatgccttaatattgaaggtcctggttagaagcatgatacaagacatctactggattcatatttacaaatatcctggaatgttatagcttcaaagtatattagaaaaaccccaaagatggtataatctttaagtgtgcacgttcgtttatttctgcatcttccctccaaacttgcctttgcatcttaaatatttcactatgcacactcccattcctcttgggtttcatcttgtcgtttaagaaatgtactgaaataatcattggaatatttgcattttgcacaatgactggtatgatagctcttgacaaataaggaaagcactgaaatgttgtgattgggtctcgggaaatgctcagattgatgtcttaccagcatttcttctgggcttgtgatgttgagctgtagtcttgtagccataatgagcaaattgactaagagaagcaaaggtttcttggggttattaaccagtagtgtggaaatactagttttatgtggccaaggaaaagcaaaggcttttcttttcagtttgtgttatttggaagacagaaaaacatcttgtctacatcctttggctgtttgtaggatcacgttgtccttacgatactgaaactttacagctgctgtaaattttttataaatgaatttcaaaatgttataatgggactgtaggttgtttttctacatcttcattatttggacctaaaaccagtttttaataagaaagtttatctttactctttctgaaattatgactccagaaaaagaaaaaaaaaatacaagtcatggaatcagcaatctggtaagaaatgctgccaagaatgtggcagtagctgtcctgacagactccaactgtctttactatctgaagaatcctaggctccacatgagaggcagaaatggatcagtcttattcttttctagaaatggttatctgtagtttggtagcaaaaaaaaagaaaaaagaatccataattagcagatttcttattaactatttggatctaattgaaatggctttattcttaggattaagaaagatagatgtggatacccagccactcgttccatattggtatctttttaaatcagctctgcctcttaatcaagaacctaaatattccctctttctaatctttgttccttctccctacaccctcatcctctttcactcttccttcataattcctctaagaaaaatatctttgcatcagcagtaatatcttttagaatagcactatcagaatttagcagtaaaccaacatacaggcttcagatttacttctgagtccaaaacaatttgtgctatccagggtagttaactctgggttaaacaagtacagggtatagattccctcttcaggtctacacaggaatttttaccatagggaaaagtggggagagctcaaacgtagttaataaggaaggtaatttgtttttcttttacctaaaagaaaagaaaattccttctgtgactacaggtctctgagaaattatctttcaaaagagatttcattgctcataagagtgttgtggcctattgataaaaacaattttgttcagtttcttgtcttgaaaaaaaagtggccttagctttttgcaatacttgaataaagtgtgtactcgcaaaagaatttctgtagcacagcattagagactcataacttttctgcaagaaatacaaacttacatcttccttttactaccttaagaatactagtgaataaaacattaattcaaagagcaaattatagaaactacaatgacatttaatgcaaattgtaggaatttacatgtttacaaatcatcttcaactggttgtgcagcaattcaataaaatatctttgtattataaaaatgtgaagaaaaaatgtaaactgatgtaaaggaggtactgtcattttaattaacctatgtttaatagcttttccttctggactttgcaaagccttcttggcaaacacattgcaaagcattctctgggaggttcagcctccttgtgtgtactgtactgtgcagacatgaaaaaataaacccgtttactgtgtgcgtgtaaatagcctggtcatcaggccattttcagccaatagtcacatccagtgcaattttgcaccgaacacttaagggtgtggtttgtaagtacgatctgtaaaataactgggatgaattcccatgtatacctgtgtaaatagatttgttaactgaaatatactttaagaaagataaaatctgtaaataaactgatttataaattaatttca

SEQ ID NO: 116536 - DNA, 2724 bp, Homo sapiens
  Payload ID: 2734
  Gene Symbol: CEP350
  Gene Name: centrosomal protein 350kDa
  ENST ID: ENST00000417046
  CDS Start-End: 1-1746
aataacaatggaacatatgatggtattgcatattttgagtgcaaagaaaagcatggtatttttgctcctcctcaaaaaatatctcacattccagaaaactttgatgactatgtagacattaatgaagatgaagactgttactcagatgaacgatatcagtgctataatcaagagcaaaatgatacagagggtccaaaagacagagaaaaggatgtcagtgaatatttttatgagaaatccctacctagtgtgaatgatatagaagcctcagttaatagaagtagaagccttaaaatagaaacagacaatgtacaggacatttctggggtacttgaagcccatgttcaccagcagtcttcagtggattcacagatttcttcaaaggaaaacaaagacctcatttctgatgccacagaaaaggtttccatcgctgcagaagatgacactttagacaataccttttccgaagaattggagaagcaacagcagtttacagaagaggaagacaacctatatgctgaagcttcagaaaagctttgtacaccacttctggatcttttaacaagagaaaaaaaccaactggaagcccagctgaagtcatcactaaatgaggaaaaaaagtcaaaacaacaactggaaaaaatcagcttactgacagacagtttactaaaagtctttgtaaaggacacagtcaatcaactacaacaaatcaaaaaaaccagggatgagaaaatccagcttagcaatcaggagcttcttggtgatgaccaaaagaaagtaacaccccaagacctatcccaaaatgttgaggaacagtcgccaagtatttcaggttgcttcttaagttctgaattggaagatgaaaaagaagagatttcctctccagatatgtgtcccagaccggagagcccagtatttggtgccagtgggcaggaagaacttgctaagagacttgctgaacttgaactcagccgggagttcctgagcgcgttaggagatgatcaagactggtttgatgaagactttggtttgagctcttctcacaagatccaaaaaaataaggcagaagaaaccattgtacctctaatggcagaacctaaaagagtaacccaacaaccatgtgaaacattattggcagtcccccatactgcagaagaagtagagattcttgtacataatgcagcagaagaactttggaaatggaaagaattaggccacgatcttcatagcatcagtattcctacaaaactgcttggctgtgccagtaaaggtctagatatagaaagcactagtaaaagggtctacaaacaggcggtttttgatttaacaaaagagatttttgaggaaatatttgctgaggatcccaacttaaatcaacctgtctggatgaagccatgtagaatcaactctagttatttccgacgagtgaaaaatccaaataaccttgatgaaatcaagagcttcatagcaagtgaagtactcaagttgttcagtcttaaaaaggagccaaaccacaaaacagattggcagaaaatgatgaaatttggaagaaagaaaagagaccgagtggatcatatcctggttcaggagctccatgaggaggaggcacagtgggtgaactatgatgaggatgagttgtgtgtgaaaatgcagctagccgacgggatctttgagaccctgatcaaagatactattgatgttctgaatcagatcagtgaaaagcaggggagaatgctacttgtgtgacatcttgcaaataaatcgaacgctgagtgctaatcattgcttctcacaactattacctgcatctgaaaaaaaatctatagactccagctgctacattagagcataagagatgctctcctgggacctcagtaccctgccttcttgactggtttccgttcatcagtcctgtccctcttcaagtaatctagaagaatgtggatactcttaggcgtgaatgtaaatgccttaatattgaaggtcctggttagaagcatgatacaagacatctactggattcatatttacaaatatcctggaatgttatagcttcaaagtatattagaaaaaccccaaagatggtataatctttaagtgtgcacgttcgtttatttctgcatcttccctccaaacttgcctttgcatcttaaatatttcactatgcacactcccattcctcttgggtttcatcttgtcgtttaagaaatgtactgaaataatcattggaatatttgcattttgcacaatgactggtatgatagctcttgacaaataaggaaagcactgaaatgttgtgattgggtctcgggaaatgctcagattgatgtcttaccagcatttcttctgggcttgtgatgttgagctgtagtcttgtagccataatgagcaaattgactaagagaagcaaaggtttcttggggttattaaccagtagtgtggaaatactagttttatgtggccaaggaaaagcaaaggcttttcttttcagtttgtgttatttggaagacagaaaaacatcttgtctacatcctttggctgtttgtaggatcacgttgtccttacgatactgaaactttacagctgctgtaaattttttataaatgaatttcaaaatgttataatgggactgtaggttgtttttctacatcttcattatttggacctaaaaccagtttttaataagaaagtttatctttactctttctgaaattatgactccag

SEQ ID NO: 116537 - DNA, 992 bp, Homo sapiens
  Payload ID: 2734
  Gene Symbol: CEP350
  Gene Name: centrosomal protein 350kDa
  ENST ID: ENST00000418229
  CDS Start-End: 1-992
ggagagtcagagacaattagaagaaacccgaaacaaagcagctcaggtccatgcagaatcattacagcaggtggttcaatcacaacgggaagtaactgaagtcctgcaggaagcaacgtgtaaaatagcagctcagcagtcagaaactgctcgcctcaccacagacgcagcacgtcaaatctgtgagatggcagagttgactagaactcatatctcagatgctgtcgtggcttcaggagctccccttgcaatactgtatgaccaccaacggcagcaccttccagactttgtgaaacagctgaggaccagaactgaaacagataggaaaagtccatctgtttcactctctcagagtaaagaagggacccttgactcaaagcatcagaagtattctgcttcatatgatagttattctgagtcttcaggatacaagaatcatgatagaagaagtagcagtggtagcagccgccaagaaagtccttcagttccatcttgtaaggaaaatgagaagaaacttaatggtgaaaagatagagagttccattgatgaacaggttcagactgctgcagatgattctctacgaagtgatagtgttccatctcttcctgatgaaaaagagacggggtcttgctctgtcacccaggctggtctcgaactcctggcctcaagggatcctcccaccttggcatcccaaaatgctggaattacagactcaacgtctattgcaacagaatattctctgaaatttgatgaatccatgacagaagatgaaatagaagaacaatcatttcgatcattactaccttcagagagtcaccgcagatttaacatggaaaagagaagaggtcatcatgatgactctgatgaagaagcttctccagaaaaaactacactgtctactgccaaggaactgaacatgccattctcaggaggacaagatagcttttctaaatttactatggagatggttcgacagtatatgaaagaggaag

SEQ ID NO: 116538 - DNA, 408 bp, Homo sapiens
  Payload ID: 2734
  Gene Symbol: CEP350
  Gene Name: centrosomal protein 350kDa
  ENST ID: ENST00000437245
  CDS Start-End: 1-333
tcacttcccaaaagctgcacatctgtgtcaaagcaggagtctagcaaaggaagtcataggactggaggacaatgtcacctgcctatcaagtcccatcagcactgttatagttggtcagatgagtcattatctatgacacagtcagaaactacatctgaccagagtgatattgaaggtaggatcagagctctgaaggatgagttgcggaaaagaaaatcagttgtgaaccagctgaagaaggaacagaaaaaaaggcaaaaggaaagactgaaagcccaagaagccagtctgatcaagcagttagaggttagacataggaagaagggggtttagtatcaaggctaatgtgtatgtgacgtctaaaatgtttttaatgttgttaataaagtaatggattaggattcttca

SEQ ID NO: 116539 - DNA, 6096 bp, Homo sapiens
  Payload ID: 2734
  Gene Symbol: CEP350
  Gene Name: centrosomal protein 350kDa
  ENST ID: ENST00000429851
  CDS Start-End: 1-3877
ctttacgtctcatcactgggcctctctcagtgtctgttttcccaaccttcatcccaaattccagctgtatatctacaaccagttggtcaggtttctgacaaagcgggagcaaaaattaatgcaacggcgacaacatgcagaggagctcctagagtggaagcgacgtttagatgcagaagaagcagaaattcgtcaaatggaaaaacaagctttggctgcctgggacaaagaattaataaaacccaaaactcctaagaaagaactggaggaccagagaacagaacagaaagaaatagcaagtgaagaggaatctccagtacctctgtactctcatctaaacagtgaaagctccattccagaagaattaggcagccctgctgttgaatatgtaccatccgagtctataggacaggagcagccagggagtccagatcacagtatacttactgaagaaatgatttgttcacaggaactagaatcttctacctctcctagtaaacattcacttcccaaaagctgcacatctgtgtcaaagcaggagtctagcaaaggaagtcataggactggaggacaatgtcacctgcctatcaagtcccatcagcactgttatagttggtcagatgagtcattatctatgacacagtcagaaactacatctgaccagagtgatattgaaggtaggatcagagctctgaaggatgagttgcggaaaagaaaatcagttgtgaaccagctgaagaaggaacagaaaaaaaggcaaaaggaaagactgaaagcccaagaagccagtctgatcaagcagttagagtcatatgatgaatttattaagaaaactgaagccgagcttagccaagatttggaaacatcaccaacagccaagcctcagattaaaacgctctcctcagcttctgaaaaacccaagatcaaacccctcacaccactacacagatctgaaacggcaaagaattggaaatcactaacagagtcagaacgttccagaggatccctggagtctattgctgaacatgttgatgcttcactgtctggttctgagagatcagtatcagaaaggtctttatctgcatatgcaaagagagtaaatgaatgggacagtcgaacagaagattttcagaccccatctccagttctcagatcatcaaggaaaatcagagaagaatctggagattctctagaaaatgtacctgcattacatcttctcaaagaattaaatgccactagtagaattcttgatatgtcagatggcaaggttggagaatctagtaaaaaatcagaaataaaagaaatagagtatacaaaattgaagaagagtaagattgaagatgccttttctaaagaaggtaaatctgatgtcttactgaaattagtcctagaacagggagattcatctgaaattctttcaaagaaagatcttcctttagattctgaaaatgttcagaaagacctagttggattagctattgaaaatctccataaaagtgaggaaatgttgaaagagagacagtcagatcaagatatgaatcatagtccaaacatccaatcaggaaaagacattcacgaacaaaagaacacaaaggaaaaagatttgtcttggtcagaacatctttttgctcctaaagagataccatactctgaagattttgaagtgtcttctttcaagaaagaaatttcagctgaattgtacaaagatgattttgaggtgtcatctttgctgtcactcaggaaagactctcagtcttgcagagataagccacagccaatgaggagctctacaagtggagccactagctttggtagtaatgaggaaatcagtgagtgcctaagtgagaaaagcctttctatccatagcaatgttcattctgacaggctgttggaactcaagtcccctactgagctgatgaaaagtaaggagcgcagtgatgtggagcatgaacagcaagttactgaatccccttccttggcttcagttcctactgcagacgagttatttgatttccacattggtgatagggtgttgattggaaatgttcagccaggaattcttcgattcaaaggtgagactagttttgctaaaggattttgggccggagtggagttagataaacctgaaggaaataacaatggaacatatgatggtattgcatattttgagtgcaaagaaaagcatggtatttttgctcctcctcaaaaaatatctcacattccagaaaactttgatgactatgtagacattaatgaagatgaagactgttactcagatgaacgatatcagtgctataatcaagagcaaaatgatacagagggtccaaaagacagagaaaaggatgtcagtgaatatttttatgagaaatccctacctagtgtgaatgatatagaagcctcagttaatagaagtagaagccttaaaatagaaacagacaatgtacaggacatttctggggtacttgaagcccatgttcaccagcagtcttcagtggattcacagatttcttcaaaggaaaacaaagacctcatttctgatgccacagaaaaggtttccatcgctgcagaagatgacactttagacaataccttttccgaagaattggagaagcaacagcagtttacagaagaggaagacaacctatatgctgaagcttcagaaaagctttgtacaccacttctggatcttttaacaagagaaaaaaaccaactggaagcccagctgaagtcatcactaaatgaggaaaaaaagtcaaaacaacaactggaaaaaatcagcttactgacagacagtttactaaaagtctttgtaaaggacacagtcaatcaactacaacaaatcaaaaaaaccagggatgagaaaatccagcttagcaatcaggagcttcttggtgatgaccaaaagaaagtaacaccccaagacctatcccaaaatgttgaggaacagtcgccaagtatttcaggttgcttcttaagttctgaattggaagatgaaaaagaagagatttcctctccagatatgtgtcccagaccggagagcccagtatttggtgccagtgggcaggaagaacttgctaagagacttgctgaacttgaactcagccgggagttcctgagcgcgttaggagatgatcaagactggtttgatgaagactttggtttgagctcttctcacaagatccaaaaaaataaggcagaagaaaccattgtacctctaatggcagaacctaaaagagtaacccaacaaccatgtgaaacattattggcagtcccccatactgcagaagaagtagagattcttgtacataatgcagcagaagaactttggaaatggaaagaattaggccacgatcttcatagcatcagtattcctacaaaactgcttggctgtgccagtaaaggtctagatatagaaagcactagtaaaagggtctacaaacaggcggtttttgatttaacaaaagagatttttgaggaaatatttgctgaggatcccaacttaaatcaacctgtctggatgaagccatgtagaatcaactctagttatttccgacgagtgaaaaatccaaataaccttgatgaaatcaagagcttcatagcaagtgaagtactcaagttgttcagtcttaaaaaggagccaaaccacaaaacagattggcagaaaatgatgaaatttggaagaaagaaaagagaccgagtggatcatatcctggttcaggagctccatgaggaggaggcacagtgggtgaactatgatgaggatgagttgtgtgtgaaaatgcagctagccgacgggatctttgagaccctgatcaaagatactattgatgttctgaatcagatcagtgaaaagcaggggagaatgctacttgtgtgacatcttgcaaataaatcgaacgctgagtgctaatgtgagtcctgggcctttctgcctcctgatgtacacccatcgccatcatagcaagagtgcttctggaccttgtacttattcttaaagactaccagtatggagttcataggacaatgtggtacacctggtattacagcctttgcctttcgagactatccactggattaatgggttattttcagtgggcagggttgcacagtgtaatcctacaccttttgctaacacccctactaggtcccagagggccagaaacacctgacttacctctgagtttagactagggtatcacttctttgagtctgaagtcaagtgagagaggtatagataaatgcatcacatcacttttgaaatgtaattctggtctataccatggaagtcataaatggacattatagtctctaaacagtattaaacccttaaccacttctaaaataggcaagctcaataatgtctgccaacttcacattctggagtttatttcatttctttttgaagaccattttcttccattattgtagttgagcagcaccaagtggactgtcaggctaacaggaataagtggtagccttgctttctgagcaccatctaaagaattttaaacctctgcattatgtttagtgttctctgtgtgggcatgaaaacaaagaaatgcccctactgaagactgggctcaaaggaccaatgcagggctggttcttttaccccttggtttactcctgcacttgtcttactcattctgaatctctaccagctgctcccagaatcacagatactcaggaccatctcaggcatccaggcatggcaaagtggaaataattcattttggcctgcaaaccttcaactcccatctttccccaagaagtcagagatgctgttacttgaatgatttaggaaatgagtgtgtgcaccaaagacaaaaagatattgtctattgtttgtgtgcttgttttgcgctatggaacattttttaatttattttaagataaattattaagttgaaaatgtgtgtccctattcagaagtgaaagattcatcttgtaatagttaaacctccatcttgaagcttctatggttcatagtctttgcacaggaacctgtggttttaacaaaccaatacacatattgaagaagtcattttaattcagtgaaacgaagatgggcttttccagatcacctgcaatagcagcagtgggataaaatgatttaaaaacactgtacaatttaactctgcctctcttgcagcattgcttctcacaactattacctgcatctgaaaaaaaatctatagactccagctgctacattagagcataagagatgctctcctgggacctcagtaccctgccttcttgactggtttccgttcatcagtcctgtccctcttcaagtaatctagaagaatgtggatactcttaggcgtgaatgtaaatgccttaatattgaaggtcctggttagaagcatgatacaagacatctactggattcatatttacaaatatcctggaatgttatagcttcaaagtatattagaaaaaccccaaagatggtataatctttaagtgtgcacgttcgtttatttctgcatcttccctccaaacttgcctttgcatcttaaatatttcactatgcacactcccattcctcttgggtttcatcttgtcgtttaagaaatgtactgaaataatcattggaatatttgcattttgcacaatgactggtatgatagctcttgacaaataaggaaagcactgaaatgttgtgattgggtctcgggaaatgctcagattgatgtcttaccagcatttcttctgggcttgtgatgttgagctgtagtcttgtagccataatgagcaaattgactaagagaagcaaaggtttcttggggttattaaccagtagtgtggaaatactagttttatgtggccaaggaaaagcaaaggcttttcttttcagtttgtgttatttggaagacagaaaaacatcttgtctacatcctttggctgtttgtaggatcacgttgtccttacgatactgaaactttacagctgctgtaaattttttataaatgaatttcaaaatgttataatgggactgtaggttgtttttctacatcttcattatttggacctaaaaccagtttttaataagaaagtttatctttactctttctgaaattatgactccag

SEQ ID NO: 116540 - DNA, 434 bp, Homo sapiens
  Payload ID: 2734
  Gene Symbol: CEP350
  Gene Name: centrosomal protein 350kDa
  ENST ID: ENST00000490047
  CDS Start-End: 1-174
gtccatgcagaatcattacagcaggtggttcaatcacaacgggaagtaactgaagtcctgcaggaagcaacgtgtaaaatagcagctcagcagtcagaaactgctcgcctcaccacagacgcagcacgtcaaatctgtgaggaaaagtccatctgtttcactctctcagagtaaagaagggacccttgactcaaagcatcagaagtattctgcttcatatgatagttattctgagtcttcaggatacaagaatcatgatagaagaagtagcagtggtagcagccgccaagaaagtccttcagttccatcttgtaaggaaaatgagaagaaacttaatggtgaaaagatagagagttccattgatgaacaggttcagactgctgcagatgattctctacgaagtgatagtgttccatctcttcctgatgaaaaag

SEQ ID NO: 116541 - DNA, 1059 bp, Homo sapiens
  Payload ID: 2734
  Gene Symbol: CEP350
  Gene Name: centrosomal protein 350kDa
  ENST ID: ENST00000491495
  CDS Start-End: 332-1059
acagccgctgccgctggcgccgctcctcctccgtgtcagttgttgggctgtaatggcgactgggccgcccctgacgaagtgactcccgggccggggagcggggccagacctgcgccagagagaactgcagggagccgcagctcggggggtggcttgccctgagggaggggaggcagcctttccgccttgtcttccttcccagcggaccggcggatccccggagccggtgcgaggagggcacccggtgcgtccccggagcggggaggccaggccgggcagccctggggccggtcggggcggcgtcactgcaccctccgccaggctccgcgggatgcaccgtggtagccgagggcggaggcgacactctcaggatgaggagcagcaaatcaaaagaggtgcctttaccaaatccaaggaactctcaaagcaaggatactgttcaagatataaccacatcgtgggatgcactttctcaaaccaaggctgctatggtagatacctggatgattcttgggttaatgctccaatctccaaatccactaaatcacgaaaagagaaatctcgtagtcctctcagggccaccaccctggagagtaatgtgaagaaaaataatcgtgtggaatttcgtgaacctttggtttcttatagggaaatccatggtgcaccttccaatttcagttccagccatctggaatcaaagcacgtatactgtgtagatgttaatgaagaaaagactgagagcggtaactggatgataggcagtcgagaagaacggaatatacggagctgtgattttgagagctcccaatcatctgtcatcaatgatacagttgttaggtttttaaatgatcgaccagcaattgatgcattgcaaaattctgaatgtttgattaggatgggagcttctatgagaactgaggaagaaatgcctaacagaacaaaaggaagtgagaataatttgaagctttctgtgaataacatggcccatgatactgatccaaaagcgttacgactaactgactcttctccatcctctactagtacttctaattcccaaag

SEQ ID NO: 116542 - DNA, 6513 bp, Homo sapiens
  Payload ID: 2735
  Gene Symbol: CEP41
  Gene Name: centrosomal protein 41kDa
  Uniprot ID: Q9BYV8
  ENST ID: ENST00000223208
  CDS Start-End: 272-1393
aaggctggagccggcgagccccagcccagagaacaaaaggcctcgctagccggcgtcccgcgttgcccttggcaaccattgagcggcgtcttgcccttctgcgaccctgagatgagagagtaaacggggcccccattggccggccggggaagacgggccaatcggagaagagggtatagggaggcggctgaacaaggttgtgggggtaggaagctagggttagaggcaacccgtgaggctagaaccccgaacgtggtcggttggagaaaatatgtccctccggaggcacattgggaaccctgagtatctgatgaaaaggataccacagaacccaagataccagcatatcaaatcaagactggacactggtaacagtatgactaaatatactgagaagctcgaagagattaagaaaaattatagatacaaaaaagatgagcttttcaagagactaaaagttacaacttttgcccagctgatcatccaagttgcttccctctctgatcaaacactggaagtgacagctgaggagattcaaaggctggaagacaatgattctgcagcttcagaccctgatgctgaaaccactgccaggaccaatgggaaaggaaatccaggtgagcagtcgccgagccctgagcagttcataaacaacgcaggagcaggggactccagccgctcaactcttcagagtgtcatcagtggtgttggggaactggatctagacaaagggccagtgaagaaagcagagccccataccaaagacaaaccttatcctgactgccccttcctgctgctagatgtgcgtgatagagattcttaccagcagtgccacattgttggagcttacagttacccaattgcaactctgtctagaacaatgaacccttattcaaatgatattcttgaatataaaaatgcccatggcaagatcatcattctgtatgacgatgatgaaaggctggccagtcaggcggccaccaccatgtgcgagcgtggatttgaaaacctcttcatgctttccggaggtctaaaagtcttagctcagaaattcccggaaggactgattactggttccctgccagcatcttgccagcaggcccttcctcctgggtctgcccggaaacgatccagccccaaagggccacccctaccagctgagaataaatggagatttaccccagaagacttaaaaaagatagaatattatctggaagaggagcaagggcctgcagatcatcctagccgactgaaccaagctaactcctccggaagagagtccaaggtgcctggtgcccgaagcgctcagaatctgccaggtggcggccccgccagccactcaaacccccgctccctcagcagtggtcacctgcaaggcaaaccctggaagtaaagactttgtctcacttaggcaaataaatgttcttcctcttttcagaacccctgagcatttcccaagttgggtcatttccagaaacttctgcagaggaaagaccatgacatatgtatgggataggcctcttccctgtccctgtctccagttcctctcccctcaggaggccacctcaggaaggattttgacaggtgaccataaaaaccagaggtgtgacaggctctagtctcctccctgttgtttacagcatatttaagtcttgtgaaactgtataggaaaaaagtatctacgtttttagtttttttgttttgtttttttttaataaggtccagcttgttgggtctctctgtgttgttttgtaaatacttcagtcacatctgcccgtgtgcctgtccctgccaccttttcattcactgttcttgacttcatgaaggcttctccgggcagtcttggtgtgagaagctgtttccaagggtgcagatgagccttaggttccagccgcctgcagaccccaccccagcaggctcactcagcaaggagctctctgcccagcatattgcaggccctgttttgagtatggaagccagtgcctgtgtactcactgaaattgaagatgaggaaagtagctgtacactcactgaatgctcccccttactagatatttcctggagccagaaaggtatgcatgtgggtgtcttcacaccggggaggagggcctctcatgggaaagccctggccaccacaccggcctgtgccccttgaagcccaccaaagcggccctcacttgtggtcagtatatcagttatgacgcccattgcccagcttcagtccatccatgttagatggacagaaattatggccagttgaaaataccagctttggttggacaactgtggacacacaaggtgaagaggactccgaagtcctttgtcagggctgacaacctcgtaagcccttgcttagaaatacagtattagtctaattgagtaattagtgcaatttcctgcttacttttcattctcatgactgaactgtgattaggaagttgtgattatagattctggttttggccggaattttgaatcagcattaattgaattgctaaatgactgacattcattccatttaattgggggaacaaaaggcctcaggtaaggatgaggaactctgaaatcagatggaaaagagcggtgttaatttttatggtctgtgatcgtagctgtgataagggactgaggaataaattgtgctctttgtcatggcaaccagcttctgaaaagcccactgaaaattgcctgtcctgctggtaactgctacggggtaagatttgccttaacagtactattttctcgccaccaaaaaaaaaaaaaaaaaaaaaaaaaaatgcaccacagtatttctagcatgggggctgtgtttgtatgagaaataaacgtaataaatatctcatagagacatatggaaaaataactttcagattcagcccagttctgttttagagtgtgtttattcttctctacttgatttccaaagtgcaacattttccgatgctttagaaatcaaacaaaccagggacattgttcagatgtcaagccatgcccaattttccacaagattcaagaatcttgtataaaattcagccaacgtacacatagctttaatgaggagcctgtcatgtttccccataaatttattgcctgagaacttagttcagcctttgctaatgccaaaatgctctggctttgtattttctttacagcatagatagaaaaatgcacatttttccacactcagctttcccctagcatggacaagattttcagccatttttgccacatatacatttttaaggaaaaaagatttttctctgtaagaaagttctggttatgctgttttaaaggtgacttgtcaggagttgagacttccctgccggattctattttgaaagtaaatggtcttccctccttgttccgattctgcgttcccatcgtcagacaactttggagtattagaaaccactgtatatatgtggaaagccaggtcagccagacctgttagaattggtgtgcactcacctgagagatctggcaggttggatatatttatgtgtatttctccacagtgcttgctttgccctgttggtaaggattttaaataaccatgctcaaaagagctgttctaatctgcgttttgcatgttaagtgttaatatcaaacattctttacgtgctcgaggtattgcttttaacattctactttgccagtttcttcattagattaattgacatgtattatttaaatgaccagtgatgctttgtgcaattatgaatgttgaagattaaagtacatagttactaatttgtcgtttgctattaatatgctgaaaactgccaacttctctcttcttttctgtcgagatgatttgggggagccacaggagactggtgtgatttttgctgcatctcctaggaaagcattttttaaaaaaaataaatgaatcaggaaatcagtccaattagggcagggggcctcagctctccagtcagaaagcctggatttcttttcctgctcaggctgggactgaagccaccttcaacaactggatcatggcttcctaccagcgtctcaggggttgactagctgcccttgtctggggcttgtgaaccctgagacagaaggtgcttcatcgatgtacaactacagcaccctgaacagcagtgatggccaaagtttaaataataccttaaatgctttaaaggggtttgtgtttaaggaagggagaaaagaaaaaaagaaaggaagggagaaagaagcaaggaaatgggaagaagggagggcagagagaagaaaagaagcagaaagcgagagagaaaggagaaagctacattacttatttgaaaacaaaaggaacaccctgggctgtaataatgtcaggctcaatctcttgaaaaagtatggaatgatttaaatggcctgcattcattttatcttttatctttttttttttttttaacctttagtggttagccaggaccagcacgatcatattgggcttggtataaatccgaatgaaaagagaccaaataacattcattagttgctcagggatttttcctgtggtgctatttaaattatacaaaaattcttaagactttaggctactcgaccaagaaaacagaacaaaacaaaaaatcgtgttttctctaattcccttgtggaatgtaagtgaaatcagagtcctaggctaggaagaaatacgtaggtaatttttcttgtgttggttttggtttctgtcatgttgtttattggctatagattctgtcttttatgttatctgacttttttagagcgaataattagtttctgtccacctggatttaaatccatgaccaccttcttgctctactctgaagataatcagtaagaacctttctttctccagttctaaaacgttctcagtgtctttaatgtgtgtttattttcttcccaattctttcaaagatttaactcccacgatacttttttttccccaggaaacaccgcaaatgtgtggaatataattcaccagtttaattatgtgagcatgttgagtacttacatgcaggtccattaatttttcactaacaattattttttcatgcaaaagcaataaataacattgtgcttccaaaatgttcagaatacatttgggtagtaatactttcctagatttacaataattattgaaattattattatgacatctttaaatggatacacaggtcagttacaacataaaaaatgtaatggtggaaatttgtcagccttgaattcaggcagaacaggattcggtgcatgattttatgtgttttcgaaacggtgtctgtcacattgtgatcccctgatggctcccctctctgttgctgatcctctttgttctgtacagaagcaaattctcacctgtgtaacatcctgaagcacctggtaaaatgtgaggcaaagagaggccacttctcaaatgctgtggacggatgggctgcatcttttaaaggatatcaatatgtcttcctgttgcaattattttgactataagctcccagagagtgaaaatcaccaaccctgtgacagtggcccttaataagtgttcatgaataaatgaattgaacctgtcaagattgaagtttggatgtgatgcccactgtggtggccactcagtgctagtctgtcattctggagacccagaaagctcgttatcttctgtcccccttgtgtatcctgcctttgtgggcgaggcattcaaaaccctgaggtttttagatctccctctacaggaagtacccagagagctgctgggggtgttattaccctgtctctgccaggcttaaagtatcctcccaaattcagcacgcaaaggtcacacaccacccccatcttaagagtaggttttctcttttgtttcaaatcttgaagatttccagaaaataataatactagccaatgtttgtggagagcttactttgctcctagattcttcattatatgttttgacccatttaatttccacaacagtctgatgaggcaggcacccccattttcagatgaggagactgaggttcgggtagaaattaagtgactcaggtttgccttcagtctctgaccaagggtttgaaaagccaggagccagcctgagaactgtggctccagagggtgttctttcagccactccgctctatgcttctcactctgggtgggcacaaccatgttctcctttggtgatgcctctaacttaccgtgaaaatgtacctttcccttcgctattggcttcccttccctcctagtcagccgagattcttttgaaaactttcctccgcttgcctgcacaaaaggcgatggaaattcaggaactgaaacatctgctctggggaatgcgtatttccacatttccaccgcctgtgtctgctgtcttatcttgaagacaggtgctccagggcttccgaggttattttgtctgttaatggacaccttgcaaagtaccacttaaggaatgagaattacaaacttttaattatattgtagggggaaaaaagtaggctgttttcctgataggtctagccattcattcagtaaaccatattgatatga

SEQ ID NO: 116543 - DNA, 1087 bp, Homo sapiens
  Payload ID: 2735
  Gene Symbol: CEP41
  Gene Name: centrosomal protein 41kDa
  Uniprot ID: Q9BYV8
  ENST ID: ENST00000343969
  CDS Start-End: 30-935
aaccccgaacgtggtcggttggagaaaatatgtccctccggaggcacattgggaaccctgagtatctgatgaaaaggataccacagaacccaagataccagcatatcaaatcaagactggacactggtaacagtatgactaaatatactgagaagctcgaagagattaagaaaaattatagatacaaaaaagatgagcttttcaagagactaaaagttacaacttttgcccagctgatcatccaagttgcttccctctctgatcaaacactggaagtgacagctgaggagattcaaaggctggaagacaatgattctgcagcttcagaccctgatgctgaaaccactgccaggaccaatgggaaaggaaatccaggtgagcagtcgccgagccctgagcagttcataaacaacgcaggagcaggggactccagccgctcaactcttcagagtgtcatcagtggtgttggggaactggatctagacaaagggccagtgaagaaagcagagccccataccaaagacaaaccttatcctgactgccccttcctgctgctagatgtgcgtgatagagattcttaccagcagtgccacattgttggagcttacagttacccaattgcaactctgtctagaacaatgaacccttattcaaatgatattcttgaatataaaaatgcccatggcaagatcatcattctgtatgacgatgatgaaaggctggccagtcaggcggccaccaccatgtgcgagcgtggatttgaaaacctcttcatgctttccggaggccgactgaaccaagctaactcctccggaagagagtccaaggtgcctggtgcccgaagcgctcagaatctgccaggtggcggccccgccagccactcaaacccccgctccctcagcagtggtcacctgcaaggcaaaccctggaagtaaagactttgtctcacttaggcaaataaatgttcttcctcttttcagaacccctgagcatttcccaagttgggtcatttccagaaacttctgcagaggaaagaccatgacatatgtatgggataggcctcttccctgtccctgtctccagttcc

SEQ ID NO: 116544 - DNA, 592 bp, Homo sapiens
  Payload ID: 2735
  Gene Symbol: CEP41
  Gene Name: centrosomal protein 41kDa
  ENST ID: ENST00000471201
  CDS Start-End: 92-301
gaggcggctgaacaaggttgtgggggtaggaagctagggttagaggcaacccgtgaggctagaaccccgaacgtggtcggttggagaaaatatgtccctccggaggcacattgggaaccctgagtatctgatgaaaaggataccacagaacccaagataccagcatatcaaatcaagactggacactggccgtactgttcctgtatttcccccaagccttgtttcttctgccacaaaaaccctcagctctttcatctctacccatctaacccctaattgcaactgtgatccacccttctgaagtaacagtatgactaaatatactgagaagctcgaagagattaagaaaaattatagatacaaaaaagatgagcttttcaagagactaaaagttacaacttttgcccagctgatcatccaagttgcttccctctctgatcaaacactggaagtgacagctgaggagattcaaaggctggaagacaatgattctgcagcttcagaccctgatgctgaaaccactgccaggaccaatgggaaaggaaatccaggtgagcagtcgccgagccctgagcagttcataaacaacgca

SEQ ID NO: 116545 - DNA, 827 bp, Homo sapiens
  Payload ID: 2735
  Gene Symbol: CEP41
  Gene Name: centrosomal protein 41kDa
  ENST ID: ENST00000472739
  CDS Start-End: 343-827
gtcattcagacatttccatgccgtacagatatttatccttgcaaatatcccacttgatgggcaggtgaaaatattatctctgtcttagaagaggaaattgtggcacggggattttgtgatttattcggagttcaataaaggagagagaactaggattatatacaggatgaggaagtcaatattggagatctggtgccaagtctggtgtactgtttcttaggccgtactgttcctgtatttcccccaagccttgtttcttctgccacaaaaaccctcagctctttcatctctacccatctaacccctaattgcaactgtgatccacccttctgaagtaacagtatgactaaatatactgagaagctcgaagagattaagaaaaattatagatacaaaaaagatgagcttttcaagagactaaaagttacaacttttgcccagctgatcatccaagttgcttccctctctgatcaaacactggaagtgacagctgaggagattcaaaggctggaagacaatgattctgcagcttcagaccctgatgctgaaaccactgccaggaccaatgggaaaggaaatccaggtgagcagtcgccgagccctgagcagttcataaacaacgcaggagcaggggactccagccgctcaactcttcagagtgtcatcagtggtgttggggaactggatctagacaaagggccagtgaagaaagcagagccccataccaaagacaaaccttatcctgactgccccttcctgctgctagatgtgcgtgatagagattcttaccagcagtgccacattgttggagcttacagttacccaat

SEQ ID NO: 116546 - DNA, 3161 bp, Homo sapiens
  Payload ID: 2735
  Gene Symbol: CEP41
  Gene Name: centrosomal protein 41kDa
  Uniprot ID: Q9BYV8
  ENST ID: ENST00000489512
  CDS Start-End: 91-255
aggcggctgaacaaggttgtgggggtaggaagctagggttagaggcaacccgtgaggctagaaccccgaacgtggtcggttggagaaaatatgtccctccggaggcacattgggaaccctgagtatctgatgaaaaggataccacagaacccaagataccagcatatcaaatcaagactggacactggtgcctgtgtgtatcttaccagctccccagcactgccagactgtgccatgaatggattatgcttctgatgaaatccctggctgcgttttgttcagtcaccaccgcagggttcttgtatattctcaagcaccctctctgggtttctgttttgcagcactgcaggctgattaagggacactttccaaaccacagggctctccctttattagtccccacagtctttcattggctgcattgtcctcccatttctatctatattcaatctaatttccaatttctttagctttctgaaattctgtaggctttctccactcagtcttttctagccttatttttgtctttttaaaaattcaccttccttttattatctctagacaaactattcattccctcttttcttctttaggctttacttttcctgaatatttgctaatagccttgactgtaagcatcaaactcattatagactaggtactcttcatttttatttgttgtttaattctgtttcttccgtcaaaggaagaaatatatgtgaaaggcttttataaaccagaaagcactatacacacatatcacttattgaggttaacaaaggaccactgtgcctcttttcatgctttctgctcttccaagccaagagaacttctccatagaggagggaaatattgaagaaaaataaagccatggagttgtctcttagcaactgagttcgtgccttataaatctcatctactttagattactgctgcacaaaatcacttgcttttcttattggctcagtataaataatgttattaaattataggaaaacaatggaaaaaatctaatgaatgactcattcactgaatcagttgcactctgtgtttgcacagcactgttgctatagtcgggttgtttcttcctcttgattctaattgtaaagttttgttatatatcttttatcacaactttagttgtaagtaaacaaagtagaagctaaatgctaccttatacatttataggttgcttaagtcgtgaagcaatatgagtcatatatgtagcacataacatatactgtatataagtcaagttgtacatagtttaaagaaaatcaggtgtgcagaaactcagaccaaattgggaagtatttgcattataaaataactcattataaggatttttcagttagtagatctccatagtaaatttcattcagcaaatgtgtatttttcctatttatttatttatttatttattgagatgaagtctcgctctgttgcccaagctggagtgcagtggcgtgatcttggctcactgcaacctctgcctcccaggttcaagcgattcttctgcctcagcctcctgagtagctgggactacaggtgcgcaccaccatgcctggctaatttttatatttttagtagagacggggttttactatgttggtcaggctggtctcgaactcctgaccttgtgatcctcccgcctcggcctcccaaagtgctgggattacaggcgtgagccactgtgccaggtctagttatttatttatttattgtagagatgggctctcactgtgttggccagggtggtcttgaactcctggcctcgagcaatccttccacctcagtctcccaaagtgctgggattacaggtgtgagctatcacacctggccatttttttttttttttttttttttgagatagagtctcactctgtcacccgcattgtagtgcagtggcgcattcttgctcactgcaacctccccttcctgggctcaggggatcctcctacctcagcctctcaagtagctgggactacagggatgtgccaccatgcctggctagtttttgtgtatgtgtgtgttttgtagagacgaggtctcactattttgcccaggctggtccggaactcctgggctcaagcaatcctgcctcctcagcctcccaacgtgctgggattgcaggcatgatccagtgcacctgaccatcattcagcaagtatttttgagtgtctcctatgctagacaatggaagggataaagattattcatacgtgtgtgtgtgtgtgtgtgtgtacgtgcccataaatagtccttggctttctgtctagtaaggtaggtaagacaatacagtgataaatgccttgtgagttgtaagccgagtgctatagaggctcagaggagggaaaggtcacttcctgctgagtgagctcttacgagtatgtggcaaggtgatacgttagagaatgcaagactaagagtttgtcaagttaagtaattaaggcaacattaagaggtagtgagttggtgtccagtgctagagcaaggagtttcagctttagttaggaagcaatggggagccactgacttttttttttctttttgatcaaaaagtcttatctgggaaaatgtatctggcagtaatgtgtaatttcaattttttttaaaaaaaattggttcttggatagtcttttaggcttcttttgtatgaaacaaagccatgtttataaataagtgaattatgaaatggattcatttccaatctttttaaaaggtagtcagaaactatcttcagatgcaattagatacagtaagataggctgcatagttaagatgtaagcagtttacacagtgggataaaaatgctacttttcatactttctcaaaccatttttaggggtatttttgtgtcagccatcctgctatctcatttgtccaattaaagcaaggaagaaatcctccattctccttttttccccattcttggatagaatgaatgtctatagtgaaaagaactcatcagtagtcctctcagatttggtctgaatttcaccaaatatttgtataattgcaaaaaacttgtttctcagccttctcctttagggggaaaacaaatagagggcatgatggcctacctccctgcattgtggtgagggtcagctgatacaaaataaagtgttaagtgtaattaccctgaaatgtttgtaattaat

SEQ ID NO: 116547 - DNA, 561 bp, Homo sapiens
  Payload ID: 2735
  Gene Symbol: CEP41
  Gene Name: centrosomal protein 41kDa
  ENST ID: ENST00000475282
  CDS Start-End: 140-561
gtgtatcttccccacaaaaagatcgtcagcgggggcaggggagataaaaggaggaggaaagcctagacttgaaaaacaaactgatagaaaatgatcatctgtatctcctggaacttgtcaatgttttgggggtaacagtatgactaaatatactgagaagctcgaagagattaagaaaaattatagatacaaaaaagatgagcttttcaagagactaaaagttacaacttttgcccagctgatcatccaagttgcttccctctctgatcaaacactggaagtgacagctgaggagattcaaaggctggaagacaatgattctgcagcttcagaccctgatgctgaaaccactgccaggaccaatgggaaaggaaatccaggtgagcagtcgccgagccctgagcagttcataaacaacgcaggagcaggggactccagccgctcaactcttcagagtgtcatcagtggtgttggggaactggatctagacaaagggccagtgaagaaagcagagccccataccaaagacaaaccttatcctgactgccccttcctgctgct

SEQ ID NO: 116548 - DNA, 516 bp, Homo sapiens
  Payload ID: 2735
  Gene Symbol: CEP41
  Gene Name: centrosomal protein 41kDa
  ENST ID: ENST00000469826
  CDS Start-End: 322-516
ttccgccgcccggaaggcgggaaggggccggcgtgaggaggggtcgggatgcaggggcggggcgggccgggcttgggggccgcggggcagcgttcaggaccccgttttgaggagcgatctctccccgcgtacgcacgccagtacttgtgactgcgaggagcgaagtacccaaagacacagcccttgccctcaaatggcttacagtctcggagtgacagttacaaaacagaaaagacaaaggaagcgctgcacactaatggcacgtgttgaaagccagccagcatctctgattgtggggatacaggaagagcaggatatctgatgaaaaggataccacagaacccaagataccagcatatcaaatcaagactggacactggtaacagtatgactaaatatactgagaagctcgaagagattaagaaaaattatagatacaaaaaagatgagcttttcaagagactaaaagttacaacttttgcccagctgatcatccaagttgcttccctctctgat

SEQ ID NO: 116549 - DNA, 1269 bp, Homo sapiens
  Payload ID: 2735
  Gene Symbol: CEP41
  Gene Name: centrosomal protein 41kDa
  ENST ID: ENST00000484549
  CDS Start-End: 62-439
aagctagggttagaggcaacccgtgaggctagaaccccgaacgtggtcggttggagaaaatatgtccctccggaggcacattgggaaccctgagtatctgatgaaaaggataccacagaacccaagataccagcatatcaaatcaagactggacactggtaacagtatgactaaatatactgagaagctcgaagagattaagaaaaattatagatacaaaaaagatgagcttttcaagagactaaaagttacaacttttgcccagctgatcatccaagttgcttccctctctgatcaaacactggaagtgacagctgaggagattcaaaggctggaagacaatgattctgcagcttcagaccctgatgctgaaaccactgccaggaccaatgggaaaggaaatccagtgtcatcagtggtgttggggaactggatctagacaaagggccagtgaagaaagcagagccccataccaaagacaaaccttatcctgactgccccttcctgctgctagatgtgcgtgatagagattcttaccagcagtgccacattgttggagcttacagttacccaattgcaactctgtctagaacaatgaacccttattcaaatgatattcttgaatataaaaatgcccatggcaagatcatcattctgtatgacgatgatgaaaggctggccagtcaggcggccaccaccatgtgcgagcgtggatttgaaaacctcttcatgctttccggaggtctaaaagtcttagctcagaaattcccggaaggactgattactggttccctgccagcatcttgccagcaggcccttcctcctgggtctgcccggaaacgatccagccccaaagggccacccctaccagctgagaataaatggagatttaccccagaagacttaaaaaagatagaatattatctggaagaggagcaagggcctgcagatcatcctagccgactgaaccaagctaactcctccggaagagagtccaaggtgcctggtgcccgaagcgctcagaatctgccaggtggcggccccgccagccactcaaacccccgctccctcagcagtggtcacctgcaaggcaaaccctggaagtaaagactttgtctcacttaggcaaataaatgttcttcctcttttcagaacccctgagcatttcccaagttgggtcatttccagaaacttctgcagaggaaagaccatgacatatgtatgggataggcctcttccctgtccctgtctccagttcctctcccctca

SEQ ID NO: 116550 - DNA, 689 bp, Homo sapiens
  Payload ID: 2735
  Gene Symbol: CEP41
  Gene Name: centrosomal protein 41kDa
  ENST ID: ENST00000492389
  CDS Start-End: 111-689
cttgtttcttctgccacaaaaaccctcagctctttcatctctacccatctaacccctaattgcaactgtgatccacccttctgaagtaagtgattctgtgaggtaacagtatgactaaatatactgagaagctcgaagagattaagaaaaattatagatacaaaaaagatgagcttttcaagagactaaaagttacaacttttgcccagctgatcatccaagttgcttccctctctgatcaaacactggaagtgacagctgaggagattcaaaggctggaagacaatgattctgcagcttcagaccctgatgctgaaaccactgccaggaccaatgggaaaggaaatccaggtgagcagtcgccgagccctgagcagttcataaacaacgcaggagcaggggactccagccgctcaactcttcagagtgtcatcagtggtgttggggaactggatctagacaaagggccagtgaagaaagcagagccccataccaaagacaaaccttatcctgactgccccttcctgctgctagatgtgcgtgatagagattcttaccagcagtgccacattgttggagcttacagttacccaattgcaactctgtctagaacaatgaacccttattcaaatgatattcttgaatataaaaatgcccatggcaagatcatcattctgtatgacgatgat

SEQ ID NO: 116551 - DNA, 557 bp, Homo sapiens
  Payload ID: 2735
  Gene Symbol: CEP41
  Gene Name: centrosomal protein 41kDa
  ENST ID: ENST00000477003
  CDS Start-End: 14-557
atccataatctctatggttacccacaaggtgcaccagtatctgatgaaaaggataccacagaacccaagataccagcatatcaaatcaagactggacactggtaacagtatgactaaatatactgagaagctcgaagagattaagaaaaattatagatacaaaaaagatgagcttttcaagagactaaaagttacaacttttgcccagctgatcatccaagttgcttccctctctgatcaaacactggaagtgacagctgaggagattcaaaggctggaagacaatgattctgcagcttcagaccctgatgctgaaaccactgccaggaccaatgggaaaggaaatccaggtgagcagtcgccgagccctgagcagttcataaacaacgcaggagcaggggactccagccgctcaactcttcagagtgtcatcagtggtgttggggaactggatctagacaaagggccagtgaagaaagcagagccccataccaaagacaaaccttatcctgactgccccttcctgctgctagatgtgcgtgatagagattcttacc

SEQ ID NO: 116552 - DNA, 6222 bp, Homo sapiens
  Payload ID: 2735
  Gene Symbol: CEP41
  Gene Name: centrosomal protein 41kDa
  Uniprot ID: Q9BYV8
  ENST ID: ENST00000541543
  CDS Start-End: 245-1102
agagaacaaaaggcctcgctagccggcgtcccgcgttgcccttggcaaccattgagcggcgtcttgcccttctgcgaccctgagatgagagagtaaacggggcccccattggccggccggggaagacgggccaatcggagaagagggtatagggaggcggctgaacaaggttgtgggggtaggaagctagggttagaggcaacccgtgaggctagaaccccgaacgtggtcggttggagaaaatatgtccctccggaggcacattgggaaccctgagtatctgatgaaaaggataccacagaacccaagataccagcatatcaaatcaagactggacactgattatagatacaaaaaagatgagcttttcaagagactaaaagttacaacttttgcccagctgatcatccaagttgcttccctctctgatcaaacactggaagtgacagctgaggagattcaaaggctggaagacaatgattctgcagcttcagaccctgatgctgaaaccactgccaggaccaatgggaaaggaaatccaggtgagcagtcgccgagccctgagcagttcataaacaacgcaggagcaggggactccagccgctcaactcttcagagtgtcatcagtggtgttggggaactggatctagacaaagggccagtgaagaaagcagagccccataccaaagacaaaccttatcctgactgccccttcctgctgctagatgtgcgtgatagagattcttaccagcagtgccacattgttggagcttacagttacccaattgcaactctgtctagaacaatgaacccttattcaaatgatattcttgaatataaaaatgcccatggcaagatcatcattctgtatgacgatgatgaaaggctggccagtcaggcggccaccaccatgtgcgagcgtggatttgaaaacctcttcatgctttccggaggccgactgaaccaagctaactcctccggaagagagtccaaggtgcctggtgcccgaagcgctcagaatctgccaggtggcggccccgccagccactcaaacccccgctccctcagcagtggtcacctgcaaggcaaaccctggaagtaaagactttgtctcacttaggcaaataaatgttcttcctcttttcagaacccctgagcatttcccaagttgggtcatttccagaaacttctgcagaggaaagaccatgacatatgtatgggataggcctcttccctgtccctgtctccagttcctctcccctcaggaggccacctcaggaaggattttgacaggtgaccataaaaaccagaggtgtgacaggctctagtctcctccctgttgtttacagcatatttaagtcttgtgaaactgtataggaaaaaagtatctacgtttttagtttttttgttttgtttttttttaataaggtccagcttgttgggtctctctgtgttgttttgtaaatacttcagtcacatctgcccgtgtgcctgtccctgccaccttttcattcactgttcttgacttcatgaaggcttctccgggcagtcttggtgtgagaagctgtttccaagggtgcagatgagccttaggttccagccgcctgcagaccccaccccagcaggctcactcagcaaggagctctctgcccagcatattgcaggccctgttttgagtatggaagccagtgcctgtgtactcactgaaattgaagatgaggaaagtagctgtacactcactgaatgctcccccttactagatatttcctggagccagaaaggtatgcatgtgggtgtcttcacaccggggaggagggcctctcatgggaaagccctggccaccacaccggcctgtgccccttgaagcccaccaaagcggccctcacttgtggtcagtatatcagttatgacgcccattgcccagcttcagtccatccatgttagatggacagaaattatggccagttgaaaataccagctttggttggacaactgtggacacacaaggtgaagaggactccgaagtcctttgtcagggctgacaacctcgtaagcccttgcttagaaatacagtattagtctaattgagtaattagtgcaatttcctgcttacttttcattctcatgactgaactgtgattaggaagttgtgattatagattctggttttggccggaattttgaatcagcattaattgaattgctaaatgactgacattcattccatttaattgggggaacaaaaggcctcaggtaaggatgaggaactctgaaatcagatggaaaagagcggtgttaatttttatggtctgtgatcgtagctgtgataagggactgaggaataaattgtgctctttgtcatggcaaccagcttctgaaaagcccactgaaaattgcctgtcctgctggtaactgctacggggtaagatttgccttaacagtactattttctcgccaccaaaaaaaaaaaaaaaaaaaaaaaaaaatgcaccacagtatttctagcatgggggctgtgtttgtatgagaaataaacgtaataaatatctcatagagacatatggaaaaataactttcagattcagcccagttctgttttagagtgtgtttattcttctctacttgatttccaaagtgcaacattttccgatgctttagaaatcaaacaaaccagggacattgttcagatgtcaagccatgcccaattttccacaagattcaagaatcttgtataaaattcagccaacgtacacatagctttaatgaggagcctgtcatgtttccccataaatttattgcctgagaacttagttcagcctttgctaatgccaaaatgctctggctttgtattttctttacagcatagatagaaaaatgcacatttttccacactcagctttcccctagcatggacaagattttcagccatttttgccacatatacatttttaaggaaaaaagatttttctctgtaagaaagttctggttatgctgttttaaaggtgacttgtcaggagttgagacttccctgccggattctattttgaaagtaaatggtcttccctccttgttccgattctgcgttcccatcgtcagacaactttggagtattagaaaccactgtatatatgtggaaagccaggtcagccagacctgttagaattggtgtgcactcacctgagagatctggcaggttggatatatttatgtgtatttctccacagtgcttgctttgccctgttggtaaggattttaaataaccatgctcaaaagagctgttctaatctgcgttttgcatgttaagtgttaatatcaaacattctttacgtgctcgaggtattgcttttaacattctactttgccagtttcttcattagattaattgacatgtattatttaaatgaccagtgatgctttgtgcaattatgaatgttgaagattaaagtacatagttactaatttgtcgtttgctattaatatgctgaaaactgccaacttctctcttcttttctgtcgagatgatttgggggagccacaggagactggtgtgatttttgctgcatctcctaggaaagcattttttaaaaaaaataaatgaatcaggaaatcagtccaattagggcagggggcctcagctctccagtcagaaagcctggatttcttttcctgctcaggctgggactgaagccaccttcaacaactggatcatggcttcctaccagcgtctcaggggttgactagctgcccttgtctggggcttgtgaaccctgagacagaaggtgcttcatcgatgtacaactacagcaccctgaacagcagtgatggccaaagtttaaataataccttaaatgctttaaaggggtttgtgtttaaggaagggagaaaagaaaaaaagaaaggaagggagaaagaagcaaggaaatgggaagaagggagggcagagagaagaaaagaagcagaaagcgagagagaaaggagaaagctacattacttatttgaaaacaaaaggaacaccctgggctgtaataatgtcaggctcaatctcttgaaaaagtatggaatgatttaaatggcctgcattcattttatcttttatctttttttttttttttaacctttagtggttagccaggaccagcacgatcatattgggcttggtataaatccgaatgaaaagagaccaaataacattcattagttgctcagggatttttcctgtggtgctatttaaattatacaaaaattcttaagactttaggctactcgaccaagaaaacagaacaaaacaaaaaatcgtgttttctctaattcccttgtggaatgtaagtgaaatcagagtcctaggctaggaagaaatacgtaggtaatttttcttgtgttggttttggtttctgtcatgttgtttattggctatagattctgtcttttatgttatctgacttttttagagcgaataattagtttctgtccacctggatttaaatccatgaccaccttcttgctctactctgaagataatcagtaagaacctttctttctccagttctaaaacgttctcagtgtctttaatgtgtgtttattttcttcccaattctttcaaagatttaactcccacgatacttttttttccccaggaaacaccgcaaatgtgtggaatataattcaccagtttaattatgtgagcatgttgagtacttacatgcaggtccattaatttttcactaacaattattttttcatgcaaaagcaataaataacattgtgcttccaaaatgttcagaatacatttgggtagtaatactttcctagatttacaataattattgaaattattattatgacatctttaaatggatacacaggtcagttacaacataaaaaatgtaatggtggaaatttgtcagccttgaattcaggcagaacaggattcggtgcatgattttatgtgttttcgaaacggtgtctgtcacattgtgatcccctgatggctcccctctctgttgctgatcctctttgttctgtacagaagcaaattctcacctgtgtaacatcctgaagcacctggtaaaatgtgaggcaaagagaggccacttctcaaatgctgtggacggatgggctgcatcttttaaaggatatcaatatgtcttcctgttgcaattattttgactataagctcccagagagtgaaaatcaccaaccctgtgacagtggcccttaataagtgttcatgaataaatgaattgaacctgtcaagattgaagtttggatgtgatgcccactgtggtggccactcagtgctagtctgtcattctggagacccagaaagctcgttatcttctgtcccccttgtgtatcctgcctttgtgggcgaggcattcaaaaccctgaggtttttagatctccctctacaggaagtacccagagagctgctgggggtgttattaccctgtctctgccaggcttaaagtatcctcccaaattcagcacgcaaaggtcacacaccacccccatcttaagagtaggttttctcttttgtttcaaatcttgaagatttccagaaaataataatactagccaatgtttgtggagagcttactttgctcctagattcttcattatatgttttgacccatttaatttccacaacagtctgatgaggcaggcacccccattttcagatgaggagactgaggttcgggtagaaattaagtgactcaggtttgccttcagtctctgaccaagggtttgaaaagccaggagccagcctgagaactgtggctccagagggtgttctttcagccactccgctctatgcttctcactctgggtgggcacaaccatgttctcctttggtgatgcctctaacttaccgtgaaaatgtacctttcccttcgctattggcttcccttccctcctagtcagccgagattcttttgaaaactttcctccgcttgcctgcacaaaaggcgatggaaattcaggaactgaaacatctgctctggggaatgcgtatttccacatttccaccgcctgtgtctgctgtcttatcttgaagacaggtgctccagggcttccgaggttattttgtctgttaatggacaccttgcaaagtaccacttaaggaatgagaattacaaacttttaattatattgtagggggaaaaaagtaggctgttttcctgataggtctagccattcattcagtaaaccatattgatatga

SEQ ID NO: 116553 - DNA, 3315 bp, Homo sapiens
  Payload ID: 2735
  Gene Symbol: CEP41
  Gene Name: centrosomal protein 41kDa
  Uniprot ID: Q9BYV8
  ENST ID: ENST00000616628
  CDS Start-End: 245-409
agagaacaaaaggcctcgctagccggcgtcccgcgttgcccttggcaaccattgagcggcgtcttgcccttctgcgaccctgagatgagagagtaaacggggcccccattggccggccggggaagacgggccaatcggagaagagggtatagggaggcggctgaacaaggttgtgggggtaggaagctagggttagaggcaacccgtgaggctagaaccccgaacgtggtcggttggagaaaatatgtccctccggaggcacattgggaaccctgagtatctgatgaaaaggataccacagaacccaagataccagcatatcaaatcaagactggacactggtgcctgtgtgtatcttaccagctccccagcactgccagactgtgccatgaatggattatgcttctgatgaaatccctggctgcgttttgttcagtcaccaccgcagggttcttgtatattctcaagcaccctctctgggtttctgttttgcagcactgcaggctgattaagggacactttccaaaccacagggctctccctttattagtccccacagtctttcattggctgcattgtcctcccatttctatctatattcaatctaatttccaatttctttagctttctgaaattctgtaggctttctccactcagtcttttctagccttatttttgtctttttaaaaattcaccttccttttattatctctagacaaactattcattccctcttttcttctttaggctttacttttcctgaatatttgctaatagccttgactgtaagcatcaaactcattatagactaggtactcttcatttttatttgttgtttaattctgtttcttccgtcaaaggaagaaatatatgtgaaaggcttttataaaccagaaagcactatacacacatatcacttattgaggttaacaaaggaccactgtgcctcttttcatgctttctgctcttccaagccaagagaacttctccatagaggagggaaatattgaagaaaaataaagccatggagttgtctcttagcaactgagttcgtgccttataaatctcatctactttagattactgctgcacaaaatcacttgcttttcttattggctcagtataaataatgttattaaattataggaaaacaatggaaaaaatctaatgaatgactcattcactgaatcagttgcactctgtgtttgcacagcactgttgctatagtcgggttgtttcttcctcttgattctaattgtaaagttttgttatatatcttttatcacaactttagttgtaagtaaacaaagtagaagctaaatgctaccttatacatttataggttgcttaagtcgtgaagcaatatgagtcatatatgtagcacataacatatactgtatataagtcaagttgtacatagtttaaagaaaatcaggtgtgcagaaactcagaccaaattgggaagtatttgcattataaaataactcattataaggatttttcagttagtagatctccatagtaaatttcattcagcaaatgtgtatttttcctatttatttatttatttatttattgagatgaagtctcgctctgttgcccaagctggagtgcagtggcgtgatcttggctcactgcaacctctgcctcccaggttcaagcgattcttctgcctcagcctcctgagtagctgggactacaggtgcgcaccaccatgcctggctaatttttatatttttagtagagacggggttttactatgttggtcaggctggtctcgaactcctgaccttgtgatcctcccgcctcggcctcccaaagtgctgggattacaggcgtgagccactgtgccaggtctagttatttatttatttattgtagagatgggctctcactgtgttggccagggtggtcttgaactcctggcctcgagcaatccttccacctcagtctcccaaagtgctgggattacaggtgtgagctatcacacctggccatttttttttttttttttttttttgagatagagtctcactctgtcacccgcattgtagtgcagtggcgcattcttgctcactgcaacctccccttcctgggctcaggggatcctcctacctcagcctctcaagtagctgggactacagggatgtgccaccatgcctggctagtttttgtgtatgtgtgtgttttgtagagacgaggtctcactattttgcccaggctggtccggaactcctgggctcaagcaatcctgcctcctcagcctcccaacgtgctgggattgcaggcatgatccagtgcacctgaccatcattcagcaagtatttttgagtgtctcctatgctagacaatggaagggataaagattattcatacgtgtgtgtgtgtgtgtgtgtgtacgtgcccataaatagtccttggctttctgtctagtaaggtaggtaagacaatacagtgataaatgccttgtgagttgtaagccgagtgctatagaggctcagaggagggaaaggtcacttcctgctgagtgagctcttacgagtatgtggcaaggtgatacgttagagaatgcaagactaagagtttgtcaagttaagtaattaaggcaacattaagaggtagtgagttggtgtccagtgctagagcaaggagtttcagctttagttaggaagcaatggggagccactgacttttttttttctttttgatcaaaaagtcttatctgggaaaatgtatctggcagtaatgtgtaatttcaattttttttaaaaaaaattggttcttggatagtcttttaggcttcttttgtatgaaacaaagccatgtttataaataagtgaattatgaaatggattcatttccaatctttttaaaaggtagtcagaaactatcttcagatgcaattagatacagtaagataggctgcatagttaagatgtaagcagtttacacagtgggataaaaatgctacttttcatactttctcaaaccatttttaggggtatttttgtgtcagccatcctgctatctcatttgtccaattaaagcaaggaagaaatcctccattctccttttttccccattcttggatagaatgaatgtctatagtgaaaagaactcatcagtagtcctctcagatttggtctgaatttcaccaaatatttgtataattgcaaaaaacttgtttctcagccttctcctttagggggaaaacaaatagagggcatgatggcctacctccctgcattgtggtgagggtcagctgatacaaaataaagtgttaagtgtaattaccctgaaatgtttgtaattaat

SEQ ID NO: 116554 - DNA, 4173 bp, Homo sapiens
  Payload ID: 2736
  Gene Symbol: CEP44
  Gene Name: centrosomal protein 44kDa
  Uniprot ID: Q9C0F1
  ENST ID: ENST00000296519
  CDS Start-End: 53-1225
aggtgaaaaattagacgatttcaagaattggagctgaatctgatgttaagtaatggcaacaggtgacttaaaaagaagcttacggaacctagaacaggtgctccgcttgctaaattatcctgaagaggtggactgtgtaggtttgataaagggagacccagcagcatctttgcccatcatcagctattcttttacctcatactcaccttatgtaacagaacttataatggaatccaatgtagagctcatagcaaaaaatgacttgcgctttatagatgctgtctataagcttcttcgtgatcaatttaattataaaccaattttgacaaaaaagcagtttatccaatgtgggtttgcagaatggaaaatccaaattgtttgtgatattttgaattgtgtgatgaaaaagcacaaggaattaagcagtcttcagaagattccatcacaacaaagaaagaaaatcagttctggtaagtcagaacctcctttgggcaatgagaaaatatctgcagaggctgttggcgttgatatcagtggcaggtttatgacctcaggaaagaagaaagctgtggtgattcgtcacttgtataatgaagataatgttgacatttctgaggatacattaagtccaataacagatgttaatgaagcagttgatgtgtctgacttaaatgctactgaaataaagatgcctgaagtaaaggttcctgaaatcaaggctgagcaacaggatgtaaatgttaatcctgagattactgcactacaaactatgcttgctgaatgccaagaaaatcttaagaaactgacttcgatagagaaaaggttagactgtttggaacaaaaaatgaaaggaaaagtgatggtagatgaaaacacctggactaatcttcttagtcgtgtcactcttcttgaaacagaaatgcttttgtctaaaaagaatgatgaatttatagagtttaatgaagttagtgaagactacgcttcttgtagtgacatggaccttctgaatcctcacagaaaaagcgaagtagagaggccagcaagtattcctctgtcctctggctatagtacagcatcatcagattcaactcccagagcctctactgttaattactgtggtttgaatgagatttcagaggaaacaacaatccagaaaatggaaaggatgaaaaaaatgtttgaagaaactgcagagttactgaaatgtccaaatcactacttgtaggattttctacatgaacttttttctaggactttggttactatacatattgtatattttaagaattctttatacaattttaatatactgcaatactgcagtttttgacaatttggattccatttggtatatgaatttttgcattcattattgaataactcttttaatatttttgagcaatgattatactgctttaccttgtgtcactttttttttttttaggaaaaactcatgttccagtatatttctcttacagagtgaagtcattacagcactgtatttctgtgttgacatttgttggcagtgtgctaagtaatgttttttaaagcacaggcttgaggactatggtttacatcctgttggaaacattccaaatgggacttgtgtattatacccaggaggctctcatatataccatcttggcatctgtactgatgaataagttataatgaacagttaaaaatgctcattgaaaattaaataaaacaaaaaggcagttatttcatgcttggtcaaaaacatcaatacctttccaattaacactgagaaattaaggttaagattctccttttgtactgggaaacaggctggaggactatggtcctcaagtttagaccaagaggactatggtctcaaggttcaccatgagaaatgtgttgaacattttagtatgctctattgtataatttttttggagggggggatggagtttcgctgttgttgcccaggctggagtgcaatagcacgatcttggctcaccgcaacctctgcctaccgggttcaagtgattcttgtgcctcagcctcctgagtagctgggattataggcatgcaccaccatgcccagctaattttgtatttttattagagacagggtttctccgtgttggtcaggctggtctcaaactcctgacctcaggtgatctgcctgtcttggcctccggcgtaacactttttaagaccagtgtaacagaaagagaatgtagccattctagccaccgttaaaagatacacagtgaggtgttgtgttttgtttttttaatgatgaaaagttacacattttttggagagaaaagtcttagctgaaggtaaatcaatggaaaaatgaaatttatttttaatattactactatatgaattatctttttttaaacttgtagataaaagtgttccagtaatcagaaaatcctcaagaaaattgacttcattatttggaaggaaaattagtattttttttaatattatatggaccatctgattatattttatttattcatctatttatggtatgtatgtataattctatattacactgtcaaatataaaatattgttatatgagtagaaatcacttaaattttttttgtgtttgtgaatttgaaacagtgtaagaaatcacttttaagaaaacatttttagaattcctttgttttttttttttttctttttgaaacagggtctcactctattgcccaggctggagtgcactggcgtgatctcggctcactgcaccttctgcctaccgagttcaagcgattcttgtgcttcagcctcctgagtagctgggactataggcctgtaccgtcatgcctggctaatttttgtatttttgtagagacagggtttcaccatgttgcccagtctgttctcaaactcgtgagctaaagctactcgcccacctggatgtcccaaagtgctagattccatgggtgagtcaccatgcttggccacatttttagtattctaataaacagttggtcatcagaactttaaaatggtagcctacagaaacatacaattttgaatttaacagagtttcagtaaatatttccagaattaatgaagcatgttagctttaattttttcaattgtgagagaagtacatttataaaaattaagaggttaagaggttatagttataagggaaaaaacttctgtatcgattaactcctaaaatatcagtaccagcatggaattatagcaccaccttgtggttaacatgccagtattttaccttttgttaaaacaagtgatttcccatcaaacaggataatattttttcccttttgaaaaattcaattttaaaaagaaacatttttgaagttttcttatggaagatagaaaaaaagttaagtctctttctaccctttctttttttctttatatagtgcagatatacacacagagaagggacttaaaacatttctaatctcctagtttatatacagtgtgcaaaatataagtaagtatatattgaaaatataaaatatttcatatatgttatcaggtggaaatttagaatccaaattttcttaaactttaataacttgtctaacaactctctaatagggactaaaaatcaactcaatatatcatacatttacacttacaaagagtctttatctagacaacataatttttggaaaaataaagcaaattcaactttattggagttattggacagatcagcaaattgttattttaaaaagttttcttgtttaggcaatttggtaagtggtttctagttataaactagccactgttgattaacttgagaaggtgaagcaggggagttctgaagagattacctagagctacataaccctaagttaagtaaaattttcactttcattcttttcattctctcataaactggttgaaaaaacactgtactaccaacaaaggtgtcagttgcttgtgctgccctgtctatgttatgctctgaataggtctcggtaaagattatatggaaatactataaagaatacataaggtaaaatactagtcagaaagggttcagaagaagttagcatcaactgtatgaaaattctaggtaaagctaagtactattgagttggaaaaaagtaattctatcatgtttgcttgttttcctctactgtttttaatgtgatgttgtaatatattttaaaaataaaacttgaaaacgttggga

SEQ ID NO: 116555 - DNA, 3824 bp, Homo sapiens
  Payload ID: 2736
  Gene Symbol: CEP44
  Gene Name: centrosomal protein 44kDa
  Uniprot ID: Q9C0F1
  ENST ID: ENST00000396791
  CDS Start-End: 305-1477
gagcacagagaagctcccagctttgaaggtcttgcggtggtgcgtggcgggcaggaacccacaattccaaatacaaacggtcggcgcgagaagcgcttctgggcgcaggcgcctggctgtagcgactggttgcgggaggctggactctggtgactgtaagcatcaagtgtacctgatttgtgaacctatcttgcttcagttggtttcctcctaaatattaggcagatgggattggctggtctgtgctctgctaggtgaaaaattagacgatttcaagaattggagctgaatctgatgttaagtaatggcaacaggtgacttaaaaagaagcttacggaacctagaacaggtgctccgcttgctaaattatcctgaagaggtggactgtgtaggtttgataaagggagacccagcagcatctttgcccatcatcagctattcttttacctcatactcaccttatgtaacagaacttataatggaatccaatgtagagctcatagcaaaaaatgacttgcgctttatagatgctgtctataagcttcttcgtgatcaatttaattataaaccaattttgacaaaaaagcagtttatccaatgtgggtttgcagaatggaaaatccaaattgtttgtgatattttgaattgtgtgatgaaaaagcacaaggaattaagcagtcttcagaagattccatcacaacaaagaaagaaaatcagttctggtaagtcagaacctcctttgggcaatgagaaaatatctgcagaggctgttggcgttgatatcagtggcaggtttatgacctcaggaaagaagaaagctgtggtgattcgtcacttgtataatgaagataatgttgacatttctgaggatacattaagtccaataacagatgttaatgaagcagttgatgtgtctgacttaaatgctactgaaataaagatgcctgaagtaaaggttcctgaaatcaaggctgagcaacaggatgtaaatgttaatcctgagattactgcactacaaactatgcttgctgaatgccaagaaaatcttaagaaactgacttcgatagagaaaaggttagactgtttggaacaaaaaatgaaaggaaaagtgatggtagatgaaaacacctggactaatcttcttagtcgtgtcactcttcttgaaacagaaatgcttttgtctaaaaagaatgatgaatttatagagtttaatgaagttagtgaagactacgcttcttgtagtgacatggaccttctgaatcctcacagaaaaagcgaagtagagaggccagcaagtattcctctgtcctctggctatagtacagcatcatcagattcaactcccagagcctctactgttaattactgtggtttgaatgagatttcagaggaaacaacaatccagaaaatggaaaggatgaaaaaaatgtttgaagaaactgcagagttactgaaatgtccaaatcactacttgtaggattttctacatgaacttttttctaggactttggttactatacatattgtatattttaagaattctttatacaattttaatatactgcaatactgcagtttttgacaatttggattccatttggtatatgaatttttgcattcattattgaataactcttttaatatttttgagcaatgattatactgctttaccttgtgtcactttttttttttttaggaaaaactcatgttccagtatatttctcttacagagtgaagtcattacagcactgtatttctgtgttgacatttgttggcagtgtgctaagtaatgttttttaaagcacaggcttgaggactatggtttacatcctgttggaaacattccaaatgggacttgtgtattatacccaggaggctctcatatataccatcttggcatctgtactgatgaataagttataatgaacagttaaaaatgctcattgaaaattaaataaaacaaaaaggcagttatttcatgcttggtcaaaaacatcaatacctttccaattaacactgagaaattaaggttaagattctccttttgtactgggaaacaggctggaggactatggtcctcaagtttagaccaagaggactatggtctcaaggttcaccatgagaaatgtgttgaacattttagtatgctctattgtataatttttttggagggggggatggagtttcgctgttgttgcccaggctggagtgcaatagcacgatcttggctcaccgcaacctctgcctaccgggttcaagtgattcttgtgcctcagcctcctgagtagctgggattataggcatgcaccaccatgcccagctaattttgtatttttattagagacagggtttctccgtgttggtcaggctggtctcaaactcctgacctcaggtgatctgcctgtcttggcctccggcgtaacactttttaagaccagtgtaacagaaagagaatgtagccattctagccaccgttaaaagatacacagtgaggtgttgtgttttgtttttttaatgatgaaaagttacacattttttggagagaaaagtcttagctgaaggtaaatcaatggaaaaatgaaatttatttttaatattactactatatgaattatctttttttaaacttgtagataaaagtgttccagtaatcagaaaatcctcaagaaaattgacttcattatttggaaggaaaattagtattttttttaatattatatggaccatctgattatattttatttattcatctatttatgggtctcactctattgcccaggctggagtgcactggcgtgatctcggctcactgcaccttctgcctaccgagttcaagcgattcttgtgcttcagcctcctgagtagctgggactataggcctgtaccgtcatgcctggctaatttttgtatttttgtagagacagggtttcaccatgttgcccagtctgttctcaaactcgtgagctaaagctactcgcccacctggatgtcccaaagtgctagattccatggaattttcctgcatggagtgctacatcctcttgttccagtctcagctggctgctccgtgggcatacttcatacctttcatcacagagctttgcttggcctctctcctgtgtgtaatctctgtttcttggatcctgtgcttaccttttcctgctgtactctgatgtttcagtgaagctcatccacgaagtccagaattctgcctggaaaccagcttcctcctcagctccagctcttttaatgggcatatcaaaactgatgactttttccttcctgctacatgggtaacacttagttgtttgtctaatttctattttccagaaatttctcaaaatgtctgctgatagcccctcactcatatttttcatgtgggtttatagctttcatatttctttattattgtaaatgggggctgtggaaggtgagaaaacacatgctttcttaaaacagaagctctctccttcattaatttaaatatttttatcggctctagaaaatgcataaggttagtacaagatcagtagagagaaagtcaaagattacagaagtgctgaagcagaccattcttcctttcttcccaatgtctattaagatcacacataggtaaactgttacaaatccagaatggtgaaagagtccaacaatggctgagggaagtagaggttaagatatagctcaacagtgaaagtagcagggaaagagctgggcaaggccaagaccatcttttgtaccgttggtacagtaggctaaaggtacggtgttccatattaaatacagcaatatgaagaaaaataaattaagtcccttatacctaa

SEQ ID NO: 116556 - DNA, 3290 bp, Homo sapiens
  Payload ID: 2736
  Gene Symbol: CEP44
  Gene Name: centrosomal protein 44kDa
  Uniprot ID: Q9C0F1
  ENST ID: ENST00000457424
  CDS Start-End: 306-1505
ggagcacagagaagctcccagctttgaaggtcttgcggtggtgcgtggcgggcaggaacccacaattccaaatacaaacggtcggcgcgagaagcgcttctgggcgcaggcgcctggctgtagcgactggttgcgggaggctggactctggtgactgtaagcatcaagtgtacctgatttgtgaacctatcttgcttcagttggtttcctcctaaatattaggcagatgggattggctggtctgtgctctgctaggtgaaaaattagacgatttcaagaattggagctgaatctgatgttaagtaatggcaacaggtgacttaaaaagaagcttacggaacctagaacaggtgctccgcttgctaaattatcctgaagaggtggactgtgtaggtttgataaagggagacccagcagcatctttgcccatcatcagctattcttttacctcatactcaccttatgtaacagaacttataatggaatccaatgtagagctcatagcaaaaaatgacttgcgctttatagatgctgtctataagcttcttcgtgatcaatttaattataaaccaattttgacaaaaaagcagtttatccaatgtgggtttgcagaatggaaaatccaaattgtttgtgatattttgaattgtgtgatgaaaaagcacaaggaattaagcagtcttcagaagattccatcacaacaaagaaagaaaatcagttctggtaagtcagaacctcctttgggcaatgagaaaatatctgcagaggctgttggcgttgatatcagtggcaggtttatgacctcaggaaagaagaaagctgtggtgattcgtcacttgtataatgaagataatgttgacatttctgaggatacattaagtccaataacagatgttaatgaagcagttgatgtgtctgacttaaatgctactgaaataaagatgcctgaagtaaaggttcctgaaatcaaggctgagcaacaggatgtaaatgttaatcctgagattactgcactacaaactatgcttgctgaatgccaagaaaatcttaagaaactgacttcgatagagaaaaggttagactgtttggaacaaaaaatgaaaggaaaagtgatggtagatgaaaacacctggactaatcttcttagtcgtgtcactcttcttgaaacagaaatgcttttgtctaaaaagaatgatgaatttatagagtttaatgaagttagtgaagactacgcttcttgtagtgacatggaccttctgaatcctcacagaaaaagcgaagtagagaggccagcaagtattcctctgtcctctggctatagtacagcatcatcagattcaactcccagagcctctactgttaattactgtggtttgaatgagatttcagagaattttcctgcatggagtgctacatcctcttgttccagtctcagctggctgctccgtgggcatacttcatacctttcatcacagagctttgcttggcctctctcctgtgtgtaatctctgtttcttggatcctgtgcttaccttttcctgctgtactctgatgtttcagtgaagctcatccacgaagtccagaattctgcctggaaaccagcttcctcctcagctccagctcttttaatgggcatatcaaaactgatgactttttccttcctgctacatgggtaacacttagttgtttgtctaatttctattttccagaaatttctcaaaatgtctgctgatagcccctcactcatatttttcatgtgggtttatagctttcatatttctttattattgtaaatgggggctgtggaaggtgagaaaacacatgctttcttaaaacagaagctctctccttcattaatttaaatatttttatcggctctagaaaatgcataaggttagtacaagatcagtagagagaaagtcaaagattacagaagtgctgaagcagaccattcttcctttcttcccaatgtctattaagatcacacataggtaaactgttacaaatccagaatggtgaaagagtccaacaatggctgagggaagtagaggttaagatatagctcaacagtgaaagtagcagggaaagagctgggcaaggccaagaccatcttttgtaccgttggtacagtaggctaaaggtacggtgttccatattaaatacagcaatatgaagaaaaataaattaagtcccttatacctaagacctctatttctctgttgattacatacacagtggcaatggaaagaagggaaaataatggggatagcatttgctcattctctgaccatgcaacactggcagcattctatacttattctattaactgcatcaaccacatcttataaaacacatttccataggccatatgtaataggccttggctttattcattgcatttattggctccttaaattgacaacatataattgttttcatataattttcatcaaataaaattcactttaatttgtatgaacatatttaaagtggaaagtatcttcccaaatggtccatatcttaaagtgtcagatattttatgggcttcacatctgaactgccagagatctcaggcatagcatgcattaatcacaaccacttactgacctggttcagatacttactcaatacatggggctagacacagagtgtgccttaggctaaagaaaaaattattcaagttgagcatatccataaactctggctcaagcagtgtattttgggggtaataaacacaagtttgttcctagttggagggatatgatgcttaggtttgaacctgttaaccttcctgggtttgagggctagaaaacgtggagacattcctttctaactaacacattttctaatagaaacaatccaccaggatgttgagcccacattttaagagttcttcggaatttactgaaaatggaaaactgattacattgggcacataggacatttatatttatagaaacattttagataagacaagaattttaaaagccagaaatcacttttagtgggcattttcagaaaaatgttgtcaactttttgtaatttttaataggcataaaaaagattgttatattgatattgacagaaattaggtggttaattagagagcgtaaaaggatgaattgctctaacattggtttagaatttttctttatatgattcaattttgtggtctggcaaaggcccaatagtcatttatctagtatgcatacctttccacagctggattttcaaatatgatgataaagttcatatgacagacctattctgaaaataaatatgtcagcagg

SEQ ID NO: 116557 - DNA, 3037 bp, Homo sapiens
  Payload ID: 2736
  Gene Symbol: CEP44
  Gene Name: centrosomal protein 44kDa
  Uniprot ID: Q9C0F1
  ENST ID: ENST00000426172
  CDS Start-End: 53-1252
aggtgaaaaattagacgatttcaagaattggagctgaatctgatgttaagtaatggcaacaggtgacttaaaaagaagcttacggaacctagaacaggtgctccgcttgctaaattatcctgaagaggtggactgtgtaggtttgataaagggagacccagcagcatctttgcccatcatcagctattcttttacctcatactcaccttatgtaacagaacttataatggaatccaatgtagagctcatagcaaaaaatgacttgcgctttatagatgctgtctataagcttcttcgtgatcaatttaattataaaccaattttgacaaaaaagcagtttatccaatgtgggtttgcagaatggaaaatccaaattgtttgtgatattttgaattgtgtgatgaaaaagcacaaggaattaagcagtcttcagaagattccatcacaacaaagaaagaaaatcagttctggtaagtcagaacctcctttgggcaatgagaaaatatctgcagaggctgttggcgttgatatcagtggcaggtttatgacctcaggaaagaagaaagctgtggtgattcgtcacttgtataatgaagataatgttgacatttctgaggatacattaagtccaataacagatgttaatgaagcagttgatgtgtctgacttaaatgctactgaaataaagatgcctgaagtaaaggttcctgaaatcaaggctgagcaacaggatgtaaatgttaatcctgagattactgcactacaaactatgcttgctgaatgccaagaaaatcttaagaaactgacttcgatagagaaaaggttagactgtttggaacaaaaaatgaaaggaaaagtgatggtagatgaaaacacctggactaatcttcttagtcgtgtcactcttcttgaaacagaaatgcttttgtctaaaaagaatgatgaatttatagagtttaatgaagttagtgaagactacgcttcttgtagtgacatggaccttctgaatcctcacagaaaaagcgaagtagagaggccagcaagtattcctctgtcctctggctatagtacagcatcatcagattcaactcccagagcctctactgttaattactgtggtttgaatgagatttcagagaattttcctgcatggagtgctacatcctcttgttccagtctcagctggctgctccgtgggcatacttcatacctttcatcacagagctttgcttggcctctctcctgtgtgtaatctctgtttcttggatcctgtgcttaccttttcctgctgtactctgatgtttcagtgaagctcatccacgaagtccagaattctgcctggaaaccagcttcctcctcagctccagctcttttaatgggcatatcaaaactgatgactttttccttcctgctacatgggtaacacttagttgtttgtctaatttctattttccagaaatttctcaaaatgtctgctgatagcccctcactcatatttttcatgtgggtttatagctttcatatttctttattattgtaaatgggggctgtggaaggtgagaaaacacatgctttcttaaaacagaagctctctccttcattaatttaaatatttttatcggctctagaaaatgcataaggttagtacaagatcagtagagagaaagtcaaagattacagaagtgctgaagcagaccattcttcctttcttcccaatgtctattaagatcacacataggtaaactgttacaaatccagaatggtgaaagagtccaacaatggctgagggaagtagaggttaagatatagctcaacagtgaaagtagcagggaaagagctgggcaaggccaagaccatcttttgtaccgttggtacagtaggctaaaggtacggtgttccatattaaatacagcaatatgaagaaaaataaattaagtcccttatacctaagacctctatttctctgttgattacatacacagtggcaatggaaagaagggaaaataatggggatagcatttgctcattctctgaccatgcaacactggcagcattctatacttattctattaactgcatcaaccacatcttataaaacacatttccataggccatatgtaataggccttggctttattcattgcatttattggctccttaaattgacaacatataattgttttcatataattttcatcaaataaaattcactttaatttgtatgaacatatttaaagtggaaagtatcttcccaaatggtccatatcttaaagtgtcagatattttatgggcttcacatctgaactgccagagatctcaggcatagcatgcattaatcacaaccacttactgacctggttcagatacttactcaatacatggggctagacacagagtgtgccttaggctaaagaaaaaattattcaagttgagcatatccataaactctggctcaagcagtgtattttgggggtaataaacacaagtttgttcctagttggagggatatgatgcttaggtttgaacctgttaaccttcctgggtttgagggctagaaaacgtggagacattcctttctaactaacacattttctaatagaaacaatccaccaggatgttgagcccacattttaagagttcttcggaatttactgaaaatggaaaactgattacattgggcacataggacatttatatttatagaaacattttagataagacaagaattttaaaagccagaaatcacttttagtgggcattttcagaaaaatgttgtcaactttttgtaatttttaataggcataaaaaagattgttatattgatattgacagaaattaggtggttaattagagagcgtaaaaggatgaattgctctaacattggtttagaatttttctttatatgattcaattttgtggtctggcaaaggcccaatagtcatttatctagtatgcatacctttccacagctggattttcaaatatgatgataaagttcatatgacagacctattctgaaaataaatatgtcagcagg

SEQ ID NO: 116558 - DNA, 913 bp, Homo sapiens
  Payload ID: 2736
  Gene Symbol: CEP44
  Gene Name: centrosomal protein 44kDa
  ENST ID: ENST00000515299
  CDS Start-End: 320-913
ttccaaatacaaacggtcggcgcgagaagcgcttctgggcgcaggcgcctggctgtagcgactggttgcgggaggctggactctggtgactgtgtatggttgcatatgctccgttttcctctccctgtcgtgctgggcctttgaaaccggcttctttgctggtggctgcttgaagcatcaagtgtacctgatttgtgaacctatcttgcttcagttggtttcctcctaaatattaggcagatgggattggctggtctgtgctctgctaggtgaaaaattagacgatttcaagaattggagctgaatctgatgttaagtaatggcaacaggtgacttaaaaagaagcttacggaacctagaacaggtgctccgcttgctaaattatcctgaagaggtggactgtgtaggtttgataaagggagacccagcagcatctttgcccatcatcagctattcttttacctcatactcaccttatgtaacagaacttataatggaatccaatgtagagctcatagcaaaaaatgacttgcgctttatagatgctgtctataagcttcttcgtgatcaatttaattataaaccaattttgacaaaaaagcagtttatccaatgtgggtttgcagaatggaaaatccaaattgtttgtgatattttgaattgtgtgatgaaaaagcacaaggaattaagcagtcttcagaagattccatcacaacaaagaaagaaaatcagttctggtaagtcagaacctcctttgggcaatgagaaaatatctgcagaggctgttggcgttgatatcagtggcaggtttatgacctcaggaaagaagaaagctgtggtgattcgtcacttgtataatgaagataatgttgacatttctgaggatacattaagtccaataacagatgttaat

SEQ ID NO: 116559 - DNA, 4534 bp, Homo sapiens
  Payload ID: 2736
  Gene Symbol: CEP44
  Gene Name: centrosomal protein 44kDa
  Uniprot ID: Q9C0F1
  ENST ID: ENST00000503780
  CDS Start-End: 415-1587
gacgttaggctccgactcttaacggagacgcatttttatttctgttgtttacgattcgctatagattccttgtttctcacttcgtagcacgagccactctgaccatcaagatcagaaaaacttctcagctgcaagttagaagtggactggccattgaggaggctctcagcggagtcgctcttcacaggagtcttgaacgcggtgtggaatcggcagcgaggaatcctggagcacagagaagctcccagctttgaaggtcttgcggtgaagcatcaagtgtacctgatttgtgaacctatcttgcttcagttggtttcctcctaaatattaggcagatgggattggctggtctgtgctctgctaggtgaaaaattagacgatttcaagaattggagctgaatctgatgttaagtaatggcaacaggtgacttaaaaagaagcttacggaacctagaacaggtgctccgcttgctaaattatcctgaagaggtggactgtgtaggtttgataaagggagacccagcagcatctttgcccatcatcagctattcttttacctcatactcaccttatgtaacagaacttataatggaatccaatgtagagctcatagcaaaaaatgacttgcgctttatagatgctgtctataagcttcttcgtgatcaatttaattataaaccaattttgacaaaaaagcagtttatccaatgtgggtttgcagaatggaaaatccaaattgtttgtgatattttgaattgtgtgatgaaaaagcacaaggaattaagcagtcttcagaagattccatcacaacaaagaaagaaaatcagttctggtaagtcagaacctcctttgggcaatgagaaaatatctgcagaggctgttggcgttgatatcagtggcaggtttatgacctcaggaaagaagaaagctgtggtgattcgtcacttgtataatgaagataatgttgacatttctgaggatacattaagtccaataacagatgttaatgaagcagttgatgtgtctgacttaaatgctactgaaataaagatgcctgaagtaaaggttcctgaaatcaaggctgagcaacaggatgtaaatgttaatcctgagattactgcactacaaactatgcttgctgaatgccaagaaaatcttaagaaactgacttcgatagagaaaaggttagactgtttggaacaaaaaatgaaaggaaaagtgatggtagatgaaaacacctggactaatcttcttagtcgtgtcactcttcttgaaacagaaatgcttttgtctaaaaagaatgatgaatttatagagtttaatgaagttagtgaagactacgcttcttgtagtgacatggaccttctgaatcctcacagaaaaagcgaagtagagaggccagcaagtattcctctgtcctctggctatagtacagcatcatcagattcaactcccagagcctctactgttaattactgtggtttgaatgagatttcagaggaaacaacaatccagaaaatggaaaggatgaaaaaaatgtttgaagaaactgcagagttactgaaatgtccaaatcactacttgtaggattttctacatgaacttttttctaggactttggttactatacatattgtatattttaagaattctttatacaattttaatatactgcaatactgcagtttttgacaatttggattccatttggtatatgaatttttgcattcattattgaataactcttttaatatttttgagcaatgattatactgctttaccttgtgtcactttttttttttttaggaaaaactcatgttccagtatatttctcttacagagtgaagtcattacagcactgtatttctgtgttgacatttgttggcagtgtgctaagtaatgttttttaaagcacaggcttgaggactatggtttacatcctgttggaaacattccaaatgggacttgtgtattatacccaggaggctctcatatataccatcttggcatctgtactgatgaataagttataatgaacagttaaaaatgctcattgaaaattaaataaaacaaaaaggcagttatttcatgcttggtcaaaaacatcaatacctttccaattaacactgagaaattaaggttaagattctccttttgtactgggaaacaggctggaggactatggtcctcaagtttagaccaagaggactatggtctcaaggttcaccatgagaaatgtgttgaacattttagtatgctctattgtataatttttttggagggggggatggagtttcgctgttgttgcccaggctggagtgcaatagcacgatcttggctcaccgcaacctctgcctaccgggttcaagtgattcttgtgcctcagcctcctgagtagctgggattataggcatgcaccaccatgcccagctaattttgtatttttattagagacagggtttctccgtgttggtcaggctggtctcaaactcctgacctcaggtgatctgcctgtcttggcctccggcgtaacactttttaagaccagtgtaacagaaagagaatgtagccattctagccaccgttaaaagatacacagtgaggtgttgtgttttgtttttttaatgatgaaaagttacacattttttggagagaaaagtcttagctgaaggtaaatcaatggaaaaatgaaatttatttttaatattactactatatgaattatctttttttaaacttgtagataaaagtgttccagtaatcagaaaatcctcaagaaaattgacttcattatttggaaggaaaattagtattttttttaatattatatggaccatctgattatattttatttattcatctatttatggtatgtatgtataattctatattacactgtcaaatataaaatattgttatatgagtagaaatcacttaaattttttttgtgtttgtgaatttgaaacagtgtaagaaatcacttttaagaaaacatttttagaattcctttgttttttttttttttctttttgaaacagggtctcactctattgcccaggctggagtgcactggcgtgatctcggctcactgcaccttctgcctaccgagttcaagcgattcttgtgcttcagcctcctgagtagctgggactataggcctgtaccgtcatgcctggctaatttttgtatttttgtagagacagggtttcaccatgttgcccagtctgttctcaaactcgtgagctaaagctactcgcccacctggatgtcccaaagtgctagattccatgggtgagtcaccatgcttggccacatttttagtattctaataaacagttggtcatcagaactttaaaatggtagcctacagaaacatacaattttgaatttaacagagtttcagtaaatatttccagaattaatgaagcatgttagctttaattttttcaattgtgagagaagtacatttataaaaattaagaggttaagaggttatagttataagggaaaaaacttctgtatcgattaactcctaaaatatcagtaccagcatggaattatagcaccaccttgtggttaacatgccagtattttaccttttgttaaaacaagtgatttcccatcaaacaggataatattttttcccttttgaaaaattcaattttaaaaagaaacatttttgaagttttcttatggaagatagaaaaaaagttaagtctctttctaccctttctttttttctttatatagtgcagatatacacacagagaagggacttaaaacatttctaatctcctagtttatatacagtgtgcaaaatataagtaagtatatattgaaaatataaaatatttcatatatgttatcaggtggaaatttagaatccaaattttcttaaactttaataacttgtctaacaactctctaatagggactaaaaatcaactcaatatatcatacatttacacttacaaagagtctttatctagacaacataatttttggaaaaataaagcaaattcaactttattggagttattggacagatcagcaaattgttattttaaaaagttttcttgtttaggcaatttggtaagtggtttctagttataaactagccactgttgattaacttgagaaggtgaagcaggggagttctgaagagattacctagagctacataaccctaagttaagtaaaattttcactttcattcttttcattctctcataaactggttgaaaaaacactgtactaccaacaaaggtgtcagttgcttgtgctgccctgtctatgttatgctctgaataggtctcggtaaagattatatggaaatactataaagaatacataaggtaaaatactagtcagaaagggttcagaagaagttagcatcaactgtatgaaaattctaggtaaagctaagtactattgagttggaaaaaagtaattctatcatgtttgcttgttttcctctactgtttttaatgtgatgttgtaatatattttaaaaataaaacttgaaaacgttggg

SEQ ID NO: 116560 - DNA, 732 bp, Homo sapiens
  Payload ID: 2736
  Gene Symbol: CEP44
  Gene Name: centrosomal protein 44kDa
  ENST ID: ENST00000503053
  CDS Start-End: 315-732
tggctgtagcgactggttgcgggaggctggactctggtgactgtgtatggttgcatatgctccgttttcctctccctgtcgtgctgggcctttgaaaccggcttctttgctggtggctgcttgctctgcttgtattactcttcaaaatatttattcactggtactgaagagagacataactttgttgtcagaaattccattatcagaggtagaaatcatgtaagagacactgaaatgttttccaaaatgtcagaaaaaggaaaggtgaaaaattagacgatttcaagaattggagctgaatctgatgttaagtaatggcaacaggtgacttaaaaagaagcttacggaacctagaacaggtgctccgcttgctaaattatcctgaagaggtggactgtgtaggtttgataaagggagacccagcagcatctttgcccatcatcagctattcttttacctcatactcaccttatgtaacagaacttataatggaatccaatgtagagctcatagcaaaaaatgacttgcgctttatagatgctgtctataagcttcttcgtgatcaatttaattataaaccaattttgacaaaaaagcagtttatccaatgtgggtttgcagaatggaaaatccaaattgtttgtgatattttgaattgtgtgatgaaaaagcacaaggaattaagcagtcttcagaagattccatcacaacaaagaaagaaaatcagttctg

SEQ ID NO: 116561 - DNA, 605 bp, Homo sapiens
  Payload ID: 2736
  Gene Symbol: CEP44
  Gene Name: centrosomal protein 44kDa
  ENST ID: ENST00000514712
  CDS Start-End: 269-605
agctttgaaggtcttgcggtggtgcgtggcgggcaggaacccacaattccaaatacaaacggtcggcgcgagaagcgcttctgggcgcaggcgcctggctgtagcgactggttgcgggaggctggactctggtgactgtgtatggttgcatatgctccgttttcctctccctgtcgtgctgggcctttgaaaccggcttctttgctggtggctgcttggtgaaaaattagacgatttcaagaattggagctgaatctgatgttaagtaatggcaacaggtgacttaaaaagaagcttacggaacctagaacaggtgctccgcttgctaaattatcctgaagaggtggactgtgtaggtttgataaagggagacccagcagcatctttgcccatcatcagctattcttttacctcatactcaccttatgtaacagaacttataatggaatccaatgtagagctcatagcaaaaaatgacttgcgctttatagatgctgtctataagcttcttcgtgatcaatttaattataaaccaattttgacaaaaaagcagtttatccaatgtgggtttgcagaatggaaaatccaaattgtttgtgatattt

SEQ ID NO: 116562 - DNA, 600 bp, Homo sapiens
  Payload ID: 2736
  Gene Symbol: CEP44
  Gene Name: centrosomal protein 44kDa
  ENST ID: ENST00000505124
  CDS Start-End: 265-600
attcgctatagattccttgtttctcacttcgtagcacgagccactctgaccatcaagatcagaaaaacttctcagctgcaagttagaagtggactggccattgaggaggctctcagcggagtcgctcttcacaggagtcttgaacgcggtgtggaatcggcagcgaggaatcctggagcacagagaagctcccagctttgaaggtcttgcggtggtgaaaaattagacgatttcaagaattggagctgaatctgatgttaagtaatggcaacaggtgacttaaaaagaagcttacggaacctagaacaggtgctccgcttgctaaattatcctgaagaggtggactgtgtaggtttgataaagggagacccagcagcatctttgcccatcatcagctattcttttacctcatactcaccttatgtaacagaacttataatggaatccaatgtagagctcatagcaaaaaatgacttgcgctttatagatgctgtctataagcttcttcgtgatcaatttaattataaaccaattttgacaaaaaagcagtttatccaatgtgggtttgcagaatggaaaatccaaattgtttgtgatatt

SEQ ID NO: 116563 - DNA, 2638 bp, Homo sapiens
  Payload ID: 2737
  Gene Symbol: CEP55
  Gene Name: centrosomal protein 55kDa
  Uniprot ID: Q53EZ4
  ENST ID: ENST00000371485
  CDS Start-End: 305-1699
cacacctgatggtgtgactcggccgacgcgagcgccgcgcttcgcttcagctgctagctggcccaagggaggcgaccgcggagggtggcgaggggcggccaggacccgcagccccggggccgggccggtccggaccgccagggagggcaggtcagtgggcagatcgcgtccgcgggattcaatctctgcccgctctgataacagtccttttccctggcgctcacttcgtgcctggcacccggctgggcgcctcaagaccgttgtctcttcgatcgcttctttggacttggcgaccatttcagagatgtcttccagaagtaccaaagatttaattaaaagtaagtggggatcgaagcctagtaactccaaatccgaaactacattagaaaaattaaagggagaaattgcacacttaaagacatcagtggatgaaatcacaagtgggaaaggaaagctgactgataaagagagacacagacttttggagaaaattcgagtccttgaggctgagaaggagaagaatgcttatcaactcacagagaaggacaaagaaatacagcgactgagagaccaactgaaggccagatatagtactaccacattgcttgaacagctggaagagacaacgagagaaggagaaaggagggagcaggtgttgaaagccttatctgaagagaaagacgtattgaaacaacagttgtctgctgcaacctcacgaattgctgaacttgaaagcaaaaccaatacactccgtttatcacagactgtggctccaaactgcttcaactcatcaataaataatattcatgaaatggaaatacagctgaaagatgctctggagaaaaatcagcagtggctcgtgtatgatcagcagcgggaagtctatgtaaaaggacttttagcaaagatctttgagttggaaaagaaaacggaaacagctgctcattcactcccacagcagacaaaaaagcctgaatcagaaggttatcttcaagaagagaagcagaaatgttacaacgatctcttggcaagtgcaaaaaaagatcttgaggttgaacgacaaaccataactcagctgagttttgaactgagtgaatttcgaagaaaatatgaagaaacccaaaaagaagttcacaatttaaatcagctgttgtattcacaaagaagggcagatgtgcaacatctggaagatgataggcataaaacagagaagatacaaaaactcagggaagagaatgatattgctaggggaaaacttgaagaagagaagaagagatccgaagagctcttatctcaggtccagtttctttacacatctctgctaaagcagcaagaagaacaaacaagggtagctctgttggaacaacagatgcaggcatgtactttagactttgaaaatgaaaaactcgaccgtcaacatgtgcagcatcaattgcatgtaattcttaaggagctccgaaaagcaagaaatcaaataacacagttggaatccttgaaacagcttcatgagtttgccatcacagagccattagtcactttccaaggagagactgaaaacagagaaaaagttgccgcctcaccaaaaagtcccactgctgcactcaatgaaagcctggtggaatgtcccaagtgcaatatacagtatccagccactgagcatcgcgatctgcttgtccatgtggaatactgttcaaagtagcaaaataagtatttgttttgatattaaaagattcaatactgtattttctgttagcttgtgggcattttgaattatatatttcacattttgcataaaactgcctatctacctttgacactccagcatgctagtgaatcatgtatcttttaggctgctgtgcatttctcttggcagtgatacctccctgacatggttcatcatcaggctgcaatgacagaatgtggtgagcagcgtctactgagactactaacattttgcactgtcaaaatacttggtgaggaaaagatagctcaggttattgctaatgggttaatgcaccagcaagcaaaatattttatgttttgggggttttgaaaaatcaaagataattaaccaaggatcttaactgtgttcgcattttttatccaagcacttagaaaacctacaatcctaattttgatgtccattgttaagaggtggtgatagatactattttttttttcatattgtatagcggttattagaaaagttggggattttcttgatctttattgctgcttaccattgaaacttaacccagctgtgttccccaactctgttctgcgcacgaaacagtatctgtttgaggcataatcttaagtggccacacacaatgttttctcttatgttatctggcagtaactgtaacttgaattacattagcacattctgcttagctaaaattgttaaaataaactttaataaacccatgtagccctctcatttgattgacagtattttagttatttttggcattcttaaagctgggcaatgtaatgatcagatctttgtttgtctgaacaggtatttttatacatgctttttgtaaaccaaaaacttttaaatttcttcaggttttctaacatgcttaccactgggctactgtaaatgagaaaagaataaaattatttaatgttttaa

SEQ ID NO: 116564 - DNA, 747 bp, Homo sapiens
  Payload ID: 2737
  Gene Symbol: CEP55
  Gene Name: centrosomal protein 55kDa
  ENST ID: ENST00000445435
  CDS Start-End: 1-626
actcatcaataaataatattcatgaaatggaaatacagctgaaagatgctctggagaaaaatcagcagtggctcgtgtatgatcagcagcgggaagtctatgtaaaaggacttttagcaaagatctttgagttggaaaagaaaacggaaacagctgctcattcactcccacagcagacaaaaaagcctgaatcagaaggttatcttcaagaagagaagcagaaatgttacaacgatctcttggcaagtgcaaaaaaagatcttgaggttgaacgacaaaccataactcagctgagttttgaactgagtgaatttcgaagaaaatatgaagaaacccaaaaagaagttcacaatttaaatcagctgttgtattcacaaagaagggcagatgtgcaacatctggaagatgataggcataaaacagagaagatacaaaaactcagggaagagaatgatattgctaggggaaaacttgaagaagagaagaagagatccgaagagctcttatctcaggtccagtttctttacacatctctgctaaagcagcaagaagaacaaacaagggtagctctgttggaacaacaggtactcattcgggttgcttctaaattcaattctgcctgttagaaaatgcagtttttcctcatgtttatgctgttctatggagaactgtttgaaagttgtgaaaagtgtctttaaaagacttcaataaaagtctttcttcttcaataaaaaagatatttcaaga

SEQ ID NO: 116565 - DNA, 3098 bp, Homo sapiens
  Payload ID: 2738
  Gene Symbol: CEP57
  Gene Name: centrosomal protein 57kDa
  Uniprot ID: Q86XR8
  ENST ID: ENST00000325486
  CDS Start-End: 239-1663
gattggctaggaaagacgtccgttaggacgtgttgccctttctgtgtaagctgtgagcgtaggcggccctgagggggtgtgttgcaggggtttccaagcccagcaccagcacccttgcccttttccatcaggggttcagcctagggtccccgctggtgggcggctcccgagtcttggagaagagcacgagaacctagaccgcccccgaagtgcggagaccccctgggcaggctgaaagatggcggcggcgtctgtctctgcggcttctggttctcacttgtcgaacagctttgctgagccatcaaggtctaatggaagcatggttcggcattcttcatctccatatgtagtatatccttcggataagcctttccttaatagtgatctacgacgctccccaagtaagcctacacttgcctatccagaaagcaacagcagagccatattttctgctcttaagaatcttcaagataagattcgacgcttggaacttgagaggattcaggcagaagaaagtgtgaaaaccttgtctagagaaacaattgaatataagaaagtactggatgaacagatacaagaaagggagaattcaaagaatgaggaatcaaagcacaatcaagaactgacatctcagttgttagctgcagaaaataaatgcaatctattagaaaaacaattggaatacatgcgaaatatgataaagcatgccgaaatggagaggacatctgtcttagagaaacaagtttccctagaaagagaacgacaacatgatcaaacacatgttcagagccaacttgaaaaattggatcttcttgaacaggagtataacaaacttaccacaatgcaggcccttgcagaaaaaaaaatgcaagagttggaagcaaaactccatgaagaagaacaggaaaggaaacgcatgcaagctaaggcagctgagttgcagactggtctagaaacaaatagacttatctttgaagataaggcaactccgtgtgttcccaatgcaagaagaattaaaaaaaagaagtcaaaaccaccagaaaagtccacaagccctagccatgccgtggtagccaatgttcagcttgtcttgcatctaatgaagcaacacagtaaagctttgtgcaatgatcgagtcatcaacagtattcctttggcaaagcaagtatcttcacgaggtggtaaaagtaagaagttgtcagtaacacctccctcctccaacggtattaatgaggagttgtcagaagtcttacagactttacaggatgaatttgggcaaatgagctttgatcaccagcagcttgcaaaacttatccaggagtcgccaaccgttgaactgaaagacaagttggagtgtgaattggaggcattagtgggaaggatggaagcaaaagccaaccaaataactaaagttcgaaaataccaagcccagctggagaaacagaagttagagaagcagaagaaggaattaaaagctaccaaaaagactcttgatgaagaaagaaacagcagcagccgttctggaatcacagggaccacaaataagaaagattttatgaaactgagacctggagaaaaaaggagaaaaaatcttcagttattgaaggacatgcaaagcatacagaattcattacaaagcagtagtttgtgttgggattactgactcataaccaggtcagaaattttattcagataatctgtacctcatcaatcagatgatgacaatttacttcccaggtctcatactcacttatgttggaattaattaatagcaggtgttaaaggacccaggcttcattacacaggcttttcatgtatgcaggatgactcaatgttaaagcatttaaatggaaaccaggggagttttaaagcccgagaaaccacacataatcttttgttgagatgagtttgctgtactgacgctgcactttgtaaacagattaccagttttttacttgtgggtgtgattttttaaaatagttctttatatataattaaaattaggtttaaattttcaaaatatgagactatgctataggcagtgcttgcttgaaaagtctcatttttaaatctccctggcatgaggtgcccacttcccctttccaaagcaaccattaaacatactttgtttctactattggtggagtttttctatatttaaaaatacatatatatttcagaggatttttattttgctttttggcatttcagactttgatcagtgttaagtgcacttgtattgctttttaatctgttaattttttaaagacccaagcagtcattttgagttatatctataaaaattataaaaggatttttgaaagtataaacaaattgtcagtgaaataaatgagattttggaataaagtgagaatgggagaagggatatgttgtgagcatataccttcacagttcttaatacctgttttgtaatcatgatattcagtcaaggcattatggtttttaatcttgaaacttagagaaccctttgaatatttgcttttactggtgtacagtatgagtggaatataaactgtacacataattatcatgttgatataaatcataatttcaactagatcaagacatgttaaccttttataaatttaaagtcaataaagcacctttttaaaggaaacactgcaactttccttaacagcctgttaataaaggctttgtgacaagctctcaaaaaatgcatttctaaataggaggacatcaatgtattgatgaagagaaaaaactagtacttagttgccacactcatgcttacatagaaagagagcccaagaatattagatttcctcatgatacaagatactacagtaacaggctttaatttaggatccttaagattttggggtattatttgtgactctcctgaaattgtaaacttgtgcttctgtgtccagttttctaatgagtaggttcgtagcttgattgaattaataattgtgagcccatagacacaagggaagtgagaaacagtgctctggtgacatgataaatatatgtgtcaaccaccatttcagctattaaaaactcctgttatctccttgtttgaatttcaggtcattaaattgtataaccatcatttg

SEQ ID NO: 116566 - DNA, 3178 bp, Homo sapiens
  Payload ID: 2738
  Gene Symbol: CEP57
  Gene Name: centrosomal protein 57kDa
  Uniprot ID: Q86XR8
  ENST ID: ENST00000325542
  CDS Start-End: 239-1741
gattggctaggaaagacgtccgttaggacgtgttgccctttctgtgtaagctgtgagcgtaggcggccctgagggggtgtgttgcaggggtttccaagcccagcaccagcacccttgcccttttccatcaggggttcagcctagggtccccgctggtgggcggctcccgagtcttggagaagagcacgagaacctagaccgcccccgaagtgcggagaccccctgggcaggctgaaagatggcggcggcgtctgtctctgcggcttctggttctcacttgtcgaacagctttgctgagccatcaaggtctaatggaagcatggttcggcattcttcatctccatatgtagtatatccttcggataagcctttccttaatagtgatctacgacgctccccaagtaagcctacacttgcctatccagaaagcaacagcagagccatattttctgctcttaagaatcttcaagataagattcgacgcttggaacttgagaggattcaggcagaagaaagtgtgaaaaccttgtctagagaaacaattgaatataagaaagtactggatgaacagatacaagaaagggagaattcaaagaatgaggaatcaaagcacaatcaagaactgacatctcagttgttagctgcagaaaataaatgcaatctattagaaaaacaattggaatacatgcgaaatatgataaagcatgccgaaatggagaggacatctgtcttagagaaacaagtttccctagaaagagaacgacaacatgatcaaacacatgttcagagccaacttgaaaaattggatcttcttgaacaggagtataacaaacttaccacaatgcaggcccttgcagaaaaaaaaatgcaagagttggaagcaaaactccatgaagaagaacaggaaaggaaacgcatgcaagctaaggcagctgagttgcagactggtctagaaacaaatagacttatctttgaagataaggcaactccgtgtgttcccaatgcaagaagaattaaaaaaaagaagtcaaaaccaccagaaaagaaaagttctaggaactattttggtgcacaaccacattatagattatgcttgggtgatatgccatttgtagctgggaagtccacaagccctagccatgccgtggtagccaatgttcagcttgtcttgcatctaatgaagcaacacagtaaagctttgtgcaatgatcgagtcatcaacagtattcctttggcaaagcaagtatcttcacgaggtggtaaaagtaagaagttgtcagtaacacctccctcctccaacggtattaatgaggagttgtcagaagtcttacagactttacaggatgaatttgggcaaatgagctttgatcaccagcagcttgcaaaacttatccaggagtcgccaaccgttgaactgaaagacaagttggagtgtgaattggaggcattagtgggaaggatggaagcaaaagccaaccaaataactaaagttcgaaaataccaagcccagctggagaaacagaagttagagaagcagaagaaggaattaaaagctaccaaaaagactcttgatgaagaaagaaacagcagcagccgttctggaatcacagggaccacaaataagaaagattttatgaaactgagacctggagaaaaaaggagaaaaaatcttcagttattgaaggacatgcaaagcatacagaattcattacaaagcagtagtttgtgttgggattactgactcataaccaggtcagaaattttattcagataatctgtacctcatcaatcagatgatgacaatttacttcccaggtctcatactcacttatgttggaattaattaatagcaggtgttaaaggacccaggcttcattacacaggcttttcatgtatgcaggatgactcaatgttaaagcatttaaatggaaaccaggggagttttaaagcccgagaaaccacacataatcttttgttgagatgagtttgctgtactgacgctgcactttgtaaacagattaccagttttttacttgtgggtgtgattttttaaaatagttctttatatataattaaaattaggtttaaattttcaaaatatgagactatgctataggcagtgcttgcttgaaaagtctcatttttaaatctccctggcatgaggtgcccacttcccctttccaaagcaaccattaaacatactttgtttctactattggtggagtttttctatatttaaaaatacatatatatttcagaggatttttattttgctttttggcatttcagactttgatcagtgttaagtgcacttgtattgctttttaatctgttaattttttaaagacccaagcagtcattttgagttatatctataaaaattataaaaggatttttgaaagtataaacaaattgtcagtgaaataaatgagattttggaataaagtgagaatgggagaagggatatgttgtgagcatataccttcacagttcttaatacctgttttgtaatcatgatattcagtcaaggcattatggtttttaatcttgaaacttagagaaccctttgaatatttgcttttactggtgtacagtatgagtggaatataaactgtacacataattatcatgttgatataaatcataatttcaactagatcaagacatgttaaccttttataaatttaaagtcaataaagcacctttttaaaggaaacactgcaactttccttaacagcctgttaataaaggctttgtgacaagctctcaaaaaatgcatttctaaataggaggacatcaatgtattgatgaagagaaaaaactagtacttagttgccacactcatgcttacatagaaagagagcccaagaatattagatttcctcatgatacaagatactacagtaacaggctttaatttaggatccttaagattttggggtattatttgtgactctcctgaaattgtaaacttgtgcttctgtgtccagttttctaatgagtaggttcgtagcttgattgaattaataattgtgagcccatagacacaagggaagtgagaaacagtgctctggtgacatgataaatatatgtgtcaaccaccatttcagctattaaaaactcctgttatctccttgtttgaatttcaggtcattaaattgtataaccatcatttgaa

SEQ ID NO: 116567 - DNA, 1739 bp, Homo sapiens
  Payload ID: 2738
  Gene Symbol: CEP57
  Gene Name: centrosomal protein 57kDa
  ENST ID: ENST00000539855
  CDS Start-End: 184-432
agcgtaggcggccctgagggggtgtgttgcaggggtttccaagcccagcaccagcacccttgcccttttccatcaggggttcagcctagggtccccgctggtgggcggctcccgagtcttggagaagagcacgagaacctagaccgcccccgaagtgcggagaccccctgggcaggctgaaagatggcggcggcgtctgtctctgcggcttctggttctcacttgtcgaacagctttgctgagccatcaaggtctaatggaagcatggttcggcattcttcatctccatatgtagtatatccttcggataagcctttccttaatagtgatctacgacgctccccaagtaagcctacacttgcctatccagaaagcaacagcagagcatccacgtttgtgtttgtatttggcagccatattttctgctcttaagaatcttcaagataagattcgacgcttggaacttgagaggattcaggcagaagaaagtgtgaaaaccttgtctagagaaacaattgaatataagaaagtactggatgaacagatacaagaaagggagaattcaaagaatgaggaatcaaagcacaatcaagaactgacatctcagttgttagctgcagaaaataaatgcaatctattagaaaaacaattggaatacatgcgaaatatgataaagcatgccgaaatggagaggacatctgtcttagagaaacaagtttccctagaaagagaacgacaacatgatcaaacacatgttcagagccaacttgaaaaattggatcttcttgaacaggagtataacaaacttaccacaatgcaggcccttgcagaaaaaaaaatgcaagagttggaagcaaaactccatgaagaagaacaggaaaggaaacgcatgcaagctaaggcagctgagttgcagactggtctagaaacaaatagacttatctttgaagataaggcaactccgtgtgttcccaatgcaagaagaattaaaaaaaagaagtcaaaaccaccagaaaagaaaagttctaggaactattttggtgcacaaccacattatagattatgcttgggtgatatgccatttgtagctgggaagtccacaagccctagccatgccgtggtagccaatgttcagcttgtcttgcatctaatgaagcaacacagtaaagctttgtgcaatgatcgagtcatcaacagtattcctttggcaaagcaagtatcttcacgaggtggtaaaagtaagaagttgtcagtaacacctccctcctccaacggtattaatgaggagttgtcagaagtcttacagactttacaggatgaatttgggcaaatgagctttgatcaccagcagcttgcaaaacttatccaggagtcgccaaccgttgaactgaaagacaagttggagtgtgaattggaggcattagtgggaaggatggaagcaaaagccaaccaaataactaaagttcgaaaataccaagcccagctggagaaacagaagttagagaagcagaagaaggaattaaaagctaccaaaaagactcttgatgaagaaagaaacagcagcagccgttctggaatcacagggaccacaaataagaaagattttatgaaactgagacctggagaaaaaaggagaaaaaatcttcagttattgaaggacatgcaaagcatacagaattcattacaaagcagtagtttgtgttgggattactgactcataaccaggtcagaaattttat

SEQ ID NO: 116568 - DNA, 851 bp, Homo sapiens
  Payload ID: 2738
  Gene Symbol: CEP57
  Gene Name: centrosomal protein 57kDa
  ENST ID: ENST00000544522
  CDS Start-End: 258-851
gtgagcgtaggcggccctgagggggtgtgttgcaggggtttccaagcccagcaccagcacccttgcccttttccatcaggggttcagcctagggtccccgctggtgggcggctcccgagtcttggagaagagcacgagaacctagaccgcccccgaagtgcggagaccccctgggcaggctgaaagatggcggcggcgtctgtctctgcggcttctggttctcacttgtcgtgtgcagactagggaaatgaagtacaatgttgaccagaattgataacagctttgctgagccatcaaggtctaatggaagcatggttcggcattcttcatctccatatgtagtatatccttcggataagcctttccttaatagtgatctacgacgctccccaagtaagcctacacttgcctatccagaaagcaacagcagagccatattttctgctcttaagaatcttcaagataagattcgacgcttggaacttgagaggattcaggcagaagaaagtgtgaaaaccttgtctagagaaacaattgaatataagaaagtactggatgaacagatacaagaaagggagaattcaaagaatgaggaatcaaagcacaatcaagaactgacatctcagttgttagctgcagaaaataaatgcaatctattagaaaaacaattggaatacatgcgaaatatgataaagcatgccgaaatggagaggacatctgtcttagagaaacaagtttccctagaaagagaacgacaacatgatcaaacacatgttcagagccaacttgaaaaattggatcttcttgaacaggagtataacaaacttaccacaatgcaggcccttgcagaa

SEQ ID NO: 116569 - DNA, 760 bp, Homo sapiens
  Payload ID: 2738
  Gene Symbol: CEP57
  Gene Name: centrosomal protein 57kDa
  ENST ID: ENST00000535224
  CDS Start-End: 1-760
acttgaaaaattggatcttcttgaacaggagtataacaaacttaccacaatgcaggcccttgcagaaaaaaaaatgcaagagttggaagcaaaactccatgaagaagaacaggaaaggaaacgcatgcaagctaaggcagctgagttgcagactggtctagaaacaaatagacttatctttgaagataaggcaactccgtgtgttcccaatgcaagaagaattaaaaaaaagaagtcaaaaccaccagaaaagtccacaagccctagccatgccgtggtagccaatgttcagcttgtcttgcatctaatgaagcaacacagtaaagctttgtgcaatgatcgagtcatcaacagtattcctttggcaaagcaagtatcttcacgaggtggtaaaagtaagaagttgtcagtaacacctccctcctccaacggtattaatgaggagttgtcagaagtcttacagactttacaggatgaatttgggcaaatgagctttgatcaccagcagcttgcaaaacttatccaggagtcgccaaccgttgaactgaaagacaagttggagtgtgaattggaggcattagtgggaaggatggaagcaaaagccaaccaaataactaaagttcgaaaataccaagcccagctggagaaacagaagttagagaagcagaagaaggaattaaaagctaccaaaaagactcttgatgaagaaagaaacagcagcagccgttctggaatcacagggaccacaaataagaaagat

SEQ ID NO: 116570 - DNA, 1936 bp, Homo sapiens
  Payload ID: 2738
  Gene Symbol: CEP57
  Gene Name: centrosomal protein 57kDa
  ENST ID: ENST00000540830
  CDS Start-End: 167-382
gggggtgtgttgcaggggtttccaagcccagcaccagcacccttgcccttttccatcaggggttcagcctagggtccccgctggtgggcggctcccgagtcttggagaagagcacgagaacctagaccgcccccgaagtgcggagaccccctgggcaggctgaaagatggcggcggcgtctgtctctgcggcttctggttctcacttgtcgaacagctttgctgagccatcaaggtctaatggaagcatggttcggcattcttcatctccatatgtagtatatccttcggataagcctttccttaatagtgatctacgacgctccccaagtaagcctacacttgcctatccagaaagcaacagcagagaatcttcaagataagattcgacgcttggaacttgagaggattcaggcagaagaaagtgtgaaaaccttgtctagagaaacaattgaatataagaaagtactggatgaacagatacaagaaagggagaattcaaagaatgaggaatcaaagcacaatcaagaactgacatctcagttgttagctgcagaaaataaatgcaatctattagaaaaacaattggaatacatgcgaaatatgataaagcatgccgaaatggagaggacatctgtcttagagaaacaagtttccctagaaagagaacgacaacatgatcaaacacatgttcagagccaacttgaaaaattggatcttcttgaacaggagtataacaaacttaccacaatgcaggcccttgcagaaaaaaaaatgcaagagttggaagcaaaactccatgaagaagaacaggaaaggaaacgcatgcaagctaaggcagctgagttgcagactggtctagaaacaaatagacttatctttgaagataaggcaactccgtgtgttcccaatgcaagaagaattaaaaaaaagaagtcaaaaccaccagaaaagaaaagttctaggaactattttggtgcacaaccacattatagattatgcttgggtgatatgccatttgtagctgggaagtccacaagccctagccatgccgtggtagccaatgttcagcttgtcttgcatctaatgaagcaacacagtaaagctttgtgcaatgatcgagtcatcaacagtattcctttggcaaagcaagtatcttcacgaggtggtaaaagtaagaagttgtcagtaacacctccctcctccaacggtattaatgaggagttgtcagaagtcttacagactttacaggatgaatttgggcaaatgagctttgatcaccagcagcttgcaaaacttatccaggagtcgccaaccgttgaactgaaagacaagttggagtgtgaattggaggcattagtgggaaggatggaagcaaaagccaaccaaataactaaagttcgaaaataccaagcccagctggagaaacagaagttagagaagcagaagaaggaattaaaagctaccaaaaagactcttgatgaagaaagaaacagcagcagccgttctggaatcacagggaccacaaataagaaagattttatgaaactgagacctggagaaaaaaggagaaaaaatcttcagttattgaaggacatgcaaagcatacagaattcattacaaagcagtagtttgtgttgggattactgactcataaccaggtcagaaattttattcagataatctgtacctcatcaatcagatgatgacaatttacttcccaggtctcatactcacttatgttggaattaattaatagcaggtgttaaaggacccaggcttcattacacaggcttttcatgtatgcaggatgactcaatgttaaagcatttaaatggaaaccaggggagttttaaagcccgagaaaccacacataatcttttgttgagatgagtttgctgtactgacgctgcactttgtaaacagattaccagttt

SEQ ID NO: 116571 - DNA, 1647 bp, Homo sapiens
  Payload ID: 2738
  Gene Symbol: CEP57
  Gene Name: centrosomal protein 57kDa
  ENST ID: ENST00000537677
  CDS Start-End: 215-1636
aaaggtctgcggtcgcggctatttctaacagccagtcccaggtttggctgagagcgccccaatccaattgagcaaatgttcgcgaaaggctcgttctctgccgcaactttttttcccttgctttctattggactaaatcgttaagtccctcctaatcctatttgttattggccaaaagaacagctttgctgagccatcaaggtctaatggaagcatggttcggcattcttcatctccatatgtagtatatccttcggataagcctttccttaatagtgatctacgacgctccccaagtaagcctacacttgcctatccagaaagcaacagcagagccatattttctgctcttaagaatcttcaagataagattcgacgcttggaacttgagaggattcaggcagaagaaagtgtgaaaaccttgtctagagaaacaattgaatataagaaagtactggatgaacagatacaagaaagggagaattcaaagaatgaggaatcaaagcacaatcaagaactgacatctcagttgttagctgcagaaaataaatgcaatctattagaaaaacaattggaatacatgcgaaatatgataaagcatgccgaaatggagaggacatctgtcttagagaaacaagtttccctagaaagagaacgacaacatgatcaaacacatgttcagagccaacttgaaaaattggatcttcttgaacaggagtataacaaacttaccacaatgcaggcccttgcagaaaaaaaaatgcaagagttggaagcaaaactccatgaagaagaacaggaaaggaaacgcatgcaagctaaggcagctgagttgcagactggtctagaaacaaatagacttatctttgaagataaggcaactccgtgtgttcccaatgcaagaagaattaaaaaaaagaagtcaaaaccaccagaaaagaaaagttctaggaactattttggtgcacaaccacattatagattatgcttgggtgatatgccatttgtagctgggaagtccacaagccctagccatgccgtggtagccaatgttcagcttgtcttgcatctaatgaagcaacacagtaaagctttgtgcaatgatcgagtcatcaacagtattcctttggcaaagcaagtatcttcacgaggtggtaaaagtaagaagttgtcagtaacacctccctcctccaacggtattaatgaggagttgtcagaagtcttacagactttacaggatgaatttgggcaaatgagctttgatcaccagcagcttgcaaaacttatccaggagtcgccaaccgttgaactgaaagacaagttggagtgtgaattggaggcattagtgggaaggatggaagcaaaagccaaccaaataactaaagttcgaaaataccaagcccagctggagaaacagaagttagagaagcagaagaaggaattaaaagctaccaaaaagactcttgatgaagaaagaaacagcagcagccgttctggaatcacagggaccacaaataagaaagattttatgaaactgagacctggagaaaaaaggagaaaaaatcttcagttattgaaggacatgcaaagcatacagaattcattacaaagcagtagtttgtgttgggattactgactcataaccag

SEQ ID NO: 116572 - DNA, 446 bp, Homo sapiens
  Payload ID: 2738
  Gene Symbol: CEP57
  Gene Name: centrosomal protein 57kDa
  ENST ID: ENST00000535497
  CDS Start-End: 169-294
gagggggtgtgttgcaggggtttccaagcccagcaccagcacccttgcccttttccatcaggggttcagcctagggtccccgctggtgggcggctcccgagtcttggagaagagcacgagaacctagaccgcccccgaagtgcggagaccccctgggcaggctgaaagatggcggcggcgtctgtctctgcggcttctggttctcacttgtcgccatattttctgctcttaagaatcttcaagataagattcgacgcttggaacttgagaggattcaggcagaagaaagtgtgaaaaccttgtctagagaaacaattgaatataagaaagtactggatgaacagatacaagaaagggagaattcaaagaatgaggaatcaaagcacaatcaagaactgacatctcagttgttagctgcagaaaataaatgcaatctattagaaaaa

SEQ ID NO: 116573 - DNA, 2911 bp, Homo sapiens
  Payload ID: 2738
  Gene Symbol: CEP57
  Gene Name: centrosomal protein 57kDa
  Uniprot ID: Q86XR8
  ENST ID: ENST00000541150
  CDS Start-End: 1-1476
atgttgaccagaattgataacagctttgctgagccatcaaggtctaatggaagcatggttcggcattcttcatctccatatgtagtatatccttcggataagcctttccttaatagtgatctacgacgctccccaagtaagcctacacttgcctatccagaaagcaacagcagagccatattttctgctcttaagaatcttcaagataagattcgacgcttggaacttgagaggattcaggcagaagaaagtgtgaaaaccttgtctagagaaacaattgaatataagaaagtactggatgaacagatacaagaaagggagaattcaaagaatgaggaatcaaagcacaatcaagaactgacatctcagttgttagctgcagaaaataaatgcaatctattagaaaaacaattggaatacatgcgaaatatgataaagcatgccgaaatggagaggacatctgtcttagagaaacaagtttccctagaaagagaacgacaacatgatcaaacacatgttcagagccaacttgaaaaattggatcttcttgaacaggagtataacaaacttaccacaatgcaggcccttgcagaaaaaaaaatgcaagagttggaagcaaaactccatgaagaagaacaggaaaggaaacgcatgcaagctaaggcagctgagttgcagactggtctagaaacaaatagacttatctttgaagataaggcaactccgtgtgttcccaatgcaagaagaattaaaaaaaagaagtcaaaaccaccagaaaagaaaagttctaggaactattttggtgcacaaccacattatagattatgcttgggtgatatgccatttgtagctgggaagtccacaagccctagccatgccgtggtagccaatgttcagcttgtcttgcatctaatgaagcaacacagtaaagctttgtgcaatgatcgagtcatcaacagtattcctttggcaaagcaagtatcttcacgaggtggtaaaagtaagaagttgtcagtaacacctccctcctccaacggtattaatgaggagttgtcagaagtcttacagactttacaggatgaatttgggcaaatgagctttgatcaccagcagcttgcaaaacttatccaggagtcgccaaccgttgaactgaaagacaagttggagtgtgaattggaggcattagtgggaaggatggaagcaaaagccaaccaaataactaaagttcgaaaataccaagcccagctggagaaacagaagttagagaagcagaagaaggaattaaaagctaccaaaaagactcttgatgaagaaagaaacagcagcagccgttctggaatcacagggaccacaaataagaaagattttatgaaactgagacctggagaaaaaaggagaaaaaatcttcagttattgaaggacatgcaaagcatacagaattcattacaaagcagtagtttgtgttgggattactgactcataaccaggtcagaaattttattcagataatctgtacctcatcaatcagatgatgacaatttacttcccaggtctcatactcacttatgttggaattaattaatagcaggtgttaaaggacccaggcttcattacacaggcttttcatgtatgcaggatgactcaatgttaaagcatttaaatggaaaccaggggagttttaaagcccgagaaaccacacataatcttttgttgagatgagtttgctgtactgacgctgcactttgtaaacagattaccagttttttacttgtgggtgtgattttttaaaatagttctttatatataattaaaattaggtttaaattttcaaaatatgagactatgctataggcagtgcttgcttgaaaagtctcatttttaaatctccctggcatgaggtgcccacttcccctttccaaagcaaccattaaacatactttgtttctactattggtggagtttttctatatttaaaaatacatatatatttcagaggatttttattttgctttttggcatttcagactttgatcagtgttaagtgcacttgtattgctttttaatctgttaattttttaaagacccaagcagtcattttgagttatatctataaaaattataaaaggatttttgaaagtataaacaaattgtcagtgaaataaatgagattttggaataaagtgagaatgggagaagggatatgttgtgagcatataccttcacagttcttaatacctgttttgtaatcatgatattcagtcaaggcattatggtttttaatcttgaaacttagagaaccctttgaatatttgcttttactggtgtacagtatgagtggaatataaactgtacacataattatcatgttgatataaatcataatttcaactagatcaagacatgttaaccttttataaatttaaagtcaataaagcacctttttaaaggaaacactgcaactttccttaacagcctgttaataaaggctttgtgacaagctctcaaaaaatgcatttctaaataggaggacatcaatgtattgatgaagagaaaaaactagtacttagttgccacactcatgcttacatagaaagagagcccaagaatattagatttcctcatgatacaagatactacagtaacaggctttaatttaggatccttaagattttggggtattatttgtgactctcctgaaattgtaaacttgtgcttctgtgtccagttttctaatgagtaggttcgtagcttgattgaattaataattgtgagcccatagacacaagggaagtgagaaacagtgctctggtgacatgataaatatatgtgtcaaccaccatttcagctattaaaaactcctgttatctccttgtttgaatttcaggtcattaaattgtataaccatcatttg

SEQ ID NO: 116574 - DNA, 590 bp, Homo sapiens
  Payload ID: 2738
  Gene Symbol: CEP57
  Gene Name: centrosomal protein 57kDa
  ENST ID: ENST00000538095
  CDS Start-End: 202-360
ctttctgtgtaagctgtgagcgtaggcggccctgagggggtgtgttgcaggggtttccaagcccagcaccagcacccttgcccttttccatcaggggttcagcctagggtccccgctggtgggcggctcccgagtcttggagaagagcacgagaacctagaccgcccccgaagtgcggagaccccctgggcaggctgaaagatggcggcggcgtctgtctctgcggcttctggttctcacttgtcgaccagaggctgggctctggattacagctcagtagtgggtcatggaatatgtactgtgactcaacccgtatcattttcaagaaagaagagagagaaaatcgttcagcaaatataactgaatgaattatctggttcacagaaacagctttgctgagccatcaaggtctaatggaagcatggttcggcattcttcatctccatatgtagtatatccttcggataagcctttccttaatagtgatctacgacgctccccaagtaagcctacacttgcctatccagaaagcaacagcagagccatattttctgctcttaagaatcttcaagataagattcgacgcttgg

SEQ ID NO: 116575 - DNA, 404 bp, Homo sapiens
  Payload ID: 2738
  Gene Symbol: CEP57
  Gene Name: centrosomal protein 57kDa
  ENST ID: ENST00000537093
  CDS Start-End: 1-404
acacatgttcagagccaacttgaaaaattggatcttcttgaacaggagtataacaaacttaccacaatgcaggcccttgcagaaaaaaaaatgcaagagttggaagcaaaactccatgaagaagaacaggaaaggaaacgcatgcaagctaaggcagctgagtccacaagccctagccatgccgtggtagccaatgttcagcttgtcttgcatctaatgaagcaacacagtaaagctttgtgcaatgatcgagtcatcaacagtattcctttggcaaagcaagtatcttcacgaggtggtaaaagtaagaagttgtcagtaacacctccctcctccaacggtattaatgaggagttgtcagaagtcttacagactttacaggatgaatttgggcaaatgagctt

SEQ ID NO: 116576 - DNA, 2084 bp, Homo sapiens
  Payload ID: 2738
  Gene Symbol: CEP57
  Gene Name: centrosomal protein 57kDa
  Uniprot ID: Q86XR8
  ENST ID: ENST00000538658
  CDS Start-End: 41-853
ccgcccccgaagtgcggagaccccctgggcaggctgaaagatggcggcggcgtctgtctctgcggcttctggttctcacttgtcgaacagctttgctgagccatcaaggtctaatggaagcatggttcggcattcttcatctccatatgtagtatatccttcggataagcctttccttaatagtgatctacgacgctccccaagtaagcctacacttgcctatccagaaagcaacagcagagccatattttctgctcttaagaatcttcaagataagattcgacgcttggaacttgagaggattcaggcagaagaaagtgtgaaaaccttgtctagagaaacaattgaatataagaaagtactggatgaacagatacaagaaagggagaattcaaagaatgaggaatcaaagcacaatcaagaactgacatctcagttgttagctgcagaaaataaatgcaatctattagaaaaacaattggaatacatgcgaaatatgataaagcatgccgaaatggagaggacatctgtcttagagaaacaagtttccctagaaagagaacgacaacatgatcaaacacatgttcagagccaacttgaaaaattggatcttcttgaacaggagtataacaaacttaccacaatgcaggcccttgcagaaaaaaaaatgcaagagttggaagcaaaactccatgaagaagaacaggaaaggaaacgcatgcaagctaaggcagctgagttgcagactggtctagaaacaaatagacttatctttgaagataaggcaactccgtgtgttcccaatgcaagaagaattaaaaaaaagaagtcaaaaccaccagaaaaggtgtgaagacagaaccaaatcaggcaaaatgctgattacttggtatagtttatgtcaaaacacccataaactgtgtggtgtactacaaccttgagagagtaaatctttcattctcaatttcttcattcagaaggtggagataagtaatacctactcctaaatttttatcctgatagtgagaaaatatataagcattttggaactacagaacaccatacaaaattagcattattagtactgcattatcttgtgctcttacaatgttttgtgtatatgtatactgattttctacttagaatgtaactgttgttttgtcaagtgcttttttccccccagcctttcctaggctaggatatatgctaacaagtactattaggagctggcttgtgatcataatgccaactatagataaggcaagtagtagcctagtagttaactgaagtttcaagttagtcatgtatagtcagtttttattatcatgtgaataaaataaaattgttttccttttcttttcattcagaaaagttctaggaactattttggtgcacaaccacattatagattatgcttgggtgatatgccatttgtagctgggaaggtgagttggtcaaactccggattctttttatacaacattgatccctgaattaagtccctgcatctgcaagtatgtctacaaatggaaggaacatttttctgtgcctttaccagtgtgtggatcacagtgatgtgaaaatgagatgtagggaggtttttggggattagggaagcaaggaagagatggggaggataccttaaagtagataaagtatatgtggaaaggaagtgataaaacagagaccctaagttgaagaaggtgttgtttcagataggggtcaaggaaataagaaatagtatgtttgtagcattggatttttagtatcaatcctgttgagttacatttagatataggtagatattcgaataagcacgtagcacattctgcttgtcctcacatccagatcatttctaggactaattctccaagaagcagtcatacgtacacttgaatcttcagtttcttcagcacttgaatgtaaagctgtattgtcatatatcaagtactgagtgaagtgcctaaaactgtgctagttgacactactttataagctgtttgtgttgctggtggttttatatttagattccaactagattgttattctggcatcttgggaagtaaatgttcttctgaattttg

SEQ ID NO: 116577 - DNA, 870 bp, Homo sapiens
  Payload ID: 2738
  Gene Symbol: CEP57
  Gene Name: centrosomal protein 57kDa
  ENST ID: ENST00000541365
  CDS Start-End: 254-870
ggcggccctgagggggtgtgttgcaggggtttccaagcccagcaccagcacccttgcccttttccatcaggggttcagcctagggtccccgctggtgggcggctcccgagtcttggagaagagcacgagaacctagaccgcccccgaagtgcggagaccccctgggcaggctgaaagatggcggcggcgtctgtctctgcggcttctggttctcacttgtcgctttgctgagccatcaaggtctaatggaagcatggttcggcattcttcatctccatatgtagtatatccttcggataagcctttccttaatagtgatctacgacgctccccaagtaagcctacacttgcctatccagaaagcaacagcagagccatattttctgctcttaagaatcttcaagataagattcgacgcttggaacttgagaggattcaggcagaagaaagtgtgaaaaccttgtctagagaaacaattgaatataagaaagtactggatgaacagatacaagaaagggagaattcaaagaatgaggaatcaaagcacaatcaagaactgacatctcagttgttagctgcagaaaataaatgcaatctattagaaaaacaattggaatacatgcgaaatatgataaagcatgccgaaatggagaggacatctgtcttagagaaacaagtttccctagaaagagaacgacaacatgatcaaacacatgttcagagccaacttgaaaaattggatcttcttgaacaggagtataacaaacttaccacaatgcaggcccttgcagaaaaaaaaatgcaagagttggaagcaaaactccatgaagaagaacaggaaaggaaacgcatgcaagctaaggcagctga

SEQ ID NO: 116578 - DNA, 2515 bp, Homo sapiens
  Payload ID: 2739
  Gene Symbol: CEP57L1
  Gene Name: centrosomal protein 57kDa-like 1
  Uniprot ID: Q8IYX8
  ENST ID: ENST00000359793
  CDS Start-End: 193-1575
aaaatggatcctcacttcttcacttggatataataatatagactgccgacattctgggaactgatcagtcttccagcttccagtgtggtgccctccctcaattgtgctgagtgtcccccaatccagagatattctgtaatttcttcctcagaaagaaacaaaacaaaattctgatcttcccagatgaagataatggattctgaattaatgcatagtatagtaggaagctatcataaacctccagaaagagtatttgttccctcattcacccagaatgaaccatctcagaattgccatcctgcaaacttagaagttacctctcctaagatacttcatagcccaaatagccaagctcttattttagccttaaaaactcttcaggaaaaaattcatcgtttagagctggagagaacacaagctgaagataacctgaacattctttccagagaagcagcacagtataagaaggccttagagaatgaaacaaatgagagaaatctggcacaccaggagctgataaagcagaaaaaagatataagtatacagttaagctcagcccagtctcgttgtactcttctagagaagcaactagaatatacaaagagaatggttctcaacgtagagcgagaaaagaacatgatcctagaacaacaggcccagcttcagagggaaaaagaacaagatcagatgaagctgtatgcaaaacttgaaaagcttgatgtcttagaaaaagagtgtttcagacttacaacaactcagaaaactgctgaggacaagattaaacatttagaagaaaaacttaaggaagaagaacatcagcgtaagctatttcaagacaaagcttctgagcttcaaactggacttgaaatcagtaaaattataatgtcttcagtttcaaatctaaagcactccaaggaaaagaagaaatcttcaaagaaaactaaatgtataaagagacgaccaccttggcaaatttgttcaaagtttggagcactgccttttgtggctgaaaagatgaggcaacatcgtgacccacatatccttcagaaaccttttaacgtgactgagactagatgtctccccaagccttctagaacaacttcctggtgtaaagctattcctcctgactcagaaaagtccatttccatttgtgacaatttatctgaacttttgatggcaatgcaagatgagctggaccaaatgagcatggagcaccaagaactactgaaacaaatgaaggaaactgaaagtcattcagtctgtgacgacatagaatgtgaactagagtgtttactcaagaaaatggaaattaaaggagaacaaatctccaaactgaagaagcatcaagacagtgtctgtaaactgcagcaaaaagttcaaaactcaaagatgagtgaagcttcaggtattcagcaagaagacagctaccctaaaggatcaaagaacataaaaaatagccccagaaaatgtttgactgacactaacctttttcagaaaaacagcagctttcatccaatacgagttcataatcttcaaatgaaattgagaagagatgatatcatgtgggaacagtaacaaaacagcaaaactgtcaccttaatgaactttgtcagtgagaccttgaattgtctaaagtggttttaatttaatataactttgtgacattttgaatcatgtttctagtttctataaaacatgaagttgcagtatttaaaaattaatgcctaatgacctggtgggttccaaataataaattaattgcttttttatttttcttattgattgaagcccgtaacctcatcttgtcttagaaacattgttggctttgcagatatcttaagctaaatttaagaaattgtactagattgacaatattcaaaattgagttaaatccaagctacaagtaccattcattccacttttcatttagtaggtttggaaccttaaaaaccaatgttcaatgaacagagttcagaaagatcatttagctttcctggtgccttctttctattttgttttagagctgtgaaatgtttttctcttttggaaaaggaaaaacttaatagttacacagttttgtgaagaagcctttaatccaagttttatgagacagtaggaacctatagctacttaatttttaggagacagtaattcagttgcagaagctttcctctgctattcccattctcttttacaaaactagttttttttaaaaaatcaatgatcaattttatcttactactttataacttttgctgacttttattctttgcattgtatgtaatgtccatcagtataaattgagactgtgaatttctaggacccacaaaagtggtattttttttttgtacaagaaagtatagaggaagaggaagctgggcattaaattacctcatccagcagaaattcacggtagtatggtatatttttattttttatattttaaaatcaataatgtcaaatgtcattgtgtatgcatgctttataataaatttacacttgatcatttttctgg

SEQ ID NO: 116579 - DNA, 1649 bp, Homo sapiens
  Payload ID: 2739
  Gene Symbol: CEP57L1
  Gene Name: centrosomal protein 57kDa-like 1
  Uniprot ID: Q8IYX8
  ENST ID: ENST00000368968
  CDS Start-End: 60-1235
ggtgcccgcgaaccaacggttagcggtggcaggggctgactgagagcgtctgcttgataatggattctgaattaatgcatagtatagtaggaagctatcataaacctccagaaagagtatttgttccctcattcacccagaatgaaccatctcagaattgccatcctgcaaacttagaagttacctctcctaagatacttcatagcccaaatagccaagctcttattttagccttaaaaactcttcaggaaaaaattcatcgtttagagctggagagaacacaagctgaagataacctgaacattctttccagagaagcagcacagtataagaaggccttagagaatgaaacaaatgagagaaatctggcacaccaggagctgataaagcagaaaaaagatataagtatacagttaagctcagcccagtctcgttgtactcttctagagaagcaactagaatatacaaagagaatggttctcaacgtagagcgagaaaagaacatgatcctagaacaacaggcccagcttcagagggaaaaagaacaagatcagatgaagctgtatgcaaaacttgaaaagcttgatgtcttagaaaaagagtgtttcagacttacaacaactcagaaaactgctgaggacaagattaaacatttagaagaaaaacttaaggaagaagaacatcagcgtaagctatttcaagacaaagcttctgagcttcaaactggacttgaaatcagtaaaattataatgtcttcagtttcaaatctaaagcactccaaggaaaagaagaaatcttcaaagaaaactaaatgtataaagagacgaccaccttggcaaatttgttcaaagtttggagcactgccttttgtggctgaaaagatgaggcaacatcgtgacccacatatccttcagaaaccttttaacgtgactgagactagatgtctccccaagccttctagaacaacttcctggtgtaaagctattcctcctgactcagaaaagtccatttccatttgtgacaatttatctgaacttttgatggcaatgcaagatgagctggaccaaatgagcatggagcaccaagaactactgaaacaaatgaaggaaactgaaagtcattcagtctgtgacgacatagaatgtgaactagagtgtttactcaagaaaatggaaattaaaggagaacaaatctccaaactgaagaagcatcaagacagtgtaagaaggctttagtctgtaaactgcagcaaaaagttcaaaactcaaagatgagtgaagcttcaggtattcagcaagaagacagctaccctaaaggatcaaagaacataaaaaatagccccagaaaatgtttgactgacactaacctttttcagaaaaacagcagctttcatccaatacgagttcataatcttcaaatgaaattgagaagagatgatatcatgtgggaacagtaacaaaacagcaaaactgtcaccttaatgaactttgtcagtgagaccttgaattgtctaaagtggttttaatttaatataactttgtgacattttgaatcatgtttctagtttctataaaacatgaagttgcagtatttaaaaattaatgcctaatgacctggtgggttccaaataataaattaattgctttttt

SEQ ID NO: 116580 - DNA, 1680 bp, Homo sapiens
  Payload ID: 2739
  Gene Symbol: CEP57L1
  Gene Name: centrosomal protein 57kDa-like 1
  ENST ID: ENST00000368970
  CDS Start-End: 51-1484
gaaccaacggttagcggtggcaggggctgactgagagcgtctgcttgataatggattctgaattaatgcatagtatagtaggaagctatcataaacctccagaaagagtatttgttccctcattcacccagaatgaaccatctcagaattgccatcctgcaaacttagaagttacctctcctaagatacttcatagcccaaatagccaagctcttattttagccttaaaaactcttcaggaaaaaattcatcgtttagagctggagagaacacaagctgaagataacctgaacattctttccagagaagcagcacagtataagaaggccttagagaatgaaacaaatgagagaaatctggcacaccaggagctgataaagcagaaaaaagatataagtatacagttaagctcagcccagtctcgttgtactcttctagagaagcaactagaatatacaaagagaatggttctcaacgtagagcgagaaaagaacatgatcctagaacaacaggcccagcttcagagggaaaaagaacaagatcagatgaagctgtatgcaaaacttgaaaagcttgatgtcttagaaaaagagtgtttcagacttacaacaactcagaaaactgctgaggacaagattaaacatttagaagaaaaacttaaggaagaagaacatcagcgtaagctatttcaagacaaagcttctgagcttcaaactggacttgaaatcagtaaaattataatgtcttcagtttcaaatctaaagcactccaaggaaaagaagaaatcttcaaagaaaactaaatgtataaagagacgaccaccttggcaaatttgttcaaagtttggagcactgccttttgtggctgaaaagtctaccagtgcaagctgttctgtgaatgcaagtatgcaaaactttttgcagatgaggcaacatcgtgacccacatatccttcagaaaccttttaacgtgactgagactagatgtctccccaagccttctagaacaacttcctggtgtaaagctattcctcctgactcagaaaagtccatttccatttgtgacaatttatctgaacttttgatggcaatgcaagatgagctggaccaaatgagcatggagcaccaagaactactgaaacaaatgaaggaaactgaaagtcattcagtctgtgacgacatagaatgtgaactagagtgtttactcaagaaaatggaaattaaaggagaacaaatctccaaactgaagaagcatcaagacagtgtctgtaaactgcagcaaaaagttcaaaactcaaagatgagtgaagcttcaggtattcagcaagaagacagctaccctaaaggatcaaagaacataaaaaatagccccagaaaatgtttgactgacactaacctttttcagaaaaacagcagctttcatccaatacgagttcataatcttcaaatgaaattgagaagagatgatatcatgtgggaacagtaacaaaacagcaaaactgtcaccttaatgaactttgtcagtgagaccttgaattgtctaaagtggttttaatttaatataactttgtgacattttgaatcatgtttctagtttctataaaacatgaagttgcagtatttaaaaattaatgcctaatgacctggtgggttccaaataataaattaattgcttttttatt

SEQ ID NO: 116581 - DNA, 1947 bp, Homo sapiens
  Payload ID: 2739
  Gene Symbol: CEP57L1
  Gene Name: centrosomal protein 57kDa-like 1
  ENST ID: ENST00000407272
  CDS Start-End: 422-1177
gggccaagcgcccccggaggcgctaagcttgcgccctgaggcggtttccgttcccggacgtttggactctgtcctggagaaggggaaggaaaaagtaagacgtagaagtacactgagacttcgtcacacataaaacaagcacgacaaagaaagagggcgcgaagggactcctggaagaaattgagtctacatttaagatcaccctaaaagtagtgacggcctcttcattactccaaaccccagatttaagtcggtaggacgtcttcgcgttgacttgtggggaatgtagtttcgatgctgccggcgcgttttgtttgcgacagaaactacaacccccaggggccaccgcgacgttgcctgtgggtgcccgcgaaccaacggttagcggtggcaggggctgactgagagcgtctgcttgataatggattctgaattaatgcatagtatagtaggaagctatcataaacctccagaaagagtatttgttccctcattcacccagaatgaaccatctcagaattgccatcctgcaaacttagaagttacctctcctaagatacttcatagcccaaatagccaagctcttattttagccttaaaaactcttcaggaaaaaattcatcgtttagagctggagagaacacaagctgaagataacctgaacattctttccagagaagcagcacagtataagaaggccttagagaatgaaacaaatgagagaaatctggcacaccaggagctgataaagcagaaaaaagatataagtatacagttaagctcagcccagtctcgttgtactcttctagagaagcaactagaatatacaaagagaatggttctcaacgtagagcgagaaaagaacatgatcctagaacaacaggcccagcttcagagggaaaaagaacaagatcagatgaagctgtatgcaaaacttgaaaagcttgatgtcttagaaaaagagtgtttcagacttacaacaactcagaaaactgctgaggacaagattaaacatttagaagaaaaacttaaggaagaagaacatcagcgtaagctatttcaagacaaagcttctgagcttcaaactggacttgaaatcagtaaaattataatgtcttcagtttcaaatctaaagcactccaaggaaaagaagaaatcttcaaaggtgtgcatataaaattttttcccaaacaaaaatactgctaatacttattcaggttaaaaaaagtagcagcagtcatgtacaaaatttagctctgagtttgcttgacaaccaaagcaaaaaggaacatataatggacagtatagctatctttgtgaaataacaggaagcactccagtttttctagaaagattaacatttttctagttttaaacttctggagaaacatattttgtgatagtttataaaagaggcagtaaacaacacagtagatactgacaacataataaatcctgaaagcagttttatgtaatatatagacaataaaaaataaggtttttcttatagacctgttaagtctgtaaagtcatttatatagggaatttattgttatatgtaatttctatgcttatttcttgtgaatttgcccaaaagtaaggattggagagttagtactttatagaccaatattttgtttagatggattgatgttttgaatgtatgctattcaagtaacccttcttaattatatataatggtatgaaaaaagtttttaatcccttttaatcttatgattgtggaattatggttttgatggccattattactatttattcagatatgaatggagtgagtgttctctgtgccatttgttgtgggggacaggagatgctatttgggaattctggccactgccatatgcttagcttgtggataaaataatggagagaacagtaaacttaactttggctactcttttattacgtaaataaaaattaatgttc

SEQ ID NO: 116582 - DNA, 819 bp, Homo sapiens
  Payload ID: 2739
  Gene Symbol: CEP57L1
  Gene Name: centrosomal protein 57kDa-like 1
  ENST ID: ENST00000524064
  CDS Start-End: 235-819
ggggccaccgcgacgttgcctgtgggtgcccgcgaaccaacggttagcggtggcaggggctgactgagagcgtctgcttgtgcctggtacctagtacaaacttaataaatgtgtgacgcaagaataaaggaatgaatgaatggaagaatgatataatgccacagaactttcaaagatgggactgtctagttgcaaaaacaagctcagggatcccactgattctactttacgataatggattctgaattaatgcatagtatagtaggaagctatcataaacctccagaaagagtatttgttccctcattcacccagaatgaaccatctcagaattgccatcctgcaaacttagaagttacctctcctaagatacttcatagcccaaatagccaagctcttattttagccttaaaaactcttcaggaaaaaattcatcgtttagagctggagagaacacaagctgaagataacctgaacattctttccagagaagcagcacagtataagaaggccttagagaatgaaacaaatgagagaaatctggcacaccaggagctgataaagcagaaaaaagatataagtatacagttaagctcagcccagtctcgttgtactcttctagagaagcaactagaatatacaaagagaatggttctcaacgtagagcgagaaaagaacatgatcctagaacaacaggcccagcttcagagggaaaaagaacaagatcagatgaagctgtatgcaaaacttgaaaagcttgatgtcttagaaaaagagtgtttcagacttacaacaactcagaaaactgctgaggacaag

SEQ ID NO: 116583 - DNA, 2771 bp, Homo sapiens
  Payload ID: 2739
  Gene Symbol: CEP57L1
  Gene Name: centrosomal protein 57kDa-like 1
  Uniprot ID: Q8IYX8
  ENST ID: ENST00000517392
  CDS Start-End: 427-1809
gaactgggccaagcgcccccggaggcgctaagcttgcgccctgaggcggtttccgttcccggacgtttggactctgtcctggagaaggggaaggaaaaagtaagacgtagaagtacactgagacttcgtcacacataaaacaagcacgacaaagaaagagggcgcgaagggactcctggaagaaattgagtctacatttaagatcaccctaaaagtagtgacggcctcttcattactccaaaccccagatttaagtcggtaggacgtcttcgcgttgacttgtggggaatgtagtttcgatgctgccggcgcgttttgtttgcgacagaaactacaacccccaggggccaccgcgacgttgcctgtgggtgcccgcgaaccaacggttagcggtggcaggggctgactgagagcgtctgcttgataatggattctgaattaatgcatagtatagtaggaagctatcataaacctccagaaagagtatttgttccctcattcacccagaatgaaccatctcagaattgccatcctgcaaacttagaagttacctctcctaagatacttcatagcccaaatagccaagctcttattttagccttaaaaactcttcaggaaaaaattcatcgtttagagctggagagaacacaagctgaagataacctgaacattctttccagagaagcagcacagtataagaaggccttagagaatgaaacaaatgagagaaatctggcacaccaggagctgataaagcagaaaaaagatataagtatacagttaagctcagcccagtctcgttgtactcttctagagaagcaactagaatatacaaagagaatggttctcaacgtagagcgagaaaagaacatgatcctagaacaacaggcccagcttcagagggaaaaagaacaagatcagatgaagctgtatgcaaaacttgaaaagcttgatgtcttagaaaaagagtgtttcagacttacaacaactcagaaaactgctgaggacaagattaaacatttagaagaaaaacttaaggaagaagaacatcagcgtaagctatttcaagacaaagcttctgagcttcaaactggacttgaaatcagtaaaattataatgtcttcagtttcaaatctaaagcactccaaggaaaagaagaaatcttcaaagaaaactaaatgtataaagagacgaccaccttggcaaatttgttcaaagtttggagcactgccttttgtggctgaaaagatgaggcaacatcgtgacccacatatccttcagaaaccttttaacgtgactgagactagatgtctccccaagccttctagaacaacttcctggtgtaaagctattcctcctgactcagaaaagtccatttccatttgtgacaatttatctgaacttttgatggcaatgcaagatgagctggaccaaatgagcatggagcaccaagaactactgaaacaaatgaaggaaactgaaagtcattcagtctgtgacgacatagaatgtgaactagagtgtttactcaagaaaatggaaattaaaggagaacaaatctccaaactgaagaagcatcaagacagtgtctgtaaactgcagcaaaaagttcaaaactcaaagatgagtgaagcttcaggtattcagcaagaagacagctaccctaaaggatcaaagaacataaaaaatagccccagaaaatgtttgactgacactaacctttttcagaaaaacagcagctttcatccaatacgagttcataatcttcaaatgaaattgagaagagatgatatcatgtgggaacagtaacaaaacagcaaaactgtcaccttaatgaactttgtcagtgagaccttgaattgtctaaagtggttttaatttaatataactttgtgacattttgaatcatgtttctagtttctataaaacatgaagttgcagtatttaaaaattaatgcctaatgacctggtgggttccaaataataaattaattgcttttttatttttcttattgattgaagcccgtaacctcatcttgtcttagaaacattgttggctttgcagatatcttaagctaaatttaagaaattgtactagattgacaatattcaaaattgagttaaatccaagctacaagtaccattcattccacttttcatttagtaggtttggaaccttaaaaaccaatgttcaatgaacagagttcagaaagatcatttagctttcctggtgccttctttctattttgttttagagctgtgaaatgtttttctcttttggaaaaggaaaaacttaatagttacacagttttgtgaagaagcctttaatccaagttttatgagacagtaggaacctatagctacttaatttttaggagacagtaattcagttgcagaagctttcctctgctattcccattctcttttacaaaactagttttttttaaaaaatcaatgatcaattttatcttactactttataacttttgctgacttttattctttgcattgtatgtaatgtccatcagtataaattgagactgtgaatttctaggacccacaaaagtggtattttttttttgtacaagaaagtatagaggaagaggaagctgggcattaaattacctcatccagcagaaattcacggtagtatggtatatttttattttttatattttaaaatcaataatgtcaaatgtcattgtgtatgcatgctttataataaatttacacttgatcatttttctggaagcctatgggaactagtacaa

SEQ ID NO: 116584 - DNA, 2259 bp, Homo sapiens
  Payload ID: 2739
  Gene Symbol: CEP57L1
  Gene Name: centrosomal protein 57kDa-like 1
  ENST ID: ENST00000521522
  CDS Start-End: 99-1322
aaactacaacccccaggggccaccgcgacgttgcctgtgggtgcccgcgaaccaacggttagcggtggcaggggctgactgagagcgtctgcttgataatggattctgaattaatgcatagtatagtaggaagctatcataaacctccagaaagagtatttgttccctcattcacccagaatgaaccatctcagaattgccatcctgcaaacttagaagttacctctcctaagatacttcatagcccaaatagccaagctcttattttagccttaaaaactcttcaggaaaaaattcatcgtttagagctggagagaacacaagctgaagataacctgaacattctttccagagaagcagcacagtataagaaggccttagagaatgaaacaaatgagagaaatctggcacaccaggagctgataaagcagaaaaaagatataagtatacagttaagctcagcccagtctcgttgtactcttctagagaagcaactagaatatacaaagagaatggttctcaacgtagagcgagaaaagaacatgatcctagaacaacaggcccagcttcagagggaaaaagaacaagatcagatgaagctgtatgcaaaacttgaaaagcttgatgtcttagaaaaagagtgtttcagacttacaacaactcagaaaactgctgaggacaagattaaacatttagaagaaaaacttaaggaagaagaacatcagcgtaagctatttcaagacaaagcttctgagaaaactaaatgtataaagagacgaccaccttggcaaatttgttcaaagtttggagcactgccttttgtggctgaaaagccttctagaacaacttcctggtgtaaagctattcctcctgactcagaaaagtccatttccatttgtgacaatttatctgaacttttgatggcaatgcaagatgagctggaccaaatgagcatggagcaccaagaactactgaaacaaatgaaggaaactgaaagtcattcagtctgtgacgacatagaatgtgaactagagtgtttactcaagaaaatggaaattaaaggagaacaaatctccaaactgaagaagcatcaagacagtgtctgtaaactgcagcaaaaagttcaaaactcaaagatgagtgaagcttcaggtattcagcaagaagacagctaccctaaaggatcaaagaacataaaaaatagccccagaaaatgtttgactgacactaacctttttcagaaaaacagcagctttcatccaatacgagttcataatcttcaaatgaaattgagaagagatgatatcatgtgggaacagtaacaaaacagcaaaactgtcaccttaatgaactttgtcagtgagaccttgaattgtctaaagtggttttaatttaatataactttgtgacattttgaatcatgtttctagtttctataaaacatgaagttgcagtatttaaaaattaatgcctaatgacctggtgggttccaaataataaattaattgcttttttatttttcttattgattgaagcccgtaacctcatcttgtcttagaaacattgttggctttgcagatatcttaagctaaatttaagaaattgtactagattgacaatattcaaaattgagttaaatccaagctacaagtaccattcattccacttttcatttagtaggtttggaaccttaaaaaccaatgttcaatgaacagagttcagaaagatcatttagctttcctggtgccttctttctattttgttttagagctgtgaaatgtttttctcttttggaaaaggaaaaacttaatagttacacagttttgtgaagaagcctttaatccaagttttatgagacagtaggaacctatagctacttaatttttaggagacagtaattcagttgcagaagctttcctctgctattcccattctcttttacaaaactagttttttttaaaaaatcaatgatcaattttatcttactactttataacttttgctgacttttattctttgcattgtatgtaatgtccatcagtataaattgagactgtgaatttctaggacccacaaaagtggtattttttttttgtacaagaaagtatagaggaagaggaagctgggcattaaattacctcatccagcagaaattcacggtagtatggtatatttttattttttatattttaaaatcaataatgtcaaatgtcattgtgtatgcatgctttataataaatttacacttgatcatttttc

SEQ ID NO: 116585 - DNA, 769 bp, Homo sapiens
  Payload ID: 2739
  Gene Symbol: CEP57L1
  Gene Name: centrosomal protein 57kDa-like 1
  ENST ID: ENST00000522608
  CDS Start-End: 431-769
gcgacgttgcctgtgggtgcccgcgaaccaacggttagcggtggcaggggctgactgagagcgtctgcttgattcaggttatgctttctggccagaatactgcataggtgatgttgcgtccttctccaggtttcatatccagaggcacatggtggccttctacctctcacagacagagtctttctctgtcacccaggctggagtacagtggcacgatctcggctccctgcaacgtccgcctcccgagttcaagtgattctcctgcctcagccacccgagtagctgggtctacaggtgtgcgccaccatgcctggctaatttttgtatttttaagagagacggggtttcaccatgctggccaggctggtctcgaactcctgacctcgtgatccgcctgcctcagcccctcaaagtgctaggattagagataatggattctgaattaatgcatagtatagtaggaagctatcataaacctccagaaagagtatttgttccctcattcacccagaatgaaccatctcagaattgccatcctgcaaacttagaagttacctctcctaagatacttcatagcccaaatagccaagctcttattttagccttaaaaactcttcaggaaaaaattcatcgtttagagctggagagaacacaagctgaagataacctgaacattctttccagagaagcagcacagtataagaaggccttagagaatgaaacaaatgagagaaatctggcacaccaggagctgataaagcagaaaaaa

SEQ ID NO: 116586 - DNA, 1120 bp, Homo sapiens
  Payload ID: 2739
  Gene Symbol: CEP57L1
  Gene Name: centrosomal protein 57kDa-like 1
  ENST ID: ENST00000520610
  CDS Start-End: 312-701
gggtgcccgcgaaccaacggttagcggtggcaggggctgactgagagcgtctgcttgctcttattttagccttaaaaactcttcaggaaaaaattcatcgtttagagctggagagaacacaagctgaagataacctgaacattctttccagagaagcagcacagtataagaaggccttagagaatgaaacaaatgagagaaatctggcacaccaggagctgataaagcagaaaaaagatataagtatacagttaagctcagcccagtctcgttgtactcttctagagaagcaactagaatatacaaagagaatggttctcaacgtagagcgagaaaagaacatgatcctagaacaacaggcccagcttcagagggaaaaagaacaagatcagatgaagctgtatgcaaaacttgaaaagcttgatgtcttagaaaaagagtgtttcagacttacaacaactcagaaaactgctgaggacaagattaaacatttagaagaaaaacttaaggaagaagaacatcagcgtaagctatttcaagacaaagcttctgagcttcaaactggacttgaaatcagtaaaattataatgtcttcagtttcaaatctaaagcactccaaggaaaagaagaaatcttcaaaggataaatgcgtaagagaacaattgttgggtcatgtgataagtacatttttagttttataagaaactgccaaactgtcttccaaaatggctgtaccattttgtattcccaccaacaatataaaactaaatgtataaagagacgaccaccttggcaaatttgttcaaagtttggagcactgccttttgtggctgaaaagatgaggcaacatcgtgacccacatatccttcagaaaccttttaacgtgactgagactagatgtctccccaagccttctagaacaacttcctggtgtaaagctattcctcctgactcagaaaagtccatttccatttgtgacaatttatctgaacttttgatggcaatgcaagatgagctggaccaaatgagcatggagcaccaagaactactgaaacaaatgaaggaaactgaaagtcattcagtctgtgacgacatagaatgtgaactagagtgtttactc

SEQ ID NO: 116587 - DNA, 553 bp, Homo sapiens
  Payload ID: 2739
  Gene Symbol: CEP57L1
  Gene Name: centrosomal protein 57kDa-like 1
  ENST ID: ENST00000523174
  CDS Start-End: 1-519
cttcaaactggacttgaaatcagtaaaattataatgtcttcagtttcaaatctaaagcactccaaggaaaagaagaaatcttcaaagaaaactaaatgtataaagagacgaccaccttggcaaatttgttcaaagtttggagcactgccttttgtggctgaaaagatgaggcaacatcgtgacccacatatccttcagaaaccttttaacgtgactgagactagatgtctccccaagccttctagaacaacttcctggtgtaaagctattcctcctgactcagaaaagtccatttccatttgtgacaatttatctgaacttttgatggcaatgcaagatgagctggaccaaatgagcatggagcaccaagaactactgaaacaaatgaaggaaactgaaagtcattcagtctgtgacgacatagaatgtgaactagagtgtttactcaagaaaatggaaattaaaggagaacaaatctccaaactgaagaagcatcaagacagtgtaagaaggctttagtaagagattttaataaaaacacaaaatatctgga

SEQ ID NO: 116588 - DNA, 575 bp, Homo sapiens
  Payload ID: 2739
  Gene Symbol: CEP57L1
  Gene Name: centrosomal protein 57kDa-like 1
  ENST ID: ENST00000522461
  CDS Start-End: 490-575
cttgcgccctgaggcggtttccgttcccggacgtttggactctgtcctggagaaggggaaggaaaaagtaagacgtagaagtacactgagacttcgtcacacataaaacaagcacgacaaagaaagagggcgcgaagggactcctggaagaaattgagtctacatttaagatcaccctaaaagtagtgacggcctcttcattactccaaaccccagatttaagtcggtaggacgtcttcgcgttgacttgtggggaatgtagtttcgatgctgccggcgcgttttgtttgcgacagaaactacaacccccaggggccaccgcgacgttgcctgtgggtgcccgcgaaccaacggttagcggtggcaggggctgactgagagcgtctgcttgtgcctggtacctagtacaaacttaataaatgtgtgacgcaagaataaaggaatgaatgaatggaagaatgatataatgccacagaactttcaaagataatggattctgaattaatgcatagtatagtaggaagctatcataaacctccagaaagagtatttgttccctcattcacccagaatga

SEQ ID NO: 116589 - DNA, 965 bp, Homo sapiens
  Payload ID: 2739
  Gene Symbol: CEP57L1
  Gene Name: centrosomal protein 57kDa-like 1
  ENST ID: ENST00000519286
  CDS Start-End: 348-965
aagcgcccccggaggcgctaagcttgcgccctgaggcggtttccgttcccggacgtttggactctgtcctggagaaggggaaggaaaaaacagagtctttctctgtcacccaggctggagtacagtggcacgatctcggctccctgcaacgtccgcctcccgagttcaagtgattctcctgcctcagccacccgagtagctgggtctacaggtgtgcgccaccatgcctggctaatttttgtatttttaagagagacggggtttcaccatgctggccaggctggtctcgaactcctgacctcgtgatccgcctgcctcagcccctcaaagtgctaggattagagataatggattctgaattaatgcatagtatagtaggaagctatcataaacctccagaaagagtatttgttccctcattcacccagaatgaaccatctcagaattgccatcctgcaaacttagaagttacctctcctaagatacttcatagcccaaatagccaagctcttattttagccttaaaaactcttcaggaaaaaattcatcgtttagagctggagagaacacaagctgaagataacctgaacattctttccagagaagcagcacagtataagaaggccttagagaatgaaacaaatgagagaaatctggcacaccaggagctgataaagcagaaaaaagatataagtatacagttaagctcagcccagtctcgttgtactcttctagagaagcaactagaatatacaaagagaatggttctcaacgtagagcgagaaaagaacatgatcctagaacaacaggcccagcttcagagggaaaaagaacaagatcagatgaagctgtatgcaaaacttgaaaagcttgatgtcttagaaaaagagtgtttcagacttacaacaactcagaaaactgctgaggacaagattaaacatttagaagaaaaacttaaggaagaa

SEQ ID NO: 116590 - DNA, 861 bp, Homo sapiens
  Payload ID: 2739
  Gene Symbol: CEP57L1
  Gene Name: centrosomal protein 57kDa-like 1
  ENST ID: ENST00000522490
  CDS Start-End: 363-861
cccgcgaaccaacggttagcggtggcaggggctgactgagagcgtctgcttgatgggactgtctagttgcaaaaacaagctcagggatcccactgattctactttacgctcttattttagccttaaaaactcttcaggaaaaaattcatcgtttagagctggagagaacacaagctgaagataacctgaacattctttccagagaagcagcacagtataagaaggccttagagaatgaaacaaatgagagaaatctggcacaccaggagctgataaagcagaaaaaagatataagtatacagttaagctcagcccagtctcgttgtactcttctagagaagcaactagaatatacaaagagaatggttctcaacgtagagcgagaaaagaacatgatcctagaacaacaggcccagcttcagagggaaaaagaacaagatcagatgaagctgtatgcaaaacttgaaaagcttgatgtcttagaaaaagagtgtttcagacttacaacaactcagaaaactgctgaggacaagattaaacatttagaagaaaaacttaaggaagaagaacatcagcgtaagctatttcaagacaaagcttctgagcttcaaactggacttgaaatcagtaaaattataatgtcttcagtttcaaatctaaagcactccaaggaaaagaagaaatcttcaaagaaaactaaatgtataaagagacgaccaccttggcaaatttgttcaaagtttggagcactgccttttgtggctgaaaaggtgagaggggataaaatgaagatagtcgttcaaaaaaactcctgttttgttatgaggcaacatcgtgacccacatatccttcagaaacctt

SEQ ID NO: 116591 - DNA, 2055 bp, Homo sapiens
  Payload ID: 2739
  Gene Symbol: CEP57L1
  Gene Name: centrosomal protein 57kDa-like 1
  ENST ID: ENST00000520883
  CDS Start-End: 36-1118
ggtggcaggggctgactgagagcgtctgcttgataatggattctgaattaatgcatagtatagtaggaagctatcataaacctccagaaagagtatttgttccctcattcacccagaatgaaccatctcagaattgccatcctgcaaacttagaagttacctctcctaagatacttcatagcccaaatagccaagagaagcaactagaatatacaaagagaatggttctcaacgtagagcgagaaaagaacatgatcctagaacaacaggcccagcttcagagggaaaaagaacaagatcagatgaagctgtatgcaaaacttgaaaagcttgatgtcttagaaaaagagtgtttcagacttacaacaactcagaaaactgctgaggacaagattaaacatttagaagaaaaacttaaggaagaagaacatcagcgtaagctatttcaagacaaagcttctgagcttcaaactggacttgaaatcagtaaaattataatgtcttcagtttcaaatctaaagcactccaaggaaaagaagaaatcttcaaagaaaactaaatgtataaagagacgaccaccttggcaaatttgttcaaagtttggagcactgccttttgtggctgaaaagccttctagaacaacttcctggtgtaaagctattcctcctgactcagaaaagtccatttccatttgtgacaatttatctgaacttttgatggcaatgcaagatgagctggaccaaatgagcatggagcaccaagaactactgaaacaaatgaaggaaactgaaagtcattcagtctgtgacgacatagaatgtgaactagagtgtttactcaagaaaatggaaattaaaggagaacaaatctccaaactgaagaagcatcaagacagtgtctgtaaactgcagcaaaaagttcaaaactcaaagatgagtgaagcttcaggtattcagcaagaagacagctaccctaaaggatcaaagaacataaaaaatagccccagaaaatgtttgactgacactaacctttttcagaaaaacagcagctttcatccaatacgagttcataatcttcaaatgaaattgagaagagatgatatcatgtgggaacagtaacaaaacagcaaaactgtcaccttaatgaactttgtcagtgagaccttgaattgtctaaagtggttttaatttaatataactttgtgacattttgaatcatgtttctagtttctataaaacatgaagttgcagtatttaaaaattaatgcctaatgacctggtgggttccaaataataaattaattgcttttttatttttcttattgattgaagcccgtaacctcatcttgtcttagaaacattgttggctttgcagatatcttaagctaaatttaagaaattgtactagattgacaatattcaaaattgagttaaatccaagctacaagtaccattcattccacttttcatttagtaggtttggaaccttaaaaaccaatgttcaatgaacagagttcagaaagatcatttagctttcctggtgccttctttctattttgttttagagctgtgaaatgtttttctcttttggaaaaggaaaaacttaatagttacacagttttgtgaagaagcctttaatccaagttttatgagacagtaggaacctatagctacttaatttttaggagacagtaattcagttgcagaagctttcctctgctattcccattctcttttacaaaactagttttttttaaaaaatcaatgatcaattttatcttactactttataacttttgctgacttttattctttgcattgtatgtaatgtccatcagtataaattgagactgtgaatttctaggacccacaaaagtggtattttttttttgtacaagaaagtatagaggaagaggaagctgggcattaaattacctcatccagcagaaattcacggtagtatggtatatttttattttttatattttaaaatcaataatgtcaaatgtcattgtgtatgcatgctttataataaatttacacttgatcatttttc

SEQ ID NO: 116592 - DNA, 866 bp, Homo sapiens
  Payload ID: 2739
  Gene Symbol: CEP57L1
  Gene Name: centrosomal protein 57kDa-like 1
  ENST ID: ENST00000523209
  CDS Start-End: 560-866
cgcgaaccaacggttagcggtggcaggggctgactgagagcgtctgcttgacagagtctttctctgtcacccaggctggagtacagtggcacgatctcggctccctgcaacgtccgcctcccgagttcaagtgattctcctgcctcagccacccgagtagctgggtctacaggtgtgcgccaccatgcctggctaatttttgtatttttaagagagacggggtttcaccatgctggccaggctggtctcgaactcctgacctcgtgatccgcctgcctcagcccctcaaagtgctaggattagagctcttattttagccttaaaaactcttcaggaaaaaattcatcgtttagagctggagagaacacaagctgaagataacctgaacattctttccagagaagcagcacagtataagaaggccttagagaatgaaacaaatgagagaaatctggcacaccaggagctgataaagcagaaaaaagatataagtatacagttaagctcagcccagtctcgttgtactcttctagagaagcaactagaatatacaaagagaatggttctcaacgtagagcgagaaaagaacatgatcctagaacaacaggcccagcttcagagggaaaaagaacaagatcagatgaagctgtatgcaaaacttgaaaagcttgatgtcttagaaaaagagtgtttcagacttacaacaactcagaaaactgctgaggacaagattaaacatttagaagaaaaacttaaggaagaagaacatcagcgtaagctatttcaagacaaagcttctgagcttcaaactggacttgaaatcagtaaaattataatgtcttcagtttcaaatctaaagcactcca

SEQ ID NO: 116593 - DNA, 813 bp, Homo sapiens
  Payload ID: 2739
  Gene Symbol: CEP57L1
  Gene Name: centrosomal protein 57kDa-like 1
  ENST ID: ENST00000518853
  CDS Start-End: 124-813
gcgccctgaggcggtttccgttcccggacgtttggactctgtcctggagaaggggaaggaaaaaatgggactgtctagttgcaaaaacaagctcagggatcccactgattctactttacgataatggattctgaattaatgcatagtatagtaggaagctatcataaacctccagaaagagtatttgttccctcattcacccagaatgaaccatctcagaattgccatcctgcaaacttagaagttacctctcctaagatacttcatagcccaaatagccaagctcttattttagccttaaaaactcttcaggaaaaaattcatcgtttagagctggagagaacacaagctgaagataacctgaacattctttccagagaagcagcacagtataagaaggccttagagaatgaaacaaatgagagaaatctggcacaccaggagctgataaagcagaaaaaagatataagtatacagttaagctcagcccagtctcgttgtactcttctagagaagcaactagaatatacaaagagaatggttctcaacgtagagcgagaaaagaacatgatcctagaacaacaggcccagcttcagagggaaaaagaacaagatcagatgaagctgtatgcaaaacttgaaaagcttgatgtcttagaaaaagagtgtttcagacttacaacaactcagaaaactgctgaggacaagattaaacatttagaagaaaaacttaaggaagaagaacatcagcgtaagctatttcaagacaaagcttctgagcttcaaactggacttgaaatcagtaaaattata

SEQ ID NO: 116594 - DNA, 812 bp, Homo sapiens
  Payload ID: 2739
  Gene Symbol: CEP57L1
  Gene Name: centrosomal protein 57kDa-like 1
  ENST ID: ENST00000518329
  CDS Start-End: 653-812
aagcttgcgccctgaggcggtttccgttcccggacgtttggactctgtcctggagaaggggaaggaaaaagtaagacgtagaagtacactgagacttcgtcacacataaaacaagcacgacaaagaaagagggcgcgaagggactcctggaagaaattgagtctacatttaagatcaccctaaaagtagtgacggcctcttcattactccaaaccccagatttaagtcggtaggacgtcttcgcgttgacttgtggggaatgtagtttcgatgctgccggcgcgttttgtttgcgacagaaactacaacccccaggggccaccgcgacgttgcctgtgggtgcccgcgaaccaacggttagcggtggcaggggctgactgagagcgtctgcttgacagagtctttctctgtcacccaggctggagtacagtggcacgatctcggctccctgcaacgtccgcctcccgagttcaagtgattctcctgcctcagccacccgagtagctgggtctacaggtgtgcgccaccatgcctggctaatttttgtatttttaagagagacggggtttcaccatgctggccaggctggtctcgaactcctgacctcgtgatccgcctgcctcagcccctcaaagtgctaggattagagataatggattctgaattaatgcatagtatagtaggaagctatcataaacctccagaaagagtatttgttccctcattcacccagaatgaaccatctcagaattgccatcctgcaaacttagaagttacctctcctaagatacttcatagcccaaatagccaag

SEQ ID NO: 116595 - DNA, 2522 bp, Homo sapiens
  Payload ID: 2739
  Gene Symbol: CEP57L1
  Gene Name: centrosomal protein 57kDa-like 1
  ENST ID: ENST00000523787
  CDS Start-End: 198-1589
agagcgtctgcttgaaaatggatcctcacttcttcacttggatataataatatagactgccgacattctgggaactgatcagtcttccagcttccagtgtggtgccctccctcaattgtgctgagtgtcccccaatccagagatattctgtaatttcttcctcagaaagaaacaaaacaaaattctgatcttcccagatgaagataatggattctgaattaatgcatagtatagtaggaagctatcataaacctccagaaagagtatttgttccctcattcacccagaatgaaccatctcagaattgccatcctgcaaacttagaagttacctctcctaagatacttcatagcccaaatagccaagctcttattttagccttaaaaactcttcaggaaaaaattcatcgtttagagctggagagaacacaagctgaagataacctgaacattctttccagagaagcagcacagtataagaaggccttagagaatgaaacaaatgagagaaatctggcacaccaggagctgataaagcagaaaaaagatataagtatacagttaagctcagcccagtctcgttgtactcttctagagaagcaactagaatatacaaagagaatggttctcaacgtagagcgagaaaagaacatgatcctagaacaacaggcccagcttcagagggaaaaagaacaagatcagatgaagctgtatgcaaaacttgaaaagcttgatgtcttagaaaaagagtgtttcagacttacaacaactcagaaaactgctgaggacaagattaaacatttagaagaaaaacttaaggaagaagaacatcagcgtaagctatttcaagacaaagcttctgagcttcaaactggacttgaaatcagtaaaattataatgtcttcagtttcaaatctaaagcactccaaggaaaagaagaaatcttcaaagaaaactaaatgtataaagagacgaccaccttggcaaatttgttcaaagtttggagcactgccttttgtggctgaaaagatgaggcaacatcgtgacccacatatccttcagaaaccttttaacgtgactgagactagatgtctccccaagccttctagaacaacttcctggtgtaaagctattcctcctgactcagaaaagtccatttccatttgtgacaatttatctgaacttttgatggcaatgcaagatgagctggaccaaatgagcatggagcaccaagaactactgaaacaaatgaaggaaactgaaagtcattcagtctgtgacgacatagaatgtgaactagagtgtttactcaagaaaatggaaattaaaggagaacaaatctccaaactgaagaagcatcaagacagtgtctgtaaactgcagcaaaaagttcaaaactcaaagatgagtgaagcttcaggtattcagcaagaagacagctaccctaaaggatcaaagaacataaaaaatagccccagaaaatgtttgactgacactaacctttttcagaaaaacagcagctttcatccaatacgagttcataatcttcaaatgaaattgagaagagatgatatcatgtgggaacagtaacaaaacagcaaaactgtcaccttaatgaactttgtcagtgagaccttgaattgtctaaagtggttttaatttaatataactttgtgacattttgaatcatgtttctagtttctataaaacatgaagttgcagtatttaaaaattaatgcctaatgacctggtgggttccaaataataaattaattgcttttttatttttcttattgattgaagcccgtaacctcatcttgtcttagaaacattgttggctttgcagatatcttaagctaaatttaagaaattgtactagattgacaatattcaaaattgagttaaatccaagctacaagtaccattcattccacttttcatttagtaggtttggaaccttaaaaaccaatgttcaatgaacagagttcagaaagatcatttagctttcctggtgccttctttctattttgttttagagctgtgaaatgtttttctcttttggaaaaggaaaaacttaatagttacacagttttgtgaagaagcctttaatccaagttttatgagacagtaggaacctatagctacttaatttttaggagacagtaattcagttgcagaagctttcctctgctattcccattctcttttacaaaactagttttttttaaaaaatcaatgatcaattttatcttactactttataacttttgctgacttttattctttgcattgtatgtaatgtccatcagtataaattgagactgtgaatttctaggacccacaaaagtggtattttttttttgtacaagaaagtatagaggaagaggaagctgggcattaaattacctcatccagcagaaattcacggtagtatggtatatttttattttttatattttaaaatcaataatgtcaaatgtcattgtgtatgcatgctttataataaatttacacttgatcatt

SEQ ID NO: 116596 - DNA, 3832 bp, Homo sapiens
  Payload ID: 2739
  Gene Symbol: CEP57L1
  Gene Name: centrosomal protein 57kDa-like 1
  ENST ID: ENST00000521277
  CDS Start-End: 526-1233
cgcggctgccagccactgccggctgctacgcatgcgtgactgcgaactgggccaagcgcccccggaggcgctaagcttgcgccctgaggcggtttccgttcccggacgtttggactctgtcctggagaaggggaaggaaaaagtaagacgtagaagtacactgagacttcgtcacacataaaacaagcacgacaaagaaagagggcgcgaagggactcctggaagaaattgagtctacatttaagatcaccctaaaagtagtgacggcctcttcattactccaaaccccagatttaagtcggtaggacgtcttcgcgttgacttgtggggaatgtagtttcgatgctgccggcgcgttttgtttgcgacagaaactacaacccccaggggccaccgcgacgttgcctgtgggtgcccgcgaaccaacggttagcggtggcaggggctgactgagagcgtctgcttgatgggactgtctagttgcaaaaacaagctcagggatcccactgattctactttacgataatggattctgaattaatgcatagtatagtaggaagctatcataaacctccagaaagagtatttgttccctcattcacccagaatgaaccatctcagaattgccatcctgcaaacttagaagttacctctcctaagatacttcatagcccaaatagccaagctcttattttagccttaaaaactcttcaggaaaaaattcatcgtttagagctggagagaacacaagctgaagataacctgaacattctttccagagaagcagcacagtataagaaggccttagagaatgaaacaaatgagagaaatctggcacaccaggagctgataaagcagaaaaaagagaagcaactagaatatacaaagagaatggttctcaacgtagagcgagaaaagaacatgatcctagaacaacaggcccagcttcagagggaaaaagaacaagatcagatgaagctgtatgcaaaacttgaaaagcttgatgtcttagaaaaagagtgtttcagacttacaacaactcagaaaactgctgaggacaagattaaacatttagaagaaaaacttaaggaagaagaacatcagcgtaagctatttcaagacaaagcttctgagcttcaaactggacttgaaatcagtaaaattataatgtcttcagtttcaaatctaaagcactccaaggaaaagaagaaatcttcaaaggtgtgcatataaaattttttcccaaacaaaaatactgctaatacttatttatataacctcttaatccttatacctacccctttccaaaaaggatttgaagatataaaataaaagacatgcaataatgcgtgtcaagtaatggatgatggtttggggtataaggacagaaaatttcataagattcaggttaaaaaaagtagcagcagtcatgtacaaaatttagctctgagtttgcttgacaaccaaagcaaaaaggaacatataatggacagtatagctatctttgtgaaataacaggaagcactccagtttttctagaaagattaacatttttctagttttaaacttctggagaaacatattttgtgatagtttataaaagaggcagtaaacaacacagtagatactgacaacataataaatcctgaaagcagttttatgtaatatatagacaataaaaaataaggtttttcttatagacctgttaagtctgtaaagtcatttatatagggaatttattgttatatgtaatttctatgcttatttcttgtgaatttgcccaaaagtaaggattggagagttagtactttatagaccaatattttgtttagatggattgatgttttgaatgtatgctattcaagtaacccttcttaattatatataatggtatgaaaaaagtttttaatcccttttaatcttatgattgtggaattatggttttgatggccattattactatttattcagatatgaatggagtgagtgttctctgtgccatttgttgtgggggacaggagatgctatttgggaattctggccactgccatatgcttagcttgtggataaaataatggagagaacagtaaacttaactttggctactcttttattacgtaaataaaaattaatgttcaatacttgggctgtatttttcataattttttcattttaaagaattttcaaactacaataacgaacaatatttccccaatatgacttattttggctctttcctttcctaaatatttgttttgtgtcttatttgtgcaatgagattcacagctacaaagccaaatagaaaaatcactataagtaatttgccagtggaacacatactgcccagtatgtatgttttatggcatcctttctctgatgggttaatggaacttttttcagtttacctatttattataaaaatagtgaaggtacagggagaagataaaagaaatgaaggaaagaaaaggtaactactggaagagaagagagtaattaacagcagaatcattttatggaagtacttagttcaaatcccaagttcacggggtatgcaaataatgatgtctctttttaaagatggagggagtgctaaagttgctgaaagtaggatcagatttcaagaagcctctatgagagatctgcttcccatcacactgtttctccatgtcctggacatagttcattcaactcttacatcttgatgtacatagactggtatctctaggtgataaaaagataagacaggaatttgtgagaaacagataaatatataagtataaaacagtataatagaagattaatagaggtttaaacaaagtgttgtggtgctgtgtagacaaaggaatatgtgaaaggtaattcaagagcaatattaaaggaagccttgaagaattaaatattgacagactgagatgaggaaaaatgtgttatagtctgagggaattgttggtttttccagggacctataagtaatagtccagtagtgggggtgagatgggatcataatgaaagttaaaatggaaaatatagcttggggtgagctaatggctgaccttgaatgccatgttaagagtttgaacttttattctataaacaggaactattgaaggcttctgagaagagtagggacatgattagagttgtaattttagatggtaactgacagcagtaggagagttttacaagagagaaatcagatgtgtagatttttgagagaatcatatgtgtagattcatgtcaccatcacaataatcaagatacagaactcttccaccactaaaaaactccttcatgcaatccctctatagctacacatccccttccctgaacattggcaacctctaatctgttcaccatctgtgtattttattatttcaagaatgttatataaatggaattatgcagtatgtaactttttgtggttggcttttttcccttgaggtccgtccaagttgtcgtatgtatcagtacatcctttttatttctgtgtggtattccgcattatggatgtaccacaatttaaccattcatctgttaaaggatatctggagccgggcgcggtggctcacacctgtaatcccaacagtttgggaggccaaggcgagtggatcatttgaggtcaggagttcaagaccagcctggccaatatggtgaaaccccatctgtactaaaaatacaaaaattagccaggcagtagtggcacacacctgtaatcccagctactcgggagacaaaagcaggagaatcgcttgagcctgggagacggaggttgcggtgagccaagatcataccactgcaccccagtctgggtgacagaatgagaccctatctc

SEQ ID NO: 116597 - DNA, 598 bp, Homo sapiens
  Payload ID: 2739
  Gene Symbol: CEP57L1
  Gene Name: centrosomal protein 57kDa-like 1
  ENST ID: ENST00000519407
  CDS Start-End: 362-598
gttgcctgtgggtgcccgcgaaccaacggttagcggtggcaggggctgactgagagcgtctgcttggttgggaaaccaattagaaaggagtgttctgctagaaacagctcttattttagccttaaaaactcttcaggaaaaaattcatcgtttagagctggagagaacacaagctgaagataacctgaacattctttccagagaagcagcacagtataagaaggccttagagaatgaaacaaatgagagaaatctggcacaccaggagctgataaagcagaaaaaagatataagtatacagttaagctcagcccagtctcgttgtactcttctagagaagcaactagaatatacaaagagaatggttctcaacgtagagcgagaaaagaacatgatcctagaacaacaggcccagcttcagagggaaaaagaacaagatcagatgaagctgtatgcaaaacttgaaaagcttgatgtcttagaaaaagagtgtttcagacttacaacaactcagaaaactgctgaggacaagattaaacatttagaagaaaaacttaaggaagaagaacatcagcgtaagctatttcaagacaaagct

SEQ ID NO: 116598 - DNA, 908 bp, Homo sapiens
  Payload ID: 2739
  Gene Symbol: CEP57L1
  Gene Name: centrosomal protein 57kDa-like 1
  ENST ID: ENST00000519095
  CDS Start-End: 68-823
tgcctgtgggtgcccgcgaaccaacggttagcggtggcaggggctgactgagagcgtctgcttgataatggattctgaattaatgcatagtatagtaggaagctatcataaacctccagaaagagtatttgttccctcattcacccagaatgaaccatctcagaattgccatcctgcaaacttagaagttacctctcctaagatacttcatagcccaaatagccaagctcttattttagccttaaaaactcttcaggaaaaaattcatcgtttagagctggagagaacacaagctgaagataacctgaacattctttccagagaagcagcacagtataagaaggccttagagaatgaaacaaatgagagaaatctggcacaccaggagctgataaagcagaaaaaagatataagtatacagttaagctcagcccagtctcgttgtactcttctagagaagcaactagaatatacaaagagaatggttctcaacgtagagcgagaaaagaacatgatcctagaacaacaggcccagcttcagagggaaaaagaacaagatcagatgaagctgtatgcaaaacttgaaaagcttgatgtcttagaaaaagagtgtttcagacttacaacaactcagaaaactgctgaggacaagattaaacatttagaagaaaaacttaaggaagaagaacatcagcgtaagctatttcaagacaaagcttctgagcttcaaactggacttgaaatcagtaaaattataatgtcttcagtttcaaatctaaagcactccaaggaaaagaagaaatcttcaaaggtgtgcatataaaattttttcccaaacaaaaatactgctaatacttatttatataacctcttaatccttatacctacccctttccaaaaaggatttg

SEQ ID NO: 116599 - DNA, 446 bp, Homo sapiens
  Payload ID: 2739
  Gene Symbol: CEP57L1
  Gene Name: centrosomal protein 57kDa-like 1
  ENST ID: ENST00000521503
  CDS Start-End: 111-446
gttgcctgtgggtgcccgcgaaccaacggttagcggtggcaggggctgactgagagcgtctgcttggttgggaaaccaattagaaaggagtgttctgctagaaacagataatggattctgaattaatgcatagtatagtaggaagctatcataaacctccagaaagagtatttgttccctcattcacccagaatgaaccatctcagaattgccatcctgcaaacttagaagttacctctcctaagatacttcatagcccaaatagccaagctcttattttagccttaaaaactcttcaggaaaaaattcatcgtttagagctggagagaacacaagctgaagataacctgaacattctttccagagaagcagcacagtataagaaggccttagagaatgaaacaaatgagagaaatctggcacaccaggagctgataaagcagaaa

SEQ ID NO: 116600 - DNA, 2056 bp, Homo sapiens
  Payload ID: 2740
  Gene Symbol: CEP63
  Gene Name: centrosomal protein 63kDa
  Uniprot ID: Q96MT8
  ENST ID: ENST00000332047
  CDS Start-End: 336-1823
caggatgtaccaaacgtggaagcggagacggggaggtctgggggtgccacgcaagtccctttcctcccgacacgagtgcagtaaagaaaaacggttatgagcgtaaagtgacagcctcggccgatgggaatagggggaagtccgacactgagcaacgaacgcattcccgcgcctccaaaacctaggccgggggcgctggaaacccttaccggcacccggccaccgcggcagacgcttgctcctgccacgccccccccccctcccccgcatcacgtgtctgcactcgctttcctcggattcccggatgtggttgccaaaacaaaggggatttggtgatggaggctttgttagaaggaatacaaaatcgagggcatggtgggggatttttgacatcttgtgaagcagaactacaggagctcatgaaacagattgacataatggtggctcataaaaaatctgaatgggaaggacgtacacatgctctagaaacttgcttgaaaatccgtgaacaggaacttaagagtcttaggagtcagttggatgtgacacataaggaggttggaatgttgcatcagcaggtagaagaacatgaaaaaatcaagcaagagatgaccatggaatataagcaggagttgaagaaactacatgaagaattatgcatactgaagagaagctatgaaaagcttcagaaaaagcaaatgagggaattcagaggaaataccaaaaatcacagggaagatcggtctgaaattgagaggttaactgcaaaaatagaggaattccgtcagaaatcgctggactgggagaagcaacgcttgatttatcagcaacaggtatcttcactggaggcacaaaggaaggctctggctgaacaatcagagataattcaggctcagcttgtcaatcggaaacagaaattagagtctgtggaactttctagccaatcagaaattcaacacttaagcagtaaactggagcgggctaatgacactatctgtgccaatgagttggaaatagagcgcctcaccatgagggtcaatgacttggttggaaccagtatgactgtcctacaggagcagcagcaaaaagaagaaaaattgagggaatctgaaaaactattagaggctctgcaggaagaaaagagagaattgaaggcagctcttcagtctcaagaaaatctcatacatgaggccagaatacaaaaggagaagttacaagaaaaagtaaaggcaactaacactcaacatgctgtagaagctataagtttggaatctgtgagtgcaacgtgtaaacagctgagccaagaactaatggaaaaatatgaagaactgaagaggatggaagcacataacaatgaatacaaagcagagattaagaagttgaaagaacagattttacagggtgaacaaagttacagttctgcactagaaggaatgaagatggaaatctcccatctaactcaggagttacatcagcgagatatcactattgcttccaccaaaggttcttcctcagacatggaaaagcgactcagagcagagatgcaaaaggcagaagacaaagcagtagagcataaggagattttggatcagctggagtcactcaaattagaaaatcgtcatctttctgaaatggtgatgaaattggaattgggtttacatgagtgttccttgcctgtatctccccttggttcaatagctaccagatttttggaagaggaggaactgaggtctcatcacattctagagcgcttggatgcccatattgaagaactaaaaagagagagtgaaaagacagtgagacaattcacagccttaaagtagcctcttaaaaaaatcactatcttggaaataaaaataaacaccaaagagttactgtcatctgaagtagcagctctttaaaaacatgaagagataaaattataaaaatgatacatctaaagcagtggtgaagaaagctgaaaaactgatacttttgataggcattttctctgcactggtttgtttaaaggacttcttccagcaataagttgaaagaataaaccactttgctagac

SEQ ID NO: 116601 - DNA, 5632 bp, Homo sapiens
  Payload ID: 2740
  Gene Symbol: CEP63
  Gene Name: centrosomal protein 63kDa
  Uniprot ID: Q96MT8
  ENST ID: ENST00000337090
  CDS Start-End: 28-2139
agttgccaaaacaaaggggatttggtgatggaggctttgttagaaggaatacaaaatcgagggcatggtgggggatttttgacatcttgtgaagcagaactacaggagctcatgaaacagattgacataatggtggctcataaaaaatctgaatgggaaggacgtacacatgctctagaaacttgcttgaaaatccgtgaacaggaacttaagagtcttaggagtcagttggatgtgacacataaggaggttggaatgttgcatcagcaggtagaagaacatgaaaaaatcaagcaagagatgaccatggaatataagcaggagttgaagaaactacatgaagaattatgcatactgaagagaagctatgaaaagcttcagaaaaagcaaatgagggaattcagaggaaataccaaaaatcacagggaagatcggtctgaaattgagaggttaactgcaaaaatagaggaattccgtcagaaatcgctggactgggagaagcaacgcttgatttatcagcaacaggtatcttcactggaggcacaaaggaaggctctggctgaacaatcagagataattcaggctcagcttgtcaatcggaaacagaaattagagtctgtggaactttctagccaatcagaaattcaacacttaagcagtaaactggagcgggctaatgacactatctgtgccaatgagttggaaatagagcgcctcaccatgagggtcaatgacttggttggaaccagtatgactgtcctacaggagcagcagcaaaaagaagaaaaattgagggaatctgaaaaactattagaggctctgcaggaagaaaagagagaattgaaggcagctcttcagtctcaagaaaatctcatacatgaggccagaatacaaaaggagaagttacaagaaaaagtaaaggcaactaacactcaacatgctgtagaagctataaggccacgggaagaatctctggcagaaaagaagtacacctctcaagggcagggggacttagacagtgtgctctcccagttgaattttacccatactagtgaggaccttctgcaggcagaggtgacttgtcttgaaggcagtttggaatctgtgagtgcaacgtgtaaacagctgagccaagaactaatggaaaaatatgaagaactgaagaggatggaagcacataacaatgaatacaaagcagagattaagaagttgaaagaacagattttacagggtgaacaaagttacagttctgcactagaaggaatgaagatggaaatctcccatctaactcaggagttacatcagcgagatatcactattgcttccaccaaaggttcttcctcagacatggaaaagcgactcagagcagagatgcaaaaggcagaagacaaagcagtagagcataaggagattttggatcagctggagtcactcaaattagaaaatcgtcatctttctgaaatggtgatgaaattggaattgggtttacatgaggcaaaagagatttcactagcagacctccaggagaattatattgaggcattaaataaattagtgtctgaaaatcaacaactacagaaagatttgatgaataccaaatctcagctggagatttctactcagatgtgcaaaaaacaaaatgacaggatctttaaaccaacacacagcagaacaactgagttcaagaatacagagttcaagccaacccatggccagcacagacatgatggaataaagactgagcactacaaaacagatcttcattctccaagaggacaagcgtcggatagtataaaccccatgtctagggtgctaagccccctgagtcctcaaatcagcccttgcagctccaccaggtctttgacttcctactctctatgtaaaactcattctttgccttcagcgctagatacaaatgaagccaatttttctgacactatgtctgagagtatgaatgaccaagaagagtttatatcttcgtgttccttgcctgtatctccccttggttcaatagctaccagatttttggaagaggaggaactgaggtctcatcacattctagagcgcttggatgcccatattgaagaactaaaaagagagagtgaaaagacagtgagacaattcacagccttaaagtagcctcttaaaaaaatcactatcttggaaataaaaataaacaccaaagagttactgtcatctgaagtagcagctctttaaaaacatgaagagataaaattataaaaatgatacatctaaagcagtggtgaagaaagctgaaaaactgatacttttgataggcattttctctgcactggtttgtttaaaggacttcttccagcaataagttgaaagaataaaccactttgctagacttttttctcatacgaatatttattatcataaagtgatacttaccttgctgacttaaatgtgaatagctatgtactaattgaaataaggattttatgatacatgttgaaaataaagtaactgcaggaactttctttaggggaaatgtgtagaagcatggatttaggggtcaaacatacctggatcgatagactggttttgccacttaccagccaacggggcttgttatttactgggctggtagcccctcctagccaaggggctggtagtgtgtaaagtcaggctggtagtgaataaggggggggtgtgctaaagaaccttatcaagcagtcctctcttgctcaacactcatgcagaggagagaggcagggagggcaagggactggctgtcatgcacggtgcccatggaatatccattggaaataaatgttcatcgtctgcactgctgaggacaagtttagatgggagacaaagatctggatgttgatgtgccgcaggcatttgaaacgatgggagttgataagatccaccagggaggctgtggagagagagaggagcaggaggctgggtttggggccctgaaagatgccagcatctgaggatcacaggaaatagatctagcaaaggaactagaatgtgcagttacagatgagaaaggtcagtgtagtgtacttgccagctcaagggtgtggcctctgtgaaccctctttctgtagtggatctttcccatcagcgtaaaacatcctgttatttcccctttttaaataaaacctcagttttttttaatgcctctcttttactgctctgtatgtttgcttcccttcacccaaacacttctggaaagagttgtctgcagtgactctttccagttcctcaccccgccccaccgtagttctcttcctaaccctctccaacaccacttccatccccagactgctttcttgctcttgagttcaccagtgacctaatcagtgtctgagcatcattcagcacagttggactctctcttggcttctgtgacctggaacttctggtttcctctctacctcatcctccactccatctcatggcttttcctcttctaacctctaagtcagagggccccctagagctctgtcatgggttttctccctcagcattctcttccctagaagtttccattccattctcaagctcttaataccacctataggccagtgacccttacatttattactaatcttgacctctccccagagctgctgtcttagatacctagctgcttatgcgatgtcttcacttggatatctgacaaacatcttgtttccaagagagaactctttattctccctcttgctaagattccatatcaggacatagcattatgtttgccagttcctaggagttacttataattccttccttacccacatccgcatatccagtcatttgggaggtcctgtcatttcttcccccagaatcttatctcagacccaaccgtttccctcctgcacttctaccacctgatccagactacttctctctcaccctgattctggcagtagcctcctaactgatagtactcacaccagtaattcagggagcttctggagttatcctttagaaatgtaaatgaaacagtgtcaccactgcttcccttcagactcttccaaggcttctctttttttttttattgagacagagtctcactctgtcgcccaagctgcagtacagtggcaggatctcggctctctgcaacctccacctcccgggctcaagtgattctcctgccttagcttcccgagtagctgggattacaggcgcatgccaccaggcccagctaatttttgtatttttagtaggaacagggtttcaccatgttggtcaggctgatctcgaactcctgacctcaagtgatccacccgcctgagcttcccaaagtgctgggttataagcgtgagccactgcacccagccccaaggcttcttactgcactcagaataaaatccaaatgaattagtatagcctacagagtgtcaataatctgggcctaatcacccattgcatcatcctttactgtgctccacccatgctggcgtcctttctgtttattgagtgcagcaagctttaacctgttcgggtctttcatttgcagtttaccctgaatattccctttctcttacctcacctttgattggcgttttcccccttgcagacctgcactctggcatcctctcctgagcaagccttctttgattgctgcctcccaaacctgtttctccccatttctctagctcattggcctgtgttacttgcttcatagtgctcactactatctgaaatcatttcattacttgatttatgtttgtactgtctatttctgtctttagaattaaaactccttgagggcaaggactttgcttctctggttcatggtgggatcctcatcacccagcacaagcccaacacttaggagaggctcagctagtttgaaccaatggaaaatgccattcctgaggtgcaccacatcgtttcttttgtgttggtgtgcatgctgtccttcagtttgtctcctcttcccacaccctgtcatgtgctcctaaaactccccctttacttggctactttatctggcttggcaaagctttcccatatcccctgacccatgtcagggaacgtttctcctcattgctgtcatggcaccctgtgtgtggctctgaccagactttgctatccgctttgatttctgtctttcaggggctaagtcctgcctacatcctcagtcagcatgctgcctaacacataacagatcctaagcaaatattgggtggatgaaaatcactaccattcaaggcttcattgtatttatcagtaaaactgaaataatatctaatggggtcgagaagatttactgaaaatatatatttgaaagggctttgcagttttaagtactgtacctatgtgcattgctgttacattcaggagatttctgagttttagacagtcccaagcttcagcttaaaatctgtagactgcagcccgtttctgaaacgtttgtactacgtgttgactaggaggaacaatgacagactctgtagtcaccggaaatacttaaggaatcatgaggtactatgtatttccttaaattatactgttttttaaagctgaagtatctaatagttaatgggttgtccaaatttgtcagaacatttgactgtaatttaatgtctcaccatttttcaaaaagatatattaataccaaatattaaaatgtgtcaagact

SEQ ID NO: 116602 - DNA, 1835 bp, Homo sapiens
  Payload ID: 2740
  Gene Symbol: CEP63
  Gene Name: centrosomal protein 63kDa
  Uniprot ID: Q96MT8
  ENST ID: ENST00000354446
  CDS Start-End: 288-1715
acgcaagtccctttcctcccgacacgagtgcagtaaagaaaaacggttatgagcgtaaagtgacagcctcggccgatgggaatagggggaagtccgacactgagcaacgaacgcattcccgcgcctccaaaacctaggccgggggcgctggaaacccttaccggcacccggccaccgcggcagacgcttgctcctgccacgccccccccccctcccccgcatcacgtgtctgcactcgctttcctcggattcccggatgtggttgccaaaacaaaggggatttggtgatggaggctttgttagaaggaatacaaaatcgagggcatggtgggggatttttgacatcttgtgaagcagaactacaggagctcatgaaacagattgacataatggtggctcataaaaaatctgaatgggaaggacgtacacatgctctagaaacttgcttgaaaatccgtgaacaggaacttaagagtcttaggagtcagttggatgtgacacataaggaggttggaatgttgcatcagcaggtagaagaacatgaaaaaatcaagcaagagatgaccatggaatataagcaggagttgaagaaactacatgaagaattatgcatactgaagagaagctatgaaaagcttcagaaaaagcaaatgagggaattcagaggaaataccaaaaatcacagggaagatcggtctgaaattgagaggttaactgcaaaaatagaggaattccgtcagaaatcgctggactgggagaagcaacgcttgatttatcagcaacaggtatcttcactggaggcacaaaggaaggctctggctgaacaatcagagataattcaggctcagcttgtcaatcggaaacagaaattagagtctgtggaactttctagccaatcagaaattcaacacttaagcagtaaactggagcgggctaatgacactatctgtgccaatgagttggaaatagagcgcctcaccatgagggtcaatgacttggttggaaccagtatgactgtcctacaggagcagcagcaaaaagaagaaaaattgagggaatctgaaaaactattagaggctctgcaggaagaaaagagagaattgaaggcagctcttcagtctcaagaaaatctcatacatgaggccagaatacaaaaggagaagttacaagaaaaagtaaaggcaactaacactcaacatgctgtagaagctataagtttggaatctgtgagtgcaacgtgtaaacagctgagccaagaactaatggaaaaatatgaagaactgaagaggatggaagcacataacaatgaatacaaagcagagattaagaagttgaaagaacagattttacagggtgaacaaagttacagttctgcactagaaggaatgaagatggaaatctcccatctaactcaggagttacatcagcgagatatcactattgcttccaccaaaggttcttcctcagacatggaaaagcgactcagagcagagatgcaaaaggcagaagacaaagcagtagagcataaggagattttggatcagctggagtcactcaaattagaaaatcgtcatctttctgaaatggtgatgaaattggaattgggtttacatgagagatggggttttaccatgttgtccagtctggttttgaacttcgggattcaagcaatccgccagcctcagcgtcccaaagtgctggaattacaagtgtgagctaccaccactggcagttaagaattttaacaatttgtcaatgaaacaagaatctcaattagagtctttatatacaatctgtactgttggaattttcaaataaatattgtaaagaaaatt

SEQ ID NO: 116603 - DNA, 2028 bp, Homo sapiens
  Payload ID: 2740
  Gene Symbol: CEP63
  Gene Name: centrosomal protein 63kDa
  Uniprot ID: Q96MT8
  ENST ID: ENST00000383229
  CDS Start-End: 172-1797
gttcatttgctcgcgtgcaggggaagtctggagaaggcattgtttcaattattaaaagtgtgggggcagtgggcggaacaaacgcgccgactacagaggctggacgtaagcttagcggtggcgcgcgtgcgcagcgccggcccgagttgccaaaacaaaggggatttggtgatggaggctttgttagaaggaatacaaaatcgagggcatggtgggggatttttgacatcttgtgaagcagaactacaggagctcatgaaacagattgacataatggtggctcataaaaaatctgaatgggaaggacgtacacatgctctagaaacttgcttgaaaatccgtgaacaggaacttaagagtcttaggagtcagttggatgtgacacataaggaggttggaatgttgcatcagcaggtagaagaacatgaaaaaatcaagcaagagatgaccatggaatataagcaggagttgaagaaactacatgaagaattatgcatactgaagagaagctatgaaaagcttcagaaaaagcaaatgagggaattcagaggaaataccaaaaatcacagggaagatcggtctgaaattgagaggttaactgcaaaaatagaggaattccgtcagaaatcgctggactgggagaagcaacgcttgatttatcagcaacaggtatcttcactggaggcacaaaggaaggctctggctgaacaatcagagataattcaggctcagcttgtcaatcggaaacagaaattagagtctgtggaactttctagccaatcagaaattcaacacttaagcagtaaactggagcgggctaatgacactatctgtgccaatgagttggaaatagagcgcctcaccatgagggtcaatgacttggttggaaccagtatgactgtcctacaggagcagcagcaaaaagaagaaaaattgagggaatctgaaaaactattagaggctctgcaggaagaaaagagagaattgaaggcagctcttcagtctcaagaaaatctcatacatgaggccagaatacaaaaggagaagttacaagaaaaagtaaaggcaactaacactcaacatgctgtagaagctataaggccacgggaagaatctctggcagaaaagaagtacacctctcaagggcagggggacttagacagtgtgctctcccagttgaattttacccatactagtgaggaccttctgcaggcagaggtgacttgtcttgaaggcagtttggaatctgtgagtgcaacgtgtaaacagctgagccaagaactaatggaaaaatatgaagaactgaagaggatggaagcacataacaatgaatacaaagcagagattaagaagttgaaagaacagattttacagggtgaacaaagttacagttctgcactagaaggaatgaagatggaaatctcccatctaactcaggagttacatcagcgagatatcactattgcttccaccaaaggttcttcctcagacatggaaaagcgactcagagcagagatgcaaaaggcagaagacaaagcagtagagcataaggagattttggatcagctggagtcactcaaattagaaaatcgtcatctttctgaaatggtgatgaaattggaattgggtttacatgagtgttccttgcctgtatctccccttggttcaatagctaccagatttttggaagaggaggaactgaggtctcatcacattctagagcgcttggatgcccatattgaagaactaaaaagagagagtgaaaagacagtgagacaattcacagccttaaagtagcctcttaaaaaaatcactatcttggaaataaaaataaacaccaaagagttactgtcatctgaagtagcagctctttaaaaacatgaagagataaaattataaaaatgatacatctaaagcagtggtgaagaaagctgaaaaactgatacttttgataggcattttctctgcactggtttgtttaaaggacttcttccagcaataagttgaaagaataaaccactttgctag

SEQ ID NO: 116604 - DNA, 464 bp, Homo sapiens
  Payload ID: 2740
  Gene Symbol: CEP63
  Gene Name: centrosomal protein 63kDa
  ENST ID: ENST00000508778
  CDS Start-End: 1-464
gaatgttgcatcagcaggtagaagaacatgaaaaaatcaagcaagagatgaccatggaatataagcaggagttgaagaaactacatgaagaattatgcatactgaagagaagctatgaaaagcttcagaaaaagcaaatgagggaattcagaggaaataccaaaaatcacagggaagatcggtctgaaattgagaggttaactgcaaaaatagaggaattccgtcagaaatcgctggactgggagaagcaacgcttgatttatcagcaacaggctcagcttgtcaatcggaaacagaaattagagtctgtggaactttctagccaatcagaaattcaacacttaagcagtaaactggagcgggctaatgacactatctgtgccaatgagttggaaatagagcgcctcaccatgagggtcaatgacttggttggaaccagtatgactgtcctacaggagcagcag

SEQ ID NO: 116605 - DNA, 566 bp, Homo sapiens
  Payload ID: 2740
  Gene Symbol: CEP63
  Gene Name: centrosomal protein 63kDa
  ENST ID: ENST00000512894
  CDS Start-End: 378-566
aacggcgggaaggctcaggggcgtgcttgcggcaaccctgtaaccgccggtgcgcaagttggaggggcaaggggctgccgtgtcctggtctggaggcggcccaggctgccttggtgattctggcttcgcggcctcatggcttgcggccggtttgcgcaacggcctgcgaaccaccaggcgcgtccccgccggcttgggtccgccccgaagcccagtccctcggcctggcccgctatgccctgcacactggcggagtctggcgtggcgcagcccggcgtggggttcggccccgccaggtggtcagcccttcctcggagtccaggtggctgggggcgcttcggagagtggccagttgccaaaacaaaggggatttggtgatggaggctttgttagaaggaatacaaaatcgagggcatggtgggggatttttgacatcttgtgaagcagaactacaggagctcatgaaacagattgacataatggtggctcataaaaaatctgaatgggaaggacgtacacatgctctagaaacttgcttgaaaatccgtgaacaggaacttaagagt

SEQ ID NO: 116606 - DNA, 629 bp, Homo sapiens
  Payload ID: 2740
  Gene Symbol: CEP63
  Gene Name: centrosomal protein 63kDa
  ENST ID: ENST00000511574
  CDS Start-End: 142-629
gatgtgggtgagttcatttgctcgcgtgcaggggaagtctggagaaggcattgtttcaattattaaaagtgtgggggcagtgggcggaacaaacgcgccgactacagaggctggacttgccaaaacaaaggggatttggtgatggaggctttgttagaaggaatacaaaatcgagggcatggtgggggatttttgacatcttgtgaagcagaactacaggagctcatgaaacagattgacataatggtggctcataaaaaatctgaatgggaaggacgtacacatgctctagaaacttgcttgaaaatccgtgaacaggaacttaagagtcttaggagtcagttggatgtgacacataaggaggttggaatgttgcatcagcaggtagaagaacatgaaaaaatcaagcaagagatgaccatggaatataagcaggagttgaagaaactacatgaagaattatgcatactgaagagaagctatgaaaagcttcagaaaaagcaaatgagggaattcagaggaaataccaaaaatcacagggaagatcggtctgaaattgagaggttaactgcaaaaatagaggaattccgtcagaaatcgctggactgggagaagcaacgcttgattta

SEQ ID NO: 116607 - DNA, 2903 bp, Homo sapiens
  Payload ID: 2740
  Gene Symbol: CEP63
  Gene Name: centrosomal protein 63kDa
  Uniprot ID: Q96MT8
  ENST ID: ENST00000513612
  CDS Start-End: 428-2539
gtgcttgcggcaaccctgtaaccgccggtgcgcaagttggaggggcaaggggctgccgtgtcctggtctggaggcggcccaggctgccttggtgattctggcttcgcggcctcatggcttgcggccggtttgcgcaacggcctgcgaaccaccaggcgcgtccccgccggcttgggtccgccccgaagcccagtccctcggcctggcccgctatgccctgcacactggcggagtctggcgtggcgcagcccggcgtggggttcggccccgccaggtggtcagcccttcctcggagtccaggtggctgggggcgcttcggagagtggccaggggcccccaaacccggggccgcagagcagtaccagtccgtggcctgttaggaaccaggctacagagcaggagttgccaaaacaaaggggatttggtgatggaggctttgttagaaggaatacaaaatcgagggcatggtgggggatttttgacatcttgtgaagcagaactacaggagctcatgaaacagattgacataatggtggctcataaaaaatctgaatgggaaggacgtacacatgctctagaaacttgcttgaaaatccgtgaacaggaacttaagagtcttaggagtcagttggatgtgacacataaggaggttggaatgttgcatcagcaggtagaagaacatgaaaaaatcaagcaagagatgaccatggaatataagcaggagttgaagaaactacatgaagaattatgcatactgaagagaagctatgaaaagcttcagaaaaagcaaatgagggaattcagaggaaataccaaaaatcacagggaagatcggtctgaaattgagaggttaactgcaaaaatagaggaattccgtcagaaatcgctggactgggagaagcaacgcttgatttatcagcaacaggtatcttcactggaggcacaaaggaaggctctggctgaacaatcagagataattcaggctcagcttgtcaatcggaaacagaaattagagtctgtggaactttctagccaatcagaaattcaacacttaagcagtaaactggagcgggctaatgacactatctgtgccaatgagttggaaatagagcgcctcaccatgagggtcaatgacttggttggaaccagtatgactgtcctacaggagcagcagcaaaaagaagaaaaattgagggaatctgaaaaactattagaggctctgcaggaagaaaagagagaattgaaggcagctcttcagtctcaagaaaatctcatacatgaggccagaatacaaaaggagaagttacaagaaaaagtaaaggcaactaacactcaacatgctgtagaagctataaggccacgggaagaatctctggcagaaaagaagtacacctctcaagggcagggggacttagacagtgtgctctcccagttgaattttacccatactagtgaggaccttctgcaggcagaggtgacttgtcttgaaggcagtttggaatctgtgagtgcaacgtgtaaacagctgagccaagaactaatggaaaaatatgaagaactgaagaggatggaagcacataacaatgaatacaaagcagagattaagaagttgaaagaacagattttacagggtgaacaaagttacagttctgcactagaaggaatgaagatggaaatctcccatctaactcaggagttacatcagcgagatatcactattgcttccaccaaaggttcttcctcagacatggaaaagcgactcagagcagagatgcaaaaggcagaagacaaagcagtagagcataaggagattttggatcagctggagtcactcaaattagaaaatcgtcatctttctgaaatggtgatgaaattggaattgggtttacatgaggcaaaagagatttcactagcagacctccaggagaattatattgaggcattaaataaattagtgtctgaaaatcaacaactacagaaagatttgatgaataccaaatctcagctggagatttctactcagatgtgcaaaaaacaaaatgacaggatctttaaaccaacacacagcagaacaactgagttcaagaatacagagttcaagccaacccatggccagcacagacatgatggaataaagactgagcactacaaaacagatcttcattctccaagaggacaagcgtcggatagtataaaccccatgtctagggtgctaagccccctgagtcctcaaatcagcccttgcagctccaccaggtctttgacttcctactctctatgtaaaactcattctttgccttcagcgctagatacaaatgaagccaatttttctgacactatgtctgagagtatgaatgaccaagaagagtttatatcttcgtgttccttgcctgtatctccccttggttcaatagctaccagatttttggaagaggaggaactgaggtctcatcacattctagagcgcttggatgcccatattgaagaactaaaaagagagagtgaaaagacagtgagacaattcacagccttaaagtagcctcttaaaaaaatcactatcttggaaataaaaataaacaccaaagagttactgtcatctgaagtagcagctctttaaaaacatgaagagataaaattataaaaatgatacatctaaagcagtggtgaagaaagctgaaaaactgatacttttgataggcattttctctgcactggtttgtttaaaggacttcttccagcaataagttgaaagaataaaccactttgctagacttttttctcatacgaatatttattatcataaagtgatacttaccttgctgacttaaatgtgaatagctatgtactaattgaaataaggattttatgatacatgttgaaaataaagtaactgcaggaacttt

SEQ ID NO: 116608 - DNA, 735 bp, Homo sapiens
  Payload ID: 2740
  Gene Symbol: CEP63
  Gene Name: centrosomal protein 63kDa
  ENST ID: ENST00000504929
  CDS Start-End: 1-735
aggaagaaaagagagaattgaaggcagctcttcagtctcaagaaaatctcatacatgaggccagaatacaaaaggagaagttacaagaaaaagtaaaggcaactaacactcaacatgctgtagaagctataagtttggaatctgtgagtgcaacgtgtaaacagctgagccaagaactaatggaaaaatatgaagaactgaagaggatggaagcacataacaatgaatacaaagcagagattaagaagttgaaagaacagattttacagggtgaacaaagttacagttctgcactagaaggaatgaagatggaaatctcccatctaactcaggagttacatcagcgagatatcactattgcttccaccaaaggttcttcctcagacatggaaaagcgactcagagcagagatgcaaaaggcagaagacaaagcagtagagcataaggagattttggatcagctggagtcactcaaattagaaaatcgtcatctttctgaaatggtgatgaaattggaattgggtttacatgaggcaaaagagatttcactagcagacctccaggagaattatattgaggcattaaataaattagtgtctgaaaatcaacaactacagaaagatttgatgaataccaaatctcagctggagatttctactcagatgtgcaaaaaacaaaatgacaggatctttaaaccaacacacagcagaacaactgagttcaagaatacagagt

SEQ ID NO: 116609 - DNA, 707 bp, Homo sapiens
  Payload ID: 2740
  Gene Symbol: CEP63
  Gene Name: centrosomal protein 63kDa
  ENST ID: ENST00000514678
  CDS Start-End: 1-585
gacttagacagtgtgctctcccagttgaattttacccatactagtgaggaccttctgcaggcagaggtgacttgtcttgaaggcagtttggaatctgtgagtgcaacgtgtaaacagctgagccaagaactaatggaaaaatatgaagaactgaagaggatggaagcacataacaatgaatacaaagcagagattaagaagttgaaagaacagattttacagggtgaacaaagttacagttctgcactagaaggaatgaagatggaaatctcccatctaactcaggagttacatcagcgagatatcactattgcttccaccaaaggttcttcctcagacatggaaaagcgactcagagcagagatgcaaaaggcagaagacaaagcagtagagcataaggagattttggatcagctggagtcactcaaattagaaaatcgtcatctttctgaaatggtgatgaaattggaattgggtttacatgagagatggggttttaccatgttgtccagtctggttttgaacttcgggattcaagcaatccgccagcctcagcgtcccaaagtgctggaattacaagtgtgagctaccaccactggcagttaagaattttaacaatttgtcaatgaaacaagaatctcaattagagtctttatatacaatctgtactgttggaattttcaaataaatattgtaaagaaaattaa

SEQ ID NO: 116610 - DNA, 2800 bp, Homo sapiens
  Payload ID: 2740
  Gene Symbol: CEP63
  Gene Name: centrosomal protein 63kDa
  Uniprot ID: Q96MT8
  ENST ID: ENST00000606977
  CDS Start-End: 329-2440
gtgcgcaagttggaggggcaaggggctgccgtgtcctggtctggaggcggcccaggctgccttggtgattctggcttcgcggcctcatggcttgcggccggtttgcgcaacggcctgcgaaccaccaggcgcgtccccgccggcttgggtccgccccgaagcccagtccctcggcctggcccgctatgccctgcacactggcggagtctggcgtggcgcagcccggcgtggggttcggccccgccaggtggtcagcccttcctcggagtccaggtggctgggggcgcttcggagagtggccagttgccaaaacaaaggggatttggtgatggaggctttgttagaaggaatacaaaatcgagggcatggtgggggatttttgacatcttgtgaagcagaactacaggagctcatgaaacagattgacataatggtggctcataaaaaatctgaatgggaaggacgtacacatgctctagaaacttgcttgaaaatccgtgaacaggaacttaagagtcttaggagtcagttggatgtgacacataaggaggttggaatgttgcatcagcaggtagaagaacatgaaaaaatcaagcaagagatgaccatggaatataagcaggagttgaagaaactacatgaagaattatgcatactgaagagaagctatgaaaagcttcagaaaaagcaaatgagggaattcagaggaaataccaaaaatcacagggaagatcggtctgaaattgagaggttaactgcaaaaatagaggaattccgtcagaaatcgctggactgggagaagcaacgcttgatttatcagcaacaggtatcttcactggaggcacaaaggaaggctctggctgaacaatcagagataattcaggctcagcttgtcaatcggaaacagaaattagagtctgtggaactttctagccaatcagaaattcaacacttaagcagtaaactggagcgggctaatgacactatctgtgccaatgagttggaaatagagcgcctcaccatgagggtcaatgacttggttggaaccagtatgactgtcctacaggagcagcagcaaaaagaagaaaaattgagggaatctgaaaaactattagaggctctgcaggaagaaaagagagaattgaaggcagctcttcagtctcaagaaaatctcatacatgaggccagaatacaaaaggagaagttacaagaaaaagtaaaggcaactaacactcaacatgctgtagaagctataaggccacgggaagaatctctggcagaaaagaagtacacctctcaagggcagggggacttagacagtgtgctctcccagttgaattttacccatactagtgaggaccttctgcaggcagaggtgacttgtcttgaaggcagtttggaatctgtgagtgcaacgtgtaaacagctgagccaagaactaatggaaaaatatgaagaactgaagaggatggaagcacataacaatgaatacaaagcagagattaagaagttgaaagaacagattttacagggtgaacaaagttacagttctgcactagaaggaatgaagatggaaatctcccatctaactcaggagttacatcagcgagatatcactattgcttccaccaaaggttcttcctcagacatggaaaagcgactcagagcagagatgcaaaaggcagaagacaaagcagtagagcataaggagattttggatcagctggagtcactcaaattagaaaatcgtcatctttctgaaatggtgatgaaattggaattgggtttacatgaggcaaaagagatttcactagcagacctccaggagaattatattgaggcattaaataaattagtgtctgaaaatcaacaactacagaaagatttgatgaataccaaatctcagctggagatttctactcagatgtgcaaaaaacaaaatgacaggatctttaaaccaacacacagcagaacaactgagttcaagaatacagagttcaagccaacccatggccagcacagacatgatggaataaagactgagcactacaaaacagatcttcattctccaagaggacaagcgtcggatagtataaaccccatgtctagggtgctaagccccctgagtcctcaaatcagcccttgcagctccaccaggtctttgacttcctactctctatgtaaaactcattctttgccttcagcgctagatacaaatgaagccaatttttctgacactatgtctgagagtatgaatgaccaagaagagtttatatcttcgtgttccttgcctgtatctccccttggttcaatagctaccagatttttggaagaggaggaactgaggtctcatcacattctagagcgcttggatgcccatattgaagaactaaaaagagagagtgaaaagacagtgagacaattcacagccttaaagtagcctcttaaaaaaatcactatcttggaaataaaaataaacaccaaagagttactgtcatctgaagtagcagctctttaaaaacatgaagagataaaattataaaaatgatacatctaaagcagtggtgaagaaagctgaaaaactgatacttttgataggcattttctctgcactggtttgtttaaaggacttcttccagcaataagttgaaagaataaaccactttgctagacttttttctcatacgaatatttattatcataaagtgatacttaccttgctgacttaaatgtgaatagctatgtactaattgaaataaggattttatgatacatgttgaaaataaagtaactgcaggaa

SEQ ID NO: 116611 - DNA, 1601 bp, Homo sapiens
  Payload ID: 2740
  Gene Symbol: CEP63
  Gene Name: centrosomal protein 63kDa
  Uniprot ID: Q96MT8
  ENST ID: ENST00000620544
  CDS Start-End: 174-1601
gagttcatttgctcgcgtgcaggggaagtctggagaaggcattgtttcaattattaaaagtgtgggggcagtgggcggaacaaacgcgccgactacagaggctggacgtaagcttagcggtggcgcgcgtgcgcagcgccggcccgagttgccaaaacaaaggggatttggtgatggaggctttgttagaaggaatacaaaatcgagggcatggtgggggatttttgacatcttgtgaagcagaactacaggagctcatgaaacagattgacataatggtggctcataaaaaatctgaatgggaaggacgtacacatgctctagaaacttgcttgaaaatccgtgaacaggaacttaagagtcttaggagtcagttggatgtgacacataaggaggttggaatgttgcatcagcaggtagaagaacatgaaaaaatcaagcaagagatgaccatggaatataagcaggagttgaagaaactacatgaagaattatgcatactgaagagaagctatgaaaagcttcagaaaaagcaaatgagggaattcagaggaaataccaaaaatcacagggaagatcggtctgaaattgagaggttaactgcaaaaatagaggaattccgtcagaaatcgctggactgggagaagcaacgcttgatttatcagcaacaggtatcttcactggaggcacaaaggaaggctctggctgaacaatcagagataattcaggctcagcttgtcaatcggaaacagaaattagagtctgtggaactttctagccaatcagaaattcaacacttaagcagtaaactggagcgggctaatgacactatctgtgccaatgagttggaaatagagcgcctcaccatgagggtcaatgacttggttggaaccagtatgactgtcctacaggagcagcagcaaaaagaagaaaaattgagggaatctgaaaaactattagaggctctgcaggaagaaaagagagaattgaaggcagctcttcagtctcaagaaaatctcatacatgaggccagaatacaaaaggagaagttacaagaaaaagtaaaggcaactaacactcaacatgctgtagaagctataagtttggaatctgtgagtgcaacgtgtaaacagctgagccaagaactaatggaaaaatatgaagaactgaagaggatggaagcacataacaatgaatacaaagcagagattaagaagttgaaagaacagattttacagggtgaacaaagttacagttctgcactagaaggaatgaagatggaaatctcccatctaactcaggagttacatcagcgagatatcactattgcttccaccaaaggttcttcctcagacatggaaaagcgactcagagcagagatgcaaaaggcagaagacaaagcagtagagcataaggagattttggatcagctggagtcactcaaattagaaaatcgtcatctttctgaaatggtgatgaaattggaattgggtttacatgagagatggggttttaccatgttgtccagtctggttttgaacttcgggattcaagcaatccgccagcctcagcgtcccaaagtgctggaattacaagtgtga

SEQ ID NO: 116612 - DNA, 5343 bp, Homo sapiens
  Payload ID: 2741
  Gene Symbol: CEP68
  Gene Name: centrosomal protein 68kDa
  Uniprot ID: Q76N32
  ENST ID: ENST00000260569
  CDS Start-End: 111-1973
tcggggccagcgcatggggctgctgagaccgctccggacgtgcgaagcgttcgcggtgcggtaggaagctgaagtcttcagcagaaccctgacctaggtagggagtctcaatggccctgggtgaagaaaaggcagaagcggaagcatctgaagacacaaaggcccagtcctatgggagagggagctgcagggagcgggagctggacatcccagggcccatgagtggggagcagcccccacgcctggaagctgagggagggctcatctcccctgtatggggggcagaagggatacctgcccctacttgctggattgggactgaccctggcggcccctctagagcccaccagccacaggccagtgatgccaacagagagcccgtagctgagaggtctgagcctgcactcagtggcctgcctcctgccaccatggggtctggagaccttctgctctccggggaaagccaggtggagaagaccaagctttcttcctccgaggagttccctcagactctgagccttcccagaacaacaactatttgctcaggacatgatgctgataccgaagatgatccatccctagcagatttgccccaggcactggacctcagccagcagcctcacagctcaggtctctcttgcctgtcacagtggaagtccgtgctgagcccaggttccgcagctcagccttccagctgcagcatctctgcttcctccacaggcagcagtctccagggtcaccaggagagggcggagcctcgtggtggttctctggccaaggtctcctcctccctggagccggtcgtcccccaggaaccttcctctgtggtggggctaggacctcggccccagtggtcaccacagcctgtgttctctgggggtgatgcttctgggctaggcaggagacgcctctccttccaggctgagtactgggcctgtgtgctgccagattccctgcctccatcacccgaccgccactcccctctctggaacccaaataaagagtatgaagatctgcttgactatacttacccactgaggcccgggcctcagctcccaaagcaccttgatagccgtgtgccagctgaccctgtcctgcaggactccggggtagacctggatagcttctctgtctctccagcaagcaccctcaaatcacctactaatgtctcccccaactgcccaccagcagaggccactgccctgccattttctgggcccagagagccaagccttaagcagtggccctccagagtaccccagaaacagggtggcatgggcttggcatcttggagccaacttgcatctacccccagagccccaggcagtagggatgctcgttgggagcgcagagagccagccctgaggggtgcgaaggaccggctgactataggcaagcaccttgatatgggctctccccagctaaggacacgggacagagggtggccctcgcccaggccagagagggagaagaggaccagccagagtgcccggcgccctacctgcacagagtctaggtggaaatcagaagaggaagtggaaagtgatgacgagtatcttgccctccccgctcggctgacacagacattttgctgtcagctggaagagctgatctgctggctgtataatgttgcagatgttactgaccacgggactgcagccaggtccaatcttacaagtctcaagtcttctctgcagctttaccggcaatttaagaaagatatagatgaacatcagtctctgacggagagtgtcttacagaagggggagattcttcttcagtgcctgttggagaacaccccagttttagaggatgtccttgggaggatcgcaaagcagtctggtgagctggagagccacgcagatcgcctgtatgactctatcttggcctctctggacatgctggctggctgcacccttatccctgacaaaaagcccatggcggcaatggagcacccatgtgaaggggtttaacctggcatcttctcaggcagaggtgcaacctgtcggccaaacactggctagtgagaaaaaaaaccttcaagaagtccttgcaagagccattcaacactgaagtcaagggggaaaccttcaatatactagctttaaaatgcctttctcctccctgaatggagggctgagttactatttttatttacaatgaatccttccaaactaaggttttccttttggtgcttctccacaaagagcgtgtagctttgcaatttttgataaaataagacgtgttgccttcccctctatcccattaaaaaagagcagataaagctcaaactattccacctggtagggtcatttaccaagggctggtaggagattccgaatactcaatattctcaggcatgcaagaggacctaagagactgaaaaaagtgaattgttggccagaaaccttgggtcttttcataaaaggaaatttgggcttgtcaatccctctttaaagatataggtagaaagaagagatttttaaccctttgtctgcaaaagaaaaagggttaaatgaagcatctatacagatgactttgggagattatgacaccttttgccatcttcagggcttacgtctttactttcttggctaaccagtttcttagaagaaaatgtgtcagggacttggggatctacagtcatgctttagcatggctatggagctaattatcaagcttaaagggtaactttgggaggactcctcccttcactcctagtctcccttggaagagcagtccaggctcagggaagggaacggataggatgacacagtaagtacagaaactgaagctgtcaatagtgaaggaaaaaggggaattcttcgttgctttggcattgacacataagtactttgattaaaaaaaaaaaaaactatggatcaaccattcaaagcatcaattctatagctttttgcagcaagatgatcagttattgctggtaactgcagattctacagaaaagcacttttaaagttctgttgggccatgaatgaacctggaaggaggaaagcacagtaacaatggaaactaaagtcctattattaatgtgacttttctgcttcagaatttctgagactttatagtcactggaaaatagccattaaattctttaaagattagctcttcaacagtagctacacataaaatgcagtatttcaagtgcctgatgctgctgtggtatgctttatcataatgcttaagggcatgatcaaaattaaaatggcttatgagtttgccatattaatcatcttagttccatacacactgagactttaaaagggaaaaaccactctagcaaataattgtcaattataaacctgtatgtaaaacattcttgaaaacctagagttggttaaaaaggtagagatgtctgacggcctcttcttaaattgatatattttaccttctcttagatgtacatttataagtaggaacatgtccttccactgagtatgttactgaatagcccttaggaaattaaacccatttatttactaatatttgacaggcatagaagtgtattaattagcataaaagttggagatgaaaaccctatagaaacaaattggccaatattatactaattgaatgcagaatgtggcattctattcccattcaactaataatcagcttcaactgacaggaatttgcacagaatgttacacaataccctgtttcccaagaaagtactaccttacctagagatgatctaagatatttttgttcatcctctgaataaggtgagactaaagggtgctaactccctggacctggctgtgaatgctactgaagagtatcaacacaactgttaattataccgccgtgctttaagtttaagacttaccttaaaactcaagctgaaggctgggcacggtggctcatgcctgtaatcccagcactttgggaggccgaggcgggtggatcacaaggtcaggagatcgagaccatcctggctaacacggtgaaaccccatctctactaaaaatacaaaaagaaattagccaggcgtggtgatgggcgcctgtagtcccagctacttgggaggctgaggcatgagaatggcatgaacccgggaggcggagcttgcagtgagctgagatggcaccactgcactccagcctgggcaacagagtgagactcttgtctcaaaaaaaaaaaatcaagctgaaattgtttcagcctagtaagatgctgccagcagcatttctatgagcaaacatggccaaattagagtcaagtagctgagcttgctaactgcactgtgatgccacactggaataacttagtagtcccttaaaattaatggaagttaaatccacagggaagtgatgatactcaaagctggatcagcagtttcaagatctgggttcttggagatccataggtaagctcagcaaatggaagacgacgtcaacacggctattttgaagcttaggtgggaatggaacacaaagaaggtttgaggtaagatatgctggaaaggcaagatgtaggctaagggaaattcaatccaaggtcgaagaataggaaattactgctcagaccacaatgactatcattctgaaaggatttcacagagtgtgcagctgcttagatttaagaacactcttcttcactatgtaaactaatttatggcagcaccttatatttagaacaagtggtaattccctttactaagtgaacagattattaaaacctgtagtagctttgaaccgtttgtacttgaaaatgggggtataaaggggtatatattttttccagaaccacatttattggcgtatacatagaagcaaatcttaaggcatgctgaaatttgttgtaaatcccaatctttactgccatggggaaaagaacgctggaattttccaaacttaagtctgtaaatatgctcatcttaagttcatgtaatgtttccgctaactcaccaagaataagctgacaatttaaacaacttttactgtgtaaaaatgaagtgcacggcatggcatcacagtatcttgacatttgttttgtgtcatttagctactttagaaaatagtttctgaactctttccccctttatactgtattaaggcaaaaacaaaacttctgaagcattaaagatcttcaccaaaataactattggtaacttcaggaatttgtcagttgccttatgtgaggatgaatagatccaccaagcacgcctataatacaaagtaaactatgatttttattgtgaaattttcatagatggaaaattgaatattctgtccatttcattttacaattatcttaccacttatttttgtaccatgtatttcaattgcctgtttagtgaaaaataaaaattaaaaaaaccta

SEQ ID NO: 116613 - DNA, 5847 bp, Homo sapiens
  Payload ID: 2741
  Gene Symbol: CEP68
  Gene Name: centrosomal protein 68kDa
  Uniprot ID: Q76N32
  ENST ID: ENST00000377990
  CDS Start-End: 204-2477
agcgcggccgaagggcgtggttggcgctcggtcctgccctgcgcgttttgggctgcggttggagggccgcagttgcagtcagggtccgccagctcggggccagcgcatggggctgctgagaccgctccggacgtgcgaagcgttcgcggtgcggtaggaagctgaagtcttcagcagaaccctgacctaggtagggagtctcaatggccctgggtgaagaaaaggcagaagcggaagcatctgaagacacaaaggcccagtcctatgggagagggagctgcagggagcgggagctggacatcccagggcccatgagtggggagcagcccccacgcctggaagctgagggagggctcatctcccctgtatggggggcagaagggatacctgcccctacttgctggattgggactgaccctggcggcccctctagagcccaccagccacaggccagtgatgccaacagagagcccgtagctgagaggtctgagcctgcactcagtggcctgcctcctgccaccatggggtctggagaccttctgctctccggggaaagccaggtggagaagaccaagctttcttcctccgaggagttccctcagactctgagccttcccagaacaacaactatttgctcaggacatgatgctgataccgaagatgatccatccctagcagatttgccccaggcactggacctcagccagcagcctcacagctcaggtctctcttgcctgtcacagtggaagtccgtgctgagcccaggttccgcagctcagccttccagctgcagcatctctgcttcctccacaggcagcagtctccagggtcaccaggagagggcggagcctcgtggtggttctctggccaaggtctcctcctccctggagccggtcgtcccccaggaaccttcctctgtggtggggctaggacctcggccccagtggtcaccacagcctgtgttctctgggggtgatgcttctgggctaggcaggagacgcctctccttccaggctgagtactgggcctgtgtgctgccagattccctgcctccatcacccgaccgccactcccctctctggaacccaaataaagagtatgaagatctgcttgactatacttacccactgaggcccgggcctcagctcccaaagcaccttgatagccgtgtgccagctgaccctgtcctgcaggactccggggtagacctggatagcttctctgtctctccagcaagcaccctcaaatcacctactaatgtctcccccaactgcccaccagcagaggccactgccctgccattttctgggcccagagagccaagccttaagcagtggccctccagagtaccccagaaacagggtggcatgggcttggcatcttggagccaacttgcatctacccccagagccccaggcagtagggatgctcgttgggagcgcagagagccagccctgaggggtgcgaaggaccggctgactataggcaagcaccttgatatgggctctccccagctaaggacacgggacagagggtggccctcgcccaggccagagagggagaagaggaccagccagagtgcccggcgccctacctgcacagagtctaggtggaaatcagaagaggaagtggaaagtgatgacgagtatcttgccctccccgctcggctgacacaggtttctagcctggtttcgtatctaggatccatttctaccttggttaccctgcccactggggatatcaaagggcagagccccttggaagtgtcagacagtgatgggccagcttccttcccttcaagctccagccaaagccagcttccccctggagctgccctccaaggatctggggatcctgagggccagaatccctgtttcctgcgctccttcgtccgtgcccacgactccgcaggggaaggcagtctggggagcagccaggccctcggggtctcctctggactgctgaaaacacgcccctccttgccagctaggttggaccggtggccattctcagacccagatgttgaagggcagcttcccaggaaaggaggagaacagggaaaagaatcactggtgcaatgtgtgaagacattttgctgtcagctggaagagctgatctgctggctgtataatgttgcagatgttactgaccacgggactgcagccaggtccaatcttacaagtctcaagtcttctctgcagctttaccggcaatttaagaaagatatagatgaacatcagtctctgacggagagtgtcttacagaagggggagattcttcttcagtgcctgttggagaacaccccagttttagaggatgtccttgggaggatcgcaaagcagtctggtgagctggagagccacgcagatcgcctgtatgactctatcttggcctctctggacatgctggctggctgcacccttatccctgacaaaaagcccatggcggcaatggagcacccatgtgaaggggtttaacctggcatcttctcaggcagaggtgcaacctgtcggccaaacactggctagtgagaaaaaaaaccttcaagaagtccttgcaagagccattcaacactgaagtcaagggggaaaccttcaatatactagctttaaaatgcctttctcctccctgaatggagggctgagttactatttttatttacaatgaatccttccaaactaaggttttccttttggtgcttctccacaaagagcgtgtagctttgcaatttttgataaaataagacgtgttgccttcccctctatcccattaaaaaagagcagataaagctcaaactattccacctggtagggtcatttaccaagggctggtaggagattccgaatactcaatattctcaggcatgcaagaggacctaagagactgaaaaaagtgaattgttggccagaaaccttgggtcttttcataaaaggaaatttgggcttgtcaatccctctttaaagatataggtagaaagaagagatttttaaccctttgtctgcaaaagaaaaagggttaaatgaagcatctatacagatgactttgggagattatgacaccttttgccatcttcagggcttacgtctttactttcttggctaaccagtttcttagaagaaaatgtgtcagggacttggggatctacagtcatgctttagcatggctatggagctaattatcaagcttaaagggtaactttgggaggactcctcccttcactcctagtctcccttggaagagcagtccaggctcagggaagggaacggataggatgacacagtaagtacagaaactgaagctgtcaatagtgaaggaaaaaggggaattcttcgttgctttggcattgacacataagtactttgattaaaaaaaaaaaaaactatggatcaaccattcaaagcatcaattctatagctttttgcagcaagatgatcagttattgctggtaactgcagattctacagaaaagcacttttaaagttctgttgggccatgaatgaacctggaaggaggaaagcacagtaacaatggaaactaaagtcctattattaatgtgacttttctgcttcagaatttctgagactttatagtcactggaaaatagccattaaattctttaaagattagctcttcaacagtagctacacataaaatgcagtatttcaagtgcctgatgctgctgtggtatgctttatcataatgcttaagggcatgatcaaaattaaaatggcttatgagtttgccatattaatcatcttagttccatacacactgagactttaaaagggaaaaaccactctagcaaataattgtcaattataaacctgtatgtaaaacattcttgaaaacctagagttggttaaaaaggtagagatgtctgacggcctcttcttaaattgatatattttaccttctcttagatgtacatttataagtaggaacatgtccttccactgagtatgttactgaatagcccttaggaaattaaacccatttatttactaatatttgacaggcatagaagtgtattaattagcataaaagttggagatgaaaaccctatagaaacaaattggccaatattatactaattgaatgcagaatgtggcattctattcccattcaactaataatcagcttcaactgacaggaatttgcacagaatgttacacaataccctgtttcccaagaaagtactaccttacctagagatgatctaagatatttttgttcatcctctgaataaggtgagactaaagggtgctaactccctggacctggctgtgaatgctactgaagagtatcaacacaactgttaattataccgccgtgctttaagtttaagacttaccttaaaactcaagctgaaggctgggcacggtggctcatgcctgtaatcccagcactttgggaggccgaggcgggtggatcacaaggtcaggagatcgagaccatcctggctaacacggtgaaaccccatctctactaaaaatacaaaaagaaattagccaggcgtggtgatgggcgcctgtagtcccagctacttgggaggctgaggcatgagaatggcatgaacccgggaggcggagcttgcagtgagctgagatggcaccactgcactccagcctgggcaacagagtgagactcttgtctcaaaaaaaaaaaatcaagctgaaattgtttcagcctagtaagatgctgccagcagcatttctatgagcaaacatggccaaattagagtcaagtagctgagcttgctaactgcactgtgatgccacactggaataacttagtagtcccttaaaattaatggaagttaaatccacagggaagtgatgatactcaaagctggatcagcagtttcaagatctgggttcttggagatccataggtaagctcagcaaatggaagacgacgtcaacacggctattttgaagcttaggtgggaatggaacacaaagaaggtttgaggtaagatatgctggaaaggcaagatgtaggctaagggaaattcaatccaaggtcgaagaataggaaattactgctcagaccacaatgactatcattctgaaaggatttcacagagtgtgcagctgcttagatttaagaacactcttcttcactatgtaaactaatttatggcagcaccttatatttagaacaagtggtaattccctttactaagtgaacagattattaaaacctgtagtagctttgaaccgtttgtacttgaaaatgggggtataaaggggtatatattttttccagaaccacatttattggcgtatacatagaagcaaatcttaaggcatgctgaaatttgttgtaaatcccaatctttactgccatggggaaaagaacgctggaattttccaaacttaagtctgtaaatatgctcatcttaagttcatgtaatgtttccgctaactcaccaagaataagctgacaatttaaacaacttttactgtgtaaaaatgaagtgcacggcatggcatcacagtatcttgacatttgttttgtgtcatttagctactttagaaaatagtttctgaactctttccccctttatactgtattaaggcaaaaacaaaacttctgaagcattaaagatcttcaccaaaataactattggtaacttcaggaatttgtcagttgccttatgtgaggatgaatagatccaccaagcacgcctataatacaaagtaaactatgatttttattgtgaaattttcatagatggaaaattgaatattctgtccatttcattttacaattatcttaccacttatttttgtaccatgtatttcaattgcctgtttagtgaaaaataaaaattaaaaaaaccta

SEQ ID NO: 116614 - DNA, 3768 bp, Homo sapiens
  Payload ID: 2741
  Gene Symbol: CEP68
  Gene Name: centrosomal protein 68kDa
  ENST ID: ENST00000537589
  CDS Start-End: 881-1765
agggtccgccagctcggggccagcgcatggggctgctgagaccgctccggacgtgcgaagcgttcgcggtgcggtggagaagaccaagctttcttcctccgaggagttccctcagactctgagccttcccagaacaacaactatttgctcaggacatgatgctgataccgaagatgatccatccctagcagatttgccccaggcactggacctcagccagcagcctcacagctcaggtctctcttgcctgtcacagtggaagtccgtgctgagcccaggttccgcagctcagccttccagctgcagcatctctgcttcctccacaggcagcagtctccagggtcaccaggagagggcggagcctcgtggtggttctctggccaaggtctcctcctccctggagccggtcgtcccccaggaaccttcctctgtggtggggctaggacctcggccccagtggtcaccacagcctgtgttctctgggggtgatgcttctgggctaggcaggagacgcctctccttccaggctgagtactgggcctgtgtgctgccagattccctgcctccatcacccgaccgccactcccctctctggaacccaaataaagagtatgaagatctgcttgactatacttacccactgaggcccgggcctcagctcccaaagcaccttgatagccgtgtgccagctgaccctgtcctgcaggactccggggtagacctggatagcttctctgtctctccagcaagcaccctcaaatcacctactaatgtctcccccaactgcccaccagcagaggccactgccctgccattttctgggcccagagagccaagccttaagcagtggccctccagagtaccccagaaacagggtggcatgggcttggcatcttggagccaacttgcatctacccccagagccccaggcagtagggatgctcgttgggagcgcagagagccagccctgaggggtgcgaaggaccggctgactataggcaagcaccttgatatgggctctccccagctaaggacacgggacagagggtggccctcgcccaggccagagagggagaagaggaccagccagagtgcccggcgccctacctgcacagagtctaggtggaaatcagaagaggaagtggaaagtgatgacgagtatcttgccctccccgctcggctgacacaggtttctagcctggtttcgtatctaggatccatttctaccttggttaccctgcccactggggatatcaaagggcagagccccttggaagtgtcagacagtgatgggccagcttccttcccttcaagctccagccaaagccagcttccccctggagctgccctccaaggatctggggatcctgagggccagaatccctgtttcctgcgctccttcgtccgtgcccacgactccgcaggggaaggcagtctggggagcagccaggccctcggggtctcctctggactgctgaaaacacgcccctccttgccagctaggttggaccggtggccattctcagacccagatgttgaagggcagcttcccaggaaaggaggagaacagggaaaagaatcactggtgcaatgtgtgaaggtaatgacactcaacgttaggaagctttgtgtacaggtgtcttgtctcttcccccaatccactaacatcataataaaacatgttcatgttgaccaggcactttttatgtgccaggcattgtgctgtaccttatcttattcagtcctcacaacttttaccaggtaagcactgttctcattttactttttggaggaaagagcagagagaggttaggtaacgtgcccacttataattagcaagggcttgagccaagaatgagacccaggtagactatttgcagaggctgagctcttagccactacccttggctgcttcctaactcagaggtattctgaacaaaaaaggttttgtgcacagatgcctttaggaaacactgggctaaacaaaggtaagtggctttcttgactgcaggacttctagagcttcatttgccacagtggtttaagtgcaaagttaggggcattggatgtactgttgcctagactttgtggccaccggaccatcttgtgaaccaaatgacttaatatctggaggtataaagaacactgcgtggaatagggttatcggtgtcaggcatctgaatttgaaacatggcactgctgtctttggaatgttggctcagcctcttgagtttgctcatttgtaaaatgtggagccctgccttcttaggatgttgtgtgcattaaataattcatgttgagggcttcggtgcattcccagacatgttgaaggttcaggaatgtgcctgtccaggaacgtgtcctagcgcttgcggggggctttcaccttcccaggaggtgacgtggttattttgtcttgtgaggtaggtaggacacgttatcatggacccctctttactgataaaagattgagatgccatgaggtaaagttgttcttcgctatagcttcaggttagtcatgattttagtcatttattttacgttcacttttccagagaaacatggacgtatctggctccaagatgctgattctagttagtaatggtgctgatccaagaattggtttccatggcaggcacgcctcttctgggctgctccattcctacctgcaaggctgggttttctcagcctgtcatttttgatgtcacaccaggctgtggttttcattgctttggcagagggaggtacagagtcgtggagtcgggacaggtgagcaaggaggagagaggaaactgaagacattttgctgtcagctggaagagctgatctgctggctgtataatgttgcagatgttactgaccacgggactgcagccaggtccaatcttacaagtctcaagtcttctctgcagctttaccgggtaatatgcggtcctggctctggcttgttccctcacaagagtgtggctaaattactcgattacaaagtaaaatctcaaataaccaatgtctggtatgttatagctcagttgactattatacctgaaatctaattagagcttcacattcttaaagcggaacgctttgtaaaatgcatgaattatttcccaggccaaatggagcttgaagatacaatatatttatctcaaatcaaaaatactttaggttttgggctggcaggtgcagtgggacaagtcttttatcccagctactctggaagctgagacaggaagattgcttgagcccaggagttcgagtacagcctgagcaacatagcaagacccccccccctcaaaaaaaagttttttcttaattaaaaacaaaaatactttagggtgatttgcaatataattttccaaatgtctcagggattataaatacagacttgcactattatgacgcctctagttatgtatggctattgaagtaaaattaaagactcagatttttttatttgcactagccacattctgcatgttcaaccatcacatttgtctagtggctaccacgtagaacagtgcagatgtagaacacttccatcaccacataaagtcctattggactgcaccactatttaaagatctgagctgaaattgtactgactccagaatctacaatagggcattttgatggtatttaaatagaaatctaggccaggcaccttggctcacactattaatcccagcactttgggatgctgaggctggaggatcgcttgagcccgggagttccagaccagcctgggcaatatagtgagacctcgtctct

SEQ ID NO: 116615 - DNA, 2732 bp, Homo sapiens
  Payload ID: 2742
  Gene Symbol: CEP70
  Gene Name: centrosomal protein 70kDa
  Uniprot ID: Q8NHQ1
  ENST ID: ENST00000264982
  CDS Start-End: 268-2061
attcgcaggccaaagaggggctggccctcgacgcgctcgggctcgattggccgccctcccccggcggtggtaacggtcgcggaggcggggcctgacgtagctgatcccagcctaacctggcccggctggctgctggtgggaggccggcgactgagtaagatgaagatccagtttcagacatgagactcgttgggtgatcatttcattgagatcaacctgaatgaccaggtgtaaagtgcaagagtaatatgctatgactgagtaactatgtttccggtagcccctaaaccccaggattccagtcaaccatcagacagactcatgactgaaaaacagcaggaagaagcagaatgggaaagcataaatgtgctattgatgatgcatggcttaaaacctttgtctctagtcaaaagaacagatctcaaagatctcatcatttttgacaaacagtcatcacaaaggatgagacagaatttgaaattgttggtggaagaaacatcatgtcaacagaacatgatacaggagcttatagaaactaatcaacagcttagaaatgaacttcagctagagcaaagccgagcagccaatcaagaacaacgagctaatgacttggaacaaattatggaaagtgtgaaatccaaaattggtgaattggaggatgaatcactaagtagggcttgccaccaacagaataaaataaaagatcttcaaaaggagcagaaaactttacaggtgaagtgccagcattataagaaaaaacgaacggagcaagaagaaactattgcttctttgcaaatggaagtctgtagattaaaaaaggaggaagaagatcgcattgtcactcaaaacagagtgtttgcctatctgtgcaaaagagttcctcataccgtcttggatagacagttgctttgtctaattgattactatgaatctaaaattagaaaaattcatacacaaaggcaatataaagaagatgaaagtcagtcagaagaagaaaacgactacagaaatctggatgcctcaccaacttataaaggccttttaatgtcattacagaatcaactcaaggaatcaaaatctaagattgatgcactttcaagtgaaaagctgaacctccaaaaagatttggaaaccaggcctacgcagcatgaattaagactttataaacagcaggtgaagaagctggaaaaagcccttaagaaaaacgtcaaattacaggagcttattaatcataagaaggctgaggacacagagaagaaagatgagcccagcaaatataatcagcaacaggccctaattgaccagagatactttcaggtgctgtgtagcatcaattcaattatccacaatccaagagctccagtaataatttataaacagaccaaagggggagtccaaaattttaataaagatcttgttcaagattgtggatttgagcatcttgttcctgtaatagaaatgtgggcagatcaactgacatccttaaaggatttgtataagtccttgaaaacactatctgcagaactggtaccttggcttaatttgaagaagcaggatgaaaatgaaggtatcaaagttgaagatttgttgtttatagtagatactatgctggaagaagttgaaaataaggaaaaggacagcaatatgccacactttcaaactttgcaagctattgtttctcacttccaaaagttatttgatgtgccttctttaaatggagtctatccccgaatgaatgaagtttatactaggcttggagaaatgaacaatgctgtgagaaacctccaagaactcttagaattagatagttcatcctcattgtgtgtgctagtaagcactgttggaaaactctgtaggctgattaatgaagatgtgaatgagcaggttatgcaggtattaggacctgaagacctccagagcattatctacaaattggaagaacacgaggaatttttcccagcatttcaggcatttactaatgatctacttgaaatcttagaaattgatgacttggatgccattgtacctgcagtaaagaaattaaaagtactttcatactgaaaacaaatcaaatcatttttactgtgtaaattgtattcttaacattttgtattttgtaggattgatcttattttgagacaagggttgtaaaatgtatttgctctcagaattcatccccttcttagtattaggtcattcttcatctgtataatttttattaactttgagattcttatacagaaaatagttgcaagggtaaggtaattaactttagatcccttcatttctaaagcaattattgagtgcttaaaatttaaggttgttttagagtggagtttgtgagtaaaagaggagcccagggagacagattgcaagtagtaggttgcaatcttttagattcagcttgtaataatctttgagccacaccaaaaggaatgccaagggctctctaaatttagccagtaggaagctactgctctcctggcaaggattaattggcacattctgttaagatatccctcatgacagttgccctttcaaagcaggaggaagaaaaggaagaaagaaaaactgtttcatcatttctgttagggtaggaaatgaatcatagggtaaaatggatgagtagatagaagtctctcatttaaaaagtgtcttttgcaatcttgatgtaatgcactttttataaggacttgagatctcaaataaaatttctgtaaagaatttccaaa

SEQ ID NO: 116616 - DNA, 2037 bp, Homo sapiens
  Payload ID: 2742
  Gene Symbol: CEP70
  Gene Name: centrosomal protein 70kDa
  Uniprot ID: Q8NHQ1
  ENST ID: ENST00000481834
  CDS Start-End: 160-1824
agcctaacctggcccggctggctgctggtgggaggccggcgactgagtaagatgaagatccagtttcagacatgagactcgttgggtgatcatttcattgagatcaacctgaatgaccaggtgtaaagtgcaagagtaatatgctatgactgagtaactatgtttccggtagcccctaaaccccaggattccagtcaaccatcagacagactcatgactgaaaaacagcaggaagaagcagaatgggaaagcataaatgtgctattgatgatgcatggcttaaaacctttgtctctagtcaaaagaacagatctcaaagatctcatcatttttgacaaacagtcatcacaaaggatgagacagaatttgaaattgttggtggaagaaacatcatgtcaacagaacatgatacaggagcttatagaaactaatcaacagcttagaaatgaacttcagctagagcaaagccgagcagccaatcaagaacaacgagctaatgacttggaacaaattatggaaagtgtgaaatccaaaattggtgaattggaggatgaatcactaagtagggcttgccaccaacagaataaaataaaagatcttcaaaaggagcagaaaactttacaggtgaagtgccagcattataagaaaaaacgaacggagcaagaagaaactattgcttctttgcaaatggaagtctgtagattaaaaaaggaggaagaagatcgcattgtcactcaaaacagagtgtttgcctatctgtgcaaaagagttcctcataccgtcttggatagacagttgctttgtctaattgattactatgaatctaaaattagaaaaattcatacacaaaggcaatataaagaagatgaaagtcagtcagaagaagaaaacgactacagaaatctggatgcctcaccaacttataaaggccttttaatgtcattacagaatcaactcaaggaatcaaaatctaagattgatgcactttcaagtgaaaagctgaacctccaaaaagatttggaaaccaggcctacgcagcatgaattaagactttataaacagcaggtgaagaagctggaaaaagcccttaagaaaaacgtcaaattacaggagcttattaatcataagaaggctgaggacacagagaagaaagatgagcccagcaaatataatcagcaacaggccctaattgaccagagatactttcaggtgctgtgtagcatcaattcaattatccacaatccaagagctccagtaataatttataaacagaccaaagggggagtccaaaattttaataaagatcttgttcaagattgtggatttgagcatcttgttcctgtaatagaaatgtgggcagatcaactgacatccttaaaggatttgtataagtccttgaaaacactatctgcagaactggtaccttggcttaatttgaagaagcaggatgaaaatgaaggtatcaaagttgaagatttgttgtttatagtagatactatgctggaagaagttgaaaataaggaaaaggacagcaatatgccacactttcaaactttgcaagctattgtttctcacttccaaaagttatttgatgtgccttctttaaatggagtctatccccgaatgaatgaagtttatactaggcttggagaaatgaacaatgctgtgagaaacctccaagaactcttagaattagatagttcatcctcattgtgtgtgctagtaagcactgttggaaaactctgtaggctgattaatgaagatgtgaatgagcaggttatgcaggtattaggacctgaagacctccagaggtatttgttttaaaagtttacaaagtatcatccagaatggctgggtgtggtggcacacgcctgtagtcccagctacttgggaggctgatgtgggaggatcacttgaacccaggagtttaagtccagtctgagcaaggcagtgagaccctgtctctaaacaataaaaattaaaataagtattatcgagagttcctggaggggtgaaattaaagactttcaaaactta

SEQ ID NO: 116617 - DNA, 1021 bp, Homo sapiens
  Payload ID: 2742
  Gene Symbol: CEP70
  Gene Name: centrosomal protein 70kDa
  ENST ID: ENST00000462419
  CDS Start-End: 243-1021
aaagaggggctggccctcgacgcgctcgggctcgattggccgccctcccccggcggtggtaacggtcgcggaggcggggcctgacgtagctgatcccagcctaacctggcccggctggctgctggtgggaggccggcgactgagtaagatgaagatccagtttcagacatgagactcgttgggtgatcatttcattgagatcaacctgaatgaccaggtgtaaagtgcaagagtaatatgctatgactgagcaggaagaagcagaatgggaaagcataaatgtgctattgatgatgcatggcttaaaacctttgtctctagtcaaaagaacagatctcaaagatctcatcatttttgacaaacagtcatcacaaaggatgagacagaatttgaaattgttggtggaagaaacatcatgtcaacagaacatgatacaggagcttatagaaactaatcaacagcttagaaatgaacttcagctagagcaaagccgagcagccaatcaagaacaacgagctaatgacttggaacaaattatggaaagtgtgaaatccaaaattggtgaattggaggatgaatcactaagtagggcttgccaccaacagaataaaataaaagatcttcaaaaggagcagaaaactttacaggtgaagtgccagcattataagaaaaaacgaacggagcaagaagaaactattgcttctttgcaaatggaagtctgtagattaaaaaaggaggaagaagatcgcattgtcactcaaaacagagtgtttgcctatctgtgcaaaagagttcctcataccgtcttggatagacagttgctttgtctaattgattactatgaatctaaaattagaaaaattcatacacaaaggcaatataaagaagatgaaagtcagtcagaagaagaaaacgactacagaaatctggatgcctcaccaacttataaaggccttttaatgtcattacagaatcaactcaaggaatcaaaatctaagattgatgcactttcaagtgaaaa

SEQ ID NO: 116618 - DNA, 1811 bp, Homo sapiens
  Payload ID: 2742
  Gene Symbol: CEP70
  Gene Name: centrosomal protein 70kDa
  ENST ID: ENST00000489254
  CDS Start-End: 217-1554
cgggctcgattggccgccctcccccggcggtggtaacggtcgcggaggcggggcctgacgtagctgatcccagcctaacctggcccggctggctgctggtgggaggccggcgactgagtaagatgaagatccagtttcagacatgagactcgttgggtgatcatttcattgagatcaacctgaatgaccaggtgtaaagtgcaagagtaatatgctatgactgaggtgaagtgccagcattataagaaaaaacgaacggagcaagaagaaactattgcttctttgcaaatggaagtctgtagattaaaaaaggaggaagaagatcgcattgtcactcaaaacagagtgtttgcctatctgtgcaaaagagttcctcataccgtcttggatagacagttgctttgtctaattgattactatgaatctaaaattagaaaaattcatacacaaaggcaatataaagaagatgaaagtcagtcagaagaagaaaacgactacagaaatctggatgcctcaccaacttataaaggccttttaatgtcattacagaatcaactcaaggaatcaaaatctaagattgatgcactttcaagtgaaaagctgaacctccaaaaagatttggaaaccaggcctacgcagcatgaattaagactttataaacagcaggtgaagaagctggaaaaagcccttaagaaaaacgtcaaattacaggagcttattaatcataagaaggctgaggacacagagaagaaagatgagcccagcaaatataatcagcaacaggccctaattgaccagagatactttcaggtgctgtgtagcatcaattcaattatccacaatccaagagctccagtaataatttataaacagaccaaagggggagtccaaaattttaataaagatcttgttcaagattgtggatttgagcatcttgttcctgtaatagaaatgtgggcagatcaactgacatccttaaaggatttgtataagtccttgaaaacactatctgcagaactggtaccttggcttaatttgaagaagcaggatgaaaatgaaggtatcaaagttgaagatttgttgtttatagtagatactatgctggaagaagttgaaaataaggaaaaggacagcaatatgccacactttcaaactttgcaagctattgtttctcacttccaaaagttatttgatgtgccttctttaaatggagtctatccccgaatgaatgaagtttatactaggcttggagaaatgaacaatgctgtgagaaacctccaagaactcttagaattagatagttcatcctcattgtgtgtgctagtaagcactgttggaaaactctgtaggctgattaatgaagatgtgaatgagcaggttatgcaggtattaggacctgaagacctccagagcattatctacaaattggaagaacacgaggaatttttcccagcatttcaggcatttactaatgatctacttgaaatcttagaaattgatgacttggatgccattgtacctgcagtaaagaaattaaaagtactttcatactgaaaacaaatcaaatcatttttactgtgtaaattgtattcttaacattttgtattttgtaggattgatcttattttgagacaagggttgtaaaatgtatttgctctcagaattcatccccttcttagtattaggtcattcttcatctgtataatttttattaactttgagattcttatacagaaaatagttgcaagggtaaggtaattaactttagatcccttcatttctaaagcaattattgagtgcttaaaatttaa

SEQ ID NO: 116619 - DNA, 1016 bp, Homo sapiens
  Payload ID: 2742
  Gene Symbol: CEP70
  Gene Name: centrosomal protein 70kDa
  ENST ID: ENST00000468900
  CDS Start-End: 136-1016
ggcccggctggctgctggtgggaggccggcgactgagtaagatgaagatccagtttcagacatgagactcgttgggtgatcatttcattgagatcaacctgaatgaccaggtgtaaagtgcaagagtaatatgctatgactgaggaagaagcagaatgggaaagcataaatgtgctattgatgatgcatggcttaaaacctttgtctctagtcaaaagaacagatctcaaagatctcatcatttttgacaaacagtcatcacaaaggatgagacagaatttgaaattgttggtggaagaaacatcatgtcaacagaacatgatacaggagcttatagaaactaatcaacagcttagaaatgaacttcagctagagcaaagccgagcagccaatcaagaacaacgagctaatgacttggaacaaattatggaaagtgtgaaatccaaaattggtgaattggaggatgaatcactaagtagggcttgccaccaacagaataaaataaaagatcttcaaaaggagcagaaaactttacaggtgaagtgccagcattataagaaaaaacgaacggagcaagaagaaactattgcttctttgcaaatggaagtctgtagattaaaaaaggaggaagaagatcgcattgtcactcaaaacagagtgtttgcctatctgtgcaaaagagttcctcataccgtcttggatagacagttgctttgtctaattgattactatgaatctaaaattagaaaaattcatacacaaaggcaatataaagaagatgaaagtcagtcagaagaagaaaacgactacagaaatctggatgcctcaccaacttataaaggccttttaatgtcattacagaatcaactcaaggaatcaaaatctaagattgatgcactttcaagtgaaaagctgaacctccaaaaagatttggaaaccaggcctacgcagcatgaattaagactttataaacagcaggtgaagaagctggaaaaagcccttaagaaaaacgtcaa

SEQ ID NO: 116620 - DNA, 569 bp, Homo sapiens
  Payload ID: 2742
  Gene Symbol: CEP70
  Gene Name: centrosomal protein 70kDa
  ENST ID: ENST00000459695
  CDS Start-End: 1-216
ctctgtaggctgattaatgaagatgtgaatgagcaggttatgcaggtattaggacctgaagacctccagagcattatctacaaattggaagaacacgaggaatttttcccagcatttcaggcatttactaatgatctacttgaaatcttagaatggctctttgcttttagaagaggagatgaagcttggtatgaaaataagggaatgagtcaatgaaaacttgataagaagaataagtgaaagaagtatctaattagaatatatagcctactgaacataaaggaagttttgtgaccagtcttatgtgcagtggggaagcaagggagacaatgagtgagcttgctttaggcttgtcctcatgtttaaaaagatcacagcaagtgaaaatgtaatttgaaagttaaacttgagatgaggtatgaaactgtataagtgtgttgtctgatatcctgaagagcctggtttcatagaataatatgattcttgctttgggattgctattaacttaagcagtgatgttctcatcattcataaatatttggcacattaataaacatattttaataggg

SEQ ID NO: 116621 - DNA, 598 bp, Homo sapiens
  Payload ID: 2742
  Gene Symbol: CEP70
  Gene Name: centrosomal protein 70kDa
  ENST ID: ENST00000485115
  CDS Start-End: 530-598
tcacctgggcctaaaagtggtcagactgacccttgtcggggaggagccatctgggacagggtcgcgccaattaaaaatccctgcgtaagggtttggggatcggacaaaactgcctccagtcccagctccccaggctttgtgttctttggcttctcctttaatgtctcagcgcctccgattctttatttgtatactaaagctggtaattcttgccttacaaggtggttgtgagggttaaatgaggcagtaagagtaaagcttagaatcacgtcgggcacagactcgatttaagctgtaggtaattactccatcccccaaaatcgacccgggctgaagcgctagttttgtgtcaaacaaccgcgaaggttgtttggggagtgaggactcggagcagaagggggcggttaggcgaatagcacagatgaagatccagtttcagacatgagactcgttgggtgatcatttcattgagatcaacctgaatgaccaggtgtaaagtgcaagagtaatatgctatgactgagtaactatgtttccggtagcccctaaaccccaggattccagtcaaccatcagacagactcatgactgaaaaacag

SEQ ID NO: 116622 - DNA, 1993 bp, Homo sapiens
  Payload ID: 2742
  Gene Symbol: CEP70
  Gene Name: centrosomal protein 70kDa
  Uniprot ID: Q8NHQ1
  ENST ID: ENST00000484888
  CDS Start-End: 188-1981
ctggtgggaggccggcgactgagtaagatgaagatccagtttcagacatgagactcgttgggtgatcatttcattgagatcaacctgaatgaccaggtgtaaagtgcaagagtaatatgctatgactgaggcaactcaaattttttaattgccaatttctgtttcttttgattctacaaaagtaactatgtttccggtagcccctaaaccccaggattccagtcaaccatcagacagactcatgactgaaaaacagcaggaagaagcagaatgggaaagcataaatgtgctattgatgatgcatggcttaaaacctttgtctctagtcaaaagaacagatctcaaagatctcatcatttttgacaaacagtcatcacaaaggatgagacagaatttgaaattgttggtggaagaaacatcatgtcaacagaacatgatacaggagcttatagaaactaatcaacagcttagaaatgaacttcagctagagcaaagccgagcagccaatcaagaacaacgagctaatgacttggaacaaattatggaaagtgtgaaatccaaaattggtgaattggaggatgaatcactaagtagggcttgccaccaacagaataaaataaaagatcttcaaaaggagcagaaaactttacaggtgaagtgccagcattataagaaaaaacgaacggagcaagaagaaactattgcttctttgcaaatggaagtctgtagattaaaaaaggaggaagaagatcgcattgtcactcaaaacagagtgtttgcctatctgtgcaaaagagttcctcataccgtcttggatagacagttgctttgtctaattgattactatgaatctaaaattagaaaaattcatacacaaaggcaatataaagaagatgaaagtcagtcagaagaagaaaacgactacagaaatctggatgcctcaccaacttataaaggccttttaatgtcattacagaatcaactcaaggaatcaaaatctaagattgatgcactttcaagtgaaaagctgaacctccaaaaagatttggaaaccaggcctacgcagcatgaattaagactttataaacagcaggtgaagaagctggaaaaagcccttaagaaaaacgtcaaattacaggagcttattaatcataagaaggctgaggacacagagaagaaagatgagcccagcaaatataatcagcaacaggccctaattgaccagagatactttcaggtgctgtgtagcatcaattcaattatccacaatccaagagctccagtaataatttataaacagaccaaagggggagtccaaaattttaataaagatcttgttcaagattgtggatttgagcatcttgttcctgtaatagaaatgtgggcagatcaactgacatccttaaaggatttgtataagtccttgaaaacactatctgcagaactggtaccttggcttaatttgaagaagcaggatgaaaatgaaggtatcaaagttgaagatttgttgtttatagtagatactatgctggaagaagttgaaaataaggaaaaggacagcaatatgccacactttcaaactttgcaagctattgtttctcacttccaaaagttatttgatgtgccttctttaaatggagtctatccccgaatgaatgaagtttatactaggcttggagaaatgaacaatgctgtgagaaacctccaagaactcttagaattagatagttcatcctcattgtgtgtgctagtaagcactgttggaaaactctgtaggctgattaatgaagatgtgaatgagcaggttatgcaggtattaggacctgaagacctccagagcattatctacaaattggaagaacacgaggaatttttcccagcatttcaggcatttactaatgatctacttgaaatcttagaaattgatgacttggatgccattgtacctgcagtaaagaaattaaaagtactttcatactgaaaacaaatcaaa

SEQ ID NO: 116623 - DNA, 1054 bp, Homo sapiens
  Payload ID: 2742
  Gene Symbol: CEP70
  Gene Name: centrosomal protein 70kDa
  Uniprot ID: Q8NHQ1
  ENST ID: ENST00000464035
  CDS Start-End: 161-799
atgaagatccagtttcagacatgagactcgttgggtgatcatttcattgagatcaacctgaatgaccaggtgtaaagtgcaagagtaatatgctatgactgaggcaactcaaattttttaattgccaatttctgtttcttttgattctacaaaagtaactatgtttccggtagcccctaaaccccaggattccagtcaaccatcagacagactcatgactgaaaaacagcaggaagaagcagaatgggaaagcataaatgtgctattgatgatgcatggcttaaaacctttgtctctagtcaaaagaacagatctcaaagatctcatcatttttgacaaacagtcatcacaaaggatgagacagaatttgaaattgttggtggaagaaacatcatgtcaacagaacatgatacaggagcttatagaaactaatcaacagcttagaaatgaacttcagctagagcaaagccgagcagccaatcaagaacaacgagctaatgacttggaacaaattatggaaagtgtgaaatccaaaattggtgaattggaggatgaatcactaagtagggcttgccaccaacagaataaaataaaagatcttcaaaaggagcagaaaactttacaggtgaagtgccagcattataagaaaaaacgaacggagcaagaagaaactattgcttctttgcaaatggaagtctgtagattaaaaaaggaggaagaagatcgcattgtcactcaaaacagagtgtttgcctatctgtgcaaaagagttcctcataccgtcttggatagacagtaattttgctacataaattgatatgtagctagattcattgttgtgtttgtttgtttgttttacctgatattatcttgggggtggttataactcttataaactagaaaagcctctctctcctcctcttctgcattgtttttccctgctcatcctgttcttttttttttttttttttgttctagaggtcctttgaagaatggaattgaacatttactaaaaataacactaaacttttaaataaattcataattaatcaga

SEQ ID NO: 116624 - DNA, 551 bp, Homo sapiens
  Payload ID: 2742
  Gene Symbol: CEP70
  Gene Name: centrosomal protein 70kDa
  ENST ID: ENST00000470159
  CDS Start-End: 204-551
ataagcctccatgtaagtgacagggcacccaaggagtgcgttggaagcgccagcgtgcccgagaccagcacatcgcaccgacgccttcgtttgcgatgaagatccagtttcagacatgagactcgttgggtgatcatttcattgagatcaacctgaatgaccaggtgtaaagtgcaagagtaatatgctatgactgagtaactatgtttccggtagcccctaaaccccaggattccagtcaaccatcagacagactcatgactgaaaaacagcaggaagaagcagaatgggaaagcataaatgtgctattgatgatgcatggcttaaaacctttgtctctagtcaaaagaacagatctcaaagatctcatcatttttgacaaacagtcatcacaaaggatgagacagaatttgaaattgttggtggaagaaacatcatgtcaacagaacatgatacaggagcttatagaaactaatcaacagcttagaaatgaacttcagctagagcaaagccgagcagccaatcaagaacaacgagctaatgacttggaa

SEQ ID NO: 116625 - DNA, 2028 bp, Homo sapiens
  Payload ID: 2742
  Gene Symbol: CEP70
  Gene Name: centrosomal protein 70kDa
  Uniprot ID: Q8NHQ1
  ENST ID: ENST00000474781
  CDS Start-End: 287-2026
gggctggccctcgacgcgctcgggctcgattggccgccctcccccggcggtggtaacggtcgcggaggcggggcctgacgtagctgatcccagcctaacctggcccggctggctgctggtgggaggccggcgactgagtaagatgaagatccagtttcagacatgagactcgttgggtgatcatttcattgagatcaacctgaatgaccaggtgtaaagtgcaagagtaatatgctatgactgagcccctaaaccccaggattccagtcaaccatcagacagactcatgactgaaaaacagcaggaagaagcagaatgggaaagcataaatgtgctattgatgatgcatggcttaaaacctttgtctctagtcaaaagaacagatctcaaagatctcatcatttttgacaaacagtcatcacaaaggatgagacagaatttgaaattgttggtggaagaaacatcatgtcaacagaacatgatacaggagcttatagaaactaatcaacagcttagaaatgaacttcagctagagcaaagccgagcagccaatcaagaacaacgagctaatgacttggaacaaattatggaaagtgtgaaatccaaaattggtgaattggaggatgaatcactaagtagggcttgccaccaacagaataaaataaaagatcttcaaaaggagcagaaaactttacaggtgaagtgccagcattataagaaaaaacgaacggagcaagaagaaactattgcttctttgcaaatggaagtctgtagattaaaaaaggaggaagaagatcgcattgtcactcaaaacagagtgtttgcctatctgtgcaaaagagttcctcataccgtcttggatagacagttgctttgtctaattgattactatgaatctaaaattagaaaaattcatacacaaaggcaatataaagaagatgaaagtcagtcagaagaagaaaacgactacagaaatctggatgcctcaccaacttataaaggccttttaatgtcattacagaatcaactcaaggaatcaaaatctaagattgatgcactttcaagtgaaaagctgaacctccaaaaagatttggaaaccaggcctacgcagcatgaattaagactttataaacagcaggtgaagaagctggaaaaagcccttaagaaaaacgtcaaattacaggagcttattaatcataagaaggctgaggacacagagaagaaagatgagcccagcaaatataatcagcaacaggccctaattgaccagagatactttcaggtgctgtgtagcatcaattcaattatccacaatccaagagctccagtaataatttataaacagaccaaagggggagtccaaaattttaataaagatcttgttcaagattgtggatttgagcatcttgttcctgtaatagaaatgtgggcagatcaactgacatccttaaaggatttgtataagtccttgaaaacactatctgcagaactggtaccttggcttaatttgaagaagcaggatgaaaatgaaggtatcaaagttgaagatttgttgtttatagtagatactatgctggaagaagttgaaaataaggaaaaggacagcaatatgccacactttcaaactttgcaagctattgtttctcacttccaaaagttatttgatgtgccttctttaaatggagtctatccccgaatgaatgaagtttatactaggcttggagaaatgaacaatgctgtgagaaacctccaagaactcttagaattagatagttcatcctcattgtgtgtgctagtaagcactgttggaaaactctgtaggctgattaatgaagatgtgaatgagcaggttatgcaggtattaggacctgaagacctccagagcattatctacaaattggaagaacacgaggaatttttcccagcatttcaggcatttactaatgatctacttgaaatcttagaaattgatgacttggatgccattgtacctgcagtaaagaaattaaaagtactttcatactgaaa

SEQ ID NO: 116626 - DNA, 2434 bp, Homo sapiens
  Payload ID: 2743
  Gene Symbol: CEP72
  Gene Name: centrosomal protein 72kDa
  Uniprot ID: Q9P209
  ENST ID: ENST00000264935
  CDS Start-End: 91-2034
ggctctcggttctgccgacgcaggtcccgcccctctcgtagcctcgccccgcccgccgcgcaggcgccgtccgagggctccgtttgaaacatggcgcgggctggccctcggctggtgctgagcgaggaggcggttcgggcgaagagcggcttagggcctcaccgcgacctggctgagcttcagtcattgtctattcctggaacttaccaagagaagatcacccacctgggacattctctgatgagtttaacaggtctgaaatctttggatctctcgcgcaactccttggttagtctggagggcattcagtacctgactgcattggagagtctcaatctctactacaactgcatctcctcgttggcagaagtgtttcggctccacgccttaaccgagctcgtggatgtggacttccggctgaaccccgtggtgaaggttgagcctgactaccgcctttttgttgtgcacctgctccccaagctccagcagctggacgatcgccccgtgagagcaagcgagcggaaggcttcccgactgcattttgcatcagaggactcactcgactccaaagagagcgtcccagcttctttgaaagagggcagaccacaccaccccagagccaagtgcaccgaggccttggccaagcagagcctggtcatggatgcggatgacgaggcagtcctgaacctcattgcagagtgcgagtgggacctcggcaggcctcccgggagcacgagcttcagccagaaggggcgtgaggccgactctcgtggttcccaagaatccagacatctgttgagcccgcagttggtacagtaccagtgtggggactctgggaagcagggccgtgagacgaggaggagcagctgcagagggtgctgtctggagaagatgccttggagccagctctgtggagagcttccgccactgtacggagcggagccagaggcctcccgtgcccccaggccacacacgtacttcaccccacacccagactccatggataccgaggactcggcctcttctcagaagttggatttgtcaggagaaatggtgcctggtcccctgccagcccccggaaagtgcaggaagcgaagaatgcctgttggaagattccagacgttttcggaccaggagggtttgggctgcccggagagaactcatgggtcctccgtgcccaaggagagcctgagcagacaggacagctcagaaagcaggaacgggaggaccttgtctcagcctgaggcctcggagactgaggagcagaggtctcggggtgtgaccgacaccagagagccgtctcccgggtcacactcggctctacccgggaagaagacggccctgcaggcggcgctcctggagacgctcttggacctggtggacaggagctggggcggctgcaggtccctgcacagcaacgaggcattccttgctcaggcaagacacatcttgtcatctgttgaagaattcacagcagctcaggacagctctgcgatggtgggtgaagatgtcggctccctggctctggagagtaagtccctgcaaagccgccttgctgagcagcagcagcagcacgcccgggagatgagcgaggtgacggcggagctgcaccacacacacaaggagctggatgatttgagacaacatttagataaatctttggaagagaacagtaggttaaaatcgcttttgttgagtatgaaaaaggaagtgaagagtgcagacactgcagccacgttaaatttgcagatcgctggacttcaaacaagtgtgaagaggctgtgtggcgagattgtggaactgaagcagcacctggagcactacgacaagatccaggagctcacgcagatgctgcaggagagccacagctccctggtcagcaccaatgaacacctgctgcaggagctgagccaggtgcgggcgcagcacagagccgaggtggagcagatgcactggagctaccaggagctcaagaagaccatggccctgtttccacacagcagcgccagccatggaggctgccaggcctgctgactcctgccgagaagctgggccaccccttaagcttcctggtaaagttacattgtctgcacctttgtacttctttattgagtgtactggctggcaagagttctctcttctgttggtaattatttaggatttttggaatgtattcaggacctgtagcttggttttctaaagcacctcgtaaaatgatatgattactccaagccctctgcatgttttcagacagaacacattgacatattttgagacaaactgactattaatcttgtatccagtatcctgagatgaagtaaatgcagtgttctactgcctgatgtgaaagagagctatgtatgataattaaagaaaataattttctgtgtaacaagcaatctttatttaataaacaaatacattgttctgaaaa

SEQ ID NO: 116627 - DNA, 528 bp, Homo sapiens
  Payload ID: 2743
  Gene Symbol: CEP72
  Gene Name: centrosomal protein 72kDa
  ENST ID: ENST00000625371
  CDS Start-End: 17-528
gggctccgtttgaaacatggcgcgggctggccctcggctggtgctgagcgaggaggcggttcgggcgaagagcggcttagggcctcaccgcgacctggctgagcttcagtcattgtctattcctggaacttaccaagagaagatcacccacctgggacattctctgatgagtttaacaggtctgaaatctttggatctctcgcgcaactccttggttagtctggagggcattcagtacctgactgcattggagagtctcaatctctactacaactgcatctcctcgttggcagaagtgtttcggctccacgccttaaccgagctcgtggatgtggacttccggctgaaccccgtggtgaaggttgagcctgactaccgcctttttgttgtgcacctgctccccaagctccagcagctggacgatcgccccgtgagagcaagcgagcggaaggcttcccgactgcattttgcatcagaggactcactcgactccaaagagagcgtcccagcttctttgaaagagggcag

SEQ ID NO: 116628 - DNA, 2939 bp, Homo sapiens
  Payload ID: 2744
  Gene Symbol: CEP76
  Gene Name: centrosomal protein 76kDa
  Uniprot ID: Q8TAP6
  ENST ID: ENST00000262127
  CDS Start-End: 227-2206
gtttgtccgccactgtttgaaaacagttggcgccgccgccgccggggcctcatttccaggtcagcccccggcctgacgcggcgttgcgtcccccgggagctgcgctaggcgaacggctgcggcgctttgtgctccagtcgctcctaacgctccctggcccggccggggccgcgcagttagggcatctgaggcggggagaagcggcggggagacgccggctgccagcatgtcgctgcctccggagaaagcctccgagctgaagcagctcatccaccagcagctgagcaagatggatgtccatggtagaataagagaaatccttgctgagactatacgggaagaattggcacctgatcaacagcatttatcaacagaagatttgatcaaagcccttagacgtcgaggaatcattgacgatgtgatgaaagaacttaattttgttactgacagtgttgagcaagaactcccttcctctccaaaacaacctatttgttttgatagacaatcgacattaaaaaaaactaatattgatccaacacggaggtatctttaccttcaggttttgggtggaaaagctttcttggaacatctgcaagaacctgagcctttacctggacaagtttgttcaacgtttactttatgtttacattatcgaaaccaacgttttcgttctaaacctgttccatgtgcctgtgaaccagattttcatgatggctttttacttgaagtacacagagaaagcttgggtgatggaactagaatggctgattcaacaacaatgttatcaataagtgatccaattcatatggtgctaatcaaaacagacatatttggtgagacgactttagtagcatcatattttctggaatggcgatcggttttgggctcagaaaatggagtgaccagtctgactgtggaacttatgggtgtaggcacagaatcaaaagtttctgtgggaattttaaatataaaacttgaaatgtatccaccactcaatcaaacgttatctcaagaagtagtgaacacacagcttgctttggaacgtcagaaaactgcagagaaagagcgattatttcttgtatatgctaagcagtggtggagagaatatttgcaaattcgaccctcacacaactcacgactggttaagatttttgcacaggatgaaaatgggataaatagaccagtctgttcctatgttaaaccacttcgagctggacggcttcttgatactccaaggcaagcagcaagatttgttaatgtccttggttatgaacgagcccctgttattggaggaggaggtaaacaggagcagtggtgcactctgctggcctttctctgtagaaacaagggtgactgtgaagatcacgctaaccttctgtgcagccttcttcttggatatggattagaagcctttgtttgtgttgggaccaaggcaaaaggagtacctcatgcatgggttatgacttgtggaactgatggggccatcactttttgggagagtttaacaggacacaggtacatccataaacctaccaatcctgatgaacctccagttgctgaacagcccaaaccactgtacccatatcgaacaattggttgtgttttcaaccatcagatgttcctgggaaattgtcaaccctctgatgcagtagaaacctgtgtatttgatttgaacgatgaatccaaatggaaacccatgagtgaggaagcaattaaatctgtgtgtgctcctggagctacaacatcccttcctccctttccacctctgtgtgcatccacaattgacgcgtcagtaacaagtaatgaaattgaaatgcagctgaggctcctggtgtcagaacacaggaaggatcttggcctcactactgtttgggaagaccagctctcctaccttttatcaccagctttggcttcttatgaatttgagcgtacaacaagtatatcagcaggcaatgaagaatttcaagatgccataagaagggctgtacctgatggtcacacatttaaagggttcccaatacattttgtgtatagaaatgcaagacgtgcatttgccacatgtcttcgatctcctttctgtgaagaaataatctgttgccgtggagaccaagtgcgactggcagttcgtgtccgagtatttacttaccctgaatctgcatgtgctgtttggatcatgtttgcttgtaaatatcgctcggtattatagggccaatatttatataagatttatacctgtgtttaattggaattttacacattgtacattacttagctatttagaggtttgttattttaaaatcacaatctggcttgaatggcatacttcaattttgtatatacttgactggtaatgtttaaaaaaaatcatgcattcctttaaaaattaaggctgaaaaacttgtataaatctccctggaatttagtataaattaagtgtatattctattttaataaatgctactttgtttacagttatcagtagtttaaatattaatataaaatgcattcagttttctttacacaaacaggtaatcaaagagatgtttgtctaagggtttgagccctagacaaatcagtatgatcattacttttcacaggttaatggaattattttatacagattaggagaaattaacctcatgacagatttatttattgcattggtgaaaataaatgttaatgaattaccacttttgtggtttattcgtggtccttgggatatttgagactgtccagaaatttatggttggaccttgaagcaagagtaggaaaaaactaataccagaaaagcataaatattaataacctcatatgaaagtacatgaatcatttagaaatatttatcactgtgatttgttgtaaaaatgaattgggtattttagaaaaactttattatacctctttgttatgatactgataaattgtgatcttgcagtcga

SEQ ID NO: 116629 - DNA, 2197 bp, Homo sapiens
  Payload ID: 2744
  Gene Symbol: CEP76
  Gene Name: centrosomal protein 76kDa
  Uniprot ID: Q8TAP6
  ENST ID: ENST00000423709
  CDS Start-End: 175-1929
tttccaggtcagcccccggcctgacgcggcgttgcgtcccccgggagctgcgctaggcgaacggctgcggcgctttgtgctccagtcgctcctaacgctccctggcccggccggggccgcgcagttagggcatctgaggcggggagaagcggcggggagacgccggctgccagcatgtcgctgcctccggagaaagcctccgagctgaagcagctcatccaccagcagctgagcaagatggatgtccatggtagaataagagaaatccttgctgagactatacgggaagaattggcacctgatcaacagcatttatcaacagaagatttgatcaaagcccttagacgtcgaggaatcattgacgatgtgatgaaagaacttaattttgttactgacagtgttgagcaagaactcccttcctctccaaaacaacctatttgttttgatagacaatcgacattaaaaaaaagtgatggaactagaatggctgattcaacaacaatgttatcaataagtgatccaattcatatggtgctaatcaaaacagacatatttggtgagacgactttagtagcatcatattttctggaatggcgatcggttttgggctcagaaaatggagtgaccagtctgactgtggaacttatgggtgtaggcacagaatcaaaagtttctgtgggaattttaaatataaaacttgaaatgtatccaccactcaatcaaacgttatctcaagaagtagtgaacacacagcttgctttggaacgtcagaaaactgcagagaaagagcgattatttcttgtatatgctaagcagtggtggagagaatatttgcaaattcgaccctcacacaactcacgactggttaagatttttgcacaggatgaaaatgggataaatagaccagtctgttcctatgttaaaccacttcgagctggacggcttcttgatactccaaggcaagcagcaagatttgttaatgtccttggttatgaacgagcccctgttattggaggaggaggtaaacaggagcagtggtgcactctgctggcctttctctgtagaaacaagggtgactgtgaagatcacgctaaccttctgtgcagccttcttcttggatatggattagaagcctttgtttgtgttgggaccaaggcaaaaggagtacctcatgcatgggttatgacttgtggaactgatggggccatcactttttgggagagtttaacaggacacaggtacatccataaacctaccaatcctgatgaacctccagttgctgaacagcccaaaccactgtacccatatcgaacaattggttgtgttttcaaccatcagatgttcctgggaaattgtcaaccctctgatgcagtagaaacctgtgtatttgatttgaacgatgaatccaaatggaaacccatgagtgaggaagcaattaaatctgtgtgtgctcctggagctacaacatcccttcctccctttccacctctgtgtgcatccacaattgacgcgtcagtaacaagtaatgaaattgaaatgcagctgaggctcctggtgtcagaacacaggaaggatcttggcctcactactgtttgggaagaccagctctcctaccttttatcaccagctttggcttcttatgaatttgagcgtacaacaagtatatcagcaggcaatgaagaatttcaagatgccataagaagggctgtacctgatggtcacacatttaaagggttcccaatacattttgtgtatagaaatgcaagacgtgcatttgccacatgtcttcgatctcctttctgtgaagaaataatctgttgccgtggagaccaagtgcgactggcagttcgtgtccgagtatttacttaccctgaatctgcatgtgctgtttggatcatgtttgcttgtaaatatcgctcggtattatagggccaatatttatataagatttatacctgtgtttaattggaattttacacattgtacattacttagctatttagaggtttgttattttaaaatcacaatctggcttgaatggcatacttcaattttgtatatacttgactggtaatgtttaaaaaaaatcatgcattcctttaaaaattaaggctgaaaaacttgtataaatctccctggaatttagtataaattaagtgtatattctattttaataaatgctactttgtttacagtt

SEQ ID NO: 116630 - DNA, 2380 bp, Homo sapiens
  Payload ID: 2744
  Gene Symbol: CEP76
  Gene Name: centrosomal protein 76kDa
  ENST ID: ENST00000590143
  CDS Start-End: 92-316
agtcgctcctaacgctccctggcccggccggggccgcgcagttagggcatctgaggcggggagaagcggcggggagacgccggctgccagcatgtcgctgcctccggagaaagcctccgagctgaagcagctcatccaccagcagctgagcaagatggatgtccatggtagaataagagaaatccttgctgagactatacgggaagaattggcacctgatcaacagcatttatcaacagaagatttgatcaaagcccttagacgtcgaggaatcattgacgatgtgatgaaagaacttaattttgttacttgttgagcaagaactcccttcctctccaaaacaacctatttgttttgatagacaatcgacattaaaaaaaactaatattgatccaacacggaggtatctttaccttcaggttttgggtggaaaagctttcttggaacatctgcaagaacctgagcctttacctggacaagtttgttcaacgtttactttatgtttacattatcgaaaccaacgttttcgttctaaacctgttccatgtgcctgtgaaccagattttcatgatggctttttacttgaagtacacagagaaagcttgggtgatggaactagaatggctgattcaacaacaatgttatcaataagtgatccaattcatatggtgctaatcaaaacagacatatttggtgagacgactttagtagcatcatattttctggaatggcgatcggttttgggctcagaaaatggagtgaccagtctgactgtggaacttatgggtgtaggcacagaatcaaaagtttctgtgggaattttaaatataaaacttgaaatgtatccaccactcaatcaaacgttatctcaagaagtagtgaacacacagcttgctttggaacgtcagaaaactgcagagaaagagcgattatttcttgtatatgctaagcagtggtggagagaatatttgcaaattcgaccctcacacaactcacgactggttaagatttttgcacaggatgaaaatgggataaatagaccagtctgttcctatgttaaaccacttcgagctggacggcttcttgatactccaaggcaagcagcaagatttgttaatgtccttggttatgaacgagcccctgttattggaggaggaggtaaacaggagcagtggtgcactctgctggcctttctctgtagaaacaagggtgactgtgaagatcacgctaaccttctgtgcagccttcttcttggatatggattagaagcctttgtttgtgttgggaccaaggcaaaaggagtacctcatgcatgggttatgacttgtggaactgatggggccatcactttttgggagagtttaacaggacacaggtacatccataaacctaccaatcctgatgaacctccagttgctgaacagcccaaaccactgtacccatatcgaacaattggttgtgttttcaaccatcagatgttcctgggaaattgtcaaccctctgatgcagtagaaacctgtgtatttgatttgaacgatgaatccaaatggaaacccatgagtgaggaagcaattaaatctgtgtgtgctcctggagctacaacatcccttcctccctttccacctctgtgtgcatccacaattgacgcgtcagtaacaagtaatgaaattgaaatgcagctgaggctcctggtgtcagaacacaggaaggatcttggcctcactactgtttgggaagaccagctctcctaccttttatcaccagctttggcttcttatgaatttgagcgtacaacaagtatatcagcaggcaatgaagaatttcaagatgccataagaagggctgtacctgatggtcacacatttaaagggttcccaatacattttgtgtatagaaatgcaagacgtgcatttgccacatgtcttcgatctcctttctgtgaagaaataatctgttgccgtggagaccaagtgcgactggcagttcgtgtccgagtatttacttaccctgaatctgcatgtgctgtttggatcatgtttgcttgtgaatgtgcctcttaggagcacttgtccagaagtgtctgggaaaagcttgggctgcacagtgatggtgctccctgaaagactcagagcagcacagccagtacctccagagtatgaagcatgaagtacacttattctacaagaataagaagtaaatataaaaaaagtcaaggattcaatttttaataaagtaacaaaatcaacaaaacaaaatcatattcagagtaacatggacttcacagcactttgaaaaagacatttaaatgttgatttgagttgttcagacattttaaatatgaagtcatagagtaaaaatacaatcaatgactgaaattggg

SEQ ID NO: 116631 - DNA, 534 bp, Homo sapiens
  Payload ID: 2744
  Gene Symbol: CEP76
  Gene Name: centrosomal protein 76kDa
  ENST ID: ENST00000587666
  CDS Start-End: 1-534
aatataaaacttgaaatgtatccaccactcaatcaaacgttatctcaagaagtagtgaacacacaggatgaaaatgggataaatagaccagtctgttcctatgttaaaccacttcgagctggacggcttcttgatactccaaggcaagcagcaagatttgttaatgtccttggttatgaacgagcccctgttattggaggaggaggtaaacaggagcagtggtgcactctgctggcctttctctgtagaaacaagggtgactgtgaagatcacgctaaccttctgtgcagccttcttcttggatatggattagaagcctttgtttgtgttgggaccaaggcaaaaggagtacctcatgcatgggttatgacttgtggaactgatggggccatcactttttgggagagtttaacaggacacaggtacatccataaacctaccaatcctgatgaacctccagttgctgaacagcccaaaccactgtacccatatcgaacaattggttgtgttttcaaccatcagatgttcctggga

SEQ ID NO: 116632 - DNA, 3309 bp, Homo sapiens
  Payload ID: 2744
  Gene Symbol: CEP76
  Gene Name: centrosomal protein 76kDa
  ENST ID: ENST00000593250
  CDS Start-End: 120-344
ggcgaacggctgcggcgctttgtgctccagtcgctcctaacgctccctggcccggccggggccgcgcagttagggcatctgaggcggggagaagcggcggggagacgccggctgccagcatgtcgctgcctccggagaaagcctccgagctgaagcagctcatccaccagcagctgagcaagatggatgtccatggtagaataagagaaatccttgctgagactatacgggaagaattggcacctgatcaacagcatttatcaacagaagatttgatcaaagcccttagacgtcgaggaatcattgacgatgtgatgaaagaacttaattttgttacttgttgagcaagaactcccttcctctccaaaacaacctatttgttttgatagacaatcgacattaaaaaaaagttttgggtggaaaagctttcttggaacatctgcaagaacctgagcctttacctggacaagtttgttcaacgtttactttatgtttacattatcgaaaccaacgttttcgttctaaacctgttccatgtgcctgtgaaccagattttcatgatggctttttacttgaagtacacagagaaagcttgggtgatggaactagaatggctgattcaacaacaatgttatcaataagtgatccaattcatatggtgctaatcaaaacagacatatttggtgagacgactttagtagcatcatattttctggaatggcgatcggttttgggctcagaaaatggagtgaccagtctgactgtggaacttatgggtgtaggcacagaatcaaaagtttctgtgggaattttaaatataaaacttgaaatgtatccaccactcaatcaaacgttatctcaagaagtagtgaacacacagatagagtctcactctatcgcccagggtggagcacggtggcatgaactcggctcactgcaacctctgcctcccgggttcaagcaattctcctgcctcagcctcccgagtagctgggattacaggcatgtaccaccatccccagctacttgctttggaacgtcagaaaactgcagagaaagagcgattatttcttgtatatgctaagcagtggtggagagaatatttgcaaattcgaccctcacacaactcacgactggttaagatttttgcacaggatgaaaatgggataaatagaccagtctgttcctatgttaaaccacttcgagctggacggcttcttgatactccaaggcaagcagcaagatttgttaatgtccttggttatgaacgagcccctgttattggaggaggaggtaaacaggagcagtggtgcactctgctggcctttctctgtagaaacaaggtattatacacacataatagaattaagtagcagtatatcatagttactctgaatttgtaatccatttgtaaaagaatgccttagaaaaatgcacatatagtcaaccctctgtacccacaggttctgtatctgtagattcaaccaactgcagatcaaaaatacttacaaaagtaaaaaattacaataataaaaaatagtacaaattaaaaaatggtgtgtaacaacgtttatgtagcatttacattgtattgagatttttaaacaatttagaggtgatttaaagtatataggaggatgtgcttaggttatatataaaatactataccattttggctggccgcagtggctcatgcctgtatcccagcattttgggaggctgaggcaggtggatcacctgaggtcaggagttcaagaccagtctgggcaacatggtgaaaccctatctctactaaaatacaaaaaattatctgggcatggtgtcgtgtgcctgtaatcccagctactcaggaggctgaggcaggagaatcacttggaccctggaggcggaggttgcagtgagctgagatcgcaccattgcactctagcctgaggacagagcaagacacgtctcaaaaaaaaaaaaaatactattttatataagccttgagtatccacggattttgttttgcaagggtcctggaactaaccgctttggggtgctatcagcttgaccacgtcagaaccttgttctgtttttcataacatttaaatatcaatacacaaaaaactcagcatctttattttctcatgtagtttcttatttattgtgatttctgtgatgtagggacctacaagtactaaaatgtcagaaatcaagttgcagaatgaattaggaacagcaccaggaccagaccatggctttctggtactactgatgtgttgcaatttgctcagataatacatctttaaaaaagagaaaataaggctgggcgtggtggctcatgcctgtaatcccagcactttgggaggcagaggtgggtggatcacctgaggtcaggagttcaagaccagtctgaccaacgtggagaaactccgtctccactaaaagtacaaaattagcgtggtgtggtggcacgtgcctgtaatcttagctactgaggaggctgaggcaggagaattgcttgaacctgggaggcggaggttgtggtgagctgagatcgcgccattgcactccagcctgggcaacgagcgaaactccataaaaaaaaaagagaaaatggcagtacaaaattaatatagaaaaaatattaaaatagaaaaaaatcttgaattgcatgctatttagtttgtttagtttgtatttaaatacaaatgtatatttaattacactttttgaatgacttgattttagtaaactaattttatagattatgggatatttcctaatctgtgttctaaaaatgttgatagtatgataacaaacaagtaaaactatctttaggccaggcgcggtggctcacgcctgtaatcccagcactttgggaggccggggagggtggatcacctgtggtcgggagttctagaacagcctggctaacatggagaaactccatctctactgaaaaaatacaaaaattagccagccatggtggcgggctcctgtaatcccagctacttgggaggctgaggcaggagaatcacttgaacctgggaggtggaggttgcagtgagccgagatcacgccatcgcactccagtgtgggcaataagagcaaaactccatctcaaaaaaaaaaaacaaaaaactatctttagcctgggtgacagagcgagactctgtctcaaaaaaaataaataaaggtgacagcaggccaggcatggtggctcatgcccgcaattccagcacttgggtaggccaaggtgggcaaatcacttgagcccagaagttccagacaaacctgggcaacatggcaaaatccctctctcta

SEQ ID NO: 116633 - DNA, 787 bp, Homo sapiens
  Payload ID: 2744
  Gene Symbol: CEP76
  Gene Name: centrosomal protein 76kDa
  ENST ID: ENST00000587929
  CDS Start-End: 209-547
gaaaacagttggcgccgccgccgccggggcctcatttccaggtcagcccccggcctgacgcggcgttgcgtcccccgggagctgcgctaggcgaacggctgcggcgctttgtgctccagtcgctcctaacgctccctggcccggccggggccgcgcagttagggcatctgaggcggggagaagcggcggggagacgccggctgccagcatgtcgctgcctccggagaaagcctccgagctgaagcagctcatccaccagcagctgagcaagatggatgtccatggtagaataagagaaatccttgctgagactatacgggaagaattggcacctgatcaacagcatttatcaacagaagatttgatcaaagcccttagacgtcgaggaatcattgacgatgtgatgaaagaacttaattttgttactgacagtgttgagcaagaactcccttcctctccaaaacaacctatttgttttgatagacaatcgacattaaaaaaaagttttgggtggaaaagctttcttggaacatctgcaagaacctgagcctttacctggacaagtttgttcaacgtttactttatgtttacattatcgaaaccaacgttttcgttctaaacctgttccatgtgcctgtgaaccagattttcatgatggctttttacttgaagtacacagagaaagcttgggtgatggaactagaatggctgattcaacaacaatgttatcaataagtgatccaattcatatggtgctaatcaaaacagacatatttggtgagacgac

SEQ ID NO: 116634 - DNA, 684 bp, Homo sapiens
  Payload ID: 2744
  Gene Symbol: CEP76
  Gene Name: centrosomal protein 76kDa
  ENST ID: ENST00000585751
  CDS Start-End: 1-576
gagcctttacctggacaagtttgttcaacgtttactttatgtttacattatcgaaaccaacgttttcgttctaaacctgttccatgtgcctgtgaaccagattttcatgatggctttttacttgaagtacacagagaaagcttgggtgatggaactagaatggctgattcaacaacaatgttatcaataagtgatccaattcatatggtgctaatcaaaacagacatatttggtgagacgactttagtagcatcatattttctggaatggcgatcggttttgggctcagaaaatggagtgaccagtctgactgtggaacttatgggtgtaggcacagaatcaaaagtttctgtgggaattttaaatataaaacttgaaatgtatccaccactcaatcaaacgttatctcaagaagtagtgaacacacagcttgctttggaacgtcagaaaactgcagagaaagagcgattatttcttgtatatgctaagcagtggtggagagaatatttgcaaattcgaccctcacacaactcacgactggttaagatttttgcacaggtttgtaaattatattagaataattttatgcctgtatttgagatttactgttatgtgtgtaaatttcatttaatatttatttgtaaaatgtattccaaaaaataaaagtgtatttgtaaaataaaa

SEQ ID NO: 116635 - DNA, 413 bp, Homo sapiens
  Payload ID: 2744
  Gene Symbol: CEP76
  Gene Name: centrosomal protein 76kDa
  ENST ID: ENST00000591034
  CDS Start-End: 1-305
aatggcgatcggttttgggctcagaaaatggagtgaccagtctgactgtggaacttatgggcacagaatcaaaagtttctgtgggaattttaaatataaaacttgaaatgtatccaccactcaatcaaacgttatctcaagaagtagtgaacacacagcttgctttggaacgtcagaaaactgcagagaaagagcgattatttcttgtatatgctaagcagtggtggagagaatatttgcaaattcgaccctcacacaactcacgactggttaagatttttgcacaggtttgtaaattatattagaataattttatgcctgtatttgagatttactgttatgtgtgtaaatttcatttaatatttatttgtaaaatgtattccaaaaaataaaagtgtatttgtaaaataaaa

SEQ ID NO: 116636 - DNA, 2542 bp, Homo sapiens
  Payload ID: 2745
  Gene Symbol: CEP78
  Gene Name: centrosomal protein 78kDa
  ENST ID: ENST00000277082
  CDS Start-End: 120-2237
cggggctgccgctatcgcctggccgtgggtgccggagcggccgggttgcgactcagcgttcttgggtgggcgcgggcggcgtctccgcggcgggcatcccccgaggccgccctcgggccatgatcgactccgtgaagctgcgccgcgacagcgcggcggacttcttctcccactacgagtacctgtgcgcgctgcagaactcggtgccgctgcccgccgtgcgcgcctgtctccgggagggcgtgctggatttcaacgccgaccgcctccgcggggtggactgggcgcctctgctgagcaccctcaagatcaataaagacctgcccttggtctccatcaagagcttcttccagccctggctgggggacacaggttctgacatgaataaattttgcagaagtcgtgttcctgcgataagatacaaagatgtgaccttccagttgtgtaaagctcttaaaggctgtttaagtatatcaagtgtgctaaagaacctggagctaaatggactaattctgagagagagggatttaactattctagcaaagggattgaataaatcggcttctttggtgcacctgtctcttgcaaattgtccaattggagatggaggtttagaaattatttgtcaaggtataaagagctctatcactcttaagacagtcaacttcacaggatgtaatctgacatggcagggagcagatcacatggccaagatcttaaagtatcagaccatgagaaggcatgaagaaacctgggctgagagtcttcgctataggagacctgatcttgactgtatggctggcttaagacgtatcacactgaattgcaacacacttattggtgacctaggtgcatgtgcttttgcagactctctcagtgaggatttatggctgagagctcttgacctgcaacagtgcggcctcaccaatgaaggagcaaaggctttgctagaggcccttgaaaccaatacaactctggtcgttctggatataagaaaaaatccactcattgatcattctatgatgaaagcagttatcaaaaaagtcctccagaatggaaggagtgccaaatcagagtaccagtggataacttctccatcagtgaaggaaccatccaaaactgctaaacagaaaaggagaactataattctaggaagtggtcacaaaggaaaagctactattagaattggattggctacaaagaaacctgtaagtagtggcagaaaacactcccttggtaaagaatattatgcgcccgcacctcttccacctggtgtgtctggtttcttgccgtggcgtactgcagaacgtgcaaaaagacacaggggtttcccattaatcaaaacacgtgatatatgtaatcagttgcagcaaccaggttttcctgtgactgtgacagtagagagtccttcatcctctgaagttgaagaggttgatgattcttcagagagtgttcatgaagtgcctgagaaaactagtatagaacaagaagcattacaggaaaaactggaggagtgcctaaagcagttaaaggaagaaagagtgataaggcttaaggttgataaacgagtcagtgagctggaacatgaaaatgcccagttaagaaatataaatttctctttgtctgaagcccttcatgcacagtcattgacaaatatgatcctggatgatgaaggtgttttgggcagcattgagaattcttttcagaagtttcatgctttcttggatctccttaaagatgctgggcttgggcagcttgccacaatggctgggatagatcagtcagattttcaattactaggtcatccccagatgacttctactgttagtaatccacctaaagaagaaaagaaggcgcttgaagatgaaaaaccagaaccgaagcagaatgccctagggcaaatgcaaaatatccagtttcagaaaattacaggtgatgctagaattcctttgcctctcgactcctttcctgtcccagtttctactccagagggcttaggaacttccagcaacaacctaggagtcccagctactgagcagcggcaggagtcttttgaaggattcattgctagaatgtgttctccttcaccagatgcgacttctggaactggaagtcaaagaaaagaagaggagttgtccagaaatagcagatcttcttcagagaaaaagaccaaaacaggtgaatataccaaaaaacactctgataagcaacaccctggaaaggacctgcattcctgatctgactgtcctgaaaaccagaaaagcaaagaaactagggaaactagttctttggttaatgaaccaattaaaagtaggtctttgaaaaaatacgtttctgtcaagaaagaaaatagaatagtgactgtttcatccaagacaaataaaagtaaatccagtccactagaacattctgaaagtgatactcttggatgtgattttgaatttcaagaaagcatccattctctatcacacctttcatatgactaaatcttttgaaactatgtttttacctttaaattttaataaattttcttatgttttta

SEQ ID NO: 116637 - DNA, 2618 bp, Homo sapiens
  Payload ID: 2745
  Gene Symbol: CEP78
  Gene Name: centrosomal protein 78kDa
  Uniprot ID: Q5JTW2
  ENST ID: ENST00000376597
  CDS Start-End: 145-2313
cgaatcaccgctcctgagcccggtgcggggctgccgctatcgcctggccgtgggtgccggagcggccgggttgcgactcagcgttcttgggtgggcgcgggcggcgtctccgcggcgggcatcccccgaggccgccctcgggccatgatcgactccgtgaagctgcgccgcgacagcgcggcggacttcttctcccactacgagtacctgtgcgcgctgcagaactcggtgccgctgcccgccgtgcgcgcctgtctccgggagggcgtgctggatttcaacgccgaccgcctccgcggggtggactgggcgcctctgctgagcaccctcaagatcaataaagacctgcccttggtctccatcaagagcttcttccagccctggctgggggacacaggttctgacatgaataaattttgcagaagtcgtgttcctgcgataagatacaaagatgtgaccttccagttgtgtaaagctcttaaaggctgtttaagtatatcaagtgtgctaaagaacctggagctaaatggactaattctgagagagagggatttaactattctagcaaagggattgaataaatcggcttctttggtgcacctgtctcttgcaaattgtccaattggagatggaggtttagaaattatttgtcaaggtataaagagctctatcactcttaagacagtcaacttcacaggatgtaatctgacatggcagggagcagatcacatggccaagatcttaaagtatcagaccatgagaaggcatgaagaaacctgggctgagagtcttcgctataggagacctgatcttgactgtatggctggcttaagacgtatcacactgaattgcaacacacttattggtgacctaggtgcatgtgcttttgcagactctctcagtgaggatttatggctgagagctcttgacctgcaacagtgcggcctcaccaatgaaggagcaaaggctttgctagaggcccttgaaaccaatacaactctggtcgttctggatataagaaaaaatccactcattgatcattctatgatgaaagcagttatcaaaaaagtcctccagaatggaaggagtgccaaatcagagtaccagtggataacttctccatcagtgaaggaaccatccaaaactgctaaacagaaaaggagaactataattctaggaagtggtcacaaaggaaaagctactattagaattgtaggattggctacaaagaaacctgtaagtagtggcagaaaacactcccttggtaaagaatattatgcgcccgcacctcttccacctggtgtgtctggtttcttgccgtggcgtactgcagaacgtgcaaaaagacacaggggtttcccattaatcaaaacacgtgatatatgtaatcagttgcagcaaccaggttttcctgtgactgtgacagtagagagtccttcatcctctgaagttgaagaggttgatgattcttcagagagtgttcatgaagtgcctgagaaaactagtatagaacaagaagcattacaggaaaaactggaggagtgcctaaagcagttaaaggaagaaagagtgataaggcttaaggttgataaacgagtcagtgagctggaacatgaaaatgcccagttaagaaatataaatttctctttgtctgaagcccttcatgcacagtcattgacaaatatgatcctggatgatgaaggtgttttgggcagcattgagaattcttttcagaagtttcatgctttcttggatctccttaaagatgctgggcttgggcagcttgccacaatggctgggatagatcagtcagattttcaattactaggtcatccccagatgacttctactgttagtaatccacctaaagaagaaaagaaggcgcttgaagatgaaaaaccagaaccgaagcagaatgccctagggcaaatgcaaaatatccaggtttctatttgtatgcagtcagcttacaatgaaggaacactaatgaagtttcagaaaattacaggtgatgctagaattcctttgcctctcgactcctttcctgtcccagtttctactccagagggcttaggaacttccagcaacaacctaggagtcccagctactgagcagcggcaggagtcttttgaaggattcattgctagaatgtgttctccttcaccagatgcgacttctggaactggaagtcaaagaaaagaagaggagttgtccagaaatagcagatcttcttcagagaaaaagaccaaaacaggtgaatataccaaaaaacactctgataagcaacaccctggaaaggacctgcattcctgatctgactgtcctgaaaaccagaaaagcaaagaaactagggaaactagttctttggttaatgaaccaattaaaagtaggtctttgaaaaaatacgtttctgtcaagaaagaaaatagaatagtgactgtttcatccaagacaaataaaagtaaatccagtccactagaacattctgaaagtgatactcttggatgtgattttgaatttcaagaaagcatccattctctatcacacctttcatatgactaaatcttttgaaactatgtttttacctttaaattttaataaattttcttatgttttta

SEQ ID NO: 116638 - DNA, 2404 bp, Homo sapiens
  Payload ID: 2745
  Gene Symbol: CEP78
  Gene Name: centrosomal protein 78kDa
  Uniprot ID: Q5JTW2
  ENST ID: ENST00000376598
  CDS Start-End: 1-2118
atgatcgactccgtgaagctgcgccgcgacagcgcggcggacttcttctcccactacgagtacctgtgcgcgctgcagaactcggtgccgctgcccgccgtgcgcgcctgtctccgggagggcgtgctggatttcaacgccgaccgcctccgcggggtggactgggcgcctctgctgagcaccctcaagatcaataaagacctgcccttggtctccatcaagagcttcttccagccctggctgggggacacaggttctgacatgaataaattttgcagaagtcgtgttcctgcgataagatacaaagatgtgaccttccagttgtgtaaagctcttaaaggctgtttaagtatatcaagtgtgctaaagaacctggagctaaatggactaattctgagagagagggatttaactattctagcaaagggattgaataaatcggcttctttggtgcacctgtctcttgcaaattgtccaattggagatggaggtttagaaattatttgtcaaggtataaagagctctatcactcttaagacagtcaacttcacaggatgtaatctgacatggcagggagcagatcacatggccaagatcttaaagtatcagaccatgagaaggcatgaagaaacctgggctgagagtcttcgctataggagacctgatcttgactgtatggctggcttaagacgtatcacactgaattgcaacacacttattggtgacctaggtgcatgtgcttttgcagactctctcagtgaggatttatggctgagagctcttgacctgcaacagtgcggcctcaccaatgaaggagcaaaggctttgctagaggcccttgaaaccaatacaactctggtcgttctggatataagaaaaaatccactcattgatcattctatgatgaaagcagttatcaaaaaagtcctccagaatggaaggagtgccaaatcagagtaccagtggataacttctccatcagtgaaggaaccatccaaaactgctaaacagaaaaggagaactataattctaggaagtggtcacaaaggaaaagctactattagaattggattggctacaaagaaacctgtaagtagtggcagaaaacactcccttggtaaagaatattatgcgcccgcacctcttccacctggtgtgtctggtttcttgccgtggcgtactgcagaacgtgcaaaaagacacaggggtttcccattaatcaaaacacgtgatatatgtaatcagttgcagcaaccaggttttcctgtgactgtgacagtagagagtccttcatcctctgaagttgaagaggttgatgattcttcagagagtgttcatgaagtgcctgagaaaactagtatagaacaagaagcattacaggaaaaactggaggagtgcctaaagcagttaaaggaagaaagagtgataaggcttaaggttgataaacgagtcagtgagctggaacatgaaaatgcccagttaagaaatataaatttctctttgtctgaagcccttcatgcacagtcattgacaaatatgatcctggatgatgaaggtgttttgggcagcattgagaattcttttcagaagtttcatgctttcttggatctccttaaagatgctgggcttgggcagcttgccacaatggctgggatagatcagtcagattttcaattactaggtcatccccagatgacttctactgttagtaatccacctaaagaagaaaagaaggcgcttgaagatgaaaaaccagaaccgaagcagaatgccctagggcaaatgcaaaatatccaggtttctatttgtatgcagtcagcttacaatgaaggaacactaatgaagtttcagaaaattacaggtgatgctagaattcctttgcctctcgactcctttcctgtcccagtttctactccagagggcttaggaacttccagcaacaacctaggagtcccagctactgagcagcggcaggagtcttttgaaggattcattgctagaatgtgttctccttcaccagatgcgacttctggaactggaagtcaaagaaaagaagaggagttgtccagaaatagcagatcttcttcagagaaaaagaccaaaacagaatcccattgaaatgactggagaaatattaaaataaaaataatagcagagttggaaaaccagaaatttgaacagtgaaatttctggaagataagaagcagatgatttaagtaccagttaattaaaggatggaacagctaagccattccactcatctttggagcatctgattctggagtttgccaccaggctaagaaagcagctatctgaagtgggagctctgacccaagaaatgctgggatcggagaataagggaattatccaaaatggctccgaagaggaactgaagttaagctgc

SEQ ID NO: 116639 - DNA, 2623 bp, Homo sapiens
  Payload ID: 2745
  Gene Symbol: CEP78
  Gene Name: centrosomal protein 78kDa
  Uniprot ID: Q5JTW2
  ENST ID: ENST00000415759
  CDS Start-End: 190-2310
tgaggggccggcctagcttggggctctggccttgcgtcttccgaccgaatcaccgctcctgagcccggtgcggggctgccgctatcgcctggccgtgggtgccggagcggccgggttgcgactcagcgttcttgggtgggcgcgggcggcgtctccgcggcgggcatcccccgaggccgccctcgggccatgatcgactccgtgaagctgcgccgcgacagcgcggcggacttcttctcccactacgagtacctgtgcgcgctgcagaactcggtgccgctgcccgccgtgcgcgcctgtctccgggagggcgtgctggatttcaacgccgaccgcctccgcggggtggactgggcgcctctgctgagcaccctcaagatcaataaagacctgcccttggtctccatcaagagcttcttccagccctggctgggggacacaggttctgacatgaataaattttgcagaagtcgtgttcctgcgataagatacaaagatgtgaccttccagttgtgtaaagctcttaaaggctgtttaagtatatcaagtgtgctaaagaacctggagctaaatggactaattctgagagagagggatttaactattctagcaaagggattgaataaatcggcttctttggtgcacctgtctcttgcaaattgtccaattggagatggaggtttagaaattatttgtcaaggtataaagagctctatcactcttaagacagtcaacttcacaggatgtaatctgacatggcagggagcagatcacatggccaagatcttaaagtatcagaccatgagaaggcatgaagaaacctgggctgagagtcttcgctataggagacctgatcttgactgtatggctggcttaagacgtatcacactgaattgcaacacacttattggtgacctaggtgcatgtgcttttgcagactctctcagtgaggatttatggctgagagctcttgacctgcaacagtgcggcctcaccaatgaaggagcaaaggctttgctagaggcccttgaaaccaatacaactctggtcgttctggatataagaaaaaatccactcattgatcattctatgatgaaagcagttatcaaaaaagtcctccagaatggaaggagtgccaaatcagagtaccagtggataacttctccatcagtgaaggaaccatccaaaactgctaaacagaaaaggagaactataattctaggaagtggtcacaaaggaaaagctactattagaattgtaggattggctacaaagaaacctgtaagtagtggcagaaaacactcccttggtaaagaatattatgcgcccgcacctcttccacctggtgtgtctggtttcttgccgtggcgtactgcagaacgtgcaaaaagacacaggggtttcccattaatcaaaacacgtgatatatgtaatcagttgcagcaaccaggttttcctgtgactgtgacagtagagagtccttcatcctctgaagttgaagaggttgatgattcttcagagagtgttcatgaagtgcctgagaaaactagtatagaacaagaagcattacaggaaaaactggaggagtgcctaaagcagttaaaggaagaaagagtgataaggcttaaggttgataaacgagtcagtgagctggaacatgaaaatgcccagttaagaaatataaatttctctttgtctgaagcccttcatgcacagtcattgacaaatatgatcctggatgatgaaggtgttttgggcagcattgagaattcttttcagaagtttcatgctttcttggatctccttaaagatgctgggcttgggcagcttgccacaatggctgggatagatcagtcagattttcaattactaggtcatccccagatgacttctactgttagtaatccacctaaagaagaaaagaaggcgcttgaagatgaaaaaccagaaccgaagcagaatgccctagggcaaatgcaaaatatccagtttcagaaaattacaggtgatgctagaattcctttgcctctcgactcctttcctgtcccagtttctactccagagggcttaggaacttccagcaacaacctaggagtcccagctactgagcagcggcaggagtcttttgaaggattcattgctagaatgtgttctccttcaccagatgcgacttctggaactggaagtcaaagaaaagaagaggagttgtccagaaatagcagatcttcttcagagaaaaagaccaaaacaggtgaatataccaaaaaacactctgataagcaacaccctggaaaggacctgcattcctgatctgactgtcctgaaaaccagaaaagcaaagaaactagggaaactagttctttggttaatgaaccaattaaaagtaggtctttgaaaaaatacgtttctgtcaagaaagaaaatagaatagtgactgtttcatccaagacaaataaaagtaaatccagtccactagaacattctgaaagtgatactcttggatgtgattttgaatttcaagaaagcatccattctctatcacacctttcatatgactaaatcttttgaaactatgtttttacctttaaattttaataaattttcttatgtttttattatggca

SEQ ID NO: 116640 - DNA, 11198 bp, Homo sapiens
  Payload ID: 2745
  Gene Symbol: CEP78
  Gene Name: centrosomal protein 78kDa
  Uniprot ID: Q5JTW2
  ENST ID: ENST00000424347
  CDS Start-End: 290-2359
ggcaccgcccaccggcttgaatcccggcgcctcagaggactatgaggcgggcgccaactgcttgggccgcagggcgggaggcagcgcgggagtggggcgttgaggggccggcctagcttggggctctggccttgcgtcttccgaccgaatcaccgctcctgagcccggtgcggggctgccgctatcgcctggccgtgggtgccggagcggccgggttgcgactcagcgttcttgggtgggcgcgggcggcgtctccgcggcgggcatcccccgaggccgccctcgggccatgatcgactccgtgaagctgcgccgcgacagcgcggcggacttcttctcccactacgagtacctgtgcgcgctgcagaactcggtgccgctgcccgccgtgcgcgcctgtctccgggagggcgtgctggatttcaacgccgaccgcctccgcggggtggactgggcgcctctgctgagcaccctcaagatcaataaagacctgcccttggtctccatcaagagcttcttccagccctggctgggggacacaggttctgacatgaataaattttgcagaagtcgtgttcctgcgataagatacaaagatgtgaccttccagttgtgtaaagctcttaaaggctgtttaagtatatcaagtgtgctaaagaacctggagctaaatggactaattctgagagagagggatttaactattctagcaaagggattgaataaatcggcttctttggtgcacctgtctcttgcaaattgtccaattggagatggaggtttagaaattatttgtcaaggtataaagagctctatcactcttaagacagtcaacttcacaggatgtaatctgacatggcagggagcagatcacatggccaagatcttaaagtatcagaccatgagaaggcatgaagaaacctgggctgagagtcttcgctataggagacctgatcttgactgtatggctggcttaagacgtatcacactgaattgcaacacacttattggtgacctaggtgcatgtgcttttgcagactctctcagtgaggatttatggctgagagctcttgacctgcaacagtgcggcctcaccaatgaaggagcaaaggctttgctagaggcccttgaaaccaatacaactctggtcgttctggatataagaaaaaatccactcattgatcattctatgatgaaagcagttatcaaaaaagtcctccagaatggaaggagtgccaaatcagagtaccagtggataacttctccatcagtgaaggaaccatccaaaactgctaaacagaaaaggagaactataattctaggaagtggtcacaaaggaaaagctactattagaattggattggctacaaagaaacctgtaagtagtggcagaaaacactcccttggtaaagaatattatgcgcccgcacctcttccacctggtgtgtctggtttcttgccgtggcgtactgcagaacgtgcaaaaagacacaggggtttcccattaatcaaaacacgtgatatatgtaatcagttgcagcaaccaggttttcctgtgactgtgacagtagagagtccttcatcctctgaagttgaagaggttgatgattcttcagagagtgttcatgaagtgcctgagaaaactagtatagaacaagaagcattacaggaaaaactggaggagtgcctaaagcagttaaaggaagaaagagtgataaggcttaaggttgataaacgagtcagtgagctggaacatgaaaatgcccagttaagaaatataaatttctctttgtctgaagcccttcatgcacagtcattgacaaatatgatcctggatgatgaaggtgttttgggcagcattgagaattcttttcagaagtttcatgctttcttggatctccttaaagatgctgggcttgggcagcttgccacaatggctgggatagatcagtcagattttcaattactaggtcatccccagatgacttctactgttagtaatccacctaaagaagaaaagaaggcgcttgaagatgaaaaaccagaaccgaagcagaatgccctagggcaaatgcaaaatatccagtttcagaaaattacaggtgatgctagaattcctttgcctctcgactcctttcctgtcccagtttctactccagagggcttaggaacttccagcaacaacctaggagtcccagctactgagcagcggcaggagtcttttgaaggattcattgctagaatgtgttctccttcaccagatgcgacttctggaactggaagtcaaagaaaagaagaggagttgtccagaaatagcagatcttcttcagagaaaaagaccaaaacagaatcccattgaaatgactggagaaatattaaaataaaaataatagcagagttggaaaaccagaaatttgaacagtgaaatttctggaagataagaagcagatgatttaagtaccagttaattaaaggatggaacagctaagccattccactcatctttggagcatctgattctggagtttgccaccaggctaagaaagcagctatctgaagtgggagctctgacccaagaaatgctgggatcggagaataagggaattatccaaaatggctccgaagaggaactgaagttaagctgcccacatgatctctctaactatgatgacctgccacttccgtttataatcaccatataagtgcctgtaatcatttgtgttcattaaaagtgaaccagaattcccatttggatgaaaaaataacacttccaactttaatcttaggccctcatttataaatatggacaaccaagaatcatcaaatttgaagaaaaccagtaacataaaaggaggcatgaaattaaaattaacctgttcaagaagatagttactaggagaaacatgaaatttttaaattaatgaatcaaaatcttcagcaattcataaagatactgtgttcataaagaataggatgccatgaaaaaaatatttagagtttctggaaattaaaaatttgattatgaaactgaaacactcagaagatggactacacagcagaatggattcatttgaagcttaaattcatgaaatggaaggtattaattggtcttagacgtttcatcagcaacttaattacttagaaaaaatctttctcagagtaactaagcaaaatgaacaatgaacccattaacgtgtggttttgttttttgggttttttttttttgagtcaaggtctcactcatgtcacccaggctggggtgtagtgatgggatcacagcttattgtaaccatgaaccattgggcttaaattatcttcccacctcagcctcccaagtagctgcaatgtaccaccatgccgaagttttaaaaaattattgtagagttgggttctttctttcttttctttttttctttttttcttttttttttgagacggagtctcgctctattgcccaggctggagtgcagtggtacaatctcagctcactgcaacctcctcgatctcagctcactgcaaccgtgaagtgatcttcctgcctcagcccccctagtaactgggattacaggcacacaccaccatgcctggctaatttttgtatttttagtaaagacggggtttcaccatgttggccaggctggtctcgaactcctaacctcaggtgattcacccacctcggcctcccaaagtgctgggattacaggcatgagccactgcatccggccaagatgggttctttcttaggctggtcttgaactcctggcctcaaatgatcctcccaccttggcctcccaaagtgctgagactacagacctgagccactgtgcccagccccatgaaagatgtttagatcaaataaactgataaagatattgataaagatatgagacaaactacttcagctttgtgacctgcaaatccccttttataatcaccagaggtgcctgtagtcagaaaaagtctaaataaatactaatgacatatgaaaacaaagtccaaccaaagttctaggtttgaacatgaatggaggcatggcaggacacagaaagtgaaagcttgtcctagatattgtcttattcatgggaaggatacaggtagtgtttgattctaggtattgattgaaaaaatatattaaaatatatataaagttaagggtatgttagtaaggataggttaggtgatgttgcattaacagctcccaaattttaattactttcaacaacataggtttatttgtgcccatgcagtttgcctttggcagattggctagaggcccctattcaacatcaacctcaatctggaagcgaggctggtggaacgtcactatttggaacattgctggttgcagtgtccaaggaaagacagtatgatgcagcatatattgtgacttaaagcttctgtctagatgtgacatatgtcacttctgttcacatttctttggccaaagaaagtcacatggttatgcctgagttcagcagaccagggaagtgcagaattgccatttgccatgagaagagagggaagcaaatgtatgtcaacaactttaatagctacaaaactacctggaaagagggaatggaatttttaggtccaacaagacgggaaagaaaaagaaacaagctacatagaaataaaaaatccacaatatagcaagatcaagttttttactcataataaacatgaacaggttaaattctggaatccttaggcttgagtaaaaacatgaaatcccactgtgtgctatttgcaaaatctaaaacgctgtcatagattataaagagatgaacaaaaatataccaggcagatgctaaagagtaaatgtggctgtgttagctgcagactaaatagaacccaaggtgaaaattggtaaaggggacaaaagcttcttttggctgataagtacagtgttgcagaagattttttaaaaaaatatatctgcaatttaaaaacttgatgttaggccgggcgcagcggctcacgcctgtaatcctagcactttgggaggccgaggtgggtggatcacctgaggtcagaagttcaagaccagcctggccaacatggcaaaactccgtctctactaaaaatacaaaaaaaaaaaaaaaaaattagctgggtgtcatggcgcatgcctgtaatcccagctactcgggaggctgaggcaggagaatcgcttgaacctgggaggcggagtttgcagtgagctgagatggcaccgctgcactccagcctgggccatagaggagactccgtctcaaacaaacaaaaaccttcatcttaaaattatagggtaagaatttagaaatacaaggaaaaatggccagccagttataacaagaagctttaagacatctcttttcagaatcagtggatcgactgctgcacacacactagaatggctaacattttgaaatgctgataaatatgcagagcaactggagttcctcacagctggtaggaatgcaaaatgactcagtcactcaaaacagtttggcagattctttaaatgctaacatacacataccatatgaccaagcagtcccactcctgggtatttagagagatgaaaacttagttcacacaaaacctgtgcgtggatatttatagcagctccattcatagtgaccaagatgtcttccaacaggtgaatggatagcgatgtatccatatggtggcaaacatgccacaattcggatgaatctcaacatcatatgctgagtgaaaaagccagtctcggaaggctacattctgtatgattccatttatatggcattcttgaaaagacaaaactatagtgacagaacagattggagattgccaggtgttggggttgggaggagttgattacaaagaggctgtacaagggagtttgtttgtttgtttgttttggtgatgaacagttctgtatcctgattgcggtggtggtaacgtgagtctatacatatgttaaaatttatagaactgcatactctcaaaaaaattagttttactctataataatattagagcttaaaaaattcatccctcttgcccatcagtagatcaggatatgaaggataccattgaacataaatattttgtatccatgatgaatacaaagtatattctcctggaaaaccaatagaacattcatataaatgattcctatgaaggtaaaaaacttacaaaattcaaagatcatacagatcatgtgctctgtataatgtaataatagtaacaaaaggcctgtccacttggaaatttttaaatgatcttctaaataactcatttaaaggagaaatcaaaataaattgcaaattatttagaattaataaaaacttctctaaagctgaggaattctaccaaagaggtgttagaggaaattgtatagattttgatttactttccaggaagaaagaagacaaaagagatgaattaaacatttaaagctaagaaagagataaaccaaaagaaaggtgaggaattggtaaaagcagaaatgaataaaatagcaaattttgatcagtgaaacacaggtttttaaaaatgaaagataaacctttgtaaaatatgataaagaaaaaaaagcaagaagtaattaacaaaaattgccagcattaggaataattttagaaggatacctacaactagaagagatatttttaattatgagcacttttataatttactataaataattgtgtagtgttaaaccaataaatttgaaagactagatgaaatgtgactgtttaaaaatatggattgtaaaaattgataaaaaatagaaaatgtaaataaacgaaacatcttaggagaaattgaaaaaataggacaagaacttatttttaaaaagaggccaggtgcggtggcccatgcctgtaataccagtactttgggaggccgaggtgggcggatcacctgagatgaggagttcaagaccagcctggccaacatggtgaaaccccgtctctactaaaaatacaaaaattagccgggcttggtggcgggcacttgtaatcccaactactcaggagtctgaggcatgagtgtcgcttgaacctgggaggcagaggttgcagtgagctgaggtcacaccgttgcactctagcctgggagacaagagggaaactctgtctccaaaaaaaaaaaaaaaaaaatacagttagaaaaactttaaaggggccaggtgtggtggctcatgtctgtaatcccagcactttgggacaccaaagtgggaacattgctgagaccagcagtttgagaccagcctgggcaagacctcatctctacaaaaattaaaaaacaaaacaaaacaaaaaaacccaaaacttagccaggcatggtggtgcgtgcatgtagtcccagccactcaggaggctgaagtgggaggatcgcttgaggccgggattcgaggctgcagtgagctgtgatcatgccaccactgctctctagcctgggcaagagtgagactccgactcaagaagagaaaaagaaaaaccttccaggggcacatttatttgtaaaccattccagaggatagaaaagagatgtaaggctccctaattcattccatacggttagcgtaatccttatagcaaactgcacaaataaaacacaaggaaaactaaaccaaattcaattaatgtaggtgcaaaaaatccaaaataaaactagcagtttgaattcagcattgtagcaaaagatatatcattttcaaggaagatttgtaccaaaacatgcaagattgagtgaagagtaactcactgtagctcactaaattaacagattaaagaagtatagtcatcttcacaagctgaaagagtatgtgataaattcaacatcctctggtattcttaacaatctcgaaatagaaggaaacttccttagcttagcttcttggcttcattaaatatacctaacagaaatccacaggaaacaaacttggtgaaaagtttttgctaagataaaaacggtactaaaaagtacacattttgggaaatgagacaaggctctcgttatttgtaaatatggggtctttttttttttggacaaaaaaccccctgtgatgatctactggcatgctattacagctaataaagctgaataaggaggctgtgcacaacaccaacacaccggtatgaaaagtgtgtacaccagcaataaccaattagaaaatgtatgaggaaatagactctcatccacaatagctgcgagaagtaaatattatctagaaataagattaacaagagaaatgtaaggcctatataaataaaaggataaatctatgctagagggtataaaagaaacacaaaaatagaggtatgccatgtataagacccaacataataaatagttctaccaaattaatttataaattcaaagcaatttcatataaccacagtaaagctttttaaatggatgtaataacctgattataacattaatctgaaagtcatcaggcataaagcaattttgattacatctcaaaacaatccatggagttagggtaaatgtgctgttcacacaggaataatcacaggtatagaaccgagaacctaggaacagagcaatgtatatatatatgtatttaaaaaatggcatcacaagtcagtagagaagggtttgaactattcagtaaatgatgttgaggttatttactactttttcttatttcatatcatggatgaaaaaaatcaagatgaattaaacatggaaattaaaaataactagaagaaaatactggaaaaaaattgtaataaatgtgtaagaaaggcattcccaaccaagacacaaaacccagtagccatgaaaaaaaagatagatttgactacatttttaaaaagtaaaacctttcactttttacaaaactttgataaaattagatttcataaataaaggagtgggaaaatacatgtaatagaacagaagatttaagataatataaagagcacctacaaacaacaaaaattggacaaaggctataaaaatattttataaataagaaatacagactataaacataaactttcaacctcgtaagcaatcaggaaaattaaagttaaaatgagatactatttttcaatacattgaaatggcagattattaaagattggtgatagtgctggagataatgtgaggaaaggagtattctcagtcattgtagaaattgatacagcttttggatggacagtttgacagtgtgtatcaacatgtgaaatgtctccagcctttgatctaatgactaattttaggcatccagcctgaagaaatattcacacaagtgcccaaagagtcagatacaagactgtgtgaagtgttttttgagataataaaaaactagaaacagcataaatgtacagaaatgcagaaattgttgaattagtacataccaatttctgacatataacactctgcagcagataaagacaatagctctctagtgtggacatgaaaatatttctaagacattgacaggacgaagaagttgcacagtaaccacgcactcctgtttacatttgtatagttaaaacttgtttacctatacgtagcatatatgcgtgtgtgcaccctagaaaagagtctgtgataacacatatcaagctattgacagcggttttgtctgctgaaggaggaaaaaaggggggcttctcacattttactccatttaattctaggttgtttggtttaaaaaaaaagtttttatgtacaacagacaatttttaaaattccttttcatcatagaaaatgaaaatgtgtactctgttatcctttacgctctgtccatttttttcttcaaaaatgtgtctgacctattatcaatgtgaatgaaaatgagctttgctacataacctcttttcagagctttgtattcctgaagtgttggagtcgcctacatggcatagtcaaatgtttttaacttaaccacaacccacagtaaaaatgaagctttctgcaaagttaaaagtagtagtcctggccccaccttccttgtgtgcacgtataattaatggaaaattgcatcaaacaactctgattgtacttctagtgactaattcatgttctgttctattccttgcctttaaagaaaattatgttggcaactcacgaagtatgtttcacaatccactaatgggtaatgtcctactgtttggaaacactggctagagtgtttcaaacatctgctctgtttacccctgacaaaactgctactcgtggggcaatgcaagtctttcccacatttgttttattttatggctaaaagtcatttctgcatttgcaaattacttccaaagcctaccttccttgagctctttaactctctatagtcttctggtaattttctttagatttcccttttcagaacccttttgtgacactgaaaacctgagttttcaaactgatacatctacctgagaattttcacatataatttggtcaaaaagttaaaaaataagaagactttgccctgtgactgaggtgctcagaaggtatggctggctgctcacaaaggcacatagtgagtgataggggctgaaagggctcagagaatgcccgagttctcttagtacagtttgtacattttaaaccactgtgaactgaaaaaaaaaaaaaaggcaaccttggtagtttagaaatagataaggacccacttatagattaaataataattagcttgttccagagagaccagtgaagattagttggtttatttaatgtgttagaaagatggtcctcaaagtccttgaaatgtgaaggcggcttttatctccttaagaaaacaagaaaactccacaaaatcttgaaagctagataatcctagcttaaatgataaaatttgagtagagtttgaaaacactaaaatcagtttgccaaataaccagctctaatttctttataccaaagccaaacttcacctaaatcttacctaagaattgagttccttattgtaaccagataggagacacttttgtatattattccaaatattgcaaacctacaaggagtaaaaggtgttattattttaaagaagaaggaatgaggcctgagaggtattgattcacttggttgagggcttcaagtagcacaaggcaaaagcaggatttgttgacttccaaacctgttttcttccttcaccatgtggcctttgcatctttcccacacaaatattattccacaaatatttattgtcaccaactataataaaagaacagaactatgtatca

SEQ ID NO: 116641 - DNA, 3130 bp, Homo sapiens
  Payload ID: 2746
  Gene Symbol: CEP83
  Gene Name: centrosomal protein 83kDa
  ENST ID: ENST00000339839
  CDS Start-End: 492-2597
gagcccgctcctccaggctggtggggcggtgcgatgaggcggcttctgggccatacgtcagcacgtggggtggcgccgcacccctgaggatcccggtccacgcggaggagtggggcttttcaccgccgccgccgccgccctcggacctctcccgggatacttcacatttccctagggacgggagcccgaggggtccgttcggccctcttcctctcgctgggccgacaccccgctgtaggaccgtaacccttagtcccaatgcctccgtaagcggagttgagtgggtgcctgtggttggagctgtggaggtgtccccggtggcgagcgcggccagaactgcggtcacttaagttttccgtgtgcgggttgcaaggagcgtgcgtgcgtctggtataatttggcttcctgagattctgccttagcaagaaaggagtgggaaatacccttggaaagaaaactaaaacagtaagaaagccaaaacttatttttacatggttgtcagcacatttaccgatatggacacttttcccaataattttcctcctggtggagacagtggattgacaggttctcagtcggagttccagaaaatgttaattgatgaaaggttacgatgtgagcatcataaagctaattatcagacactgaaggctgaacacacaaggttgcagaatgaacatgtaaagttacaaaatgaactcaagcacctgtttaatgaaaagcaaactcagcaggaaaaacttcagctcctgcttgaagaactaagaggagaattagtagagaaaactaaagatttagaagaaatgaaactgcagatattaactccacaaaaattggaattgctaagagcccaaatacaacaagaattagaaactccaatgagagaacgttttaggaatctagatgaagaggtagaaaagtatagagctgtatataataagcttcgctatgaacatacatttctcaagtcagaatttgaacaccagaaggaagagtatgcacgtattttagatgaaggaaaaataaaatatgaatcagagattgcaagactggaggaagataaagaagaactacgtaaccagctgcttaatgttgatctcacaaaagacagcaaacgagtggaacaacttgctcgagaaaaagtctatttgtgtcaaaaattaaaaggtttagaggctgaagtagcggaattaaaggctgaaaaggagaattctgaggctcaggtggaaaatgcccaaagaatacaggtgcggcagttggctgagatgcaggctacagtcagatccctggaggctgaaaaacaatcagctaatttacgggcagaacgtttggaaaaagagctacaatcaagcagtgaacaaaatacctttttaattaataaattgcataaagctgaacgagaaataaatacattgtccagtaaagtaaaagaacttaaacattcaaacaaactggaaataacagacatcaaactggagacagcaagagctaagagtgagctagaaagagaaaggaataagattcaaagtgaactggatggattacagtcagacaatgaaattctcaaagcagctgttgaacatcacaaagtgctcttagtagaaaaggatcgtgaattaatacgtaaagtacaagctgccaaagaagaaggttatcaaaaacttgtggtattacaagatgaaaagttagaactcgagaacagattagcagatttggagaaaatgaaagtggaacatgatgtctggaggcaatctgaaaaggatcagtatgaagagaaattgcgggcttcacagatggcagaagagatcaccaggaaggagcttcagagtgttaggttaaaacttcagcaacaaattgtgactattgaaaatgcagagaaggaaaaaaatgaaaattctgacctaaaacagcaaatcagtagtttgcagatccaagtgacttcacttgcacagtcagagaatgacttgctgaattcaaaccaaatgctgaaggaaatggtggagagattaaaacaagaatgccgaaattttagaagccaagctgaaaaagcgcaactagaagctgaaaagacattggaagagaaacagatacagtggttggaagaaaagcataagcttcatgagcgtatcacagacagagaagaaaagtacaatcaagctaaggagaaactgcagcgagctgcaattgcccagaaaaagagaaaatctcttcatgaaaacaaattgaaaagactacaagagaaagtagaagtcttggaggcaaagaaagaagaattggaaacagaaaatcaggtcttaaatagacaaaatgttccttttgaagactatacaaggcttcaaaaaagactaaaagatatacagagaagacataatgaatttcgaagtctaattttggttcctaacatgcctccaacagcatctatcaatcctgttagctttcagtcatcagccatggttccaagcatggaactaccatttcctcctcatatgcaggaggaacaacatcaaagggaactctctctacttcgcaaaagactagaagaactggaaacaacacaaagaaaacaactagaggaacttggatcttccggagaatgatgttcttggagaacaggcagatcaaaagaggtgaagttggtgactcagtaaaacttgacattttaacctgtggcatttagatactttttactgtttgccaaaacacttgaatgtgcctcaagaaaaggtacctactacatgctgtattgtatgactgtcaggattttaagattatacaagtgaagcattaaaagagaaattctcagagatatttagaatatttgacaatggtttgagaatgtaaaacaaaaaggaactagttagagtcaagttttaaaatttttactttgttgaatttttttttttggcattttgagtgaaatataactatcattaattctctcttcatctttgagatgcttggccataacagggtccatacacatcttctggtttactatatacaaaaactgtagttgaaaaaagatgacaatttaaaagtcagcctaaagaatgtaaaggtatctatatacaaaaggctaccttttctaaaatctgtgtgcacataattaaagagcttaatttttttttaa

SEQ ID NO: 116642 - DNA, 2737 bp, Homo sapiens
  Payload ID: 2746
  Gene Symbol: CEP83
  Gene Name: centrosomal protein 83kDa
  ENST ID: ENST00000397807
  CDS Start-End: 493-1911
gcaggtataatttggcttcctgagattctgccttagcaagaaaggagtgggaaatacccttggaaagaaaactaaaacagtaagaaagccaaaacttatttttacatggttgtcagcacatttaccgatatggacacttttcccaataattttcctcctggtggagacagtggattgacaggttctcagtcggagttccagaaaatgttaattgatgaaaggttacgatgtgagcatcataaagctaattatcagacactgaaggctgaacacacaaggttgcagaatgaacatgtaaagttacaaaatgaactcaagcacctgtttaatgaaaagcaaactcagcaggaaaaacttcagctcctgcttgaagaactaagaggagaattagtagagaaaactaaagatttagaagaaatgaaactgcagatattaactccacaaaaattggaattgctaagagcccaaatacaacaagaattagaaactccaatgagagaacgttttaggaatctagatgaagaggtagaaaagtatagagctgtatataataagcttcgctatgaacatacatttctcaagtcagaatttgaacaccagaaggaagagtatgcacgtattttagatgaaggaaaaataaaatatgaatcagagattgcaagactggaggaagataaagaagaactacgtaaccagctgcttaatgttgatctcacaaaagacagcaaacgagtggaacaacttgctcgagaaaaagtctatttgtgtcaaaaattaaaaggtttagaggctgaagtagcggaattaaaggctgaaaaggagaattctgaggctcaggtggaaaatgcccaaagaatacaggtgcggcagttggctgagatgcaggctacagtcagatccctggaggctgaaaaacaatcagctaatttacgggcagaacgtttggaaaaagagctacaatcaagcagtgaacaaaatacctttttaattaataaattgcataaagctgaacgagaaataaatacattgtccagtaaagtaaaagaacttaaacattcaaacaaactggaaataacagacatcaaactggagacagcaagagctaagagtgagctagaaagagaaaggaataagattcaaagtgaactggatggattacagtcagacaatgaaattctcaaagcagctgttgaacatcacaaagtgctcttagtagaaaaggatcgtgaattaatacgtaaagtacaagctgccaaagaagaaggttatcaaaaacttgtggtattacaagatgaaaagttagaactcgagaacagattagcagatttggagaaaatgaaagtggaacatgatgtctggaggcaatctgaaaaggatcagtatgaagagaaattgcgggcttcacagatggcagaagagatcaccaggaaggagcttcagagtgttaggttaaaacttcagcaacaaattgtgactattgaaaatgcagagaaggaaaaaaatgaaaattctgacctaaaacagcaaatcagtagtttgcagatccaagtgacttcacttgcacagtcagagaatgacttgctgaattcaaaccaaatgctgaaggaaatggtggagagattaaaacaagaatgccgaaattttagaagccaagctgaaaaagcgcaactagaagctgaaaagacattggaagagaaacagatacagtggttggaagaaaagcataagcttcatgagcgtatcacagacagagaagaaaagtacaatcaagctaaggagaaactgcagcgagctgcaattgcccagaaaaagagaaaatctcttcatgaaaacaaattgaaaagactacaagagaaagtagaagtcttggaggcaaagaaagaagaattggaaacagaaatcaggtcttaaatagacaaaatgttccttttgaagactatacaaggcttcaaaaaagactaaaagatatacagagaagacataatgaatttcgaagtctaattttggttcctaacatgcctccaacagcatctatcaatcctgttagctttcagtcatcagccatggttccaagcatggaactaccatttcctcctcatatgcaggaggaacaacatcaaagggaactctctctacttcgcaaaagactagaagaactggaaacaacacaaagaaaacaactagaggaacttggatcttccggagaatgatgttcttggagaacaggcagatcaaaagaggtgaagttggtgactcagtaaaacttgacattttaacctgtggcatttagatactttttactgtttgccaaaacacttgaatgtgcctcaagaaaaggtacctactacatgctgtattgtatgactgtcaggattttaagattatacaagtgaagcattaaaagagaaattctcagagatatttagaatatttgacaatggtttgagaatgtaaaacaaaaaggaactagttagagtcaagttttaaaatttttactttgttgaatttttttttttggcattttgagtgaaatataactatcattaattctctcttcatctttgagatgcttggccataacagggtccatacacatcttctggtttactatatacaaaaactgtagttgaaaaaagatgacaatttaaaagtcagcctaaagaatgtaaaggtatctatatacaaaaggctaccttttctaaaatctgtgtgcacataattaaagagcttaattttt

SEQ ID NO: 116643 - DNA, 3773 bp, Homo sapiens
  Payload ID: 2746
  Gene Symbol: CEP83
  Gene Name: centrosomal protein 83kDa
  ENST ID: ENST00000397809
  CDS Start-End: 551-2656
gggacagagcccgctcctccaggctggtggggcggtgcgatgaggcggcttctgggccatacgtcagcacgtggggtggcgccgcacccctgaggatcccggtccacgcggaggagtggggcttttcaccgccgccgccgccgccctcggacctctcccgggatacttcacatttccctagggacgggagcccgaggggtccgttcggccctcttcctctcgctgggccgacaccccgctgtaggaccgtaacccttagtcccaatgcctccgtaagcggagttgagtgggtgcctgtggttggagctgtggaggtgtccccggtggcgagcgcggccagaactgcggtcacttaagttttccgtgtgcgggttgcaaggagcgtgcgtgcgtctggtatagggaggacacctctggattgaggatcttatgacctactttagaggaaggtataatttggcttcctgagattctgccttagcaagaaaggagtgggaaatacccttggaaagaaaactaaaacagtaagaaagccaaaacttatttttacatggttgtcagcacatttaccgatatggacacttttcccaataattttcctcctggtggagacagtggattgacaggttctcagtcggagttccagaaaatgttaattgatgaaaggttacgatgtgagcatcataaagctaattatcagacactgaaggctgaacacacaaggttgcagaatgaacatgtaaagttacaaaatgaactcaagcacctgtttaatgaaaagcaaactcagcaggaaaaacttcagctcctgcttgaagaactaagaggagaattagtagagaaaactaaagatttagaagaaatgaaactgcagatattaactccacaaaaattggaattgctaagagcccaaatacaacaagaattagaaactccaatgagagaacgttttaggaatctagatgaagaggtagaaaagtatagagctgtatataataagcttcgctatgaacatacatttctcaagtcagaatttgaacaccagaaggaagagtatgcacgtattttagatgaaggaaaaataaaatatgaatcagagattgcaagactggaggaagataaagaagaactacgtaaccagctgcttaatgttgatctcacaaaagacagcaaacgagtggaacaacttgctcgagaaaaagtctatttgtgtcaaaaattaaaaggtttagaggctgaagtagcggaattaaaggctgaaaaggagaattctgaggctcaggtggaaaatgcccaaagaatacaggtgcggcagttggctgagatgcaggctacagtcagatccctggaggctgaaaaacaatcagctaatttacgggcagaacgtttggaaaaagagctacaatcaagcagtgaacaaaatacctttttaattaataaattgcataaagctgaacgagaaataaatacattgtccagtaaagtaaaagaacttaaacattcaaacaaactggaaataacagacatcaaactggagacagcaagagctaagagtgagctagaaagagaaaggaataagattcaaagtgaactggatggattacagtcagacaatgaaattctcaaagcagctgttgaacatcacaaagtgctcttagtagaaaaggatcgtgaattaatacgtaaagtacaagctgccaaagaagaaggttatcaaaaacttgtggtattacaagatgaaaagttagaactcgagaacagattagcagatttggagaaaatgaaagtggaacatgatgtctggaggcaatctgaaaaggatcagtatgaagagaaattgcgggcttcacagatggcagaagagatcaccaggaaggagcttcagagtgttaggttaaaacttcagcaacaaattgtgactattgaaaatgcagagaaggaaaaaaatgaaaattctgacctaaaacagcaaatcagtagtttgcagatccaagtgacttcacttgcacagtcagagaatgacttgctgaattcaaaccaaatgctgaaggaaatggtggagagattaaaacaagaatgccgaaattttagaagccaagctgaaaaagcgcaactagaagctgaaaagacattggaagagaaacagatacagtggttggaagaaaagcataagcttcatgagcgtatcacagacagagaagaaaagtacaatcaagctaaggagaaactgcagcgagctgcaattgcccagaaaaagagaaaatctcttcatgaaaacaaattgaaaagactacaagagaaagtagaagtcttggaggcaaagaaagaagaattggaaacagaaaatcaggtcttaaatagacaaaatgttccttttgaagactatacaaggcttcaaaaaagactaaaagatatacagagaagacataatgaatttcgaagtctaattttggttcctaacatgcctccaacagcatctatcaatcctgttagctttcagtcatcagccatggttccaagcatggaactaccatttcctcctcatatgcaggaggaacaacatcaaagggaactctctctacttcgcaaaagactagaagaactggaaacaacacaaagaaaacaactagaggaacttggatcttccggagaatgatgttcttggagaacaggcagatcaaaagaggtgaagttggtgactcagtaaaacttgacattttaacctgtggcatttagatactttttactgtttgccaaaacacttgaatgtgcctcaagaaaaggtacctactacatgctgtattgtatgactgtcaggattttaagattatacaagtgaagcattaaaagagaaattctcagagatatttagaatatttgacaatggtttgagaatgtaaaacaaaaaggaactagttagagtcaagttttaaaatttttactttgttgaatttttttttttggcattttgagtgaaatataactatcattaattctctcttcatctttgagatgcttggccataacagggtccatacacatcttctggtttactatatacaaaaactgtagttgaaaaaagatgacaatttaaaagtcagcctaaagaatgtaaaggtatctatatacaaaaggctaccttttctaaaatctgtgtgcacataattaaagagcttaatttttttttaatcgtgtgtttaattttacatcaaccatatagcatatatttagcaatatgacagtctactgattttggctttgttagaatagagaataagtgcaaataattaaatcctatggctgtattaacaagggggccattgattataaaacttgaactcaggtccttttataaacattgttggtatttaactttacttcccattactgtggatctaaccaaataattatgtgttttgtgtccctaagtatgctctcattttttttggtctacacccattggaagcctttttaatgtgacatcttttagaggaattctgctggaataatttcatgttaacgaggctaaagctcaagtctcccaaattaagtggaatgttcattatcccaaggtgttcatagtcaaaagtcccagttgatagtgaagaaggccaggactgtaattgagcagtccttagcaccatttagcaaactaggtttacttactacataatatagctgcttattcacagcatatacagtgacaccttatctctgaaaaataatttccacggagccacttagaataaaaaaactattataactagaaaatt

SEQ ID NO: 116644 - DNA, 705 bp, Homo sapiens
  Payload ID: 2746
  Gene Symbol: CEP83
  Gene Name: centrosomal protein 83kDa
  ENST ID: ENST00000552632
  CDS Start-End: 1-498
gaagaaaagcataagcttcatgagcgtatcacagacagagaagaaaagtacaatcaagctaaggagaaactgcagcgagctgcaattgcccagaaaaagagaaaatctcttcatgaaaacaaattgaaaagactacaagagaaagtagaagtcttggaggcaaagaaagaagaattggaaacagaaaatcaggtcttaaatagacaaaatgttccttttgaagactatacaaggcttcaaaaaagactaaaagatatacagagaagacataatgaatttcgaagtctaattttggttcctaacatgcctccaacagcatctatcaatcctgttagctttcagtcatcagccatggttccaagcatggaactaccatttcctcctcatatgcaggaggaacaacatcaaagggaactctctctacttcgcaaaagactagaagaactggaaacaacacaaagaaaacaactagaggaacttggatcttccggagaatgatgttcttggagaacaggcagatcaaaagagatgggggatttggagcaccaagggtaaaaggtgcctgccacaagaaaagctcaagagttgccaattatgctgtttacttcttctggtttaatagaaggaaaacacagtggtattaaaactggtcatgagcagcaaaaattcaggaattaaaaaatcagcactaaaaagactacagta

SEQ ID NO: 116645 - DNA, 644 bp, Homo sapiens
  Payload ID: 2746
  Gene Symbol: CEP83
  Gene Name: centrosomal protein 83kDa
  ENST ID: ENST00000546527
  CDS Start-End: 638-644
gggtgggacttcctgcttcgcgtgccgctgggccaagggacagagcccgctcctccaggctggtggggcggtgcgatgaggcggcttctgggccatacgtcagcacgtggggtggcgccgcacccctgaggatcccggtccacgcggaggagtggggcttttcaccgccgccgccgccgccctcggacctctcccgggatacttcacatttccctagggacgggagcccgaggggtccgttcggccctcttcctctcgctgggccgacaccccgctgtaggaccgtaacccttagtcccaatgcctccgtaagcggagttgagtgggtgcctgtggttggagctgtggaggtgtccccggtggcgagcgcggccagaactgcggtcacttaagttttccgtgtgcgggttgcaaggagcgtgcgtgcgtctggtatagggaggacacctctggattgaggatcttatgacctactttagaggaagagccagctttagagtttgcccctctgcttatgaaatccctatggaaaaaaggtataatttggcttcctgagattctgccttagcaagaaaggagtgggaaatacccttggaaagaaaactaaaacagtaagaaagccaaaacttatttttacatggttg

SEQ ID NO: 116646 - DNA, 2166 bp, Homo sapiens
  Payload ID: 2746
  Gene Symbol: CEP83
  Gene Name: centrosomal protein 83kDa
  Uniprot ID: Q9Y592
  ENST ID: ENST00000547232
  CDS Start-End: 236-1942
aagcggagttgagtgggtgcctgtggttggagctgtggaggtgtccccggtggcgagcgcggccagaactgcggtcacttaagttttccgtgtgcgggttgcaaggagcgtgcgtgcgtctggtataatttggcttcctgagattctgccttagcaagaaaggagtgggaaatacccttggaaagaaaactaaaacaacagtggattgacaggttctcagtcggagttccagaaaatgttaattgatgaaaggttacgatgtgagcatcataaagctaattatcagacactgaaggctgaacacacaaggttgcagaatgaacatgtaaagttacaaaatgaactcaagcacctgtttaatgaaaagcaaactcagcaggaaaaacttcagctcctgcttgaagaactaagaggagaattagtagagaaaactaaagatttagaagaaatgaaactgcagatattaactccacaaaaattggaattgctaagagcccaaatacaacaagaattagaaactccaatgagagaacgttttaggaatctagatgaagaggtagaaaagtatagagctgtatataataagcttcgctatgaacatacatttctcaagtcagaatttgaacaccagaaggaagagtatgcacgtattttagatgaaggaaaaataaaatatgaatcagagattgcaagactggaggaagataaagaagaactacgtaaccagctgcttaatgttgatctcacaaaagacagcaaacgagtggaacaacttgctcgagaaaaagtctatttgtgtcaaaaattaaaaggtttagaggctgaagtagcggaattaaaggctgaaaaggagaattctgaggctcaggtggaaaatgcccaaagaatacaggtgcggcagttggctgagatgcaggctacagtcagatccctggaggctgaaaaacaatcagctaatttacgggcagaacgtttggaaaaagagctacaatcaagcagtgaacaaaatacctttttaattaataaattgcataaagctgaacgagaaataaatacattgtccagtaaagtaaaagaacttaaacattcaaacaaactggaaataacagacatcaaactggagacagcaagagctaagagtgagctagaaagagaaaggaataagattcaaagtgaactggatggattacagtcagacaatgaaattctcaaagcagctgttgaacatcacaaagtgctcttagtagaaaaggatcgtgaattaatacgtaaagtacaagctgccaaagaagaaggttatcaaaaacttgtggtattacaagatgaaaagttagaactcgagaacagattagcagatttggagaaaatgaaagtggaacatgatgtctggaggcaatctgaaaaggatcagtatgaagagaaattgcgggcttcacagatggcagaagagatcaccaggaaggagcttcagagtgttaggttaaaacttcagcaacaaattgtgactattgaaaatgcagagaaggaaaaaaatgaaaattctgacctaaaacagcaaatcagtagtttgcagatccaagtgacttcacttgcacagtcagagaatgacttgctgaattcaaaccaaatgctgaaggaaatggtggagagattaaaacaagaatgccgaaattttagaagccaagctgaaaaagcgcaactagaagctgaaaagacattggaagagaaacagatacagtggttggaagaaaagcataagcttcatgagcgtatcacagacagagaagaaaagtacaatcaagctaaggagaaactgcagcgagctgcaattgcccagaaaaagcttgaacaggatcttgagttgggatgcccttctgtgactgatacatacagagagagtgtattccccccacccccattgaagagagatctcttgaagtgaacacaagaaaatctcttcatgaaaacaaattgaaaagactacaagagaaagtagaagtcttggaggcaaagaaagaagaattggaaacagaaaatcaggtcttaaatagacaaaatgttccttttgaagactatacaaggcttcaaaaaagactaaaagatatacagagaagacataatgaatttcgaagtctaattttggttcctaacatgcctccaacagca

SEQ ID NO: 116647 - DNA, 3122 bp, Homo sapiens
  Payload ID: 2746
  Gene Symbol: CEP83
  Gene Name: centrosomal protein 83kDa
  ENST ID: ENST00000547575
  CDS Start-End: 551-1609
gggacagagcccgctcctccaggctggtggggcggtgcgatgaggcggcttctgggccatacgtcagcacgtggggtggcgccgcacccctgaggatcccggtccacgcggaggagtggggcttttcaccgccgccgccgccgccctcggacctctcccgggatacttcacatttccctagggacgggagcccgaggggtccgttcggccctcttcctctcgctgggccgacaccccgctgtaggaccgtaacccttagtcccaatgcctccgtaagcggagttgagtgggtgcctgtggttggagctgtggaggtgtccccggtggcgagcgcggccagaactgcggtcacttaagttttccgtgtgcgggttgcaaggagcgtgcgtgcgtctggtatagggaggacacctctggattgaggatcttatgacctactttagaggaaggtataatttggcttcctgagattctgccttagcaagaaaggagtgggaaatacccttggaaagaaaactaaaacagtaagaaagccaaaacttatttttacatggttgtcagcacatttaccgatatggacacttttcccaataattttcctcctggtggagacagtggattgacaggttctcagtcggagttccagaaaatgttaattgatgaaaggttacgatgtgagcatcataaagctaattatcagacactgaaggctgaacacacaaggttgcagaatgaacatgtaaagttacaaaatgaactcaagcacctgtttaatgaaaagcaaactcagcaggaaaaacttcagctcctgcttgaagaactaagaggagaattagtagagaaaactaaagatttagaagaaatgaaactgcagatattaactccacaaaaattggaattgctaagagcccaaatacaacaagaattagaaactccaatgagagaacgttttaggaatctagatgaagaggtagaaaagtatagagctgtatataataagcttcgctatgaacatacatttctcaagtcagaatttgaacaccagaaggaagagtatgcacgtattttagatgaaggaaaaataaaatatgaatcagagattgcaagactggaggaagataaagaagaactacgtaaccagctgcttaatgttgatctcacaaaagacagcaaacgagtggaacaacttgctcgagaaaaagtctatttgtgtcaaaaattaaaaggtttagaggctgaagtagcggaattaaaggctgaaaaggagaattctgaggctcaggtggaaaatgcccaaagaatacaggtgcggcagttggctgagatgcaggctacagtcagatccctggaggctgaaaaacaatcagctaatttacgggcagaacgtttggaaaaagagctacaatcaagcagtgaacaaaatacctttttaattaataaattgcataaagctgaacgagaaataaatacattgtccagtaaagtaaaagaacttaaacattcaaacaaactggaaataacagacatcaaactggagacagcaagagctaagagtgagctagaaagagaaaggaataagattcaaagtgaactggatggtaatatgtgatttcccttgctgctgctgctgctgcttattttcagatatgaactcaaattattaaaatagttgaatctgaatttttatttccaaattttcaacttaatttagttttaattttggagtacatatgaaatgtttattatatgttgagtgttttgttcattgtaagatttaataactttaaaaaaatcagtcttatgtttttatcatagttattggatacataaatgaattttgtaaatgggatgccatacttcctgatttataaattttaaatctatttatggtgtagttattagtcccaggacattttaagtctggagaatgtgaggaagataattgggttccaggcttaatttttttcaattaaaaagatttttttatgtagacctcaggccagttcattgtagcctagtgcagagtaggcttatttatttattttttatttttattttttatttttgagatggagtctcgctctgtccccctggctggagtgcagtggcgtgatctcggctcactggaagctctgcctcccaggttcacgccattctcctgcctcagcctcccaaatagctgggactacaggcgcccaccaccaggctggctatttttttgtatttttaagtagagacagcgtttcaccgtgttagccaggatggtcttgatctcctgacctcgtgatctgcctgcctcggcctcccaaagtactgggattacaggcatgagccacgcccagccgagtaggcttatttttaagttccagtttaatcttggaacatctgtctcatcagatttcctcattatttatgttgtttctaacttgaagtatttaaataagcttacctttggcctgtagctatgcttgagttgatctgtagttgaactcatttcagacagagtttatgatgaatgcctttcatgttttgaaatggggtctcaccatgttgcccaggctagccttgaactcctgggctcaaatggtcctcctgcctaagcctcctcagtagctgggactacaggtgctaacaccgtgtctggctgctatgaatgattttttccaattgttaatttctatttattgactcatggatttccatagagttaagaagtaaatttttttaggaacttaaagaatgctgcattttgttttcactttgagttagatgtgaatttgctttagttattccatctgcaaagtatttgccatttcattgcaaagatttctgaattcattgtacaaacttgaaagtgtccatgttatttatacttctgctagagatctagcaattctgctagaatcaataggttttgaagggttttgtgatttatttcactctgctatcagccagctttttctatgaggcttaggtcacagaacctctttagaggtgaagtaagtaaacctctggttatcatccagtttgatctcaactctcaatgttcgaatgagtaaatgtatacagcttttattaaagtttttatatgtgtatgcactaaataaacagtgacaggaaaa

SEQ ID NO: 116648 - DNA, 3935 bp, Homo sapiens
  Payload ID: 2747
  Gene Symbol: CEP85
  Gene Name: centrosomal protein 85kDa
  Uniprot ID: Q6P2H3
  ENST ID: ENST00000252992
  CDS Start-End: 132-2420
gcaacggccgttagaggagctgagggagggaaccaccgctcaccgcagacgtggtggctgcagtcagtcttcccgagtgagggatttcgccgcccgctttcaggcccgtttggcttaaataactgtgattgatggccatgcaggagaaatatccaactgaggggatctctcacgtcacttcaccgagttccgatgtgattcagaagggcagttccctggggactgaatggcagaccccagttatctcggagccctttcggagccgcttcagccgctgttcaagtgtagccgacagtggggacacagccattggtacatcatgctcagatattgcggaggatttttgcagctcaagtggcagtcctcctttccagcccatcaaaagccacgtaaccattccaacagcccatgtgatgccttctactttagggacctctcctgccaagccaaattctacacctgttggaccctcttcctctaaactccctttgtcagggttggctgaaagtgtgggaatgacaagaaatggagacctcggtgcaatgaaacattctccaggcctatctagagatctcatgtatttctctggtgctactggagaaaatggaattgagcagtcctggtttccagcagtgggccatgaaagacaagaagaggcgaggaagtttgatattcctagcatggaatctaccctcaatcagtcggcaatgatggagacactttattcagatcctcaccaccgagtccgcttccacaacccaagaaccagcacaagtaaggagttgtacagagtgttgcctgaggccaagaaggcaccgggcagcggggcagtgtttgagcggaatggaccacattctaatagcagtggggtcctccctttgggactccagcctgctcccgggctctccaagcctctgccctctcaggtgtggcagccgagtcctgacacttggcatccccgagagcaatcttgtgaactcagcacttgtcggcagcagctggaattgattcgtttacagatggagcaaatgcagcttcagaatggagccatctgccaccatcctgctgcttttggtccttcactgcccatcttagagccagcacagtggatcagcatcttgaacagtaatgaacaccttctgaaggaaaaagagcttctcattgacaagcagaggaaacacatctctcagctggagcagaaagtgcgagagagcgaactgcaagtccacagtgccctcttgggccgccctgccccctttggtgatgtctgcttgctgaggctacaggaattgcagcgagaaaacactttcttacgtgcacagtttgcacagaagacagaagccttgagcagagaaaagattgaccttgaaaagaaactctctgcttctgaagttgaagtccagctcatcagagagtcgctcaaagtggcgttgcagaagcattctgaggaagtgaagaaacaggaagaaagggtcaaaggtcgtgataaacatatcaataatttgaaaaagaaatgccagaaggaatcagagcagaaccgggagaagcagcagcgtattgagaccttggagcgctacctggctgacctgcccacactggaagaccatcagaagcagagccagcagcttaaggattctgagttgaagagcacagagctgcaggagaaagtgactgagctggagagtttgctggaggagacccaggcaatctgcagagagaaggagattcaactggaaagcctgaggcagagagaagcagaattctcctccgctggacatagcctgcaagataaacagtctgtggaggagaccagtggagaaggtccagaagtggaaatggagtcctggcagaagcgatacgattcgctccaaaagattgtggagaagcagcagcagaagatggatcagttgcgctcacaagtacagagcctagagcaggaagtggctcaagaagaaggaacaagccaggccctgagagaggaggcccagcgaagggattcagccctgcagcagctgcgcacagccgtgaaggagctttcagtgcaaaaccaggacttgattgagaagaatctgacactccaggaacacctgcgccaggcccaaccagggtctccaccttcaccagacacggcccagctggcacttgagctgcaccaggagttggccagttgccttcaagatctgcaggctgtctgtagcattgtgacccagagggcccagggccatgaccccaatctctccctgctcctgggcattcactcagcacagcacccagagactcagctagatttgcagaagccagatgtgatcaagaggaaactagaagaggttcaacagctgcgtcgtgacattgaggacttaaggaccaccatgtcagacagatatgcccaggacatgggagaaaactgtgtcacacagtgaggaattctgggggattcccccagggaggagctgggctgctgagagcctagtccagcaggtttctgccctgacattctcttgtctgctattcccagagaggtctcagaggggaggggagagcctgcatctgggggccaagggctgattagggaactgtgtcctacccacactggcatgttggattacgtttgtcctgttaattcactctagacggtgagttactaattaacttttggcaggtacaacagataagtcctcacaaactgttcccagccctaggctgacatgagagacgaacaggctgtccacctttcttctccatccaatgggatggatccatgttcattcccacttcacaccttggtcctgctgattagagagctcatcagaggggcctggaaaggctgagcaagtaccagtgacaatggccatttaagaattctcaggccccatgtgccagccttcttgggaactgagctggctttctgggttttctcatgcctggtcttactgcttcttcctcagggctcttgttctcccagaagcctcagggtaatgtgttggttagcacgtaactactaggattggggccctagggattatagccaggactctaatctgcctaccatgccatttaacaagagatcccactctccagctgccttgtgtccctagggtcctggccatgtgtttagtgtgctaaactttctcctttgttctcaggccttccaggtagtccccttcctggacttaagagtgcaaactcttctctgtggttctagccttgggcagaattatatcccagagaccacagagcaactgtcaagctgcttaccccctcacccagggctacagcctgtgcccagccctctaatttgtgcctctcttgtgttgggggtggtgggggttattcctttccctttcctgctctggcctccttgaaagttcagagtacccagtacaagtcagctttaaagtacagcttttagtgtttcctgggttgtttctctggggctttagtgagggacctttgccctctggtttttcttgcctcctggtttagggagcatctcacacttgttagtatctggttgttgggccagccgtgcctcctctagatctggagccaggccaggcaggggccacgtgtgggccagtcagccactacaagatttttgctaagctttgggctgttggcagcatcttggacctcatgcctgggcctgaatgaggctctttcttaagtgtttttacaagtttgtgttttatttatggagtgacttatcccttccattcagagcagccccacccagccagcccttcagcctctgggctcctgctgcttaaaggcagagccgcctggttggtctccaccctgtgcattgggagcccagccaccatgctgacgggtatttttcctcataaagtttataaccagttatttatatgaatctttgttatgtccatttgtttgtattgcgtattttgattataaaataaagtatcttaacagac

SEQ ID NO: 116649 - DNA, 2821 bp, Homo sapiens
  Payload ID: 2747
  Gene Symbol: CEP85
  Gene Name: centrosomal protein 85kDa
  ENST ID: ENST00000453146
  CDS Start-End: 1-1307
tcagcatcttgaacagtaatgaacaccttctgaaggaaaaagagcttctcattgacaagcagaggaaacacatctctcagctggagcagaaagtgcgagagagcgaactgcaagtccacagtgccctcttgggccgccctgccccctttggtgatgtctgcttgctgaggctacaggaattgcagcgagaaaacactttcttacgtgcacagtttgcacagaagacagaagccttgagcagagaaaagattgaccttgaaaagaaactctctgcttctgaagttgaagtccagctcatcagagagtcgctcaaagtggcgttgcagaagcattctgaggaagtgaagaaacaggaagaaagggtcaaaggtcgtgataaacatatcaataatttgaaaaagaaatgccagaaggaatcagagcagaaccgggagaagcagcagcgtattgagaccttggagcgctacctggctgacctgcccacactggaagaccatcagaagcagagccagcagcttaaggattctgagttgaagagcacagagctgcaggagaaagtgactgagctggagagtttgctggaggagacccaggcaatctgcagagagaaggagattcaactggaaagcctgaggcagagagaagcagaattctcctccgctggacatagcctgcaagataaacagtctgtggaggagaccagtggagaaggtccagaagtggaaatggagtcctggcagaagcgatacgattcgctccaaaagattgtggagaagcagcagcagaagatggatcagttgcgctcacaagtacagagcctagagcaggaagtggctcaagaagaaggaacaagccaggccctgagagaggaggcccagcgaagggattcagccctgcagcagctgcgcacagccgtgaaggagctttcagtgcaaaaccaggacttgattgagaagaatctgacactccaggaacacctgcgccaggcccaaccagggtctccaccttcaccagacacggcccagctggcacttgagctgcaccaggagttggccagttgccttcaagatctgcaggctgtctgtagcattgtgacccagagggcccagggccatgaccccaatctctccctgctcctgggcattcactcacagcacccagagactcagctagatttgcagaagccagatgtgatcaagaggaaactagaagaggttcaacagctgcgtcgtgacattgaggacttaaggaccaccatgtcagacagatatgcccaggacatgggagaaaactgtgtcacacagtgaggaattctgggggattcccccagggaggagctgggctgctgagagcctagtccagcaggtttctgccctgacattctcttgtctgctattcccagagaggtctcagaggggaggggagagcctgcatctgggggccaagggctgattagggaactgtgtcctacccacactggcatgttggattacgtttgtcctgttaattcactctagacggtgagttactaattaacttttggcaggtacaacagataagtcctcacaaactgttcccagccctaggctgacatgagagacgaacaggctgtccacctttcttctccatccaatgggatggatccatgttcattcccacttcacaccttggtcctgctgattagagagctcatcagaggggcctggaaaggctgagcaagtaccagtgacaatggccatttaagaattctcaggccccatgtgccagccttcttgggaactgagctggctttctgggttttctcatgcctggtcttactgcttcttcctcagggctcttgttctcccagaagcctcagggtaatgtgttggttagcacgtaactactaggattggggccctagggattatagccaggactctaatctgcctaccatgccatttaacaagagatcccactctccagctgccttgtgtccctagggtcctggccatgtgtttagtgtgctaaactttctcctttgttctcaggccttccaggtagtccccttcctggacttaagagtgcaaactcttctctgtggttctagccttgggcagaattatatcccagagaccacagagcaactgtcaagctgcttaccccctcacccagggctacagcctgtgcccagccctctaatttgtgcctctcttgtgttgggggtggtgggggttattcctttccctttcctgctctggcctccttgaaagttcagagtacccagtacaagtcagctttaaagtacagcttttagtgtttcctgggttgtttctctggggctttagtgagggacctttgccctctggtttttcttgcctcctggtttagggagcatctcacacttgttagtatctggttgttgggccagccgtgcctcctctagatctggagccaggccaggcaggggccacgtgtgggccagtcagccactacaagatttttgctaagctttgggctgttggcagcatcttggacctcatgcctgggcctgaatgaggctctttcttaagtgtttttacaagtttgtgttttatttatggagtgacttatcccttccattcagagcagccccacccagccagcccttcagcctctgggctcctgctgcttaaaggcagagccgcctggttggtctccaccctgtgcattgggagcccagccaccatgctgacgggtatttttcctcataaagtttataaccagttatttatatgaatctttgttatgtccatttgtttgtattgcgtattttgattataaaataaagtatcttaacaga

SEQ ID NO: 116650 - DNA, 4061 bp, Homo sapiens
  Payload ID: 2747
  Gene Symbol: CEP85
  Gene Name: centrosomal protein 85kDa
  Uniprot ID: Q6P2H3
  ENST ID: ENST00000451429
  CDS Start-End: 181-2316
gggtggggccaaacgacgcgcgttctgtggcgcgcggcctggcgggcgtgcaacggccgttagaggagctgagggagggaaccaccgctcaccgcagacgtggtggctgcagtcagtcttcccgagtgagggatttcgccgcccgctttcaggcccgtttggcttaaataactgtgattgatggccatgcaggagaaatatccaactgaggggatctctcacgtcacttcaccgaatttttgcagctcaagtggcagtcctcctttccagcccatcaaaagccacgtaaccattccaacagcccatgtgatgccttctactttagggacctctcctgccaagccaaattctacacctgttggaccctcttcctctaaactccctttgtcagggttggctgaaagtgtgggaatgacaagaaatggagacctcggtgcaatgaaacattctccaggcctatctagagatctcatgtatttctctggtgctactggagaaaatggaattgagcagtcctggtttccagcagtgggccatgaaagacaagaagaggcgaggaagtttgatattcctagcatggaatctaccctcaatcagtcggcaatgatggagacactttattcagatcctcaccaccgagtccgcttccacaacccaagaaccagcacaagtaaggagttgtacagagtgttgcctgaggccaagaaggcaccgggcagcggggcagtgtttgagcggaatggaccacattctaatagcagtggggtcctccctttgggactccagcctgctcccgggctctccaagcctctgccctctcaggtgtggcagccgagtcctgacacttggcatccccgagagcaatcttgtgaactcagcacttgtcggcagcagctggaattgattcgtttacagatggagcaaatgcagcttcagaatggagccatctgccaccatcctgctgcttttggtccttcactgcccatcttagagccagcacagtggatcagcatcttgaacagtaatgaacaccttctgaaggaaaaagagcttctcattgacaagcagaggaaacacatctctcagctggagcagaaagtgcgagagagcgaactgcaagtccacagtgccctcttgggccgccctgccccctttggtgatgtctgcttgctgaggctacaggaattgcagcgagaaaacactttcttacgtgcacagtttgcacagaagacagaagccttgagcagagaaaagattgaccttgaaaagaaactctctgcttctgaagttgaagtccagctcatcagagagtcgctcaaagtggcgttgcagaagcattctgaggaagtgaagaaacaggaagaaagggtcaaaggtcgtgataaacatatcaataatttgaaaaagaaatgccagaaggaatcagagcagaaccgggagaagcagcagcgtattgagaccttggagcgctacctggctgacctgcccacactggaagaccatcagaagcagagccagcagcttaaggattctgagttgaagagcacagagctgcaggagaaagtgactgagctggagagtttgctggaggagacccaggcaatctgcagagagaaggagattcaactggaaagcctgaggcagagagaagcagaattctcctccgctggacatagcctgcaagataaacagtctgtggaggagaccagtggagaaggtccagaagtggaaatggagtcctggcagaagcgatacgattcgctccaaaagattgtggagaagcagcagcagaagatggatcagttgcgctcacaagtacagagcctagagcaggaagtggctcaagaagaaggaacaagccaggccctgagagaggaggcccagcgaagggattcagccctgcagcagctgcgcacagccgtgaaggagctttcagtgcaaaaccaggacttgattgagaagaatctgacactccaggaacacctgcgccaggcccaaccagggtctccaccttcaccagacacggcccagctggcacttgagctgcaccaggagttggccagttgccttcaagatctgcaggctgtctgtagcattgtgacccagagggcccagggccatgaccccaatctctccctgctcctgggcattcactcagcacagcacccagagactcagctagatttgcagaagccagatgtgatcaagaggaaactagaagaggttcaacagctgcgtcgtgacattgaggacttaaggaccaccatgtcagacagatatgcccaggacatgggagaaaactgtgtcacacagtgaggaattctgggggattcccccagggaggagctgggctgctgagagcctagtccagcaggtttctgccctgacattctcttgtctgctattcccagagaggtctcagaggggaggggagagcctgcatctgggggccaagggctgattagggaactgtgtcctacccacactggcatgttggattacgtttgtcctgttaattcactctagacggtgagttactaattaacttttggcaggtacaacagataagtcctcacaaactgttcccagccctaggctgacatgagagacgaacaggctgtccacctttcttctccatccaatgggatggatccatgttcattcccacttcacaccttggtcctgctgattagagagctcatcagaggggcctggaaaggctgagcaagtaccagtgacaatggccatttaagaattctcaggccccatgtgccagccttcttgggaactgagctggctttctgggttttctcatgcctggtcttactgcttcttcctcagggctcttgttctcccagaagcctcagggtaatgtgttggttagcacgtaactactaggattggggccctagggattatagccaggactctaatctgcctaccatgccatttaacaagagatcccactctccagctgccttgtgtccctagggtcctggccatgtgtttagtgtgctaaactttctcctttgttctcaggccttccaggtagtccccttcctggacttaagagtgcaaactcttctctgtggttctagccttgggcagaattatatcccagagaccacagagcaactgtcaagctgcttaccccctcacccagggctacagcctgtgcccagccctctaatttgtgcctctcttgtgttgggggtggtgggggttattcctttccctttcctgctctggcctccttgaaagttcagagtacccagtacaagtcagctttaaagtacagcttttagtgtttcctgggttgtttctctggggctttagtgagggacctttgccctctggtttttcttgcctcctggtttagggagcatctcacacttgttagtatctggttgttgggccagccgtgcctcctctagatctggagccaggccaggcaggggccacgtgtgggccagtcagccactacaagatttttgctaagctttgggctgttggcagcatcttggacctcatgcctgggcctgaatgaggctctttcttaagtgtttttacaagtttgtgttttatttatggagtgacttatcccttccattcagagcagccccacccagccagcccttcagcctctgggctcctgctgcttaaaggcagagccgcctggttggtctccaccctgtgcattgggagcccagccaccatgctgacgggtatttttcctcataaagtttataaccagttatttatatgaatctttgttatgtccatttgtttgtattgcgtattttgattataaaataaagtatcttaacagactcctcagttttccatacccttccatcaccaccaccacgctattctacccctcactttggcttgttagagccaaacacctgggtgttcagccaggtcccccaggcagcagcgtggaggaacctttggcaggtccagccagcctcatgtccctatctatctctgccacctctgctcctctgtcgttctatagaaccagatctcttcccactcactttctcttgggcaaacct

SEQ ID NO: 116651 - DNA, 3507 bp, Homo sapiens
  Payload ID: 2747
  Gene Symbol: CEP85
  Gene Name: centrosomal protein 85kDa
  Uniprot ID: Q6P2H3
  ENST ID: ENST00000476272
  CDS Start-End: 134-2419
gtgcaacggccgttagaggagctgagggagggaaccaccgctcaccgcagacgtggtggctgcagtcagtcttcccgagtgagggatttcgccgcccgctttcaggcccgtttggcttaaataactgtgattgatggccatgcaggagaaatatccaactgaggggatctctcacgtcacttcaccgagttccgatgtgattcagaagggcagttccctggggactgaatggcagaccccagttatctcggagccctttcggagccgcttcagccgctgttcaagtgtagccgacagtggggacacagccattggtacatcatgctcagatattgcggaggatttttgcagctcaagtggcagtcctcctttccagcccatcaaaagccacgtaaccattccaacagcccatgtgatgccttctactttagggacctctcctgccaagccaaattctacacctgttggaccctcttcctctaaactccctttgtcagggttggctgaaagtgtgggaatgacaagaaatggagacctcggtgcaatgaaacattctccaggcctatctagagatctcatgtatttctctggtgctactggagaaaatggaattgagcagtcctggtttccagcagtgggccatgaaagacaagaagaggcgaggaagtttgatattcctagcatggaatctaccctcaatcagtcggcaatgatggagacactttattcagatcctcaccaccgagtccgcttccacaacccaagaaccagcacaagtaaggagttgtacagagtgttgcctgaggccaagaaggcaccgggcagcggggcagtgtttgagcggaatggaccacattctaatagcagtggggtcctccctttgggactccagcctgctcccgggctctccaagcctctgccctctcaggtgtggcagccgagtcctgacacttggcatccccgagagcaatcttgtgaactcagcacttgtcggcagcagctggaattgattcgtttacagatggagcaaatgcagcttcagaatggagccatctgccaccatcctgctgcttttggtccttcactgcccatcttagagccagcacagtggatcagcatcttgaacagtaatgaacaccttctgaaggaaaaagagcttctcattgacaagcagaggaaacacatctctcagctggagcagaaagtgcgagagagcgaactgcaagtccacagtgccctcttgggccgccctgccccctttggtgatgtctgcttgctgaggctacaggaattgcagcgagaaaacactttcttacgtgcacagtttgcacagaagacagaagccttgagcagagaaaagattgaccttgaaaagaaactctctgcttctgaagttgaagtccagctcatcagagagtcgctcaaagtggcgttgcagaagcattctgaggaagtgaagaaacaggaagaaagggtcaaaggtcgtgataaacatatcaataatttgaaaaagaaatgccagaaggaatcagagcagaaccgggagaagcagcagcgtattgagaccttggagcgctacctggctgacctgcccacactggaagaccatcagaagcagagccagcagcttaaggattctgagttgaagagcacagagctgcaggagaaagtgactgagctggagagtttgctggaggagacccaggcaatctgcagagagaaggagattcaactggaaagcctgaggcagagagaagcagaattctcctccgctggacatagcctgcaagataaacagtctgtggaggagaccagtggagaaggtccagaagtggaaatggagtcctggcagaagcgatacgattcgctccaaaagattgtggagaagcagcagcagaagatggatcagttgcgctcacaagtacagagcctagagcaggaagtggctcaagaagaaggaacaagccaggccctgagagaggaggcccagcgaagggattcagccctgcagcagctgcgcacagccgtgaaggagctttcagtgcaaaaccaggacttgattgagaagaatctgacactccaggaacacctgcgccaggcccaaccagggtctccaccttcaccagacacggcccagctggcacttgagctgcaccaggagttggccagttgccttcaagatctgcaggctgtctgtagcattgtgacccagagggcccagggccatgaccccaatctctccctgctcctgggcattcactcacagcacccagagactcagctagatttgcagaagccagatgtgatcaagaggaaactagaagaggttcaacagctgcgtcgtgacattgaggacttaaggaccaccatgtcagacagatatgcccaggacatgggagaaaactgtgtcacacagtgaggaattctgggggattcccccagggaggagctgggctgctgagagcctagtccagcaggtttctgccctgacattctcttgtctgctattcccagagaggtctcagaggggaggggagagcctgcatctgggggccaagggctgattagggaactgtgtcctacccacactggcatgttggattacgtttgtcctgttaattcactctagacggtgagttactaattaacttttggcaggtacaacagataagtcctcacaaactgttcccagccctaggctgacatgagagacgaacaggctgtccacctttcttctccatccaatgggatggatccatgttcattcccacttcacaccttggtcctgctgattagagagctcatcagaggggcctggaaaggctgagcaagtaccagtgacaatggccatttaagaattctcaggccccatgtgccagccttcttgggaactgagctggctttctgggttttctcatgcctggtcttactgcttcttcctcagggctcttgttctcccagaagcctcagggtaatgtgttggttagcacgtaactactaggattggggccctagggattatagccaggactctaatctgcctaccatgccatttaacaagagatcccactctccagctgccttgtgtccctagggtcctggccatgtgtttagtgtgctaaactttctcctttgttctcaggccttccaggtagtccccttcctggacttaagagtgcaaactcttctctgtggttctagccttgggcagaattatatcccagagaccacagagcaactgtcaagctgcttaccccctcacccagggctacagcctgtgcccagccctctaatttgtgcctctcttgtgttgggggtggtgggggttattcctttccctttcctgctctggcctccttgaaagttcagagtacccagtacaagtcagccaccatgctgacgggtatttttcctcataaagtttataaccagttatttatatgaatctttgttatgtccatttgtttgtattgcgtattttgattataaaataaagtatcttaacag

SEQ ID NO: 116652 - DNA, 1736 bp, Homo sapiens
  Payload ID: 2748
  Gene Symbol: CEP85L
  Gene Name: centrosomal protein 85kDa-like
  Uniprot ID: Q5SZL2
  ENST ID: ENST00000360290
  CDS Start-End: 351-1535
ctctgagtgatgggcctactgcagagcccgcctcccaccacagtgctggcccagaattttttatacgaactagttcgtaactaaacgttggaagcatcaccatattgccagtgagaagcccagattattcatcagcatggctacctgctaatgaatcattgtggcaggccacaactgttccatctaaccatcgaaataaccatatcaggagacacagtatagcttctgacagtggagacactggcattggaacttcctgttctgatagcgtggaagatcattcaacttcaagtggcacattatcttttaagcctagtcaatcattgattactcttcctactgcccatgtgatgccgtctaattccagcgcttcaatttccaaacttagggaatcattgacaccagatggctcaaaatggagtacaagcctcatgcaaacattgggaaaccacagtaggggggagcaggactcttccctagacatgaaggacttccggccacttcggaaatggtcatctttatccaaactcactgccccggataactgtggccagggtggcactgtatgcagagaagagtcaaggaatggtttggagaagatagggaaggctaaggctttaacatcacaactgaggacaattgggcctagctgtttacatgatagtatggagatgcttaggttagaggacaaggaaataaataaaaaacggtcatcaactctggactgcaagtataaatttgagagctgtagcaaggaggactttagagcctcttcctctactcttaggagacagcctgtagacatgacatatagtgccttacctgaaagcaagcccattatgacaagctcagaggcttttgaacctccaaaatatttaatgcttggtcaacaggcagtaggtggagttcccattcagccttccgtaaggactcagatgtggcttacagagcagctgcggacaaatcctttggaaggtagaaatacagaggattcttacagtttagctccttggcaacagcagcaaattgaagactttcgacaaggaagtgaaacaccaatgcaggttttgactggatcatctcgtcaaagttattcacctggctatcaggatttcagtaagtgggaatcaatgttgaaaataaaagaaggacttctaaggcagaaagaaattgtaatcgatcggcagaagcaacaaattacccacctgcatgagaggataagggataatgaattacgggctcaacatgccatgttaggacattatgtaaattgtgaggattcttatgtggctagtttgcagccacaatatgagaacacttcactccagacaccattttcagaggaatcagtttcccattcccaacaaggggaatttgagcaaaagcttgcatctactgagaaagaagttttacagcttaatgagtttctcaaacaaagactaagcctatttagtgaagagaagaagaaactagaggaaaaagtaggtttttctaataaagttgaattaggtcaacaacatttcctcagcatataattatttgtctgtcatttaccctgtcaggtgtcatgccaggttatgtatacatttatgtggaggtgattaattttgtagtaacttttgagaagccctctgctgtctgcagaaatccaaggattttctttgaggatagaaatgctcttgtatatctttctaacaaatagtaaaatctttaaaaaattaattgcctacaccaaa

SEQ ID NO: 116653 - DNA, 7118 bp, Homo sapiens
  Payload ID: 2748
  Gene Symbol: CEP85L
  Gene Name: centrosomal protein 85kDa-like
  Uniprot ID: Q5SZL2
  ENST ID: ENST00000368488
  CDS Start-End: 68-2494
gcctatcatttgaagacgttccttgaggaggtttgaaaaaaaacagctgacccttggctaacattacatgatttggagaaataattggaagtctaccacagggagactaaatgtaaaactccaatcagataaattacaacacggatgtggcccagattattcatcagcatggctacctgctaatgaatcattgtggcaggccacaactgttccatctaaccatcgaaataaccatatcaggagacacagtatagcttctgacagtggagacactggcattggaacttcctgttctgatagcgtggaagatcattcaacttcaagtggcacattatcttttaagcctagtcaatcattgattactcttcctactgcccatgtgatgccgtctaattccagcgcttcaatttccaaacttagggaatcattgacaccagatggctcaaaatggagtacaagcctcatgcaaacattgggaaaccacagtaggggggagcaggactcttccctagacatgaaggacttccggccacttcggaaatggtcatctttatccaaactcactgccccggataactgtggccagggtggcactgtatgcagagaagagtcaaggaatggtttggagaagatagggaaggctaaggctttaacatcacaactgaggacaattgggcctagctgtttacatgatagtatggagatgcttaggttagaggacaaggaaataaataaaaaacggtcatcaactctggactgcaagtataaatttgagagctgtagcaaggaggactttagagcctcttcctctactcttaggagacagcctgtagacatgacatatagtgccttacctgaaagcaagcccattatgacaagctcagaggcttttgaacctccaaaatatttaatgcttggtcaacaggcagtaggtggagttcccattcagccttccgtaaggactcagatgtggcttacagagcagctgcggacaaatcctttggaaggtagaaatacagaggattcttacagtttagctccttggcaacagcagcaaattgaagactttcgacaaggaagtgaaacaccaatgcaggttttgactggatcatctcgtcaaagttattcacctggctatcaggatttcagtaagtgggaatcaatgttgaaaataaaagaaggacttctaaggcagaaagaaattgtaatcgatcggcagaagcaacaaattacccacctgcatgagaggataagggataatgaattacgggctcaacatgccatgttaggacattatgtaaattgtgaggattcttatgtggctagtttgcagccacaatatgagaacacttcactccagacaccattttcagaggaatcagtttcccattcccaacaaggggaatttgagcaaaagcttgcatctactgagaaagaagttttacagcttaatgagtttctcaaacaaagactaagcctatttagtgaagagaagaagaaactagaggaaaaacttaaaactagagatcgatacatcagtagtctgaaaaagaaatgccagaaggaatctgaacaaaacaaagaaaagcagagaagaattgagaccttggaaaagtatctggctgatcttccaactctagatgatgtacagagtcagagtctacagctgcagattctggaagaaaaaaataagaatttacaagaggctttgatagatacagaaaaaaaacttgaagagatcaaaaagcagtgtcaagataaagagacacagttaatatgccagaaaaagaaagaaaaggagttagtaactaccgttcagagtttgcaacaaaaagtagaaagatgccttgaagatggaatccgccttcccatgttagatgcaaaacagcttcagaatgaaaatgataatctcagacaacaaaatgagactgctagtaagataatagacagccaacaagatgagattgacagaatgattttagaaattcagtctatgcaaggaaagctttctaaagagaaactgaccactcaaaagatgatggaagagctggaaaagaaagaaagaaatgtacagagattaacaaaagcattgcttgaaaaccaaagacaaacagatgagacatgctctttattggatcagggccaggaacctgaccaatctaggcagcagacagttctttccaaacggccactatttgatttgactgtgattgatcagctgttcaaggaaatgtcctgttgtttgtttgacttgaaagcattgtgtagtattcttaatcagcgtgctcagggcaaggagcctaatctttcattattactgggaataagatcaatgaactgttcagctgaagagactgagaatgaccacagcacagaaacactcactaaaaagctgtcagatgtgtgccagttacgaagagacattgatgaattaaggactacaatatcagaccgctatgctcaggacatgggagacaactgcattactcagtgatcaagtgttagtcccacagcaataatgacctgttgtttaaatgctgctgtgttatggagccataatggaaggttgcaagtgacatgacttgcacttagggattttttttctgtggatttgttttgttgaaggggagaagggaagtgaagagattttgaaggggcttatctaatcaggcaaaaagaaaaaaaatcaaattacctttggaaaatatgataaaatctacaaggaaaaaaatgtctatattctcaaactactgattgtaggaccaagctgtgaagagtacccttcacatgaaggagtaggattccttttaatcctatagctttgtgtgtttgtgtgtgcatgtatgtgtgttgttgtgtgtgtgtgcacgtgctttattcacaaatttataagggtttctagggtcagagcagagcttctgagaaaggcacacgctgtttattcttatatttctttcatatagaagcttgtgttgtactttgggattttcagtggctggctgaacaagagttcaaacagcaggcaagtgttgtcatggtagtacaggaggcaaaaccatttatattttgaacacttactgcactgataggatgtttgtggttgagctgattttagtactgtagataggtcagctgtttttccagagtgattgtggatttcccaagaggtgtgaaattttgacgtgatgctctttttccttagcattgtaatgtatgtgttacaagaaaggttaacataacttgaactaattttaacatgttccttactatttacaattttttatttatatgttttatatatatacatatataaatgtaaacaaagccatatataattaataaaggcattggatcattattataaaaggaagattaacaaagttaccctggaacaatagcttacttatccaaatctcaacatttacattttaacagttttgtatgtttcaaagttgaaactactgtaagagaaagccaatactatttatatctgaatcaacagtagcataaacattttttaattgagattgtattttaatcccttttgttaaagtacattaacaacagtttttcacaggatatgaacttggcgaaattagttcttaatctgaattacagggtattactatgaaatgcagttgattttgcagtagacgtacagtcatttaaacttccaaatgagtgttgtccatgtttctgttggtattttggaaggattatacattttattgccttcagcattgattatgttcttttgaatatacttagttttggcgaaagccttgtcctttgtaagttggtttgatcttgtgatgcaaccaagtctcatttaggtcaagactaaataagagatggaggggtagagggtgtgactcaagcaggataatattgatttgataaagagcatatcacatgcctgttttcttgccagataaagggcatagcacatgcctgttttcttatatactagaataaaggctctcctaggaaagatttttcttaaatatttaaaagtgaaaatgtgagacaaggccttcaaggagactacccaggaagatacacagtttaaaatgttggctatacagctctcaatagattattttatagttatagttgaataatcagttataatacactgtaaagaaatcagattttccttctgtttggtgtctgagtccttcctgctcttcttacttctgagaatctgggcactaagaaatcagtaagtacattgtagtgctcctgcatcccagagtccttaacctaaggagggtcttagtcactggtaagaacttggctttctaattatattcacttggtttttaacattagtagcttgacgataatcagggtatagtaaatttccaccaaaaatgtgatgcgaagaattctgccttggtcctttatggtaaaacagataataacgtctaaaatagatcagccacaagtgcagcaaatatttttacactctctttgaatagaatcccaaccaccctcccccatgattttagaaataaaggcttcctaaaataatagaacaaattggcaaacaatcactaattggaccagtaggttcttacttaaatatctctcctagatttttagtgtatgttttgggattttatgggtttatttatttttttttttttaagcagacgttacagtttgttttaatctactatagatacgtttttgttttttggcttagttggggataaaataatttatttgtaagttagctttctaaaacttagagaaagtaatttaattcacgtatcttaaaaataaaattccaaagttaaaaaatttctgacttagtaggaagttaacaaaactactgctgatgcatttcagtttccaaaatctgtaccctccccccataaaaaagggagttaagatgtgctagtttaagtagttagctgaattatagattgatcctcttaaaatctggagtttgtaaaggggcctacataaacagtagatagacttggagggattttgtgggggaattgaaactaatagtattctatctagtttgtcagtatttactttttgatttttatttttcagaaaattttcctttcccaggacaccctcttgtattagaatatcctcttctgtatcacattaaaaacagattttactgttagaccaaataagatgggcaaatagcaacactagagcatctcacccagtttgaactaggatgttcgtggaagttatgacaccaatatattcctgaaatgaaaattaacctaaattttaaagtgaatctatttgaaaatttacttagataatgaaacctcgttttaattgtgctttttgtgaatccaacacttgtttgcttagaaagtatcttatccagtattaatattttgttcttttgggttttaaagttgagcttattcagcctcaatcacattacagcaagcataaagtaacagttgactcaatgaaagacccaaattgcctgtacagataaaattcactgaatcaaaggcacaatagctatcttttcacttgagctcagaaaagtaaaatggcttaatttgaactattaattttcagtggcctctaattaaacaaaaacaaaaaaccacaaatactggctaggtaagatattcctgaggtcattttaaaagaagtgtggcacctaggattcaatatttaatgctaacagtattatattttagtgaaatttattttggtggtgacagtttattaaacctaattagacttctttcaatagcttgttgtagagacaatctcaagggctggaaagtgttgctaaaatgaatgtcatacatttctgatatactaaggagcttataaagtaattctttcatagtgcaagaattattaatttcttagaggatgtttttaaaggagctacttaattgggaaaatgttctttaaatatcagtaatagttcattaagtaacatagtagctaagaacatggactatattttcacagcatagttcagcttaggcacacctttagtttggattattggcattctcttacgtaggaattatatcattgtagatatgtaattatggtaataagcaattttcataaccatgctcactcagactatatcatttgaaactgccatgtttccatttttgacaattcatgttcacaaaacaacaggaacaatttcctatttggtataaagagcaaaatttccaactttgccccaaaatgccatgggtggcatattgccatatgattatatcatatatttaatcatgtatgggaaagattttggattttttttcttatttaaaaaagtgctaaatataagaatatagttttaaatcagcaagtctaataacactattgcagctgtacacagagagaaccttttgtgcctttttgcctgcagtaagcatttatttctattttacatgagttctaagaatgttgatgattattgcaccttgttcttctgtatataaacttgattaaggaatttttttttttaaagcaaggagccgttttttgttactaggtggataccttagtaaacatgaggggaattatcagatagatgtctttggagcccagccttccctgtgtagtgagctggaaactcctttagattgtattcattggtgtgtatgtatatgtacatatatgtataaatagttaaatacataaacataaaacttaacatcgcattgttgtgatgacaagaagtagtaaggtgctaggtggttacattaaaaagcacagcacagtgtataatcagtcactatgactggtggttttgtaagctgggttcagtttttgaaccacccagaatacctcatgtgtaaatacagtgttcatgacttaattgaaatacagttattgtttaaaaaaaaaaaaaaagaatgtgaagccactggttggcttatgccttctgatctatcattcttgcctctttttttgtaaaggggttttcttcttgttgttctgttttttaatagggtttacagctagaattttgaatgccaaagttctatttattaaattaagaaaaaagttttcaatgttaatggctagtatttttccactggactattgtttgttgatgttggaatttgtatttacagagaaataaatttttt

SEQ ID NO: 116654 - DNA, 7673 bp, Homo sapiens
  Payload ID: 2748
  Gene Symbol: CEP85L
  Gene Name: centrosomal protein 85kDa-like
  Uniprot ID: Q5SZL2
  ENST ID: ENST00000368491
  CDS Start-End: 623-3040
gggagggcgtgagggattacccaagggaggggcgagtatcgcaaaataggccaagtcgctgccctctactcaactcgcagggcgggaggatggagacagagggatgcggcgggagggcgggacagcccagtcgccgccaaggaggcgaagcggggtcggggtagctcacccgccccccgcagtccccgccccccgcagtccccgccccgcgcggcgccgcgcacgcctgaagtcattgcccgaggccccgccccctcgcggccccagccccggctctggctctgccggcggagggggcggagagaacccgcagctgcaacttcgcctggagcctttgagcctgggctcagccggggatctagcagccgtcaccgccgagtcgccgcttccccggcgcgggcctcagcccagccggcttggccatggcaggcgccggcagtgcggcgaatctggcccctgcgctccccgcccgtagctgagcagccgttaaccagccatcccgcctttcctcctgcccgtgtcgccgaggcccacgctccgcgcaagtttccgccgccgaagaagcaggaggacggacgtgaggagtcgggcgtccctggcccacccggccctctcgcccgcgatgtgggggcgcttcctggctccggaggccagcggccgggatagccccggcggagcccgcagcttccctgccggcccagattattcatcagcatggctacctgctaatgaatcattgtggcaggccacaactgttccatctaaccatcgaaataaccatatcaggagacacagtatagcttctgacagtggagacactggcattggaacttcctgttctgatagcgtggaagatcattcaacttcaagtggcacattatcttttaagcctagtcaatcattgattactcttcctactgcccatgtgatgccgtctaattccagcgcttcaatttccaaacttagggaatcattgacaccagatggctcaaaatggagtacaagcctcatgcaaacattgggaaaccacagtaggggggagcaggactcttccctagacatgaaggacttccggccacttcggaaatggtcatctttatccaaactcactgccccggataactgtggccagggtggcactgtatgcagagaagagtcaaggaatggtttggagaagatagggaaggctaaggctttaacatcacaactgaggacaattgggcctagctgtttacatgatagtatggagatgcttaggttagaggacaaggaaataaataaaaaacggtcatcaactctggactgcaagtataaatttgagagctgtagcaaggaggactttagagcctcttcctctactcttaggagacagcctgtagacatgacatatagtgccttacctgaaagcaagcccattatgacaagctcagaggcttttgaacctccaaaatatttaatgcttggtcaacaggcagtaggtggagttcccattcagccttccgtaaggactcagatgtggcttacagagcagctgcggacaaatcctttggaaggtagaaatacagaggattcttacagtttagctccttggcaacagcagcaaattgaagactttcgacaaggaagtgaaacaccaatgcaggttttgactggatcatctcgtcaaagttattcacctggctatcaggatttcagtaagtgggaatcaatgttgaaaataaaagaaggacttctaaggcagaaagaaattgtaatcgatcggcagaagcaacaaattacccacctgcatgagaggataagggataatgaattacgggctcaacatgccatgttaggacattatgtaaattgtgaggattcttatgtggctagtttgcagccacaatatgagaacacttcactccagacaccattttcagaggaatcagtttcccattcccaacaaggggaatttgagcaaaagcttgcatctactgagaaagaagttttacagcttaatgagtttctcaaacaaagactaagcctatttagtgaagagaagaagaaactagaggaaaaacttaaaactagagatcgatacatcagtagtctgaaaaagaaatgccagaaggaatctgaacaaaacaaagaaaagcagagaagaattgagaccttggaaaagtatctggctgatcttccaactctagatgatgtacagagtcagagtctacagctgcagattctggaagaaaaaaataagaatttacaagaggctttgatagatacagaaaaaaaacttgaagagatcaaaaagcagtgtcaagataaagagacacagttaatatgccagaaaaagaaagaaaaggagttagtaactaccgttcagagtttgcaacaaaaagtagaaagatgccttgaagatggaatccgccttcccatgttagatgcaaaacagcttcagaatgaaaatgataatctcagacaacaaaatgagactgctagtaagataatagacagccaacaagatgagattgacagaatgattttagaaattcagtctatgcaaggaaagctttctaaagagaaactgaccactcaaaagatgatggaagagctggaaaagaaagaaagaaatgtacagagattaacaaaagcattgcttgaaaaccaaagacaaacagatgagacatgctctttattggatcagggccaggaacctgaccaatctaggcagcagacagttctttccaaacggccactatttgatttgactgtgattgatcagctgttcaaggaaatgtcctgttgtttgtttgacttgaaagcattgtgtagtattcttaatcagcgtgctcagggcaaggagcctaatctttcattattactgggaataagatcaatgaactgttcagctgaagagactgagaatgaccacagcacagaaacactcactaaaaagctgtcagatgtgtgccagttacgaagagacattgatgaattaaggactacaatatcagaccgctatgctcaggacatgggagacaactgcattactcagtgatcaagtgttagtcccacagcaataatgacctgttgtttaaatgctgctgtgttatggagccataatggaaggttgcaagtgacatgacttgcacttagggattttttttctgtggatttgttttgttgaaggggagaagggaagtgaagagattttgaaggggcttatctaatcaggcaaaaagaaaaaaaatcaaattacctttggaaaatatgataaaatctacaaggaaaaaaatgtctatattctcaaactactgattgtaggaccaagctgtgaagagtacccttcacatgaaggagtaggattccttttaatcctatagctttgtgtgtttgtgtgtgcatgtatgtgtgttgttgtgtgtgtgtgcacgtgctttattcacaaatttataagggtttctagggtcagagcagagcttctgagaaaggcacacgctgtttattcttatatttctttcatatagaagcttgtgttgtactttgggattttcagtggctggctgaacaagagttcaaacagcaggcaagtgttgtcatggtagtacaggaggcaaaaccatttatattttgaacacttactgcactgataggatgtttgtggttgagctgattttagtactgtagataggtcagctgtttttccagagtgattgtggatttcccaagaggtgtgaaattttgacgtgatgctctttttccttagcattgtaatgtatgtgttacaagaaaggttaacataacttgaactaattttaacatgttccttactatttacaattttttatttatatgttttatatatatacatatataaatgtaaacaaagccatatataattaataaaggcattggatcattattataaaaggaagattaacaaagttaccctggaacaatagcttacttatccaaatctcaacatttacattttaacagttttgtatgtttcaaagttgaaactactgtaagagaaagccaatactatttatatctgaatcaacagtagcataaacattttttaattgagattgtattttaatcccttttgttaaagtacattaacaacagtttttcacaggatatgaacttggcgaaattagttcttaatctgaattacagggtattactatgaaatgcagttgattttgcagtagacgtacagtcatttaaacttccaaatgagtgttgtccatgtttctgttggtattttggaaggattatacattttattgccttcagcattgattatgttcttttgaatatacttagttttggcgaaagccttgtcctttgtaagttggtttgatcttgtgatgcaaccaagtctcatttaggtcaagactaaataagagatggaggggtagagggtgtgactcaagcaggataatattgatttgataaagagcatatcacatgcctgttttcttgccagataaagggcatagcacatgcctgttttcttatatactagaataaaggctctcctaggaaagatttttcttaaatatttaaaagtgaaaatgtgagacaaggccttcaaggagactacccaggaagatacacagtttaaaatgttggctatacagctctcaatagattattttatagttatagttgaataatcagttataatacactgtaaagaaatcagattttccttctgtttggtgtctgagtccttcctgctcttcttacttctgagaatctgggcactaagaaatcagtaagtacattgtagtgctcctgcatcccagagtccttaacctaaggagggtcttagtcactggtaagaacttggctttctaattatattcacttggtttttaacattagtagcttgacgataatcagggtatagtaaatttccaccaaaaatgtgatgcgaagaattctgccttggtcctttatggtaaaacagataataacgtctaaaatagatcagccacaagtgcagcaaatatttttacactctctttgaatagaatcccaaccaccctcccccatgattttagaaataaaggcttcctaaaataatagaacaaattggcaaacaatcactaattggaccagtaggttcttacttaaatatctctcctagatttttagtgtatgttttgggattttatgggtttatttatttttttttttttaagcagacgttacagtttgttttaatctactatagatacgtttttgttttttggcttagttggggataaaataatttatttgtaagttagctttctaaaacttagagaaagtaatttaattcacgtatcttaaaaataaaattccaaagttaaaaaatttctgacttagtaggaagttaacaaaactactgctgatgcatttcagtttccaaaatctgtaccctccccccataaaaaagggagttaagatgtgctagtttaagtagttagctgaattatagattgatcctcttaaaatctggagtttgtaaaggggcctacataaacagtagatagacttggagggattttgtgggggaattgaaactaatagtattctatctagtttgtcagtatttactttttgatttttatttttcagaaaattttcctttcccaggacaccctcttgtattagaatatcctcttctgtatcacattaaaaacagattttactgttagaccaaataagatgggcaaatagcaacactagagcatctcacccagtttgaactaggatgttcgtggaagttatgacaccaatatattcctgaaatgaaaattaacctaaattttaaagtgaatctatttgaaaatttacttagataatgaaacctcgttttaattgtgctttttgtgaatccaacacttgtttgcttagaaagtatcttatccagtattaatattttgttcttttgggttttaaagttgagcttattcagcctcaatcacattacagcaagcataaagtaacagttgactcaatgaaagacccaaattgcctgtacagataaaattcactgaatcaaaggcacaatagctatcttttcacttgagctcagaaaagtaaaatggcttaatttgaactattaattttcagtggcctctaattaaacaaaaacaaaaaaccacaaatactggctaggtaagatattcctgaggtcattttaaaagaagtgtggcacctaggattcaatatttaatgctaacagtattatattttagtgaaatttattttggtggtgacagtttattaaacctaattagacttctttcaatagcttgttgtagagacaatctcaagggctggaaagtgttgctaaaatgaatgtcatacatttctgatatactaaggagcttataaagtaattctttcatagtgcaagaattattaatttcttagaggatgtttttaaaggagctacttaattgggaaaatgttctttaaatatcagtaatagttcattaagtaacatagtagctaagaacatggactatattttcacagcatagttcagcttaggcacacctttagtttggattattggcattctcttacgtaggaattatatcattgtagatatgtaattatggtaataagcaattttcataaccatgctcactcagactatatcatttgaaactgccatgtttccatttttgacaattcatgttcacaaaacaacaggaacaatttcctatttggtataaagagcaaaatttccaactttgccccaaaatgccatgggtggcatattgccatatgattatatcatatatttaatcatgtatgggaaagattttggattttttttcttatttaaaaaagtgctaaatataagaatatagttttaaatcagcaagtctaataacactattgcagctgtacacagagagaaccttttgtgcctttttgcctgcagtaagcatttatttctattttacatgagttctaagaatgttgatgattattgcaccttgttcttctgtatataaacttgattaaggaatttttttttttaaagcaaggagccgttttttgttactaggtggataccttagtaaacatgaggggaattatcagatagatgtctttggagcccagccttccctgtgtagtgagctggaaactcctttagattgtattcattggtgtgtatgtatatgtacatatatgtataaatagttaaatacataaacataaaacttaacatcgcattgttgtgatgacaagaagtagtaaggtgctaggtggttacattaaaaagcacagcacagtgtataatcagtcactatgactggtggttttgtaagctgggttcagtttttgaaccacccagaatacctcatgtgtaaatacagtgttcatgacttaattgaaatacagttattgtttaaaaaaaaaaaaaaagaatgtgaagccactggttggcttatgccttctgatctatcattcttgcctctttttttgtaaaggggttttcttcttgttgttctgttttttaatagggtttacagctagaattttgaatgccaaagttctatttattaaattaagaaaaaagttttcaatgttaatggctagtatttttccactggactattgtttgttgatgttggaatttgtatttacagagaaataaattttttataaaaaga

SEQ ID NO: 116655 - DNA, 1872 bp, Homo sapiens
  Payload ID: 2748
  Gene Symbol: CEP85L
  Gene Name: centrosomal protein 85kDa-like
  Uniprot ID: Q5SZL2
  ENST ID: ENST00000392500
  CDS Start-End: 172-1671
atttgaagacgttccttgaggaggtttgaaaaactcttacccggctctacaaattactgaagtccactgatagtccctccttcgtgaagcattcctgaagaccccagcctgacagatctccccttcctctgacctcctgtattgaaacagctgacccttggctaacattacatgatttggagaaataattggaagtctaccacagggagactaaatgtaaaactccaatcagataaattacaacacggatgtggcccagattattcatcagcatggctacctgctaatgaatcattgtggcaggccacaactgttccatctaaccatcgaaataaccatatcaggagacacagtatagcttctgacagtggagacactggcattggaacttcctgttctgatagcgtggaagatcattcaacttcaagtggcacattatcttttaagcctagtcaatcattgattactcttcctactgcccatgtgatgccgtctaattccagcgcttcaatttccaaacttagggaatcattgacaccagatggctcaaaatggagtacaagcctcatgcaaacattgggaaaccacagtaggggggagcaggactcttccctagacatgaaggacttccggccacttcggaaatggtcatctttatccaaactcactgccccggataactgtggccagggtggcactgtatgcagagaagagtcaaggaatggtttggagaagatagggaaggctaaggctttaacatcacaactgaggacaattgggcctagctgtttacatgatagtatggagatgcttaggttagaggacaaggaaataaataaaaaacggtcatcaactctggactgcaagtataaatttgagagctgtagcaaggaggactttagagcctcttcctctactcttaggagacagcctgtagacatgacatatagtgccttacctgaaagcaagcccattatgacaagctcagaggcttttgaacctccaaaatatttaatgcttggtcaacaggcagtaggtggagttcccattcagccttccgtaaggactcagatgtggcttacagagcagctgcggacaaatcctttggaaggtagaaatacagaggattcttacagtttagctccttggcaacagcagcaaattgaagactttcgacaaggaagtgaaacaccaatgcaggttttgactggatcatctcgtcaaagttattcacctggctatcaggatttcagtaagtgggaatcaatgttgaaaataaaagaaggacttctaaggcagaaagaaattgtaatcgatcggcagaagcaacaaattacccacctgcatgagaggataagggataatgaattacgggctcaacatgccatgttaggacattatgtaaattgtgaggattcttatgtggctagtttgcagccacaatatgagaacacttcactccagacaccattttcagaggaatcagtttcccattcccaacaaggggaatttgagcaaaagcttgcatctactgagaaagaagttttacagcttaatgagtttctcaaacaaagactaagcctatttagtgaagagaagaagaaactagaggaaaaagtaggtttttctaataaagttgaattaggtcaacaacatttcctcagcatataattatttgtctgtcatttaccctgtcaggtgtcatgccaggttatgtatacatttatgtggaggtgattaattttgtagtaacttttgagaagccctctgctgtctgcagaaatccaaggattttctttgaggatagaaatgctcttgtatatctttctaacaaatagtaaaatctttaaaaaattaattgcctacaccaaa

SEQ ID NO: 116656 - DNA, 1797 bp, Homo sapiens
  Payload ID: 2748
  Gene Symbol: CEP85L
  Gene Name: centrosomal protein 85kDa-like
  ENST ID: ENST00000434604
  CDS Start-End: 68-1797
gcctatcatttgaagacgttccttgaggaggtttgaaaaaaaacagctgacccttggctaacattacatgatttggagaaataattggaagtctaccacagggagactaaatgtaaaactccaatcagataaattacaacacggatgtggcccagattattcatcagcatggctacctgctaatgaatcattgtggcaggccacaactgttccatctaaccatcgaaataaccatatcaggagacacagtatagcttctgacagtggagacactggcattggaacttcctgttctgatagcgtggaagatcattcaacttcaagtggcacattatcttttaagcctagtcaatcattgattactcttcctactgcccatgtgatgccgtctaattccagcgcttcaatttccaaacttagggaatcattgacaccagatggctcaaaatggagtacaagcctcatgcaaacattgggaaaccacagtaggggggagcaggactcttccctagacatgaaggacttccggccacttcggaaatggtcatctttatccaaactcactgccccggataactgtggccagggtggcactgtatgcagagaagagtcaaggaatggtttggagaagatagggaaggctaaggctttaacatcacaactgaggacaattgggcctagctgtttacatgatagtatggagatgcttaggttagaggacaaggaaataaataaaaaacggtcatcaactctggactgcaagtataaatttgagagctgtagcaaggaggactttagagcctcttcctctactcttaggagacagcctgtagacatgacatatagtgccttacctgaaagcaagcccattatgacaagctcagaggcttttgaacctccaaaatatttaatgcttggtcaacaggcagtaggtggagttcccattcagccttccgtaaggactcagatgtggcttacagagcagctgcggacaaatcctttggaaggtagaaatacagaggattcttacagtttagctccttggcaacagcagcaaattgaagactttcgacaaggaagtgaaacaccaatgcaggttttgactggatcatctcgtcaaagttattcacctggctatcaggatttcagtaagtgggaatcaatgttgaaaataaaagaaggacttctaaggcagaaagaaattgtaatcgatcggcagaagcaacaaattacccacctgcatgagaggataagggataatgaattacgggctcaacatgccatgttaggacattatgtaaattgtgaggattcttatgtggctagtttgcagccacaatatgagaacacttcactccagacaccattttcagaggaatcagtttcccattcccaacaaggggaatttgagcaaaagcttgcatctactgagaaagaagttttacagcttaatgagtttctcaaacaaagactaagcctatttagtgaagagaagaagaaactagaggaaaaacttaaaactagagatcgatacatcagtagtctgaaaaagaaatgccagaaggaatctgaacaaaacaaagaaaagcagagaagaattgagaccttggaaaagtatctggctgatcttccaactctagatgatgtacagagtcagagtctacagctgcagattctggaagaaaaaaataagaatttacaagaggctttgatagatacagaaaaaaaacttgaagagatcaaaaagcagtgtcaagataaagagacacagttaatatgccagaaaaagaaagaaaa

SEQ ID NO: 116657 - DNA, 2079 bp, Homo sapiens
  Payload ID: 2748
  Gene Symbol: CEP85L
  Gene Name: centrosomal protein 85kDa-like
  Uniprot ID: Q5SZL2
  ENST ID: ENST00000419517
  CDS Start-End: 589-2079
agtatcgcaaaataggccaagtcgctgccctctactcaactcgcagggcgggaggatggagacagagggatgcggcgggagggcgggacagcccagtcgccgccaaggaggcgaagcggggtcggggtagctcacccgccccccgcagtccccgccccccgcagtccccgccccgcgcggcgccgcgcacgcctgaagtcattgcccgaggccccgccccctcgcggccccagccccggctctggctctgccggcggagggggcggagagaacccgcagctgcaacttcgcctggagcctttgagcctgggctcagccggggatctagcagccgtcaccgccgagtcgccgcttccccggcgcgggcctcagcccagccggcttggccatggcaggcgccggcagtgcggcgaatctggcccctgcgctccccgcccgtagctgagcagccgttaaccagccatcccgcctttcctcctgcccgtgtcgccgaggcccacgctccgcgcaagtttccgccgccgaagaagcaggaggacggacgtgaggagtcgggcgtccctggcccacccggccctctcgcccgcgatgtgggggcgcttcctggctccggaggccagcggccgggatagccccggcggagcccgcagcttccctgccggcccagattattcatcagcatggctacctgctaatgaatcattgtggcaggccacaactgttccatctaaccatcgaaataaccatatcaggagacacagtatagcttctgacagtggagacactggcattggaacttcctgttctgatagcgtggaagatcattcaacttcaagtggcacattatcttttaagcctagtcaatcattgattactcttcctactgcccatgtgatgccgtctaattccagcgcttcaatttccaaacttagggaatcattgacaccagatggctcaaaatggagtacaagcctcatgcaaacattgggaaaccacagtaggggggagcaggactcttccctagacatgaaggacttccggccacttcggaaatggtcatctttatccaaactcactgccccggataactgtggccagggtggcactgtatgcagagaagagtcaaggaatggtttggagaagatagggaaggctaaggctttaacatcacaactgaggacaattgggcctagctgtttacatgatagtatggagatgcttaggttagaggacaaggaaataaataaaaaacggtcatcaactctggactgcaagtataaatttgagagctgtagcaaggaggactttagagcctcttcctctactcttaggagacagcctgtagacatgacatatagtgccttacctgaaagcaagcccattatgacaagctcagaggcttttgaacctccaaaatatttaatgcttggtcaacaggcagtaggtggagttcccattcagccttccgtaaggactcagatgtggcttacagagcagctgcggacaaatcctttggaaggtagaaatacagaggattcttacagtttagctccttggcaacagcagcaaattgaagactttcgacaaggaagtgaaacaccaatgcaggttttgactggatcatctcgtcaaagttattcacctggctatcaggatttcagtaagtgggaatcaatgttgaaaataaaagaaggacttctaaggcagaaagaaattgtaatcgatcggcagaagcaacaaattacccacctgcatgagaggataagggataatgaattacgggctcaacatgccatgttaggacattatgtaaattgtgaggattcttatgtggctagtttgcagccacaatatgagaacacttcactccagacaccattttcagaggaatcagtttcccattcccaacaaggggaatttgagcaaaagcttgcatctactgagaaagaagttttacagcttaatgagtttctcaaacaaagactaagcctatttagtgaagagaagaagaaactagaggaaaaagtaggtttttctaataaagttgaattaggtcaacaacatttcctcagcatataa

SEQ ID NO: 116658 - DNA, 5678 bp, Homo sapiens
  Payload ID: 2749
  Gene Symbol: CEP89
  Gene Name: centrosomal protein 89kDa
  Uniprot ID: Q96ST8
  ENST ID: ENST00000305768
  CDS Start-End: 90-2441
cctgcggcgggctttagggagtggtccctggctgtggatagatctgctgatgagtccaggccccggtccattctcctcgcgctgcaaggatgctcctgggatttcggagaggccgcaggagtcatttcaaacacatcatccatggccttttacctgcagccagcgttgctccgaaggcagctgtgccacgcacacctcctccccgcagccccaacccatctccagagagaccaagatctgctctggcagcagccattctggcgacaacattgactgggcggacggttgctattcctcagcctcgccagaggtcccggtctgagagtgatgtgagcagtgttgaacaggacagcttcatcgagccctatgccaccacctcacagctgaggcctcggccaaattggcagagtgagatgggaagaagatcttctttgccatcctttgaaacactggactatggggacgaagaggacattgaaactcagctgtcatccagcggcaaggaattgggggatgtcagtgcccgggaggacagaggaggccacagtgatgacctgtacgctgtgccacacagaaatcaggtgccattgttacatgaggtgaacagtgaagacgatgaaaatatttctcatcaagatgggtttccaggctcccctcctgcaccacagcggacacaacaaaaagatggtaaacaccctgttctgaatttaaaggatgaaaaacctccattatgtgagaaacctccaccctccccagatataactggtagagcacgtcaaagatatacagaaataaccagagaaaagtttgaggcattaaaagaagaaaatatggacctaaacaatatgaatcaaagccttacccttgaactaaacacaatgaaacaagcaatgaaagaactacagttaaaacttaagggaatggaaaaagagaagagaaagctcaaagaggctgagaaggcgtcgtcacaggaagttgctgcacctgaattactttatctgcgaaaacaagctcaagaactggtggatgaaaatgatggattgaaaatgactgtccatcgtttgaatgtagaactcagtcgatatcagacaaaattcaggcatttgtccaaggaagagagcttaaatattgaaggcctcccatccaagggccctataccaccctggttgttggatataaagtacctgtcaccattgttgctggcttatgaagatatgatgaaagagaaggacgagctcaatgccaccctcaaggaggaaatgagaatgtttaggatgcgagtccaagaagtggtgaaagaaaatgaagaattgcaccaagagttaaataagagtagtgctgttaccagtgaggaatggcgtcagcttcagactcaagcaaaactggttttagaggaaaacaagttgttgctggagcagttggagattcagcaaaggaaagccaaggacagccaccaggagcgcctccaagaagtttctaagctgactaaacaactaatgctcctggaggcaaaaacccacggccaggaaaaggagctggcggagaacagggaacagctggagattttacgtgccaaatgccaagaactcaaaacacactcggatggcaaaatcgcagtggaagttcataaatcaattgtgaatgaattaaaaagccaattacagaaggaagaagagaaagaaagggctgagatggaggagttgatggagaagctgacagtcctgcaagcgcagaagaagagcctgctgttagagaagaacagtttgacagagcaaaacaaagcactggaagccgaacttgaacgagcacagaaaatcaataggaaatctcaaaagaaaattgaggtcctcaaaaagcaggtggaaaaagccatggggaacgaaatgtctgctcatcagtacctggcaaaccttgttggcctggcagaaaacataacccaggaacgtgacagtcttatgtgtttggcaaaatgtttagaaagtgagaaggatggagtgcttaataaagtcataaaaagcaacattcgcctgggaaagttagaggaaaaagtcaagggctacaagaagcaggcagcactgaagctgggggacatcagtcaccgtctgctggagcagcaggaggacttcgccggcaagacagcccagtaccggcaggagatgcggcacctgcaccaggtgctgaaggacaagcaggaggtgctggaccaggcgctgcagcagaacagagaaatggaaggtgaacttgaagttatttgggaatctaccttcagggaaaaccgaagaatccgagaacttctccaggacacactcacgaggacaggcgtgcaggacaaccccagagctctggttgcccccagcctcaatggcgtctctcaggcagacctgctggacggctgcgatgtctgctcctatgacctgaagtctcatgcccccacctgctagaatctgcgggagcccgtggtgtagcctcctctggcctgaaaggtctgcctcacacaggccttccctgcagggcagcccatggtggcagccggaggtgcgtaagcccactgaacgctgcagggcagggaagaaataaatggtctcatagtttaatccattgataacattttgctttattttttaatttttttttttttttagagctagggtctcactctgttgcccatgctggagtacagtggtgcaatcatagctcacggcagcctcaaacatgtttgagatccttctgcttcagcctcctgagtagctgggacctcaggtgtgcactgtcaggcccagctaatttttttcttttttgttgagatgaggtcttgctatgttgctcaggctggtcttgaactcctggcctcaatctgtcctcctgccttggcctcccaaagtgcgggaatgacacgtgtgagccactgcgcctggcccattgtgctttattttaataacgtgctgctgaaatctgttttagccagggcatgttctctggccacattgccactgagatgagttctatgacacccactgctctggtgagtaggtggcctgctgagcaggcctgccttccagctcctagatctgcagctgggaagtgctggaagggttgggcgggcagctgagccctcgtgccatgtgtcagatggggaagtgtcacccgaggagccaggccatggcaccggccctgatgatagctgtgcgtgagctctgggggccttttcttgtttggtcaaaaaaaacaaggtgctgctgctgttcatgccctctaagttgtacaaaccttttctgccctctcccctagcccttctctatcctcctgagcaagtactttattctcttttgtttagttgttacttttgtttgtttgttttgagacagggtctcactctgttacccaggctggaatgcagtggtgcaatcaccacagccttgacctccaggctcaagcgatcctcccatcccagcctcctgagtaggtgagatgacaggtatacactaacatgcctggctaattttgtaaaaaaaaaatttttgtaggccagccatggtggctcactcctgtaatcccagcactttgggaggtcgaggcaggcggatcacccgaggccaggagttcgagaccagcctggccaacatggtgaaaccccatctctactaaaaatacaaaaattagctgggcatggtggtgggtgcctgtaatcccagctacttgggaggctgaggcaggagaattgcttgaacctggaaggcggaggttgcagtgaaccaagatcacgccattataccccagcctgggcagcctgggcaacaagagcgagactttgtctcaaaaaaaaaaaattttttttttggtagagatggggtcttgctatgttgcccaagctggtctcaaacgtctagcttcaagcaatcctcctgcctaggcctcccaaagtgttgggattataggtatgagccaccgcgcctggtctgggaaggtaattgattctggagccacacagctccccacccatgtaatgagagccctggctttgagctaagatagagtccctgccccactgccaccaccaagaagcataccagggggccatggttctgtcccatgtgtgttagatgacgtgccacctcctcaggaaaattaccccagccgctcaggaccattcagtcccaggcatgctggagggacttggggacattgggctacaaaggaccctaactgtgggactcaggggtggcaccctgcagcatctccttttcagagcccctcgcagtgaagtcctgccttgtttcaggtgggaaggaggccccagtactggtccttggtcatgtgtagaagttctacgtgtgatctttgattgccagacggaagggtgagatagaaaatcatagttcttttatgactctataagcttgttcaacagttgaatcattgtaatttaattttattttacaagcggtagaaagactcactgggattgaaaactgtgtatcatctccctaggagatgacctaacaaataactgtgatgctatttcaaaggcatttacggccgctctgcagcctcctgtagacaggctgacaggcggcggcagcccagcgtggctgcgcggggcaggagtgcttgtcagcaggaatgctgctcccgccatcgtgacctagagaaccactgttgacatccctgtctttctgccttttatgcaaacattttattcttttgagaagtgtccacttttgttcttatgtttctgctttaagtttttcacacagtgcaaacatactttgcaagtatggggactcctggatggcactgtgaccagggcaagggcaggtgtcccacagacactatcttctgcccagcctcctgctgggtgccataggaaatgggcagagaagccacgagtccaggatgccaaggagggcggggcaggcaaggcagagaggcacctgggtgcttgtgagattccaggaaaggacagaaacattggggtgcttctgggaggaactggcacgccccggcccttgcagagtggacaaggtttcaggagctacagaagggtggagagggcccccaggagcacagcaggcactcagagcagcaggagggggtttggtcagagcttgggtgggaaatgaggccggactgcacagaggagaactgggtctgctgggaggggctcctccttccccatgctgcaagtgtctggtctgagcagggaacccttctctttcttggtcctggtgaggtttcatacggcattggaagattcctggtcaagcagctgtagaacatgacccaggcacgcgagtgagccttgctggctttgccattatttaaaagcagccctgggcatggtgatggcgcctatggtttcagctactcaggaggctgaggtgggaggatcacttgagcctgggaggttgaggctgcagtgagctatgatcatgccactgcactccagcctgggcaaccaggtgagaccctgcctcaaaaataatacaataaaaagtaaaagcagccctggggaaatggagacagtggacaaagcaggctggggcaccaggtgtgcatgtgggtgtgagtctgtcatgagagctgtcctgaatgcccttaacgccactgaactgtatgctggaaaacagtgacaacagtggattttgttatatagacaattaaaaaagaaataacaccca

SEQ ID NO: 116659 - DNA, 2482 bp, Homo sapiens
  Payload ID: 2749
  Gene Symbol: CEP89
  Gene Name: centrosomal protein 89kDa
  ENST ID: ENST00000586984
  CDS Start-End: 82-1368
gggctttagggagtggtccctggctgtggatagatctgctgatgagtccaggccccggtccattctcctcgcgctgcaaggatgctcctgggatttcggagaggccgcaggagtcatttcaaacacatcatccatggccttttacctgcagccagcgttgctccgaaggcagctgtgccacgcacacctcctccccgcagccccaacccatctccagagagaccaagatctgctctggcagcagccattctggcgacaacattgactgggcggacggttgctattcctcagcctcgccagaggtcccggtctgagagtgatgtgagcagtgttgaacaggacagcttcatcgagccctatgccaccacctcacagctgaggcctcggccaaattggcagagtgagatgggaagaagatcttctttgccatcctttgaaacactggactatggggacgaagaggacattgaaactcagctgtcatccagcggcaaggaattgggggatgtcagtgcccgggaggacagaggaggccacagtgatgacctgtacgctgtgccacacagaaatcaggtgccattgttacatgaggtgaacagtgaagacgatgaaaatatttctcatcaagatgggtttccaggctcccctcctgcaccacagcggacacaacaaaaagatggtaaacaccctgttctgaatttaaaggatgaaaaacctccattatgtgagaaacctccaccctccccagatataactggtagagcacgtcaaagatatacagaaataaccagagaaaagtttgaggcattaaaagaagaaaatatggacctaaacaatatgaatcaaagccttacccttgaactaaacacaatgaaacaagcaatgaaagaactacagttaaaacttaagggaatggaaaaagagaagagaaagctcaaagaggctgagaaggcgtcgtcacaggaagttgctgcacctgaattactttatctgcgaaaacaagctcaagaactggtggatgaaaatgatggattgaaaatgactgtccatcgtttgaatgtagaactcagtcgatatcagacaaaattcaggcatttgtccaaggaagagagcttaaatattgaaggcctcccatccaagggccctataccaccctggttgttggatataaagtacctgtcaccattgttgctggcttatgaagatatgatgaaagagaaggacgagctcaatgccaccctcaaggcgtcagcttcagactcaagcaaaactggttttagaggaaaacaagttgttgctggagcagttggagattcagcaaaggaaagccaaggacagccaccaggagcgcctccaagaagtttctaagctgactaaacaactaatgctcctggaggcaaaaacccacggccaggaaaaggagctggcggagaacagggaacagctggagattttacgtgccaaatgccaagaactcaaaacacactcggatggcaaaatcgcagtggaagttcataaatcaattgtgaatgaattaaaaagccaattacagaaggaagaagagaaagaaagggctgagatggaggagttgatggagaagctgacagtcctgcaagcgcagaagaagagcctgctgttagagaagaacagtttgacagagcaaaacaaagcactggaagccgaacttgaacgagcacagaaaatcaataggaaatctcaaaagaaaattgaggtcctcaaaaagcaggtggaaaaagccatggggaacgaaatgtctgctcatcagtacctggcaaaccttgttggcctggcagaaaacataacccaggaacgtgacagtcttatgtgtttggcaaaatgtttagaaagtgagaaggatggagtgcttaataaagtcataaaaagcaacattcgcctgggaaagttagaggaaaaagtcaagggctacaagaagcaggcagcactgaagctgggggacatcagtcaccgtctgctggagcagcaggaggacttcgccggcaagacagcccagtaccggcaggagatgcggcacctgcaccaggtgctgaaggacaagcaggaggtgctggaccaggcgctgcagcagaacagagaaatggaaggtgaacttgaagttatttgggaatctaccttcagggaaaaccgaagaatccgagaacttctccaggacacactcacgaggacaggcgtgcaggacaaccccagagctctggttgcccccagcctcaatggcgtctctcaggcagacctgctggacggctgcgatgtctgctcctatgacctgaagtctcatgcccccacctgctagaatctgcgggagcccgtggtgtagcctcctctggcctgaaaggtctgcctcacacaggccttccctgcagggcagcccatggtggcagccggaggtgcgtaagcccactgaacgctgcagggcagggaagaaataaatggtctcatagtttaa

SEQ ID NO: 116660 - DNA, 1340 bp, Homo sapiens
  Payload ID: 2749
  Gene Symbol: CEP89
  Gene Name: centrosomal protein 89kDa
  ENST ID: ENST00000590597
  CDS Start-End: 90-1160
cctgcggcgggctttagggagtggtccctggctgtggatagatctgctgatgagtccaggccccggtccattctcctcgcgctgcaaggatgctcctgggatttcggagaggccgcaggagtcatttcaaacacatcatccatggccttttacctgcagccagcgttgctccgaaggcagctgtgccacgcacacctcctccccgcagccccaacccatctccagagagaccaagatctgctctggcagcagccattctggcgacaacattgactgggcggacggttgctattcctcagcctcgccagaggtcccggtctgagagtgatgtgagcagtgttgaacaggacagcttcatcgagccctatgccaccacctcacagctgaggcctcggccaaattggcagagtgagatgggaagaagatcttctttgccatcctttgaaacactggactatggggacgaagaggacattgaaactcagctgtcatccagcggcaaggaattgggggatgtcagtgcccgggaggacagaggaggccacagtgatgacctgtacgctgtgccacacagaaatcaggtgccattgttacatgaggtgaacagtgaagacgatgaaaatatttctcatcaagatgggtttccaggctcccctcctgcaccacagcggacacaacaaaaagatggtaaacaccctgttctgaatttaaaggatgaaaaacctccattatgtgagaaacctccaccctccccagatataactggtagagcacgtcaaagatatacagaaataaccagagaaaagtttgaggcattaaaagaagaaaatatggacctaaacaatatgaatcaaagccttacccttgaactaaacacaatgaaacaagcaatgaaagaactacagttaaaacttaagggaatggaaaaagagaagagaaagctcaaagaggctgagaaggcgtcgtcacaggaagttgctgcacctgaattactttatctgcgaaaacaagctcaagaactggtggatgaaaatgatggattgaaaatgactgtccatcgtttgaatgtagaactcagtcgatatcagacaaaattcaggcatttgtccaaggaagaggtaacgtttccgattgtgaaaatcagcttttcagatttttaagcctttactgttgaattgatttccaatcttgagaggttcttatttattataatttgatgtaagaaaagctctgtccaaggcacaatgtttctaaggaccattctgtttcttgcctccttcccttccttcttccccgtaataaaggcaataaagactgtaaaacattgggacaatacagaa

SEQ ID NO: 116661 - DNA, 2367 bp, Homo sapiens
  Payload ID: 2749
  Gene Symbol: CEP89
  Gene Name: centrosomal protein 89kDa
  ENST ID: ENST00000591698
  CDS Start-End: 1-522
gaacaggacagcttcatcgagccctatgccaccacctcacagctgaggcctcggccaaattggcagagtgagatgggaagaagatcttctttgccatcctttgaaacactggactatggggacgaagaggacattgaaactcagctgtcatccagcggcaaggaattgggggatgtcagtgcccgggaggacagaggaggccacagtgatgacctgtacgctgtgccacacagaaatcaggtgccattgttacatgaggtgaacagtgaagacgatgaaaatatttctcatcaagatgggtttccaggctcccctcctgcaccacagcggacacaacaaaaagatggtaaacaccctgttctgaatttaaaggatgaaaaacctccattatgtgagaaacctccaccctccccaggtcccacattgttacaagatctttggggtgtcgcttttctggtcggaaatgtctgtggtgccagtgtgcctttgcctgagttcttgtcctgcgtccaggaagaatgagatataactggtagagcacgtcaaagatatacagaaataaccagagaaaagtttgaggcattaaaagaagaaaatatggacctaaacaatatgaatcaaagccttacccttgaactaaacacaatgaaacaagcaatgaaagaactacagttaaaacttaagggaatggaaaaagagaagagaaagctcaaagaggctgagaaggcgtcgtcacaggaagttgctgcacctgaattactttatctgcgaaaacaagctcaagaactggtggatgaaaatgatggattgaaaatgactgtccatcgtttgaatgtagaactcagtcgatatcagacaaaattcaggcatttgtccaaggaagagagcttaaatattgaaggcctcccatccaagggccctataccaccctggttgttggatataaagtacctgtcaccattgttgctggcttatgaagatatgatgaaagagaaggacgagctcaatgccaccctcaaggaggaaatgagaatgtttaggatgcgagtccaagaagtggtgaaagaaaatgaagaattgcaccaagagttaaataagagtagtgctgttaccagtgaggaatggcgtcagcttcagactcaagcaaaactggttttagaggaaaacaagttgttgctggagcagttggagattcagcaaaggaaagccaaggacagccaccaggagcgcctccaagaagtttctaagctgactaaacaactaatgctcctggaggcaaaaacccacggccaggaaaaggagctggcggagaacagggaacagctggagattttacgtgccaaatgccaagaactcaaaacacactcggatggcaaaatcgcagtggaagttcataaatcaattgtgaatgaattaaaaagccaattacagaaggaagaagagaaagaaagggctgagatggaggagttgatggagaagctgacagtcctgcaagcgcagaagaagagcctgctgttagagaagaacagtttgacagagcaaaacaaagcactggaagccgaacttgaacgagcacagaaaatcaataggaaatctcaaaagaaaattgaggtcctcaaaaagcaggtggaaaaagccatggggaacgaaatgtctgctcatcagtacctggcaaaccttgttggcctggcagaaaacataacccaggaacgtgacagtcttatgtgtttggcaaaatgtttagaaagtgagaaggatggagtgcttaataaagtcataaaaagcaacattcgcctgggaaagttagaggaaaaagtcaagggctacaagaagcaggcagcactgaagctgggggacatcagtcaccgtctgctggagcagcaggaggacttcgccggcaagacagcccagtaccggcaggagatgcggcacctgcaccaggtgctgaaggacaagcaggaggtgctggaccaggcgctgcagcagaacagagaaatggaaggtgaacttgaagttatttgggaatctaccttcagggaaaaccgaagaatccgagaacttctccaggacacactcacgaggacaggcgtgcaggacaaccccagagctctggttgcccccagcctcaatggcgtctctcaggcagacctgctggacggctgcgatgtctgctcctatgacctgaagtctcatgcccccacctgctagaatctgcgggagcccgtggtgtagcctcctctggcctgaaaggtctgcctcacacaggccttccctgcagggcagcccatggtggcagccggaggtgcgtaagcccactgaacgctgcagggcagggaagaaataaatggtctcatagtttaatccatt

SEQ ID NO: 116662 - DNA, 682 bp, Homo sapiens
  Payload ID: 2749
  Gene Symbol: CEP89
  Gene Name: centrosomal protein 89kDa
  ENST ID: ENST00000593276
  CDS Start-End: 1-652
ggcagctgtgccacgcacacctcctccccgcagccccaacccatctccagagagaccaagatctgctctggcagcagccattctggcgacaacattgactgggcggacggttgctattcctcagcctcgccagaggtcccggtctgagagtgatgtgagcagtgttgaacaggacagcttcatcgagccctatgccaccacctcacagctgaggcctcggccaaattggcagagtgagatgggaagaagatcttctttgccatcctttgaaacactggactatggggacgaagaggacattgaaactcagctgtcatccagcggcaaggaattgggggatgtcagtgcccgggaggacagaggaggccacagtgatgacctgtacgctgtgccacacagaaatcaggtgccattgttacatgaggtgaacagtgaagacgatgaaaatatttctcatcaagatgggtttccaggctcccctcctgcaccacagcggacacaacaaaaagatggtaaacaccctgttctgaatttaaaggatgaaaaacctccattatgtgagaaacctccaccctccccaggtatttgccttttgaattatattatgattgaaaagcttgttttggagaatatccagattaattttatctgaaaataaagattacattttctttttcttgta

SEQ ID NO: 116663 - DNA, 2903 bp, Homo sapiens
  Payload ID: 2749
  Gene Symbol: CEP89
  Gene Name: centrosomal protein 89kDa
  ENST ID: ENST00000591863
  CDS Start-End: 118-360
attgcgaagagaaagcgtgagggctgggcctgcggcgggctttagggagtggtccctggctgtggatagatctgctgatgagtccaggccccggtccattctcctcgcgctgcaaggatgctcctgggatttcggagaggccgcaggagtcatttcaaacagggtctcgctctgtcgcccaggctagagtgcagtggtgcgatcatagctcactgcatcctcgaactcctgggctcaagcgatcttcccaccccagcctcccgaggagctgagactacaggcgcgcgccactactcccggctaattgttcaatatttttgtggaaacagggatcttgctatgttcctatggtggtcttgagctccttagcctcctaaagtgttggtatcacaggcgtgagccactgtgcccggcgttaacaatcttctgccccagggtcggccacagttggacaggagcaccctgcctcccctgtagcattcgtccccgtgcccggagttaactcctggacgacgtacacctgctgcactgctggatatagccattcttcatttttccctcctccacccaccatgtacaccccatcagcaagtcccatccgatatacccactacatacatctgccagctgttcccatctccacccacaccccggcctccagcatctgtctggactgctgcggcagatcctcactggtttctctgcttccactctcgcccttcccctaggtccattctccacgtagcagccaaggggattcttatatttatttattatttaatttagttttagagacagggtcttgtcctgatgcccaggctggagtacagtggcatgatcatagctcactgtggcttcaacctcttgggttcaagtgatcctcctgcctcaggctcctgagtagctgggactacaggtgtgcaccaccacacctaggtattttttatttattttattttttgcctcacactctgccaagtctcaatgcctggctaattttaaaaattattttgtagaggccacgtgaggtggctctcacctgtaatccagcactttgggaggctgaggcaggcggatcatttgaggtcaggagttcaagattagcctggccaacatggtgaaaacccatctctactaaaaatacaaaaattagcgggcgtggtggtgggcacctgtaatcccagctacacgggaggttgaggtgggataatcgcttaaacccgagaggcagaggttgcagtgagccaagattgtgccactgcactccagcctgggcgacaaagctagactctgcctcaaaaaaacataattttttttttttggtagagatggggtctgggtatgctgcccaggctggtcttaaaccttggctcaagcaatcctctcaccttggcctccagagtgttgggattacaggtgtgagccactgcatctggcttgagtttttatttaaagccccaaacattaatgagtccctgctgtgtgctgatacccacaactgacagcttatggccacacggtctgtaggatagacaagcccataaataattctgtacacaatggtaaaacaagaactgctgttgatgtgtgtaccagaagggcagtgacgtcagcctggagagttggcctgggcctggcagggagtaaggaaagaattctgggtgcagaagacagcaaataccaaggcctaaaaaagaatgaattatttgctgtttgggaaatggaagcccacgctgagtgctgaagcacagggactctgcgcaggaagaggaggggaagcaagaaatgaatttgggtccttgtgatggcagtggctgctgccatcacgctgtgtggctagggctgcacacttcatggagccggtggaagccccgtccctcatgagttgggactggagccgcaaaccgctgctgcagacccaggccttctgctctatggagcaggcaggagccccaccctcttgggcagggctacagccacccaaactgcagctgtggatccgagcctctctgctcctgggggagccgggaacaggcagaatttgcccttccagatgcagctgcagccgcgcaggcaggagccagggacaagtgggagccctgcctcttccaagttggcggggtgggagctcccaggtgcagctgtggctgcccccccaggcacaggacgagggcatctctgtagcctgcaccatcggccatcccaggaaggacagcccccttcaccctccatccctgcaggctcaggggtgtctgcttccactgcctggcctctctccactccagcaactgctctgatcttggaggggagtcggagccaagacctgcagccatgaatggcagcaggaggaagggggtggggtccccagtaaggccccaccctcaggccagggagggcctgaattctgggggctgggctgccagtccctctgaccagagtggaaactcgtggagccttttctgggcctgccaatggcccaatcagcacacacttcttccccgctgaggtccataaaaaccctgggctcagccagagcagcgcagagaatagccagaggatgaagatggtagagacgaggggacaggatgaccagctgcagagagcagtaccctctctgctgatagctggagacggtggggtgaccagctacagagaggagtaccttctccgctgaaagctacagagaccacctgccagcagagaggagctacactctgctgcgagcttcagagacctgcagagacattggaatgacttgcctgcggagaggagccactctctccagggcctcctctctgttgagagctgaatggttgagctcatgggacaatctgtctccagagaggagctacccactcctctgagctcttctaacactaaataaaactcctcttcacccttca

SEQ ID NO: 116664 - DNA, 3139 bp, Homo sapiens
  Payload ID: 2750
  Gene Symbol: CEP95
  Gene Name: centrosomal protein 95kDa
  Uniprot ID: Q96GE4
  ENST ID: ENST00000556440
  CDS Start-End: 511-2976
ctcggagatgtttacgtctccaaagagccctcacgtctgtaaccaaaagagggggaaggcggggcctggcgttgtcacgtggctgtaccaccccggaccaccgagagagcggtccgcactactttcccgttgacgtcggcggagggatacaaaacgaaatagctcaccggaagtgcgctgctcgcaccccgggacccgcccgggctgccggctgatgtggaccgtccgacccgcgtgtctgataatcctttgacgggttttggtcggcggagaatggtctctaaacttcccaaaccgcccccgtttcacgtcctgtgaaaggaagtgctcctctgatgaccaatcagcggcgagaagctcttttaacgtccgtccttctttcacgcctccttccccgcgctttggttcgtgcgtccgcgccccagtgtcgggtctgcgtggatcggtccttccaggacaccgtcgccttcccggccgcgtcggagtccggcggcgacctgcctctgaaacatggcaggctcggatgctgagtgggtaaccattgccaataaccttctttttaagtgtcatatacatctgagaatacatgaacttcaagactgtgatgctaatgtttttattgctctttatcagtctattttgggagaaaaggtaccagacctcatagttattcctaggagtcaagaagatgatgcacacaatgtacaagcagtaattgattcactggccttggactacttgcaggtcagcttgtctcacataacaggagaaaatatagtgaaaggagataaagaatctattaagaatctcctggaaatatttgatggtttgttggagtatcttacagaacgcatcagtgaaacatctcatgagaaaagtgaaactgaacagtattttaaagaatctgatcgaggagaacgtttggaagagccagaaagtactaaagaatctaaatcatcatggaaaagagtttcttttgggaggtgctccttgtcttctgagatgttgggcccctcttgggatggagatgaagcagaatccactggtgaaatcattagacttggagacacagcacacaccttttctctaagaagtaatggtgctcaatgtcctaatgaaatgctgtctaaaaaagccttagcctcaccaagttctaaatcacatgaagatatgttgtaccctcctagtgttttgtccaagagtaggacatcctttgttgaagacacggaaaccctttctgtgagtgggattccaaatgctaggaagctaggggagcctatccgagcagctattcctttacatccaccctaccacccttcagagcctcgagcaccctgccccataggaaaagaatacttgcattcaagtcactgctccccagccgtaaattctactggagagcatacggaattttctggggatctagatgatggacttttcttaatttccaagttgcctaaaggcagcaaatgggaagtatatccagctcaggtccaagggcctaggacaaggaagcctcccaaaggaaaaagaaatgaaaacagagctacagcctcatcctgcaattcacctttcccccagaggccaagaaagagattaacagaacaagaattacatgatgtatcagaaaaactctctcagcggctttctgaactagattggatgttaaaaagtgctctgggtgatcggattaaagaaaagactgaccataaagaagaaaatactggaaatgaggaggtagaggatggaactgaggagacactgtctcagcacagtgatggcatcgtggagtatgggccaaagaagtcaaggccaggactttccatgcgtagaaagccaccctacagatcccattcgctctctccatctccagttaacaaacacaaacagttccacttggagagaaaaaggcagcgcaagccaagagaaacagatgtccgccaattccaagcacaggcgtttactgaagcatttgaaagggaactaagaagacataaagttcaagagaatattggacctctaagaatacatgagaaggaggaggaaacagaaaaaatatacagaggagaagctgttcgtaaaggaactccagaatgtagtcagccctggaagatttactctagaaaaaccacaacgcagagtctaagaggtggcctcccaaagccaaataaagcagttccaatgaaagtaagtgaacacagtctcctgccccttatgctggagcagtttccgtttctttatgtttctggcccaacactaagcaaaatgtggaaacagcaaattgcacaggttgaacagcttaagaaagaagcatgtagagaaaatcgatcaaagaagaaactccaagatgaaatagaagaagccctaagaaggcatgacctccttactacccttgtcaagaaagaatatgaacataacaagagactgcaagacttcaaggactgcattcgtaggcaaaggttgacccaatcaaagataaaagaaaatcgacagcaaatcgttcgtgctcgaaaatattatgatgattatagagttcagttgtgtgcaaaaatgatgagaatgaggacccgggaagaaatgatatttaagaaactgtttgaagaaggtttaaacattcaaaagcaaagattacgagacctaagaaactatgccaaagaaaagcgagatgaacaaaggagacgccaccaggatgaactggactccatggagaactactataaggaccagttttcattgctggcagaagccatatcacaggaacatcaagaacttaaagccagagagaaatctcaggcccagacattacataaggtgaagagggagctgagatctaagatggagaaggaaattcagcagctgcaggacatgataacacagaatgatgatgatgttttcttccgggaactggaagctgagcgcttcagatctcggcttcagctggcttcctttcagtacagtaaaagtccctccctatgaggccagacttgataatagtaggtgaaggttctggaggcctttaccaggacagagctagaatcgagccagtaaacagtctaagccagaaaaataattttcaaatgctttacctgtattttcattccagtactttttatgattttttaaataaaaattgttttct

SEQ ID NO: 116665 - DNA, 2492 bp, Homo sapiens
  Payload ID: 2750
  Gene Symbol: CEP95
  Gene Name: centrosomal protein 95kDa
  ENST ID: ENST00000553412
  CDS Start-End: 59-2329
caggacaccgtcgccttcccggccgcgtcggagtccggcggcgacctgcctctgaaacatggcaggctcggatgctgagtgggtaaccattgccaataaccttctttttaagtgtcatatacatctgagaatacatgaacttcaagactgtgatgctaatgtttttattgctctttatcagtctattttgggagaaaaggtaccagacctcatagttattcctaggagtcaagaagatgatgcacacaatgtacaagcagtaattgattcactggccttggactacttgcaggtcagcttgtctcacataacagctctatattctgtctccaggagaaaatatagtgaaaggagaatgttgggcccctcttgggatggagatgaagcagaatccactggtgaaatcattagacttggagacacagcacacaccttttctctaagaagtaatggtgctcaatgtcctaatgaaatgctgtctaaaaaagccttagcctcaccaagttctaaatcacatgaagatatgttgtaccctcctagtgttttgtccaagagtaggacatcctttgttgaagacacggaaaccctttctgtgagtgggattccaaatgctaggaagctaggggagcctatccgagcagctattcctttacatccaccctaccacccttcagagcctcgagcaccctgccccataggaaaagaatacttgcattcaagtcactgctccccagccgtaaattctactggagagcatacggaattttctggggatctagatgatggacttttcttaatttccaagttgcctaaaggcagcaaatgggaagtatatccagctcaggtccaagggcctaggacaaggaagcctcccaaaggaaaaagaaatgaaaacagagctacagcctcatcctgcaattcacctttcccccagaggccaagaaagagattaacagaacaagaattacatgatgtatcagaaaaactctctcagcggctttctgaactagattggatgttaaaaagtgctctgggtgatcggattaaagaaaagactgaccataaagaagaaaatactggaaatgaggaggtagaggatggaactgaggagacactgtctcagcacagtgatggcatcgtggagtatgggccaaagaagtcaaggccaggactttccatgcgtagaaagccaccctacagatcccattcgctctctccatctccagttaacaaacacaaacagttccacttggagagaaaaaggcagcgcaagccaagagaaacagatgtccgccaattccaagcacaggcgtttactgaagcatttgaaagggaactaagaagacataaagttcaagagaatattggacctctaagaatacatgagaaggaggaggaaacagtgggaaaaaatatacagaggagaagcttcgtaaaggaactccagaatgtagtcagccctggaagatttactctagaaaaaccacaacgcagagtcagaggtggcctcccaaagccaaataaagcagttccaatgaaagtaagtgaacacagtctcctgccccttatgctggagcagtttccgtttctttatgtttctggcccaacactaagcaaaatgtggaaacagcaaattgcacaggttgaacagcttaagaaagaagcatgtagagaaaatcgatcaaagaagaaactccaagatgaaatagaagaagccctaagaaggcatgacctccttactacccttgtcaagaaagaatatgaacataacaagagactgcaagacttcaaggactgcattcgtaggcaaaggttgacccaatcaaagataaaagaaaatcgacagcaaatcgttcgtgctcgaaaatattatgatgattatagagttcagttgtgtgcaaaaatgatgagaatgaggacccgggaagaaatgatatttaagaaactgtttgaagaaggtttaaacattcaaaagcaaagattacgagacctaagaaactatgccaaagaaaagcgagatgaacaaaggagacgccaccaggatgaactggactccatggagaactactataaggaccagttttcattgctggcagaagccatatcacaggaacatcaagaacttaaagccagagagaaatctcaggcccagacattacataaggtgaagagggagctgagatctaagatggagaaggaaattcagcagctgcaggacatgataacacagaatgatgatgatgttttcttccgggaactggaagctgagcgcttcagatctcggcttcagctggcttcctttcagtacagtaaaagtccctccctatgaggccagacttgataatagtaggtgaaggttctggaggcctttaccaggacagagctagaatcgagccagtaaacagtctaagccagaaaaataattttcaaatgctttacctgtattttcattccagtactttttatgattttttaaataaaaattgttttct

SEQ ID NO: 116666 - DNA, 2669 bp, Homo sapiens
  Payload ID: 2750
  Gene Symbol: CEP95
  Gene Name: centrosomal protein 95kDa
  ENST ID: ENST00000553956
  CDS Start-End: 14-313
ctgcctctgaaacatggcaggctcggatgctgagtgggtaaccattgccaataaccttctttttaagtgtcatatacatctgagaatacatgaacttcaagactgtgatgctaatgtttttattgctctttatcagtctattttgggagaaaaggtaccagacctcatagttattcctaggagtcaagaagatgatgcacacaatgtacaagcagtaattgattcactggccttggactacttgcaggtcagcttgtctcacataacagctctatattctgtctccaggagaaaatatagtgaaaggagataaagaatctattaagaatctcctggaaatatttgatggtttgttggagtatcttacagaacgcatcagtgaaacatctcatgagaaaagtgaaactgaacagtattttaaagaatctgatcgaggagaacgtttggaagagccagaaagtactaaagaatctaaatcatcatggaaaagagtttcttttgggaggtgctccttgtcttctgagatgttgggcccctcttgggatggagatgaagcagaatccactggtgaaatcattagacttggagacacagcacacaccttttctctaagaagtaatggtgctcaatgtcctaatgaaatgctgtctaaaaaagccttagcctcaccaagttctaaatcacatgaagatatgttgtaccctcctagtgttttgtccaagagtaggacatcctttgttgaagacacggaaaccctttctgtgagtgggattccaaatgctaggaagctaggggagcctatccgagcagctattcctttacatccaccctaccacccttcagagcctcgagcaccctgccccataggaaaagaatacttgcattcaagtcactgctccccagccgtaaattctactggagagcatacggaattttctggggatctagatgatggacttttcttaatttccaagttgcctaaaggcagcaaatgggaagtatatccagctcaggtccaagggcctaggacaaggaagcctcccaaaggaaaaagaaatgaaaacagagctacagcctcatcctgcaattcacctttcccccagaggccaagaaagagattaacagaacaagaattacatgatgtatcagaaaaactctctcagcggctttctgaactagattggatgttaaaaagtgctctgggtgatcggattaaagaaaagactgaccataaagaagaaaatactggaaatgaggaggtagaggatggaactgaggagacactgtctcagcacagtgatggcatcgtggagtatgggccaaagaagtcaaggccaggactttccatgcgtagaaagccaccctacagatcccattcgctctctccatctccagttaacaaacacaaacagttccacttggagagaaaaaggcagcgcaagccaagagaaacagatgtccgccaattccaagcacaggcgtttactgaagcatttgaaagggaactaagaagacataaagttcaagagaatattggacctctaagaatacatgagaaggaggaggaaacagtgggaaaaaatatacagaggagaagctgttcgtaaaggaactccagaatgtagtcagccctggaagatttactctagaaaaaccacaacgcagagtctaagaggtggcctcccaaagccaaataaagcagttccaatgaaagtaagtgaacacagtctcctgccccttatgctggagcagtttccgtttctttatgtttctggcccaacactaagcaaaatgtggaaacagcaaattgcacaggttgaacagcttaagaaagaagcatgtagagaaaatcgatcaaagaagaaactccaagatgaaatagaagaagccctaagaaggcatgacctccttactacccttgtcaagaaagaatatgaacataacaagagactgcaagacttcaaggactgcattcgtaggcaaaggttgacccaatcaaagataaaagaaaatcgacagcaaatcgttcgtgctcgaaaatattatgatgattatagagttcagttgtgtgcaaaaatgatgagaatgaggacccgggaagaaatgatatttaagaaactgtttgaagaaggtttaaacattcaaaagcaaagattacgagacctaagaaactatgccaaagaaaagcgagatgaacaaaggagacgccaccaggatgaactggactccatggagaactactataaggaccagttttcattgctggcagaagccatatcacaggaacatcaagaacttaaagccagagagaaatctcaggcccagacattacataaggtgaagagggagctgagatctaagatggagaaggaaattcagcagctgcaggacatgataacacagaatgatgatgatgttttcttccgggaactggaagctgagcgcttcagatctcggcttcagctggcttcctttcagtacagtaaaagtccctccctatgaggccagacttgataatagtaggtgaaggttctggaggcctttaccaggacagagctagaatcgagccagtaaacagtctaagccagaaaaataattttcaaatgctttacctgtattttcattccagtactttttatgattttttaaataaaaattgttttctaaaa

SEQ ID NO: 116667 - DNA, 404 bp, Homo sapiens
  Payload ID: 2750
  Gene Symbol: CEP95
  Gene Name: centrosomal protein 95kDa
  ENST ID: ENST00000583457
  CDS Start-End: 1-404
aaaaactctctcagcggctttctgaactagattggatgttaaaaagtgctctgggtgatcggattaaagaaaagactgaccataaagaagaaaatactggaaatgaggaggtagaggatggaactgaggagacactgtctcagcacagtgatggcatcgtggagtatgggccaaagaagtcaaggccaggactttccatgcgtagaaagccaccctacagatcccattcgctctctccatctccagttaacaaacacaaacagttccacttggagagaaaaaggcagcgcaagccaagagaaacagatgtccgccaattccaagcacaggaaaaaatatacagaggagaagctgttcgtaaaggaactccagaatgtagtcagccctggaagatttactctaga

SEQ ID NO: 116668 - DNA, 903 bp, Homo sapiens
  Payload ID: 2750
  Gene Symbol: CEP95
  Gene Name: centrosomal protein 95kDa
  ENST ID: ENST00000581056
  CDS Start-End: 88-558
agtgtcgggtctgcgtggatcggtccttccaggacaccgtcgccttcccggccgcgtcggagtccggcggcgacctgcctctgaaacatggcaggctcggatgctgagtgggtaaccattgccaataaccttctttttaagtgtcatatacatctgagaatacatgaacttcaagactgtgatgctaatgtttttattgctctttatcagtctattttgggagaaaaggtaccagacctcatagttattcctaggagtcaagaagatgatgcacacaatgtacaagcagtaattgattcactggccttggactacttgcaggtcagcttgtctcacataacaggagaaaatatagtgaaaggagataaagaatctattaagaatctcctggaaatatttgatggtttgttggagtatcttacagaacgcatcagtgaaacatctcatgagaaaagtaagtttaagaatggaaatttggtttggtttaccttttatgatgtgtcccttttgccttttatctttttgtgtatttttcttcataggaagcagattcactaatacagtatacctgataaccgtagttgtaaatttcaaattcttattgttccagctggttggaaactgtcttagactgtcatcatgttctttatcaacttggatgttgctcataaattacttcaaaactaatttatactagaaagataaatttctggctaaattatttattgtcctatgattgcataaaatttctttctccaaaatttcgtgtgtcagaactgctatttatggtaaatatttggatgttactgaggcatcaacaggaagaattggtgcatttgtgtctttagcctgcacttacatttgtgacagcctaaatatttcagatatttgtcattgcaaaaa

SEQ ID NO: 116669 - DNA, 607 bp, Homo sapiens
  Payload ID: 2750
  Gene Symbol: CEP95
  Gene Name: centrosomal protein 95kDa
  ENST ID: ENST00000583676
  CDS Start-End: 1-309
atatttaagaaactgtttgaagaaggtttaaacattcaaaagcaaagattacgagacctaagaaactatgccaaagaaaagcgagatgaacaaaggagacgccaccaggatgaactggactccatggagaactactataaggaccagttttcattgctggcagaagccatatcacaggaacatcaagaacttaaagccagagagaaatctcaggcccaggtactaccaactgagcagtcaccacggccggagaaaacgggcaccttccctgctctgcgaggagacagaaagctgagctctgcaacatgacagaggcatcaactcaggatggcatgtgttcttgaacttttcattttgtgactcatgttgtcaccctccatagagccaaccataaatgttttcaaaacgattcattacaaactcaatattctttaaaaacgttgatgctgtgacagtgcaaacagcattgattttattgctcgacttcggcatgggcacatacatagttaatttttaaaaaccatttatacagatgttactgataaagctcatgtaacaaatgaatgaaaatacaaagaatatcaaagctaaaacactctgtaataaa

SEQ ID NO: 116670 - DNA, 592 bp, Homo sapiens
  Payload ID: 2750
  Gene Symbol: CEP95
  Gene Name: centrosomal protein 95kDa
  ENST ID: ENST00000577960
  CDS Start-End: 1-223
gtgctccttgtcttctgagatgttgggcccctcttgggatggagatgaagcagaatccactggtgaaatcattagacttggagacacagcacacaccttttctctaagaagtaatggtcttgctctgtcacccagggtggagtgcggtggcgcaatctcggctcactgcaacctctgcctcagcctctcaagcggctgggattacaagtgctcaatgtcctaatgaaatgctgtctaaaaaagccttagcctcaccaagttctaaatcacatgaagatatgttgtaccctcctagtgttttgtccaagagtaggacatcctttgttgaagacacggaaaccctttctgtgagtgggattccaaatgctaggaagctaggggagcctatccgagcagctattcctttacatccaccctaccacccttcagagcctcgagcaccctgccccataggaaaagaatacttgcattcaagtcactgctccccagccgtaaattctactggagagcatacggaattttctggggatctagatgatggacttttcttaatttccaagttgcctaaaggcagcaaatgggaagtatatcc

SEQ ID NO: 116671 - DNA, 895 bp, Homo sapiens
  Payload ID: 2750
  Gene Symbol: CEP95
  Gene Name: centrosomal protein 95kDa
  ENST ID: ENST00000579860
  CDS Start-End: 234-707
tctctaaacttcccaaaccgcccccgtttcacgtcctgtgaaaggaagtgctcctctgatgaccaatcagcggcgagaagctcttttaacgtccgtccttctttcacgcctccttccccgcgctttggttcgtgcgtccgcgccccagtgtcgggtctgcgtggatcggtccttccaggacaccgtcgccttcccggccgcgtcggagtccggcggcgacctgcctctgaaacatggcaggctcggatgctgagtgggtaaccattgccaataaccttctttttaagtgtcatatacatctgagaatacatgaacttcaagactgtgatgctaatgtttttattgctctttatcagtctattttgggagaaaaggtaccagacctcatagttattcctaggagtcaagaagatgatgcacacaatgtacaagcagtaattgattcactggccttggactacttgcaggtcagcttgtctcacataacaggagaaaatatagtgaaaggagataaagaatctattaagaatctcctggaaatatttgatggtttgttggagtatcttacagaacgcatcagtgaaacatctcatgagaaaagtgctccttgtcttctgagatgttgggcccctcttgggatggagatgaagcagaatccactggtgaaatcattagacttggagacacagcacacaccttttctctaagaagtaatggtgctcaatgtcctaatgaaatgctgtctaaaaaagccttagcctcaccaagttctaaatcacatgaagatatgttgtaccctcctagtgttttgtccaagagtaggacatcctttgttgaagacacggaaaccctttctgtgagtgggattccaaatgctaggaagctaggggagcct

SEQ ID NO: 116672 - DNA, 516 bp, Homo sapiens
  Payload ID: 2750
  Gene Symbol: CEP95
  Gene Name: centrosomal protein 95kDa
  ENST ID: ENST00000582724
  CDS Start-End: 1-214
cttggactacttgcaggtcagcttgtctcacataacaggagaaaatatagtgaaaggagataaagaatctattaagaatctcctggaaatatttgatggtttgttggagtatcttacagaacgcatcagtgaaacatctcatgagaaaagtctaatatatacttacctggcaatatttcctagagctgatcaggttcttcaaaatgccagttaacagtaatgggaaacaaatctttattatcactaatcatatcagctgtgcagggcagcttcaacctgggacctgagctagcattatcatttaccactgaagaaggaggggttcgaaggaagaccatgggttcagtgctgggttcttcctctcactatatgatggcagctctctaagcctgttttctcatctgaaattctttcatggttgttgtgaaagttaagtaagtagatgtgtgtaaacagttgggcacacagcctagctcagagtaaatgcataataaatgttaattgatgttattgaaa

SEQ ID NO: 116673 - DNA, 575 bp, Homo sapiens
  Payload ID: 2750
  Gene Symbol: CEP95
  Gene Name: centrosomal protein 95kDa
  ENST ID: ENST00000580188
  CDS Start-End: 406-575
tccttccccgcgctttggttcgtgcgtccgcgccccagtgtcgggtctgcgtggatcggtccttccaggacaccgtcgccttcccggccgcgtcggagtccggcggcgacctgcctctgaaacatggcaggctcggatgctgtctattttgggagaaaaggtaccagacctcatagttattcctaggagtcaagaagatgatgcacacaatgtacaagcagtaattgattcactggccttggactacttgcaggtcagcttgtctcacataacaggagaaaatatagtgaaaggagataaagaatctattaagaatctcctggaaatatttgatggtttgttggagtatcttacagaacgcatcagtgaaacatctcatgagaaaagtgctccttgtcttctgagatgttgggcccctcttgggatggagatgaagcagaatccactggtgaaatcattagacttggagacacagcacacaccttttctctaagaagtaatggtgctcaatgtcctaatgaaatgctgtctaaaaaagccttagcctcaccaagttctaaatcacatgaagatat

SEQ ID NO: 116674 - DNA, 8361 bp, Homo sapiens
  Payload ID: 2751
  Gene Symbol: CEP97
  Gene Name: centrosomal protein 97kDa
  Uniprot ID: Q8IW35
  ENST ID: ENST00000341893
  CDS Start-End: 753-3350
actacagacggggtttctccatgttggccaggcgggtctcgaattcccgacctcaggtgatcagcctgcgttgacctcccaaagtgctgggattacagacgtgaaccactgcgcccggcctggagattatattttaaagttattttgaatactccctggaaaagttcttggttcatacttatacccgtaagtcaaaagatttgtcaaatattcaagaacaatcaaacaatcacttaaaaatactgtataaaagtttctatttcggcatactttacttttacttaactaaaatttcaaataaaatgtatccacttttatgatctcaacaagatcggtcattcctatagcggagttgaaaactttcaacttattcacaattatcaaaagaatggagcagcccccacagagacttccagcaatgagttgtaaaatgcagtctgcattaagtagcttccttacaatcatcccgatggtaaaagtgtcaaatttcgcaaacgcctggacaaggaagtgaaatgatcatctaataacgcagttgactcatctgtcaaataagcgagtgggccagggtccctgagctcactaccctcagattctaactccagcttcacatcattaggcgtaagcagccaattgggccgtctgggagccgtgcatcctgggagttatagtttccggctccctccttcagattacaagctccacagagccgcgggaggacggttgcctggtattattagcaagcagcaaatatggcggtggcgcgcgtggacgcggctttgcctcccggagaaggatcagtggtcaattggtcaggacagggactacagaaattaggtccaaatttaccctgtgaagctgatattcacactttgattctggataaaaatcagattattaaattggaaaatctggagaaatgcaaacgattaatacagttatcagtagctaataatcggctggttcggatgatgggtgtggccaagctgacgttgcttcgtgtattaaatttgcctcataatagcattggctgtgtggaagggctaaaggaactagtacatctggaatggctgaatttggcaggaaataatcttaaggccatggaacagatcaatagctgcacagctctacagcatctcgatttatcagacaataatatatcccagataggtgatctatctaaattggtatccctgaaaaccctgcttttacatggaaacatcatcacctctcttagaatggcacctgcttacctacccagaagtcttgctatactttctttggcagaaaatgaaatccgagacttaaatgagatctcttttttggcatccttaactgaattggaacagttgtcgattatgaacaatccttgtgtgatggcaacaccatccatcccaggatttgactatcggccgtacatcgtcagctggtgcctaaacctcagagtcctagatggatatgtgatttctcagaaggaaagtttgaaagctgaatggctctatagtcaaggcaaggggagagcatatcggcctggccagcacatccagcttgtccaatatctggctacagtctgccccctcacttctacactaggtcttcaaactgcagaggatgccaaactagagaagattttgagcaaacagaggtttcaccagaggcagttgatgaaccaaagccaaaatgaagagttgtctcctcttgttcctgttgaaacaagggcatcccttattcctgagcattcaagccctgttcaagattgccagatatcccaggaaagtgaacccgtcattcaagtgaattcttgggttgggataaacagtaatgatgatcagttatttgcggttaagaataattttccagcctctgtacacactacgagatattctcgaaatgatctgcacctggaagacatacagacggatgaggacaagttaaactgtagtcttctctcttcagagtctacttttatgccagttgcatcaggactgtctccactatcacctacagttgagctgaggctgcagggcattaacttgggcctagaagatgatggtgttgcagatgaatctgtgaaagggctggaaagccaggtgttggataaggaagaggaacagcctttatgggctgcaaatgagaattctgttcaaatgatgagaagtgaaatcaatacagaggtaaatgagaaagctggactattaccttgtcctgagccaacaataatcagtgctatcttgaaggatgataaccacagtcttacattttttcctgagtcaactgagcagaaacaatcagacataaagaaaccagaaaatacacaaccagaaaataaagaaaccatatctcaagcaacttcagagaaacttcccatgattttaacccagagatctgttgctttgggacaagacaaagttgcccttcagaaattaaatgatgcagccaccaagcttcaggcctgttggcggggattttatgccaggaactacaaccctcaagccaaagatgtgcgttacgaaatccggctacgcagaatgcaagagcacattgtctgcttaactgatgaaataaggagattacgaaaagaaagagatgaagaacgtattaaaaaatttgtacaagaagaagctttcagattcctttggaaccaggtaaggtctctacaggtttggcaacagacagtggaccagcgtctaagttcctggcatactgatgttcctcctatatcaagtactcttgtgccatcgaaacatccattatttacccaaagccaggagtcctcttgtgatcaaaatgctgattggtttattgcttctgatgtagctcctcaagagaaatcattaccagaatttccagactctggttttcattcctctctaacagaacaagttcattcattgcagcattctttggattttgagaaaagttccacagaaggcagtgaaagctccataatggggaattccattgacacagtcagatatggcaaagaatcagatttaggggatgttagtgaagaacatggtgaatggaataaggaaagctcaaataacgagcaggacaatagtctgcttgaacagtatttaacttcagttcaacagctggaagatgctgatgagaggaccaattttgatacagagacaagagatagcaaacttcacattgcttgtttcccagtacagttagatacattgtctgacggtgcttctgtagatgagagtcatggcatatctcctcctttgcaaggtgaaattagccagacacaagagaattctaaattaaatgcagaagttcaggggcagcagccagaatgtgattctacatttcagctattgcatgttggtgttactgtgtagcatgtcttttgggaggcagatatccacttaacttttcttaaaaatactttcagttgcctttgcttttttttggagggaaatactccctacccctaattttgttactacttatatagaatttgtattcatgtcttatatttttcagattctagatattgagctgagttttcattttgattttgttagctttttacttagctgtaaggtaccaaactatttatattgaaagctatatgcactttatttcttaactgaattgcatcaacaatgttcctgtttctttcatgtactcatttactttcaaaaataagctagaatatattaaagaaaatagaaaaaattaccttaaatatataaataagagaattttggcccttctgtgtctgagaaaattaattatatagcaaggaatgaaatttgataaagcaaatataaatgagaaatatgaggattgtgaattattgaaatttgccagtctccctggtgtaaaatgtttttttaaagccttttttcctcctttcggagtcaaggaaagcctttctataagcaaattaaggaagaaaaggtaggattataagatttctcaatggggatgattaaattgtctcatggaaaacttcagttaatgtcatgcatcagttttaacatatgaagtaaagtgttctatccaggattaaagtcaagtttacttaggcaacacaagaatatttcacttagatatgaagaaaggaaacactagtctccattcacttgaaatactctcatggcaaatatttatcctctcattaagtgctttttcaccctataggtaagcatttttgtgccaacatgttgtcagaaattaatgtatgttcatctcctctgttcctgcttatttttacttatatatttcagcagaaggtccgtggccattcacttcaattttgacctctgtcccatagtgaagaacatttaaagtaatactactggtcgaatatgaatgactttttaggaactactttttgtctaacctgaaaaagttccacatttggaagacaatttaatgatggtgaagaaataataaacctcactttacttgttaaaagggatatatatatatatatatatgtctgcaacttcagggagaaataagattgtgtttgaatattgtaggtagatgcatttgtaattaaggataatatcgtttaacaacatgtatttggtttccctcaacttacagacatacagctatttaaaactatggcaatacttaagcatctctaaatttaggtgctaaatatctattattctgttgtagtcattaggtgcccttctctgaagttatgtaaaataaaagcatctgatccttcaaggataaagttgaggatcacatggtacgtggcatttgttgttattgttttttaaagagatggaggctggctctgttggtgcggtgccatgatcatagttcactataacctcgaactcctggctcaagtgatctcccacttcagcctcccgagtatctgggattataagcaagagccactgctcccagctcatggtatttgttgatagtcataacatttttcctgtatggtaagacgtatttttctcagtttataaatacgtagcactcaggttgagacgacttggattttattcttagaaatccagaatcccttgaaaaggaaatattttctgtttcttataaataaaagagtaatcttactttcagaaggattttccttagtgaaacatgtgtaacattgaatgcatgttaaataaaaatggaatttctaactttttttcaatagtgctaattatcttttctgaatgattttgaatgtcttcttaaatataccctatttttctattttaaagttaagtgcctcacttgctgtccatagttagacaaagaaaaaccaatttccactgcactagtaccaaaatactactttatacattagtttttcataaaagctgctggaatgtcatgattcagtattacctaaatagatttctgctaaaatcctctccctcctgtcttttttaagttatggaaaaacacaactaaattcatttgatcatcagcacttgttagcaggatttccttttttacctttgccttgtttctttagcccacaaatagtactcagcatactttcattaaaaatttggcacaatatgataattgttaatattctgttcttcgtctgtgttttatttaacttttactagtgtttagaagtgcaagaatattaaatagccccttccttaactgtacatattatcttgaatgtagataaaatgaaaatactgtaaattagagtgtaggaaaactggcatagagttaatatattttaatgggtttacattatactttaaaagtaatttatataattaaaatatttggttttaactctatgggctattctttggttggctgaagagggaatgggtctagtaaggtttggaaagttaagctttgaacatggtctttgtgtttttttcctaacaaggaaaggtttagttcagctgtgctattttagtacacatcagttctcttgatttatggaagattcagtttatcaattaagaattcctgcagaagcacagaatcataccatgtaagagttggaaggaagcttaagagatttctgttcgaatctctttgtttcaaagatgaaactaaagcacagcatgttaaatgacttgtctaagttatagctagttagtagtaaataaactgaaaacctatatgctactgtagtccaaaattttattatgtcctcttaatctttacatttagtgagtcagtaaggaaatctctgcatatttctcattctctttgaaagaggaaaaaaacttctaagagagctacaactctatcactcatgacagagttgcttgtagaaaataactaattccttcagaaccctgagtgaattttttctaagaaatgtgacttgattaaaatggtttcaaaagagcaatagtggaaattaaagttttagaaaagagacctggcgtggtggttgacaactgtaatcccagtgctttgggaggctgaggccagaggatcacttgaggccaggagttcaagaccagcctggacaacatagcaagacccccctctctacaaaaaaaatttttttctgaaaagaataagtacattttagagtccatttatttgacgacaggcagtatgacaggttgctgaggtatataaaattttctagagaaatgctgagtttgatgacattttatcttcagttttgtagaacagatgttaaaatgttaactctcctggtgtgcagaaagctgtaatcatgacagttgataatatgcaatttagtttgattttataggtttaattataaaaggcttcacaatatgcatgttttaggaaaatgttcatttatttagtcatataatcgtttgtatatatgtaaataactttattctggaataatgtgggtgccatcttgagcgtgtgtttttatctgttttggattattttttgtatacaaacaccataatactgtattttcctgttatctacttaagtctagttctactttttcccaataatttcaggaaaatacaagcttgagatattatactatctcccttggtattttttgtgtgcaaagtcttagaattggatttataacattgataataaaaatataaaacgtttttcctcgggagttaagatggtaaaaagaaaaaaatagaatgaatatgatcatttctccatcataaaggaaagaagagacttcattgtgtgtgtgttttttttttttttttcgagatagagtttcactgttgtcacccaggctggtctcagctcactgcaacctccacttcctgggtacaagcgattctcctgcctcagcttcctgtgtagctgggattacaggtgtgcaaccacaaggctcggctaatttttttgtatttttagtagagatggggtttcaccatgttggccaggctggtctcgaactcctgacctcaagtgatccacccacctcggcctcgcaaagtgctgagattacaggtgtgagccactgtgcccagccgagacttcattgtttaatgtatatttttattttttccaaacaccagctcgaatcagagtatatttttattttgccacatacctttaaaaggtatttattgtgtcataatgttttaaatgttaaatatatgataccctcattcatgaagtgaagcagaaagggtctgtaaggaacattctaaacatttttaatgatattgcttttactgatcaagcttgttgtgccatattaaaattaaaagtcaaataaacaaagcagtcctcacagccttggaaagaaatagataattgtcttcttaagatgaggtgctttttatctgtggatgaatggaaatcacactgaattttaattcttatttattttagtggatagcaggaatcactctgtagtagttgtgttcattttcttttctttttcttttcttttttttgagagagtctcgctctgtcaccaggctggagtgcagtggcgtgatctcggctcactgcaacctccatctcctgggttcaagtgattctcctgcctcatcctcccgagtagctaagactacaggcacacgccaccatgcccagctaatttttatatttttagtagagatggggtttcaccatgttggccaggatggtctcaatctcttgacctcgtgatccacccagtttggcctcccaaagtgctgggattacaggcgtgagccactacacctggccttgttcatcttctaattaaatatctttgaatgttttgtaataattttaatgttgacaataagagtttaaaaataatttgattttggactgtatttagatttctctttaattttgctgtagaaatagtaaatgatttaaagtggttatgatgtgttttatgaaggcttactattttatattgtacttatttaatttgtatttgagtctgtctaattttaaataaaaggtttatacatttga

SEQ ID NO: 116675 - DNA, 2870 bp, Homo sapiens
  Payload ID: 2751
  Gene Symbol: CEP97
  Gene Name: centrosomal protein 97kDa
  ENST ID: ENST00000494050
  CDS Start-End: 23-2443
gtattattagcaagcagcaaatatggcggtggcgcgcgtggacgcggctttgcctcccggagaaggatcagtggtcaattggtcaggacagggactacagaaattaggtccaaatttaccctgtgaagctgatattcacactttgattctggataaaaatcagattattaaattggaaaatctggagaaatgcaaacgattaatacagttatcagtagctaataatcggctggttcggatgatgggtgtggccaagctgacgttgcttcgtgtattaaatttgcctcataatagcattggctgtgtggaagggctaaaggaactagtacatctggaatggctgaatttggcaggaaataatcttaaggccatggaacagatcaatagctgcacagctctacagcatctcgatttatcagacaataatatatcccagataggtgatctatctaaattggtatccctgaaaaccctgcttttacatggaaacatcatcacctctcttagaatggcacctgcttacctacccagaagtcttgctatactttctttggcagaaaatgaaatccgagacttaaatgagatctcttttttggcatccttaactgaattggaacagttgtcgattatgaacaatccttgtgtgatggcaacaccatccatcccaggatttgactatcggccgtacatcgtcagctggtgcctaaacctcagagtcctagatggatatgtgatttctcagaaggaaagtttgaaagctgaatggctctatagtcaaggcaaggggagagcatatcggcctggccagcacatccagcttgtccaatatctggctacagtctgccccctcacttctacactaggtcttcaaactgcagaggatgccaaactagagaagattttgagcaaacagaggtttcaccagaggcagttgatgaaccaaagccaaaatgaagagttgtctcctcttgttcctgttgaaacaagggcatcccttattcctgagcattcaagccctgttcaagattgccagatatcccaggaaagtgagtctacttttatgccagttgcatcaggactgtctccactatcacctacagttgagctgaggctgcagggcattaacttgggcctagaagatgatggtgttgcagatgaatctgtgaaagggctggaaagccaggtgttggataaggaagaggaacagcctttatgggctgcaaatgagaattctgttcaaatgatgagaagtgaaatcaatacagaggtaaatgagaaagctggactattaccttgtcctgagccaacaataatcagtgctatcttgaaggatgataaccacagtcttacattttttcctgagtcaactgagcagaaacaatcagacataaagaaaccagaaaatacacaaccagaaaataaagaaaccatatctcaagcaacttcagagaaacttcccatgattttaacccagagatctgttgctttgggacaagacaaagttgcccttcagaaattaaatgatgcagccaccaagcttcaggcctgttggcggggattttatgccaggaactacaaccctcaagccaaagatgtgcgttacgaaatccggctacgcagaatgcaagagcacattgtctgcttaactgatgaaataaggagattacgaaaagaaagagatgaagaacgtattaaaaaatttgtacaagaagaagctttcagattcctttggaaccaggtaaggtctctacaggtttggcaacagacagtggaccagcgtctaagttcctggcatactgatgttcctcctatatcaagtactcttgtgccatcgaaacatccattatttacccaaagccaggagtcctcttgtgatcaaaatgctgattggtttattgcttctgatgtagctcctcaagagaaatcattaccagaatttccagactctggttttcattcctctctaacagaacaagttcattcattgcagcattctttggattttgagaaaagttccacagaaggcagtgaaagctccataatggggaattccattgacacagtcagatatggcaaagaatcagatttaggggatgttagtgaagaacatggtgaatggaataaggaaagctcaaataacgagcaggacaatagtctgcttgaacagtatttaacttcagttcaacagctggaagatgctgatgagaggaccaattttgatacagagacaagagatagcaaacttcacattgcttgtttcccagtacagttagatacattgtctgacggtgcttctgtagatgagagtcatggcatatctcctcctttgcaaggtgaaattagccagacacaagagaattctaaattaaatgcagaagttcaggggcagcagccagaatgtgattctacatttcagctattgcatgttggtgttactgtgtagcatgtcttttgggaggcagatatccacttaacttttcttaaaaatactttcagttgcctttgcttttttttggagggaaatactccctacccctaattttgttactacttatatagaatttgtattcatgtcttatatttttcagattctagatattgagctgagttttcattttgattttgttagctttttacttagctgtaaggtaccaaactatttatattgaaagctatatgcactttatttcttaactgaattgcatcaacaatgttcctgtttctttcatgtactcatttactttcaaaaataagctagaatatattaaagaaaatagaaaaaattaccttaaatatataaataagagaattttggcccttctgtgtctgagaaaattaattatatagcaaggaatgaaatttgataaagc

SEQ ID NO: 116676 - DNA, 1782 bp, Homo sapiens
  Payload ID: 2751
  Gene Symbol: CEP97
  Gene Name: centrosomal protein 97kDa
  ENST ID: ENST00000467655
  CDS Start-End: 1-528
attggctgtgtggaagggctaaaggaactagtacatctggaatggctgaatttggcaggaaataatcttaagaccctgcttttacatggaaacatcatcacctctcttagaatggcacctgcttacctacccagaagtcttgctatactttctttggcagaaaatgaaatccgagacttaaatgagatctcttttttggcatccttaactgaattggaacagttgtcgattatgaacaatccttgtgtgatggcaacaccatccatcccaggatttgactatcggccgtacatcgtcagctggtgcctaaacctcagagtcctagatggatatgtgatttctcagaaggaaagtttgaaagctgaatggctctatagtcaaggcaaggggagagcatatcggcctggccagcacatccagcttgtccaatatctggctacagtctgccccctcacttctacactaggtcttcaaactgcagaggatgccaaactagagaagattttgagcaaacagagaggcagttgatgaaccaaagccaaaatgaagagttgtctcctcttgttcctgttgaaacaagggcatcccttattcctgagcattcaagccctgttcaagattgccagatatcccaggaaagtgaacccgtcattcaagtgaattcttgggttgggataaacagtaatgatgatcagttatttgcggttaagaataattttccagcctctgtacacactacgagatattctcgaaatgatctgcacctggaagacatacagacggatgaggacaagttaaactgtagtcttctctcttcagagtctacttttatgccagttgcatcaggactgtctccactatcacctacagttgagctgaggctgcagggcattaacttgggcctagaagatgatggtgttgcagatgaatctgtgaaagggctggaaagccaggtgttggataaggaagaggaacagcctttatgggctgcaaatgagaattctgttcaaatgatgagaagtgaaatcaatacagaggtaaatgagaaagctggactattaccttgtcctgagccaacaataatcagtgctatcttgaaggatgataaccacagtcttacattttttcctgagtcaactgagcagaaacaatcagacataaagaaaccagaaaatacacaaccagaaaataaagaaaccatatctcaagcaacttcagagaaacttcccatgattttaacccagagatctgttgctttgggacaagacaaagttgcccttcagaaattaaatgatgcagccaccaagcttcaggcctgttggcggggattttatgccaggaactacaaccctcaagccaaagatgtgcgttacgaaatccggctacgcagaatgcaagagcacattgtctgcttaactgatgaaataaggagattacgaaaagaaagagatgaagaacgtattaaaaaatttgtacaagaagaagctttcagattcctttggaaccagaaatggggtcttgccatattgcccaggccggtctcaaacttctgggctcaagcagtcttccctcctcagcctcccaaagtaaggtctctacaggtttggcaacagacagtggaccagcgtctaagttcctggcatactgatgttcctcctatatcaagtactcttgtgccatcgaaacatccattatttacccaaagccaggagtcctcttgtgatcaaaatgctgattggtttattgcttctgatgtagctcctcaagagaaatcattaccag

SEQ ID NO: 116677 - DNA, 769 bp, Homo sapiens
  Payload ID: 2751
  Gene Symbol: CEP97
  Gene Name: centrosomal protein 97kDa
  ENST ID: ENST00000465011
  CDS Start-End: 20-406
ttattagcaagcagcaaatatggcggtggcgcgcgtggacgcggctttgcctcccggagaaggatcagtggtcaattggtcaggacagggactacagaaattaggtccaaatttaccctgtgaagctgatattcacactttgattctggataaaaatcagattattaaattggaaaatctggagaaatgcaaacgattaatacagttatcagtagctaataatcggctggttcggatgatgggtgtggccaagctgacgttgcttcgtgtattaaatttgcctcataatagcattggctgtgtggaagggctaaaggaactagtacatctggaatggctgaatttggcaggaaataatcttaagtgtgatgcttttcttgtgataggccatggaacagatcaatagctgcacagctctacagcatctcgatttatcagacaataatatatcccagataggtgatctatctaaattggtatccctgaaaaccctgcttttacatggaaacatcatcacctctcttagaatggcacctgcttacctacccagaagtcttgctatactttctttggcagaaaatgaaatccgagacttaaatgagatctcttttttggcatccttaactgaattggaacagttgtcgattatgaacaatccttgtgtgatggcaacaccatccatcccaggatttgactatcggccgtacatcgtcagctggtgcctaaacctcagagtcctagatggatatgtgatttctcagaaggaaag

SEQ ID NO: 116678 - DNA, 4367 bp, Homo sapiens
  Payload ID: 2752
  Gene Symbol: CSPP1
  Gene Name: centrosome and spindle pole associated protein 1
  Uniprot ID: Q1MSJ5
  ENST ID: ENST00000262210
  CDS Start-End: 32-3697
gaggggcggagccccggcccggaggtctgtcatgctgttcccgctccaggtggccgctgtaacctcttcggtccgcgacgatcctctagagcactgtgtgtctccccggacgcgagcccgctcccctgaaatctgcaaaatggctgataatttggatgaatttattgaagagcaaaaagccagattggccgaagacaaagcagagttggaaagtgatccaccttacatggaaatgaagggaaagttgtcagcgaagctttctgaaaacagtaagatactgatctctatggctaaggaaaacataccaccaaatagtcaacagaccaggggttccttaggaattgattatggattaagtttaccacttggagaagactatgaacggaagaaacataaattaaaagaagaattgcggcaagattacagacgttatcttactcaggaaaggttgaaacttgaacgtaacaaagaatacaatcagtttctcaggggtaaggaagaatccagtgaaaagttcaggcaggtggaaaagagtactgagcccaagagtcagagaaataaaaaacctattggtcaagttaagcctgatctaacttcacaaatacagacatcttgtgaaaattcagagggtcctagaaaagatgtcttaactccttcagaggcatatgaagaacttctgaaccaaagacgactagaggaggacagataccgacaactagatgatgaaatcgaattaaggaatagaagaattattaaaaaagcaaatgaagaagtgggcatttccaacctaaaacatcaaaggtttgcaagcaaggctggcattccagatagaagatttcacagatttaatgaggatcgtgtttttgatagacggtatcatagaccagaccaagatcctgaagtaagtgaagaaatggatgagaggtttagatatgaaagtgattttgatagaagactttcgagagtgtatacaaatgacaggatgcacaggaacaaacgagggaatatgcctcctatggaacatgatggggatgttatagaacagtcaaacataagaatttcatctgctgaaaataaaagtgctccagacaatgaaacatccaaatctgctaatcaagatacctgtagtccttttgcagggatgctctttggaggtgaagatcgagaacttattcagagaaggaaagagaaatacagactagaactgttggaacaaatggctgagcaacagaggaacaagagacgagaaaaagatttagaactcagggttgcagcgtctggagcacaagaccctgagaaatcgcctgatagactaaagcagtttagtgtggcaccaagacactttgaagagatgataccacctgaaagacccagaatagctttccagacacctctccctcctttatctgccccatctgtcccacccatcccatcagttcatcctgttccttctcaaaatgaagatttgcgcagtggactcagcagcgcccttggtgaaatggtgtctcccaggattgcacctctgcctccacctcccctactaccacctttggctactaactatcgaactccttatgatgatgcatactatttttatgggtccaggaatactttcgatcccagtcttgcttattatggttcaggaatgatgggcgtacagcctgcagcttatgttagtgctcctgtcacccaccaactagcacaacctgttgtgaatacggttggacagaatgaactgaagattacaagtgatcaagtgataaattcaggattgatttttgaagataaaccgaaaccttccaaacagtcacttcagtcttaccaagaggctttgcagcagcagattcgggaaagagaagaaagaaggaagaaagaacgtgaagaaaaagaagaatatgaagctaaattagaagctgaaatgagaacatataatccctggggaaaaggtggaggtggtgctcctctcagggatgcaaaaggaaatctgataactgatttgaataggatgcacagacaaaatatagatgcctaccataacccagatgcaagaacatatgaagataaaagggctgttgtatctctagacccaaatttagccacttcaaatgctgagaacctagaagatgctgcaaataaaagctcaggtcatatgcaaacacagagctctccttttgctcggggaaatgtatttggtgagcctccaactgaacttcagattaaacagcaagaattatacaagaattttcttcgtttccagattgaggaaaagaaacaaagagaggaagcagagcgagagagactgagaattgcagaagaaaaagaagaaagacggcttgcagaacagagggcacgaattcagcaggagtatgaagaggaacaggaaaagaaaagagagaaagaggaggagcaaaggctaaaaaatgaagagcatattcggttagctgaagaaagacaaaaagaagcagaaagaaagaagaaagaagaagaagaaaaatataacctgcaacttcagcactactgtgaaagagacaatttgattggggaagaaacaaagcacatgagacagccttctcctatagttcctgctcttcagaacaaaattgcaagcaaactccaaagacctccttcagttgacagcatcatacgttcctttattcatgaaagttccatgtccagggcacagtcacccccggtacctgccaggaaaaatcagctccgtgcagaagaggagaaaaaaaatgtaattatggaattatcagaaatgagaaaacagcttcgtagtgaagagaggcgtctacaagagcgattgctacacatggacagtgatgatgaaattcctatcaggaaaaaggaaaggaatcccatggatatatttgatatggctagacatcggttgcaagctcctgtcagaagacagtcccctaagggcttagacgctgccacttttcagaatgttcatgattttaatgagctgaaagatagagattcagaaacacgagttgatctgaaatttatgtacctggatcctccaagagatcatcacaccttagagattcagcagcaagccctgctaagagagcagcagaagaggctgaacagaataaaaatgcaggaaggtgccaaagttgacttagatgccatcccaagtgctaaagtacgagagcaaagaatgcccagagatgacactagtgatttcttgaaaaactcattattggaatctgatagtgcttttattggggcttacggtgagacatatcctgccattgaagatgacgtcctccctccaccatcacagttgccctctgcacgggagcgcaggaggaacaaatggaaaggactagacattgatagcagtcgtcctaatgtagcaccagatggtctctctctaaaatctatatccagtgtaaatgttgatgagcttagagtgagaaatgaggaacgaatgcgaagactgaatgaatttcacaataaacctattaatacagatgatgagagttcactggttgaccctgatgacatcatgaaacacataggggatgacggatcaaactctgtagcaactgagccctggctccgccctggcacttcagaaacgctgaaacgtttcatggcagagcagctgaaccaggagcagcagcagattcctggaaaaccaggcactttcacttggcagggcctgtcgactgcacatggttaaaataaacctgtactggacccagtagtgccttttaaggtgaaaggaatggtaaatctgtacctttaatatgtcctacttttggcccctacctgaaagttactttttttccatcatctgtatataaaattatttttatcatgatgtatattatgtacataaataaaaggccatgattattgatttatataatagaattgtatagattatttttgcacagttttgtcataaattagggtggtaatgaactggattgaactactatatgtgcattatattgaattctgcttgtcattaagataaggtgaataagtgtcttaaacgtcctgtaaaaccggactcccctttgttacatgcacattttccattgttacctcgatgcaaaagaattcatttagtaggtacatctattgtagctgtgattattccagtttctgtgtgatgcaatcaaatgtcctattaattaattattatttcatgtcatttgtagctactgatacagcagaaatgaagggaactgtaattacttgtatttttgtaagccatacgttaaatgtttgttacatcatctttctgcttctatttttatgccaatgaaggcatttgtcttgttactaattacatgatgtaactacttcttgatataaataaatttttattttaattactaaaa

SEQ ID NO: 116679 - DNA, 3982 bp, Homo sapiens
  Payload ID: 2752
  Gene Symbol: CSPP1
  Gene Name: centrosome and spindle pole associated protein 1
  ENST ID: ENST00000519163
  CDS Start-End: 80-1294
aacctcttcggtccgcgacgatcctctagagcactgtgtgtctccccggacgcgagcccgctcccctgaaatctgcaaaatggctgataatttggatgaatttattgaagagcaaaaagccagattggccgaagacaaagcagagttggaaagtgatccaccttacatggaaatgaagggaaagttgtcagcgaagctttctgaaaacagtaagatactgatctctatggctaaggaaaacataccaccaaatagtcaacagaccaggggttccttaggaattgattatggattaagtttaccacttggagaagactatgaacggaagaaacataaattaaaagaagaattgcggcaagattacagacgttatcttactcagggcattacacaagggaaaagaaagaaaaattttctatctacgagtgaaacagatccatctactttgggagtttctcttcctattggtgagaggttatctgctaaggaaaggttgaaacttgaacgtaacaaagaatacaatcagtttctcaggggtaaggaagaatccagtgaaaagttcaggcaggtggaaaagagtactgagcccaagagtcagagaaataaaaaacctattggtcaagttaagcctgatctaacttcacaaatacagacatcttgtgaaaattcagagggtcctagaaaagatgtcttaactccttcagaggcatatgaagaacttctgaaccaaagacgactagaggaggacagataccgacaactagatgatgaaatcgaattaaggaatagaagaattattaaaaaagcaaatgaagaagtgggcatttccaacctaaaacatcaaaggtttgcaagcaaggctggcattccagatagaagatttcacagatttaatgaggatcgtgtttttgatagacggtatcatagaccagaccaagatcctgaagtaagtgaagaaatggatgagaggtttagatatgaaagtgattttgatagaagactttcgagagtgtatacaaatgacaggatgcacaggaacaaacgagggaatatgcctcctatggaacatgatggggatgttatagaacagtcaaacataagaatttcatctgctgaaaataaaagtgctccagacaatgaaacatccaaatctgctaatcaagatacctgtagtccttttgcagggatgctctttggaggtgaagatcgagaacttattcagagaaggaaagagaaatacagactagaactgttggaacaaatggctgagcaacagaggaacaagagacggtaatgaaagagaaaaagatttagaactcagggttgcagcgtctggagcacaagaccctgagaaatcggtaagggtttctggcatcttttaatgtttaatctttcatcaaatgatcctcaaatgtggtggcaggtggggatagagaatattgggagaaaaagagagtagaccaatttgaacagtaataaaattaactaaattcagttctcataaagtgtaaattctcttaactgttatttccttgaggtaatttttcctttttcatttgtgtgtcatttttttaaagtttaaattagttctctctgctttattcacatgtactattccatgggaaagttatctgggttaaatttacaattgatgttaatatttttcttgaatacatcttgatcacttacttttcttacattggagtgatttctgagaaaactgacgactttatttttaaagcgttttagtaattgttacttattgtaacattagagagataataatcttatttttactttaattttgcaattctcatcattaagtggaatgaattactcacatcattgcagttaagtaaggaggaggtaatttattgtttttaccacaatttattttttctgtagttggttatgtaatatttatttctaatacaagtcttgtttcatctttgaatgatgattaagacctttaatttcattaaaaagctcattcttaaaaaggatgcagcaacttaaaattatttacctgtaggcaacttttgatttgcttttacttatgctgagaatatatcctgtgggttatctatttggaaaagtttcatattgcaccagcatcactcgcagtatgcttctgggttaacctgataaatcattcctgataagataaccatggtaggaaaaaaagaagataaatttcaaagctaaatatattttcctttatgaatcaaaagtttccttttaagaggtgagctttttaatgtaatatgttggcatgttaaattttgtatttatggttacactagtgtgtgacagaccttatttatctttgaattgaagctcctatacagtgtcaagttgatttatgagaataaataagtaattggaggcaacagttacgcctttacttttgggtttacttttgatgtgcaaatcttagaaaagggcacataagtgatgttctaaagtagagattagcaaagtgtggcctgtgaccaaatttgtttgctacctgttttcataaaaaaaagttttattgcagcacagccttgttcattccttgacatactgtttgtggctgctttagcaccatagctgagtctgctcattatgaagagactatgtagtcttgcaaatcttaatctatttactgtctagccctttacagaaagcatttgctgaccctgttttacagaatactataacagaaatggcaattagagaagtagcacggtgtcctagtacataaaaagaatactacagcctgatagactaaagcagtttagtgtggcaccaagacactttgaagagatgataccacctgaaagacccagaatagctttccagacacctctccctcctttatctgccccatctgtcccacccatcccatcagttcatcctgttccttctcaaaatgaagatttgcgcagtggactcagcagcgcccttggtgaaatggtgtctcccaggattgcacctctgcctccacctcccctactaccacctttggctactaactatcgaactccttatgatgatgcatactatttttatgggtccaggaatactttcgatcccagtcttgcttattatggttcaggaatgatgggcgtacagcctgcagcttatgttagtgctcctgtcacccaccaactagcacaacctgttgtggtctccctgtgttgcccagtgtgatcttgaactcctggcctcaagcgatcctcttgcctcagcctcccaaagaatacggttggacagaatgaactgaagattacaagtgatcaagtgataaattcaggattgatttttgaagataaaccgaaaccttccaaacagtcacttcagtcttaccaagaggctttgcagcagcagattcgggaaagagaagaaagaaggaagaaagaacgtgaagaaaaagaagaatatgaagctaaattagaagctgaaatgagaacatataatccctggggaaaaggtggaggtggtgctcctctcagggatgcaaaaggaaatctgataactgatttgaataggatgcacagacaaaatatagatgcctaccataacccagatgcaagaacatatgaagataaaagggctgttgtatctctagacccaaatttagccacttcaaatgctgagaacctagaagatgctgcaaataaaagctcaggtcatatgcaaacacagagctctccttttgctcggggaaatgtatttggtgagcctccaactgaacttcagattaaacagcaagaattatacaagaattttcttcgtttccagattgaggaaaagaaacaaagagaggaagcagagcgagagagactgagaattgcagaagaaaaagaagaaagacggcttgcagaacagagggcacgaattcagcaggagtatgaagaggaacaggaaaagaaaagagagaaagaggaggagcaaaggctaaaaaatgaagagcatattcggttagctgaagaaagac

SEQ ID NO: 116680 - DNA, 569 bp, Homo sapiens
  Payload ID: 2752
  Gene Symbol: CSPP1
  Gene Name: centrosome and spindle pole associated protein 1
  ENST ID: ENST00000519701
  CDS Start-End: 82-282
gtaacctcttcggtccgcgacgatcctctagagcactgtgtgtctccccggacgcgagcccgctcccctgaaatctgcaaaatggctgataatttggatgaatttattgaagagcaaaaagccagattggccgaagacaaagcagagttggaaagtgatccaccttacatggaaatgaagaatctcgctctgttggccaggcaggactgcaatggtgtgatctcagctcgccacaacctccgcctcccaggctcaagtgattcttctgcctcagcctcatgagtagctgggactacagggaaagttgtcagcgaagctttctgaaaacagtaagatactgatctctatggctaaggaaaacataccaccaaatagtcaacagaccaggggttccttaggaattgattatggattaagtttaccacttggagaagactatgaacggaagaaacataaattaaaagaagaattgcggcaagattacagacgttatcttactcagaaaaattttctatctacgagtgaaacagatccatctactttgggagtttctcttcctattggtgaga

SEQ ID NO: 116681 - DNA, 567 bp, Homo sapiens
  Payload ID: 2752
  Gene Symbol: CSPP1
  Gene Name: centrosome and spindle pole associated protein 1
  ENST ID: ENST00000521919
  CDS Start-End: 106-567
agctggagccttaagagcgggatgtggagggcggaaagtgtttttgtgtgggtataggtaccttaaatgagataagtttgttgaaagactaaaagaatctgcaaaatggctgataatttggatgaatttattgaagagcaaaaagccagattggccgaagacaaagcagagttggaaagtgatccaccttacatggaaatgaagggaaagttgtcagcgaagctttctgaaaacagtaagatactgatctctatggctaaggaaaacataccaccaaatagtcaacagaccaggggttccttaggaattgattatggattaagtttaccacttggagaagactatgaacggaagaaacataaattaaaagaagaattgcggcaagattacagacgttatcttactcagaaaaattttctatctacgagtgaaacagatccatctactttgggagtttctcttcctattggtgagaggttatctgctaaggaaaggttgaaacttgaacgtaacaaagaatacaatcagtttctcaggggtaaggaagaatccagtgaaaagttcagg

SEQ ID NO: 116682 - DNA, 3715 bp, Homo sapiens
  Payload ID: 2752
  Gene Symbol: CSPP1
  Gene Name: centrosome and spindle pole associated protein 1
  Uniprot ID: Q1MSJ5
  ENST ID: ENST00000519668
  CDS Start-End: 1067-3697
cagtcagaccgctaacaggagaaatggaatattaagtatagtatattgttccccctcaccttttctcatttcttcctctgtctcaggcactcattcatatattcatttgcagatttattcaatgaacattttcttgggttaaagttatgtgccagcattataaaattgaatagcgcatgggccttgccttcatagattttatagtttagttttatatatgatgttccattctgaacatgagaatcaaaactttctctccttaggcttaaattctgtatctttaaaaaaaggtttagattccttcaaaaggaaacagttcctttctaggatgatttaaaattccaagcatatggaatgctttagtttcttttggaagagagttagaagcatgtgtaagaggtgtccctaaggaatcctctgttataccctctatcatcaaggagttaaataggccagaaatgtttatcaagagaattccagtgttgatagcggaattgattatggattaagtttaccacttggagaagactatgaacggaagaaacataaattaaaagaagaattgcggcaagattacagacgttatcttactcaggaaaggttgaaacttgaacgtaacaaagaatacaatcagtttctcaggggtaaggaagaatccagtgaaaagttcaggcaggtggaaaagagtactgagcccaagagtcagagaaataaaaaacctattggtcaagttaagcctgatctaacttcacaaatacagacatcttgtgaaaattcagagggtcctagaaaagatgtcttaactccttcagaggcatatgaagaacttctgaaccaaagacgactagaggaggacagataccgacaactagatgatgaaatcgaattaaggaatagaagaattattaaaaaagcaaatgaagaagtgggcatttccaacctaaaacatcaaaggtttgcaagcaaggctggcattccagatagaagatttcacagatttaatgaggatcgtgtttttgatagacggtatcatagaccagaccaagatcctgaagtaagtgaagaaatggatgagaggtttagatatgaaagtgattttgatagaagactttcgagagtgtatacaaatgacaggatgcacaggaacaaacgagggaatatgcctcctatggaacatgatggggatgttatagaacagtcaaacataagaatttcatctgctgaaaataaaagtgctccagacaatgaaacatccaaatctgctaatcaagatacctgtagtccttttgcagggatgctctttggaggtgaagatcgagaacttattcagagaaggaaagagaaatacagactagaactgttggaacaaatggctgagcaacagaggaacaagagacgagaaaaagatttagaactcagggttgcagcgtctggagcacaagaccctgagaaatcgcctgatagactaaagcagtttagtgtggcaccaagacactttgaagagatgataccacctgaaagacccagaatagctttccagacacctctccctcctttatctgccccatctgtcccacccatcccatcagttcatcctgttccttctcaaaatgaagatttgcgcagtggactcagcagcgcccttggtgaaatggtgtctcccaggattgcacctctgcctccacctcccctactaccacctttggctactaactatcgaactccttatgatgatgcatactatttttatgggtccaggaatactttcgatcccagtcttgcttattatggttcaggaatgatgggcgtacagcctgcagcttatgttagtgctcctgtcacccaccaactagcacaacctgttgtgaatacggttggacagaatgaactgaagattacaagtgatcaagtgataaattcaggattgatttttgaagataaaccgaaaccttccaaacagtcacttcagtcttaccaagaggctttgcagcagcagattcgggaaagagaagaaagaaggaagaaagaacgtgaagaaaaagaagaatatgaagctaaattagaagctgaaatgagaacatataatccctggggaaaaggtggaggtggtgctcctctcagggatgcaaaaggaaatctgataagtcatatgcaaacacagagctctccttttgctcggggaaatgtatttggtgagcctccaactgaacttcagattaaacagcaagaattatacaagaattttcttcgtttccagattgaggaaaagaaacaaagagaggaagcagagcgagagagactgagaattgcagaagaaaaagaagaaagacggcttgcagaacagagggcacgaattcagcaggagtatgaagaggaacaggaaaagaaaagagagaaagaggaggagcaaaggctaaaaaatgaagagcatattcggttagctgaagaaagacaaaaagaagcagaaagaaagaagaaagaagaagaagaaaaatataacctgcaacttcagcactactgtgaaagagacaatttgattggggaagaaacaaagcacatgagacagccttctcctatagttcctgctcttcagaacaaaattgcaagcaaactccaaagacctccttcagttgacagcatcatacgttcctttattcatgaaagttccatgtccagggcacagtcacccccggtacctgccaggaaaaatcagctccgtgcagaagaggagaaaaaaaatgtaattatggaattatcagaaatgagaaaacagcttcgtagtgaagagaggcgtctacaagagcgattgctacacatggacagtgatgatgaaattcctatcaggaaaaaggaaaggaatcccatggatatatttgatatggctagacatcggttgcaagctcctgtcagaagacagtcccctaagggcttagacgctgccacttttcagaatgttcatgattttaatgagctgaaagatagagattcagaaacacgagttgatctgaaatttatgtacctggatcctccaagagatcatcacaccttagagattcagcagcaagccctgctaagagagcagcagaagaggctgaacagaataaaaatgcaggaaggtgccaaagttgacttagatgccatcccaagtgctaaagtacgagagcaaagaatgcccagagatgacactagtgatttcttgaaaaactcattattggaatctgatagtgcttttattggggcttacggtgagacatatcctgccattgaagatgacgtcctccctccaccatcacagttgccctctgcacgggagcgcaggaggaacaaatggaaaggactagacattgatagcagtcgtcctaatgtagcaccagatggtctctctctaaaatctatatccagtgtaaatgttgatgagcttagagtgagaaatgaggaacgaatgcgaagactgaatgaatttcacaataaacctattaatacagatgatgagagttcactggttgaccctgatgacatcatgaaacacataggggatgacggatcaaactctgtagcaactgagccctggctccgccctggcacttcagaaacgctgaaacgtttcatggcagagcagctgaaccaggagcagcagcagattcctggaaaaccaggcactttcacttggcagggcctgtcgactgcacatggttaaaataaacctgtactggac

SEQ ID NO: 116683 - DNA, 2090 bp, Homo sapiens
  Payload ID: 2753
  Gene Symbol: CEP295NL
  Gene Name: CEP295 N-terminal like
  Uniprot ID: Q96MC4
  ENST ID: ENST00000322630
  CDS Start-End: 167-2032
atgagtagccagccagggcagaggccgggctgcaggtggaggcggggaagcgattccggccacctttgtgatgggcgtctcactacctacaaagtcagcccagtgatttcaagacagccctggagacagtgcttcctgccctcctgtcagcttctgcctccctgtaatgtgttctgggtggtctagctcagtcatctggagacacacacagtttgctgtggaacgttgtggcttctgtggctcctcaggcccgggggcgccccttgaaccctccactcttggctccaagcaccttccctgggaagctgtatctgctgggttcgcagacaggaacagaaacatggatggagccatgtggctgagcctctgtcctgataacgaagacctgctttggaggaaaaagcacaaattgctacaagcccggggcaaaggcgatctcgctctgcagagaagagcggatgccaagctgtggaaaaactaccagctccagcgcttggctgaggagttgaggagagggtatcaggaggcacagcacctgcacgtcggtggcctggacaggctgcagtcagcacgtctgttgggctggggaggaggacgggccagggaaaatgagcctgactcgcaggggcccatccagcgaagatcagccaggcccccgagggccaaggagaagcatagagcagcccttagtgaagagaggagttgcagggaagagttgggccagcaacaccccaggcactccaggccccggaagacagcagcgagtccagagaaaccacagactacaaaagccacgggtcggatgaattctcacctggccccgcctgagaagagaaagggaaggccagaaccttcgaccaagtctgggggtggccgctgtgccatccatcctcggaggagcaaaggggcggacctagaaaggtcaaacccactcgtggctgctgtgggagaaatcgggcttgtggaggaaaaagagaaaggaacagctcgggcggggaggaggcaactgggaaagggggcagtttgctttgttccagccctgaccagtcgctctcagggacagagtctggaggggaagctgagagacctcgggcagctgtggccagctgattccagctgcagaagggaagccgtgtccccagcatctcagtgcacgctccgggagaagaacaagtggcagaaagagctggagttggcctttgaagagttgtttaatataaacagaaagctgaaaaaacacctgtgcttgtacctggcactgaagcccaggatggaccagagacctggggaagggcatgccttctcagagatgcaagagtgtggcgctgggaccccaagagggaagaaaatggcagacccagagatgctgcctgccggggaacccaggagcccagcagaggaggaggcgcagcaggcagcgtccaagaccgacttgaaaacgttcatgggcaaggcccagaaccaaaaatatcagggcacggtcaagcccacgtttagaaatggaagtcaaacattgtctcccgaggcaggtatatttatcaacaaagaggactcattattgtatagcactgaatctggacaagagacccccaaactgggcacgctggcagagggctcccttcagctccaccttcaagaccaggcagacagagtgggctcgacggcatccaggcaaaggcagaaagcagagatggagcagagaagacaaaaacaactggaatcgcttgaacaaatggaacacccagatatgagcttggaaatccactacaaagctgagctagaaaaagagaggagggagcaaagaagagctcgactggcccatctgaagtcctcctccacgagagcccaggaaagggagagaggatctgagctcagcaccacttccccatcgggcaccagcctcgccgacgacgaccggcacagtcagatgatccgagaccagcagcagcagatcttacagcaaaacaggttgcacaagcagtttcttgaagaagcccggaaatgcttgcgggagtttcagaacatatgctaaatgcgagaggcccacccggggtaaatacatcactgataatggtgctgccagcactggt

SEQ ID NO: 116684 - DNA, 711 bp, Homo sapiens
  Payload ID: 2753
  Gene Symbol: CEP295NL
  Gene Name: CEP295 N-terminal like
  ENST ID: ENST00000586713
  CDS Start-End: 615-711
ggcaacagcctgctatgagtagccagccagggcagaggccgggctgcaggtggaggcggggaagcgattccggccacctttgtgatgggcgtctcactacctacaaagtcagcccagtgatttcaagacagccctggagacagtgcttcctgccctcctgtcagcttctgcctccctgtaatgtgttctgggtggtctagctcagtcatctggagacacacacaagcacaggcacttcgtagctgttgaccatcatttagctccacgtctgcccgtcggttcctcgtgcgtggaatccagcaccacgtgggtgtctctgccgagctctcggcatttcctgagccctcccggaagccagactctgttctcggcgcttcacacgggccgtctcgtctgatgctgtggcgtcctgcagggtgggaacgggcggtgcccgtggacgtggcgctgtgcctgccggcgtcctgggcaccacagcgttgccgcttgcccactgcctcctagcatggccagtgatcagggccaaagcggtcagtgagaaggaagtggactctggaaacgacatttatggcaaccctatcaagaggatccagtatgagatcaagcagataaagatgttcaaagggcctgagaaggatatagagtttatctacacggccccctcctcggcagtgtgtggggtctcgctggacgttggaggaaagaaggaat

SEQ ID NO: 116685 - DNA, 1866 bp, Homo sapiens
  Payload ID: 2753
  Gene Symbol: CEP295NL
  Gene Name: CEP295 N-terminal like
  Uniprot ID: Q96MC4
  ENST ID: ENST00000619342
  CDS Start-End: 1-1866
atgtgttctgggtggtctagctcagtcatctggagacacacacagtttgctgtggaacgttgtggcttctgtggctcctcaggcccgggggcgccccttgaaccctccactcttggctccaagcaccttccctgggaagctgtatctgctgggttcgcagacaggaacagaaacatggatggagccatgtggctgagcctctgtcctgataacgaagacctgctttggaggaaaaagcacaaattgctacaagcccggggcaaaggcgatctcgctctgcagagaagagcggatgccaagctgtggaaaaactaccagctccagcgcttggctgaggagttgaggagagggtatcaggaggcacagcacctgcacgtcggtggcctggacaggctgcagtcagcacgtctgttgggctggggaggaggacgggccagggaaaatgagcctgactcgcaggggcccatccagcgaagatcagccaggcccccgagggccaaggagaagcatagagcagcccttagtgaagagaggagttgcagggaagagttgggccagcaacaccccaggcactccaggccccggaagacagcagcgagtccagagaaaccacagactacaaaagccacgggtcggatgaattctcacctggccccgcctgagaagagaaagggaaggccagaaccttcgaccaagtctgggggtggccgctgtgccatccatcctcggaggagcaaaggggcggacctagaaaggtcaaacccactcgtggctgctgtgggagaaatcgggcttgtggaggaaaaagagaaaggaacagctcgggcggggaggaggcaactgggaaagggggcagtttgctttgttccagccctgaccagtcgctctcagggacagagtctggaggggaagctgagagacctcgggcagctgtggccagctgattccagctgcagaagggaagccgtgtccccagcatctcagtgcacgctccgggagaagaacaagtggcagaaagagctggagttggcctttgaagagttgtttaatataaacagaaagctgaaaaaacacctgtgcttgtacctggcactgaagcccaggatggaccagagacctggggaagggcatgccttctcagagatgcaagagtgtggcgctgggaccccaagagggaagaaaatggcagacccagagatgctgcctgccggggaacccaggagcccagcagaggaggaggcgcagcaggcagcgtccaagaccgacttgaaaacgttcatgggcaaggcccagaaccaaaaatatcagggcacggtcaagcccacgtttagaaatggaagtcaaacattgtctcccgaggcaggtatatttatcaacaaagaggactcattattgtatagcactgaatctggacaagagacccccaaactgggcacgctggcagagggctcccttcagctccaccttcaagaccaggcagacagagtgggctcgacggcatccaggcaaaggcagaaagcagagatggagcagagaagacaaaaacaactggaatcgcttgaacaaatggaacacccagatatgagcttggaaatccactacaaagctgagctagaaaaagagaggagggagcaaagaagagctcgactggcccatctgaagtcctcctccacgagagcccaggaaagggagagaggatctgagctcagcaccacttccccatcgggcaccagcctcgccgacgacgaccggcacagtcagatgatccgagaccagcagcagcagatcttacagcaaaacaggttgcacaagcagtttcttgaagaagcccggaaatgcttgcgggagtttcagaacatatgctaa

SEQ ID NO: 116686 - DNA, 4450 bp, Homo sapiens
  Payload ID: 2754
  Gene Symbol: CERK
  Gene Name: ceramide kinase
  Uniprot ID: Q8TCT0
  ENST ID: ENST00000216264
  CDS Start-End: 114-1727
ccgcctcccgccgcccgccgcccgccgcccgggccactgcaggggccgctaacggtccggcgcccctcggcgtccgcgcgcccccagcctggcggacgagcccggcggcggagatgggggcgacgggggcggcggagccgctgcaatccgtgctgtgggtgaagcagcagcgctgcgccgtgagcctggagcccgcgcgggctctgctgcgctggtggcggagcccggggcccggagccggcgcccccggcgcggatgcctgctctgtgcctgtatctgagatcatcgccgttgaggaaacagacgttcacgggaaacatcaaggcagtggaaaatggcagaaaatggaaaagccttacgcttttacagttcactgtgtaaagagagcacgacggcaccgctggaagtgggcgcaggtgactttctggtgtccagaggagcagctgtgtcacttgtggctgcagaccctgcgggagatgctggagaagctgacgtccagaccaaagcatttactggtatttatcaacccgtttggaggaaaaggacaaggcaagcggatatatgaaagaaaagtggcaccactgttcaccttagcctccatcaccactgacatcatcgttactgaacatgctaatcaggccaaggagactctgtatgagattaacatagacaaatacgacggcatcgtctgtgtcggcggagatggtatgttcagcgaggtgctgcacggtctgattgggaggacgcagaggagcgccggggtcgaccagaaccacccccgggctgtgctggtccccagtagcctccggattggaatcattcccgcagggtcaacggactgcgtgtgttactccaccgtgggcaccagcgacgcagaaacctcggcgctgcatatcgttgttggggactcgctggccatggatgtgtcctcagtccaccacaacagcacactccttcgctactccgtgtccctgctgggctacggcttctacggggacatcatcaaggacagtgagaagaaacggtggttgggtcttgccagatacgacttttcaggtttaaagaccttcctctcccaccactgctatgaagggacagtgtccttcctccctgcacaacacacggtgggatctccaagggataggaagccctgccgggcaggatgctttgtttgcaggcaaagcaagcagcagctggaggaggagcagaagaaagcactgtatggtttggaagctgcggaggacgtggaggagtggcaagtcgtctgtgggaagtttctggccatcaatgccacaaacatgtcctgtgcttgtcgccggagccccaggggcctctccccggctgcccacttgggagacgggtcttctgacctcatcctcatccggaaatgctccaggttcaattttctgagatttctcatcaggcacaccaaccagcaggaccagtttgacttcacttttgttgaagtttatcgcgtcaagaaattccagtttacgtcgaagcacatggaggatgaggacagcgacctcaaggagggggggaagaagcgctttgggcacatttgcagcagccacccctcctgctgctgcaccgtctccaacagctcctggaactgcgacggggaggtcctgcacagccctgccatcgaggtcagagtccactgccagctggttcgactctttgcacgaggaattgaagagaatccgaagccagactcacacagctgagaagccggcgtcctgctcacaaactgggaaagtgtgaaaactatttaagataattattacagaccaattatgttgatatatacatttaaatgtagaaatttatttttgatagttaaatcttgattttagaagaaaacccttttgtcaacaattttgtgtacatatttggcattttcagttctgtacgcatctgcgggttgcagcccacgccgcttactctcagcggatgcagctgctcacttgggggcactggcctcttaggttttaacgatgtcaacagtgtagtttagaaaatggcccgttagtggctctattgcaataatgttagggacattatatgatttccacgcaggtcacaccatctgggcctgaggtagcagtgggtcactttgatccactttgcaggacttattctgtaacggtttgtggccaagttttgggaagtggttgattctctttgccttcatttcaccttcctcttcgtttacggttaggacatcgctgcttgatccttacaatactgtgcaactgcaatgcaacgtggccctgcttcaggtgatccgcgggaggggcctccacgccagcgccgggaaggctgctggggcctccacacctgcctcatcacggcggcgaggctacgacaatccggctgggagcatgaccttggcgtctgttctgggagcacggatgataagctctggaagctggcagtgtgtaaagcactggcaagtttgttactgttaaaatgtcaaataccaatgctttatatcgacgcgaagtgcttaacacagccgggcttgggggcagtcaggaggaagctggccatccgtggaggaggggccggtcctggactcccgcaggactcctctgaggcagggcctgaagtctgtacacgtggtccagatttgtccttgtcttttcttcacactgagttctctatatttattgaacatcttgtccttttaagccagagtagtgtaaactgcgtctcggatgtctgtcttttgcctcgaagccacgatggatcgctggtttcctctgcagcgcgagggctccggcgaccagaggattcttcccggaaggcattcctgccgcgctccccggggcacccctcaattgtgtactacgtccttgtttagtgtgtatccgtgcccacgtagatgatgtctgtaacgtagttttgtttgaaatatgagaatatgcggcttaaactttgatctgtaaggagcggggccgtggccgtttggagcacgctgtagacaccgttcctcatgctgccgggtgggttttgcagaagctcccttagtgatttcatgtttaacaggcagcatccattttcagaatttcctggcattgatttatattttgaagcatacaggaaacttctcgtttcctcgtttagccccacccagatcaggtgaaagggcagctttaatggtggtttttatggaccacattatcagagagcactgtgcaagccaaatggttcaataatgaatgaaaattctgggtgtaaagagtaaatatgccctggctctttctaccaatgtttgctcctggttggaaagaaaccaaagatttaagacgggctgctcttccagactggctgtgcctgcctgtgcccagcaacctgtgcagccggcagtgtgcctggtgtcacgccaggaggctgtggctgctgtgggccctctggaattgtgctcctcacaaagtttccccaaaaggttcttctaagcctttattgtccctggtaaatgtttcccggctgggcgcggtggctcacgcctgtaatcccagcactttgggaggccgaggcgggtggatcacctaaggtcaggagtttgagatcagcctgcccaacatggtgaaacctcgtctctactaaaaatacacaacttagccagtcttgttggcgcacgcctgtaatctcagctactagggatgctgaggcaggagaatcgcttgaacccaagaaagaggtggaggttgcggtgagccaagattgcgccactgcactccagcctgggcaaacagagggagactccatcgccccccccaacaaaaaaaaaagtttcccatacactggcctgccccaaaacccactaacaattttagcaaaacagtccaggccaaagaggaagcatttcatgttcaataagaaacccagccattccgcatggctggttcctgagtggctctggtgatactctccagccacctgctgacattcagaatctcagacctcgggactgctgttgcggtaccgtgtgtctgacacctgccagcagccctttgctatctgcgcgcaggatgggggtgactgcccagacattcccgctagataggctctgatttccggggcagcctttcagatgcggcagacatacaacacctgtactttagagttttaagggaaaaaaaatcagaagtgctggttagatagtaaaaacttaggataacttagaaaggctagttttagcttcctttgtggctccctggtgcaaaacaattagcagttatgcaatggacctgattctagtttattctaattaagaagtgaggccgagtttgacttcgttcctgaatacaatcttgagtaactgggaaagtctgagtgaaaggatggcctcattctctttctaatcttgctggtttcaagattagaaaatggcattatttgatctgaaatgtttgagaagacacgaataaagttacttgggcag

SEQ ID NO: 116687 - DNA, 1760 bp, Homo sapiens
  Payload ID: 2754
  Gene Symbol: CERK
  Gene Name: ceramide kinase
  ENST ID: ENST00000443629
  CDS Start-End: 60-617
gtccggcgcccctcggcgtccgcgcgcccccagcctggcggacgagcccggcggcggagatgggggcgacgggggcggcggagccgctgcaatccgtgctgtgggtgaagcagcagcgctgcgccgtgagcctggagcccgcgcgggctctgctgcgctggtggcggagcccggggcccggagccggcgcccccggcgcggatgcctgctctgtgcctgtatctgagatcatcgccgttgaggaaacagacgttcacgggaaacatcaaggcagtggaaaatggcagaaaatggaaaagccttacgcttttacagttcactgtgtaaagagagcacgacggcaccgctggaagtgggcgcaggtgactttctggtgtccagaggagcagctgtgtcacttgtggctgcagaccctgcgggagatgctggagaagctgacgtccagaccaaagcatttactggtatttatcaacccgtttggaggaaaaggacaaggcaagcggatatatgaaagaaaagtggcaccactgttcaccttagcctccatcaccactgacatcatcgcatcgtctgtgtcggcggagatggtatgttcagcgaggtgctgcacggtctgattgggaggacgcagaggagcgccggggtcgaccagaaccacccccgggctgtgctggtccccagtagcctccggattggaatcattcccgcagggtcaacggactgcgtgtgttactccaccgtgggcaccagcgacgcagaaacctcggcgctgcatatcgttgttggggactcgctggccatggatgtgtcctcagtccaccacaacagcacactccttcgctactccgtgtccctgctgggctacggcttctacggggacatcatcaaggacagtgagaagaaacggtggttgggtcttgccagatacgacttttcaggtttaaagaccttcctctcccaccactgctatgaagggacagtgtccttcctccctgcacaacacacggtgggatctccaagggataggaagccctgccgggcaggatgctttgtttgcaggcaaagcaagcagcagctggaggaggagcagaagaaagcactgtatggtttggaagctgcggaggacgtggaggagtggcaagtcgtctgtgggaagtttctggccatcaatgccacaaacatgtcctgtgcttgtcgccggagccccaggggcctctccccggctgcccacttgggagacgggtcttctgacctcatcctcatccggaaatgctccaggttcaattttctgagatttctcatcaggcacaccaaccagcaggaccagtttgacttcacttttgttgaagtttatcgcgtcaagaaattccagtttacgtcgaagcacatggaggatgaggacagcgacctcaaggagggggggaagaagcgctttgggcacatttgcagcagccacccctcctgctgctgcaccgtctccaacagctcctggaactgcgacggggaggtcctgcacagccctgccatcgaggtcagagtccactgccagctggttcgactctttgcacgaggaattgaagagaatccgaagccagactcacacagctgagaagccggcgtcctgctcacaaactgggaaagtgtgaaaactatttaagataattattacagaccaattatgttgatatatacatttaaatgtagaaatttatttttgatagttaaatcttgattttagaagaaaacccttttgtcaacaa

SEQ ID NO: 116688 - DNA, 1677 bp, Homo sapiens
  Payload ID: 2755
  Gene Symbol: CERKL
  Gene Name: ceramide kinase-like
  Uniprot ID: Q49MI3
  ENST ID: ENST00000339098
  CDS Start-End: 1-1677
atgccctggaggaggcgcaggaaccgggtgagtgccctggagggcggccgggaggaagaggcgcccccggaggctgccgctgtgcctccggcgctgttaacgtccccgcagcagacggaggcggcggccgagcggattctgctccggggcatcttcgagatcgggagggacagttgtgacgtggtgctgagcgagcgagcactgcggtggcggcccattcagcccgagcgcccggcgggtgattctaagtatgacttgctatgtaaagaagaatttattgaactcaaagacatattctctgtgaaactgaaacggcgttgttctgttaaacagcagagaagtggtactttattaggtatcacactcttcatctgcttgaaaaaggaacaaaataaactaaagaattctacacttgatcttattaatttaagtgaagaccactgtgacatatggtttagacagttcaagaaaatattggcaggctttccaaacagaccgaagtcattaaaaatactccttaacccccaaagtcacaaaaaagaagctacccaggtttattatgagaaggttgaacctctgttgaagcttgcaggaataaaaactgatgtaacaataatggaatatgaagggcacgctctgtcactgcttaaggaatgtgaactccagggatttgatggtgggcatcggaaaccattgttcgcaatacattggagtgtacagagattgttcactggcatgcaaacgttagaaccaagtgttgtctgtgttggtggagatggatctgctagcgaagtagcccatgctttgcttctgagagctcagaagaatgctgggatggaaacagaccgaatcctgactcctgtcagagcacagcttccacttggcttaataccagcaggatctaccaatgtattggcacattctcttcatggagttcctcatgtgataactgcaacattgcacattataatggggcatgtacagctggtcgacgtctgcaccttcagcaccgctggcaagcttcttcgctttgggttctcagccatgtttggctttggtggaagaactttggctctggcagaaaaatatcgatggatgtcccctaaccaacggagagattttgctgttgttaaggcactggcaaaacttaaggcagaagactgtgaaatatcatttttaccatttaacagctctgatgatgtgcaagaaaggagggcacagggatctcccaaatctgactgtaatgatcaatggcaaatgatccagggtcagttcttgaatgtcagcattatggcaattccttgcctgtgttcagtggcacctagaggcttggcacctaataccagattaaataatggaagtatggctcttataattgcccgaaacacttctcggccagaatttataaaacacctgaaaagatatgccagtgtaaaaaatcagttcaattttccatttgttgagacttacactgttgaggaagtaaaagttcatccaaggaataatactggtggatataatccagaggaggaggaggatgaaactgcttcagaaaattgtttcccttggaatgtagatggtgacttaatggaagttgcatcagaggtccatattagattgcatccaagacttatcagtctttatggaggaagcatggaagaaatgattccaaagtaa

SEQ ID NO: 116689 - DNA, 1535 bp, Homo sapiens
  Payload ID: 2755
  Gene Symbol: CERKL
  Gene Name: ceramide kinase-like
  Uniprot ID: Q49MI3
  ENST ID: ENST00000374967
  CDS Start-End: 1-654
atgccctggaggaggcgcaggaaccgggtgagtgccctggagggcggccgggaggaagaggcgcccccggaggctgccgctgtgcctccggcgctgttaacgtccccgcagcagacggaggcggcggccgagcggattctgctccggggcatcttcgagatcgggagggacagttgtgacgtggtgctgagcgagcgagcactgcggtggcggcccattcagcccgagcgcccggcgggtgattctaagtatgacttgctatgtaaagaagaatttattgaactcaaagacatattctctgtgaaactgaaacggcgttgttctgttaaacagcagagaagtggtactttattaggtatcacactcttcatctgcttgaaaaaggaacaaaataaactaaagaattctacacttgatcttattaatttaagtgaagaccactgtgacatatggtttagacagttcaagaaaatattggcaggctttccaaacagaccgaagtcattaaaaatactccttaacccccaaagtcacaaaaaagaagctacccaggtttattatgagaaggttgaacctctgttgaagcttgcaggaataaaaactgatgtaacaatgttgtctgtgttggtggagatggatctgctagcgaagtagcccatgctttgcttctgagagctcagaagaatgctgggatggaaacagaccgaatcctgactcctgtcagagcacagcttccacttggcttaataccagcaggatctaccaatgtattggcacattctcttcatggagttcctcatgtgataactgcaacattgcacattataatggggcatgtacagctggtcgacgtctgcaccttcagcaccgctggcaagcttcttcgctttgggttctcagccatgtttggctttggtggaagaactttggctctggcagaaaaatatcgatggatgtcccctaaccaacggagagattttgctgttgttaaggcactggcaaaacttaaggcagaagactgtgaaatatcatttttaccatttaacagctctgatgatgtgcaagaaaggagggcacagggatctcccaaatctgactgtaatgatcaatggcaaatgatccagggtcagttcttgaatgtcagcattatggcaattccttgcctgtgttcagtggcacctagaggcttggcacctaataccagattaaataatggaagtatggctcttataattgcccgaaacacttctcggccagaatttataaaacacctgaaaagatatgccagtgtaaaaaatcagttcaattttccatttgttgagacttacactgttgaggaagtaaaagttcatccaaggaataatactggtggatataatccagaggaggaggaggatgaaactgcttcagaaaattgtttcccttggaatgtagatggtgacttaatggaagttgcatcagaggtccatattagattgcatccaagacttatcagtctttatggaggaagcatggaagaaatgattccaaagtaa

SEQ ID NO: 116690 - DNA, 1330 bp, Homo sapiens
  Payload ID: 2755
  Gene Symbol: CERKL
  Gene Name: ceramide kinase-like
  Uniprot ID: Q49MI3
  ENST ID: ENST00000374969
  CDS Start-End: 1-1260
atgccctggaggaggcgcaggaaccgggtgagtgccctggagggcggccgggaggaagaggcgcccccggaggctgccgctgtgcctccggcgctgttaacgtccccgcagcagacggaggcggcggccgagcggattctgctccggggcatcttcgagatcgggagggacagttgtgacgtggtgctgagcgagcgagcactgcggtggcggcccattcagcccgagcgcccggcgggtgattctaagtatgacttgctatgtaaagaagaatttattgaactcaaagacatattctctgtgaaactgaaacggcgttgttctgttaaacagcagagaagtggtactttattaggtatcacactcttcatctgcttgaaaaaggaacaaaataaactaaagaattctacacttgatcttattaatttaagtgaagaccactgtgacatatggtttagacagttcaagaaaatattggcaggatctaccaatgtattggcacattctcttcatggagttcctcatgtgataactgcaacattgcacattataatggggcatgtacagctggtcgacgtctgcaccttcagcaccgctggcaagcttcttcgctttgggttctcagccatgtttggctttggtggaagaactttggctctggcagaaaaatatcgatggatgtcccctaaccaacggagagattttgctgttgttaaggcactggcaaaacttaaggcagaagactgtgaaatatcatttttaccatttaacagctctgatgatgtgcaagaaaggagggcacagggatctcccaaatctgactgtaatgatcaatggcaaatgatccagggtcagttcttgaatgtcagcattatggcaattccttgcctgtgttcagtggcacctagaggcttggcacctaataccagattaaataatggaagtatggctcttataattgcccgaaacacttctcggccagaatttataaaacacctgaaaagatatgccagtgtaaaaaatcagttcaattttccatttgttgagacttacactgttgaggaagtaaaagttcatccaaggaataatactggtggatataatccagaggaggaggaggatgaaactgcttcagaaaattgtttcccttggaatgtagatggtgacttaatggaagttgcatcagaggtccatattagattgcatccaagacttatcagtctttatggaggaagcatggaagaaatgattccaaagtaacatgtaattgtttctaaaagaaatgtacaaactagaattttaatataaagaaatgtggccatgctttaaa

SEQ ID NO: 116691 - DNA, 1392 bp, Homo sapiens
  Payload ID: 2755
  Gene Symbol: CERKL
  Gene Name: ceramide kinase-like
  Uniprot ID: Q49MI3
  ENST ID: ENST00000374970
  CDS Start-End: 1-1392
atgccctggaggaggcgcaggaaccgggtgagtgccctggagggcggccgggaggaagaggcgcccccggaggctgccgctgtgcctccggcgctgttaacgtccccgcagcagacggaggcggcggccgagcggattctgctccggggcatcttcgagatcgggagggacagttgtgacgtggtgctgagcgagcgagcactgcggtggcggcccattcagcccgagcgcccggcgggtgattctaagtatgacttgctatgtaaagaagaatttattgaactcaaagacatattctctgtgaaactgaaacggcgttgttctgttaaacagcagagaagtggtactttattaggtatcacactcttcatctgcttgaaaaaggaacaaaataaactaaagaattctacacttgatcttattaatttaagtgaagaccactgtgacatatggtttagacagttcaagaaaatattggcaggctttccaaacagaccgaagtcattaaaaatactccttaacccccaaagtcacaaaaaagaagctacccaggtttattatgagaaggttgaacctctgttgaagcttgcaggaataaaaactgatgtaacaagatctaccaatgtattggcacattctcttcatggagttcctcatgtgataactgcaacattgcacattataatggggcatgtacagctggtcgacgtctgcaccttcagcaccgctggcaagcttcttcgctttgggttctcagccatgtttggctttggtggaagaactttggctctggcagaaaaatatcgatggatgtcccctaaccaacggagagattttgctgttgttaaggcactggcaaaacttaaggcagaagactgtgaaatatcatttttaccatttaacagctctgatgatgtgcaagaaaggagggcacagggatctcccaaatctgactgtaatgatcaatggcaaatgatccagggtcagttcttgaatgtcagcattatggcaattccttgcctgtgttcagtggcacctagaggcttggcacctaataccagattaaataatggaagtatggctcttataattgcccgaaacacttctcggccagaatttataaaacacctgaaaagatatgccagtgtaaaaaatcagttcaattttccatttgttgagacttacactgttgaggaagtaaaagttcatccaaggaataatactggtggatataatccagaggaggaggaggatgaaactgcttcagaaaattgtttcccttggaatgtagatggtgacttaatggaagttgcatcagaggtccatattagattgcatccaagacttatcagtctttatggaggaagcatggaagaaatgattccaaagtaa

SEQ ID NO: 116692 - DNA, 3208 bp, Homo sapiens
  Payload ID: 2755
  Gene Symbol: CERKL
  Gene Name: ceramide kinase-like
  Uniprot ID: Q49MI3
  ENST ID: ENST00000410087
  CDS Start-End: 102-1700
gcagcgctggacgcggctagagctggggctgccgcgccctccacctccttctccaaaggcctccccggacccctggctcgggcccagcctgcgactccgccatgccctggaggaggcgcaggaaccgggtgagtgccctggagggcggccgggaggaagaggcgcccccggaggctgccgctgtgcctccggcgctgttaacgtccccgcagcagacggaggcggcggccgagcggattctgctccggggcatcttcgagatcgggagggacagttgtgacgtggtgctgagcgagcgagcactgcggtggcggcccattcagcccgagcgcccggcgggtgattctaagtatgacttgctatgtaaagaagaatttattgaactcaaagacatattctctgtgaaactgaaacggcgttgttctgttaaacagcagagaagtggtactttattaggtatcacactcttcatctgcttgaaaaaggaacaaaataaactaaagaattctacacttgatcttattaatttaagtgaagaccactgtgacatatggtttagacagttcaagaaaatattggcaggctttccaaacagaccgaagtcattaaaaatactccttaacccccaaagtcacaaaaaagaagctacccaggtttattatgagaaggttgaacctctgttgaagcttgcaggaataaaaactgatgtaacaataatggaatatgaagggcacgctctgtcactgcttaaggaatgtgaactccagggatttgatggtgttgtctgtgttggtggagatggatctgctagcgaagtagcccatgctttgcttctgagagctcagaagaatgctgggatggaaacagaccgaatcctgactcctgtcagagcacagcttccacttggcttaataccagcaggatctaccaatgtattggcacattctcttcatggagttcctcatgtgataactgcaacattgcacattataatggggcatgtacagctggtcgacgtctgcaccttcagcaccgctggcaagcttcttcgctttgggttctcagccatgtttggctttggtggaagaactttggctctggcagaaaaatatcgatggatgtcccctaaccaacggagagattttgctgttgttaaggcactggcaaaacttaaggcagaagactgtgaaatatcatttttaccatttaacagctctgatgatgtgcaagaaaggagggcacagggatctcccaaatctgactgtaatgatcaatggcaaatgatccagggtcagttcttgaatgtcagcattatggcaattccttgcctgtgttcagtggcacctagaggcttggcacctaataccagattaaataatggaagtatggctcttataattgcccgaaacacttctcggccagaatttataaaacacctgaaaagatatgccagtgtaaaaaatcagttcaattttccatttgttgagacttacactgttgaggaagtaaaagttcatccaaggaataatactggtggatataatccagaggaggaggaggatgaaactgcttcagaaaattgtttcccttggaatgtagatggtgacttaatggaagttgcatcagaggtccatattagattgcatccaagacttatcagtctttatggaggaagcatggaagaaatgattccaaagtaacatgtaattgtttctaaaagaaatgtacaaactagaattttaatataaagaaatgtggccatgctttaaacctgtggtccccaccctttttgggaccagtttcatggaagacaatttttccgtggatgggggaatggtttcaggatgaactgttccacctcagatcatcaggcattagattctcttgaggaacatggcactctagatccctcacataccagttcaccatatggttcgcacttctatgagaatctaatgctgctgctgatctgacagggggaggaactcagtaatgctccattgctctaacctcctgctgtgtggccaaacggatatcctaatagaaattgatgttactaacaattagcctctagggctttaaaagtcaagatgaaatatcaattcaaattctgtttttagatatcaattcaaattcttttttttacaatgtgtttattggacacacaaaaaaactttgcaaccatcataatacatcaatatttaacctagataattctgaaataatttggattctttcatttttcaggatttgagctcatcaattatgttaaatttcctatattctgttacaaatataatacagatttcataagtctgccttgattcactgctccctaatccagagcagttaaatttcaaaatcacatagttatatagcctacctgccaaaaaagaataacccatccctgtcttcttaaagtggtagggttttaaaattcatgatacaagtaacaaagtaagttgataacaaatactattttgaactgggcaaaatctagcccaatatgtaattgtgttccccttgtatctgagaggcctgtgttggacaaccatagtactctgctttcactgtgctcagataacctgaaatatatagttgtttctgagtagttctgagtaggaaagaaccaaatgtaaatttccttagagaccatcctggagaagacagttctaaatcggggcttgatttttcatctatgatcctagatgttctcctgaaagaatgactagcctttttataacgatacaaagttttttaaaaatacataaatgtcataaagtttattcctgtgtatacacactctgggttcaggaggttttgtgcttacatttcactactcaaatgccttcgcaaatctcagaacattcctcaccatcactgcaggcctgtgaacagataactttcatcaattaggatggctggctagtggcagggacttcatataaagaaatctttcccagaattgtttttccacattgccttctaatttgatcactccctataacagatgttcaaaattcggccacagctctcttatgaaggcagagtcagataaaatgatattctgcaattatctagatcataagcataaaataaatattacaaaaatgattgtatttaaagaaattttttaaaatccagaaagtcatttaaaatagaacctcatatagtatgaacaaactataaaaatattttacatttcatg

SEQ ID NO: 116693 - DNA, 2425 bp, Homo sapiens
  Payload ID: 2755
  Gene Symbol: CERKL
  Gene Name: ceramide kinase-like
  Uniprot ID: Q49MI3
  ENST ID: ENST00000409440
  CDS Start-End: 102-1646
gcagcgctggacgcggctagagctggggctgccgcgccctccacctccttctccaaaggcctccccggacccctggctcgggcccagcctgcgactccgccatgccctggaggaggcgcaggaaccgggtgagtgccctggagggcggccgggaggaagaggcgcccccggaggctgccgctgtgcctccggcgctgttaacgtccccgcagcagacggaggcggcggccgagcggattctgctccggggcatcttcgagatcgggagggacagttgtgacgtggtgctgagcgagcgagcactgcggtggcggcccattcagcccgagcgcccggcgggtgattctaagtatgacttgctatgtaaagaagaatttattgaactcaaagacatattctctgtgaaactgaaacggcgttgttctgttaaacagcagagaagtggtactttattaggtatcacactcttcatctgcttgaaaaaggaacaaaataaactaaagaattctacacttgatcttattaatttaagtgaagaccactgtgacatatggtttagacagttcaagaaaatattggcagtaatggaatatgaagggcacgctctgtcactgcttaaggaatgtgaactccagggatttgatggtgggcatcggaaaccattgttcgcaatacattggagtgtacagagattgttcactggcatgcaaacgttagaaccaagtgttgtctgtgttggtggagatggatctgctagcgaagtagcccatgctttgcttctgagagctcagaagaatgctgggatggaaacagaccgaatcctgactcctgtcagagcacagcttccacttggcttaataccagcaggatctaccaatgtattggcacattctcttcatggagttcctcatgtgataactgcaacattgcacattataatggggcatgtacagctggtcgacgtctgcaccttcagcaccgctggcaagcttcttcgctttgggttctcagccatgtttggctttggtggaagaactttggctctggcagaaaaatatcgatggatgtcccctaaccaacggagagattttgctgttgttaaggcactggcaaaacttaaggcagaagactgtgaaatatcatttttaccatttaacagctctgatgatgtgcaagaaaggagggcacagggatctcccaaatctgactgtaatgatcaatggcaaatgatccagggtcagttcttgaatgtcagcattatggcaattccttgcctgtgttcagtggcacctagaggcttggcacctaataccagattaaataatggaagtatggctcttataattgcccgaaacacttctcggccagaatttataaaacacctgaaaagatatgccagtgtaaaaaatcagttcaattttccatttgttgagacttacactgttgaggaagtaaaagttcatccaaggaataatactggtggatataatccagaggaggaggaggatgaaactgcttcagaaaattgtttcccttggaatgtagatggtgacttaatggaagttgcatcagaggtccatattagattgcatccaagacttatcagtctttatggaggaagcatggaagaaatgattccaaagtaacatgtaattgtttctaaaagaaatgtacaaactagaattttaatataaagaaatgtggccatgctttaaacctgtggtccccaccctttttgggaccagtttcatggaagacaatttttccgtggatgggggaatggtttcaggatgaactgttccacctcagatcatcaggcattagattctcttgaggaacatggcactctagatccctcacataccagttcaccatatggttcgcacttctatgagaatctaatgctgctgctgatctgacagggggaggaactcagtaatgctccattgctctaacctcctgctgtgtggccaaacggatatcctaatagaaattgatgttactaacaattagcctctagggctttaaaagtcaagatgaaatatcaattcaaattctgtttttagatatcaattcaaattcttttttttacaatgtgtttattggacacacaaaaaaactttgcaaccatcataatacatcaatatttaacctagataattctgaaataatttggattctttcatttttcaggatttgagctcatcaattatgttaaatttcctatattctgttacaaatataatacagatttcataagtctgccttgattcactgctccctaatccagagcagttaaatttcaaaatcacatagttatatagcctacctgccaaaaaagaataacccatccctgtcttcttaaagtggtagggttttaaaattcatgatacaagtaacaaagtaagttgataacaaatactat

SEQ ID NO: 116694 - DNA, 1403 bp, Homo sapiens
  Payload ID: 2755
  Gene Symbol: CERKL
  Gene Name: ceramide kinase-like
  Uniprot ID: Q49MI3
  ENST ID: ENST00000452174
  CDS Start-End: 1-522
atgccctggaggaggcgcaggaaccgggtgagtgccctggagggcggccgggaggaagaggcgcccccggaggctgccgctgtgcctccggcgctgttaacgtccccgcagcagacggaggcggcggccgagcggattctgctccggggcatcttcgagatcgggagggacagttgtgacgtggtgctgagcgagcgagcactgcggtggcggcccattcagcccgagcgcccggcgggtgattctaagtatgacttgctatgtaaagaagaatttattgaactcaaagacatattctctgtgaaactgaaacggcgttgttctgttaaacagcagagaagtggtactttattaggtatcacactcttcatctgcttgaaaaaggaacaaaataaactaaagaattctacacttgatcttattaatttaagtgaagaccactgtgacatatggtttagacagttcaagaaaatattggcagtgttgtctgtgttggtggagatggatctgctagcgaagtagcccatgctttgcttctgagagctcagaagaatgctgggatggaaacagaccgaatcctgactcctgtcagagcacagcttccacttggcttaataccagcaggatctaccaatgtattggcacattctcttcatggagttcctcatgtgataactgcaacattgcacattataatggggcatgtacagctggtcgacgtctgcaccttcagcaccgctggcaagcttcttcgctttgggttctcagccatgtttggctttggtggaagaactttggctctggcagaaaaatatcgatggatgtcccctaaccaacggagagattttgctgttgttaaggcactggcaaaacttaaggcagaagactgtgaaatatcatttttaccatttaacagctctgatgatgtgcaagaaaggagggcacagggatctcccaaatctgactgtaatgatcaatggcaaatgatccagggtcagttcttgaatgtcagcattatggcaattccttgcctgtgttcagtggcacctagaggcttggcacctaataccagattaaataatggaagtatggctcttataattgcccgaaacacttctcggccagaatttataaaacacctgaaaagatatgccagtgtaaaaaatcagttcaattttccatttgttgagacttacactgttgaggaagtaaaagttcatccaaggaataatactggtggatataatccagaggaggaggaggatgaaactgcttcagaaaattgtttcccttggaatgtagatggtgacttaatggaagttgcatcagaggtccatattagattgcatccaagacttatcagtctttatggaggaagcatggaagaaatgattccaaagtaa

SEQ ID NO: 116695 - DNA, 1395 bp, Homo sapiens
  Payload ID: 2755
  Gene Symbol: CERKL
  Gene Name: ceramide kinase-like
  Uniprot ID: Q49MI3
  ENST ID: ENST00000421817
  CDS Start-End: 19-540
ccagcctgcgactccgccatgccctggaggaggcgcaggaaccgggtgagtgccctggagggcggccgggaggaagaggcgcccccggaggctgccgctgtgcctccggcgctgttaacgtccccgcagcagacggaggcggcggccgagcggattctgctccggggcatcttcgagatcgggagggacagttgtgacgtggtgctgagcgagcgagcactgcggtggcggcccattcagcccgagcgcccggcgggtgattctaagtatgacttgctatgtaaagaagaatttattgaactcaaagacatattctctgtgaaactgaaacggcgttgttctgttaaacagcagagaagtggtactttattaggtatcacactcttcatctgcttgaaaaaggaacaaaataaactaaagaattctacacttgatcttattaatttaagtgaagaccactgtgacatatggtttagacagttcaagaaaatattggcagtgttgtctgtgttggtggagatggatctgctagcgaagtagcccatgctttgcttctgagagctcagaagaatgctgggatggaaacagaccgaatcctgactcctgtcagagcacagcttccacttggcttaataccagcaggatctaccaatgtattggcacattctcttcatggagttcctcatgtgataactgcaacattgcacattataatggggcatgtacagctggtcgacgtctgcaccttcagcaccgctggcaagcttcttcgctttgggttctcagccatgtttggctttggtggaagaactttggctctggcagaaaaatatcgatggatgtcccctaaccaacggagagattttgctgttgttaaggcactggcaaaacttaaggcagaagactgtgaaatatcatttttaccatttaacagctctgatgatgtgcaagaaagactgtaatgatcaatggcaaatgatccagggtcagttcttgaatgtcagcattatggcaattccttgcctgtgttcagtggcacctagaggcttggcacctaataccagattaaataatggaagtatggctcttataattgcccgaaacacttctcggccagaatttataaaacacctgaaaagatatgccagtgtaaaaaatcagttcaattttccatttgttgagacttacactgttgaggaagtaaaagttcatccaaggaataatactggtggatataatccagaggaggaggaggatgaaactgcttcagaaaattgtttcccttggaatgtagatggtgacttaatggaagttgcatcagaggtccatattagattgcatccaagacttatcagtctttatggaggaagcatggaagaaatgattccaaagtaa

SEQ ID NO: 116696 - DNA, 2094 bp, Homo sapiens
  Payload ID: 2756
  Gene Symbol: CERS1
  Gene Name: ceramide synthase 1
  Uniprot ID: P27544
  ENST ID: ENST00000429504
  CDS Start-End: 64-1077
gcgcggctccgtcggctaccgcgggcgggcgcaggcgacgggcacggcgggcgagcgggcggtatggcggcggcggggcccgcggcggggccgacggggcccgagcccatgccgagctacgcgcagctagtgcagcgcggctggggcagcgcgctggcggcggcgcggggctgcacggactgcggctgggggctggcgcgtcgcggcctggctgagcacgcgcacctggcgccgcccgagctgctgctgctggcgctcggcgcgctgggctggaccgccctgcgctccgcggccactgcgcgcctctttcggcccctggcgaagcggtgctgcctccagcccagagatgccgccaagatgcccgagagcgcttggaagtttctcttctacctgggcagctggagctacagtgcctacctgctgtttggcaccgactaccccttcttccatgacccaccatctgtcttctacgactggacgccgggcatggcagtgccacgggacattgcagccgcctacctgctccagggaagcttctatggccactccatctacgctacgctatacatggacacctggcgcaaggactcggtggtcatgctgctccaccacgtggtcactctcatcctcatcgtctcctcctacgccttccggtaccacaatgtgggcatccttgtgctcttcctgcacgatatcagtgacgtgcagcttgagttcaccaagctcaacatttacttcaagtcccgcggcggctcctaccatcggctgcatgccttggcagcagacttgggctgcctcagcttcggcttcagctggttctggttccgcctctactggttcccgctcaaggtcctgtatgccaccagtcactgcagtctgcgcacggtgcctgacatccccttctacttcttcttcaatgcgctcctgctgctgctcacccttatgaacctctactggttcctgtacatcgtggcgtttgcagccaaggtgttgacaggccaggtgcacgagctgaaggacctgcgggagtatgacacagccgaggcccagagcctgaagcccagcaaagccgagtgagtgtggaggggcccgcaccccgcgttccctcctttagtgtcacccgtccaagcgtgttcgtgggcaggcccccaagacccagcagcagatgaggccgacgcggatgctgccccccaagcctactccaaaacagagactgcaataaaggcgtggacgatgtggccagtaccctgaaggacaggacagtgaggaaggggagggagaggctggggaggggcaggcagggcgacaggcagggtctcagcggtagggacactgagggccaggcctagtggctggtgtggcgggagtggcgagccagggccctgtgggtggtgaggagtagttgctggccagcctggatgacgacctctgacccatgtcgccactggagctggtggcagtggggctggggaggaaggaacgccaagggccacagagagaacccaggctccatctgggccgagacatcctggcctctgagtttgacaggggagcccactgcccggccaaacaggagctggggctgggagctcagactcagtccagcccaggtgggagtcctggggaaggagatagcccacgagcctcaccagccctgggtgacagccagatggtgtccgaagccccaggcctggggcaggcagggggtgtctgggccagggatgaacggaggccaaactgggtaacaagcagagtcgggtgtgcagtgtctcataggcaacgtgaggagtgtttgagcaggagccggggcaggaggttgtggaaggccctggaaggtgccgaccagccaggccctctgatttggccggtgggggccatcggtgacgtgggaacgatggtttcagggaagcagtggctcagagctccgtgacgttttttggaacgggaggtgcgagatgcagacatttaacacatccggggctgtagccaggcagaggagcgtcagaccccccaccctgtttggaagggagaacccatcagattcgccttgggtgtagatgaaacagaaataaaagaatcaaagacgactcaaga

SEQ ID NO: 116697 - DNA, 1947 bp, Homo sapiens
  Payload ID: 2756
  Gene Symbol: CERS1
  Gene Name: ceramide synthase 1
  ENST ID: ENST00000542296
  CDS Start-End: 213-932
aggtgcgcctcccaacgccctggcgtgggccgtgtccttttgaagaatgagaatgtttcattgagcctacgcctcctgaatgcgggagggccacgggatggtcccaagactgtgccaaggcgtgccaggcctcgggtccttgagaaggagcgagggctccaagaacgcccctggcgaagcggtgctgcctccagcccagagatgccgccaagatgcccgagagcgcttggaagtttctcttctacctgggcagctggagctacagtgcctacctgctgtttggcaccgactaccccttcttccatgacccaccatctgtcttctacgactggacgccgggcatggcagtgccacgggacattgcagccgcctacctgctccagggaagcttctatggccactccatctacgctacgctatacatggacacctggcgcaaggactcggtggtcatgctgctccaccacgtggtcactctcatcctcatcgtctcctcctacgccttccggtaccacaatgtgggcatccttgtgctcttcctgcacgatatcagtgacgtgcagcttgagttcaccaagctcaacatttacttcaagtcccgcggcggctcctaccatcggctgcatgccttggcagcagacttgggctgcctcagcttcggcttcagctggttctggttccgcctctactggttcccgctcaaggtcctgtatgccaccagtcactgcagtctgcgcacggtgcctgacatccccttctacttcttcttcaatgcgctcctgctgctgctcacccttatgaacctctactggttcctgtacatcgtggcgtttgcagccaaggtgttgacaggccaggtgcacgagctgaaggacctgcgggagtatgacacagccgaggcccagagcctgaagcccagcaaagccgagtgagtgtggaggggcccgcaccccgcgttccctcctttagtgtcacccgtccaagcgtgttcgtgggcaggcccccaagacccagcagcagatgaggccgacgcggatgctgccccccaagcctactccaaaacagagactgcaataaaggcgtggacgatgtggccagtaccctgaaggacaggacagtgaggaaggggagggagaggctggggaggggcaggcagggcgacaggcagggtctcagcggtagggacactgagggccaggcctagtggctggtgtggcgggagtggcgagccagggccctgtgggtggtgaggagtagttgctggccagcctggatgacgacctctgacccatgtcgccactggagctggtggcagtggggctggggaggaaggaacgccaagggccacagagagaacccaggctccatctgggccgagacatcctggcctctgagtttgacaggggagcccactgcccggccaaacaggagctggggctgggagctcagactcagtccagcccaggtgggagtcctggggaaggagatagcccacgagcctcaccagccctgggtgacagccagatggtgtccgaagccccaggcctggggcaggcagggggtgtctgggccagggatgaacggaggccaaactgggtaacaagcagagtcgggtgtgcagtgtctcataggcaacgtgaggagtgtttgagcaggagccggggcaggaggttgtggaaggccctggaaggtgccgaccagccaggccctctgatttggccggtgggggccatcggtgacgtgggaacgatggtttcagggaagcagtggctcagagctccgtgacgttttttggaacgggaggtgcgagatgcagacatttaacacatccggggctgtagccaggcagaggagcgtcagaccccccaccctgtttggaagggagaacccatcagattcgccttgggtgtagatgaaacagaaataaaagaatcaaagacgactcaa

SEQ ID NO: 116698 - DNA, 749 bp, Homo sapiens
  Payload ID: 2756
  Gene Symbol: CERS1
  Gene Name: ceramide synthase 1
  ENST ID: ENST00000596048
  CDS Start-End: 1-649
tgcagccgcctacctgctccagggaagcttctatggccactccatctacgctacgctatacatggacacctggcgcaaggactcggtggtcatgctgctccaccacgtggtcactctcatcctcatcgtctcctcctacgccttccggtaccacaatgtgggcatccttgtgctcttcctgcacgatatcagtgacgtgcagcttgagttcaccaagctcaacatttacttcaagtcccgcggcggctcctaccatcggctgcatgccttggcagcagacttgggctgcctcagcttcggcttcagctggttctggttccgcctctactggttcccgctcaaggtcctgtatgccaccagtcactgcagtctgcgcacggtgcctgacatccccttctacttcttcttcaatgcgctcctgctgctgctcacccttatgaacctctactggttcctgtacatcgtggcgtttgcagccaaggtgttgacaggccaggtgcacgagctgaaggacctgcgggagtatgacacagccgaggcccagagcctgaagcccagcaaagccgaggaagcagtggctcagagctccgtgacgttttttggaacgggaggtgcgagatgcagacatttaacacatccggggctgtagccaggcagaggagcgtcagaccccccaccctgtttggaagggagaacccatcagattcgccttgggtgtagatgaaacagaaataaaagaatcaaagacg

SEQ ID NO: 116699 - DNA, 2517 bp, Homo sapiens
  Payload ID: 2756
  Gene Symbol: CERS1
  Gene Name: ceramide synthase 1
  Uniprot ID: P27544
  ENST ID: ENST00000623882
  CDS Start-End: 25-1077
gggcacggcgggcgagcgggcggtatggcggcggcggggcccgcggcggggccgacggggcccgagcccatgccgagctacgcgcagctagtgcagcgcggctggggcagcgcgctggcggcggcgcggggctgcacggactgcggctgggggctggcgcgtcgcggcctggctgagcacgcgcacctggcgccgcccgagctgctgctgctggcgctcggcgcgctgggctggaccgccctgcgctccgcggccactgcgcgcctctttcggcccctggcgaagcggtgctgcctccagcccagagatgccgccaagatgcccgagagcgcttggaagtttctcttctacctgggcagctggagctacagtgcctacctgctgtttggcaccgactaccccttcttccatgacccaccatctgtcttctacgactggacgccgggcatggcagtgccacgggacattgcagccgcctacctgctccagggaagcttctatggccactccatctacgctacgctatacatggacacctggcgcaaggactcggtggtcatgctgctccaccacgtggtcactctcatcctcatcgtctcctcctacgccttccggtaccacaatgtgggcatccttgtgctcttcctgcacgatatcagtgacgtgcagcttgagttcaccaagctcaacatttacttcaagtcccgcggcggctcctaccatcggctgcatgccttggcagcagacttgggctgcctcagcttcggcttcagctggttctggttccgcctctactggttcccgctcaaggtcctgtatgccaccagtcactgcagtctgcgcacggtgcctgacatccccttctacttcttcttcaatgcgctcctgctgctgctcacccttatgaacctctactggttcctgtacatcgtggcgtttgcagccaaggtgttgacaggccaggtgcacgagctgaaggacctgcgggagtatgacacagccgaggcccagagcctgaagcccagcaaagccgagaagccactgaggaacggcctggtgaaggacaagcgcttctgaacccctcggccccgcccccgtggacccggccccaccccgaataccccggccacgctccccgtccttggccgcccctccaccccctccaactctgctcctctagggccgccgccacctcccctgggaccccgccccctcatcctgcctccagttcccggccacgccccccaggacccctgcccctccggggacaccggccccgccctcagcccactggtcccgggccgccgcggaccctgcgcactctctggtcatcgcctgggaggaagatgccaccgccgcagcaaggtccctgcggccaccacctcctcctcctcctggccctgctgctgccctcgctgcccctgacccgcgcccccgtgcccccaggcccagccgccgccctgctccaggctctaggactgcgcgatgagccccagggtgcccccaggctccggccggttcccccggtcatgtggcgcctgtttcgacgccgggacccccaggagaccaggtctggctcgcggcggacgtccccaggggtcaccctgcaaccgtgccacgtggaggagctgggggtcgccggaaacatcgtgcgccacatcccggaccgcggtgcgcccacccgggcctcggagcctgcctcggccgcggggcattgccctgagtggacagtcgtcttcgacctgtcggctgtggaacccgctgagcgcccgagccgggcccgcctggagctgcgtttcgcggcggcggcggcggcagccccggagggcggctgggagctgagcgtggcgcaagcgggccagggcgcgggcgcggaccccgggccggtgctgctccgccagttggtgcccgccctggggccgccagtgcgcgcggagctgctgggcgccgcttgggctcgcaacgcctcatggccgcgcagcctccgcctggcgctggcgctacgcccccgggcccctgccgcctgcgcgcgcctggccgaggcctcgctgctgctggtgaccctcgacccgcgcctgtgccaccccctggcccggccgcggcgcgacgccgaacccgtgttgggcggcggccccgggggcgcttgtcgcgcgcggcggctgtacgtgagcttccgcgaggtgggctggcaccgctgggtcatcgcgccgcgcggcttcctggccaactactgccagggtcagtgcgcgctgcccgtcgcgctgtcggggtccggggggccgccggcgctcaaccacgctgtgctgcgcgcgctcatgcacgcggccgccccgggagccgccgacctgccctgctgcgtgcccgcgcgcctgtcgcccatctccgtgctcttctttgacaacagcgacaacgtggtgctgcggcagtatgaggacatggtggtggacgagtgcggctgccgctaacccggggcgggcagggacgcgggcccaacaataaatgccgcgtggtctgctc

SEQ ID NO: 116700 - DNA, 2558 bp, Homo sapiens
  Payload ID: 2756
  Gene Symbol: CERS1
  Gene Name: ceramide synthase 1
  ENST ID: ENST00000623927
  CDS Start-End: 1395-2513
acgcggggcgcgcggctccgtcggctaccgcgggcgggcgcaggcgacgggcacggcgggcgagcgggcggtatggcggcggcggggcccgcggcggggccgacggggcccgagcccatgccgagctacgcgcagctagtgcagcgcggctggggcagcgcgctggcggcggcgcggggctgcacggactgcggctgggggctggcgcgtcgcggcctggctgagcacgcgcacctggcgccgcccgagctgctgctgctggcgctcggcgcgctgggctggaccgccctgcgctccgcggccactgcgcgcctctttcggcccctggcgaagcggtgctgcctccagcccagagatgccgccaagatgcccgagagcgcttggaagtttctcttctacctgggcagctggagctacagtgcctacctgctgtttggcaccgactaccccttcttccatgacccaccatctgtcttctacgactggacgccgggcatggcagtgccacgggacattgcagccgcctacctgctccagggaagcttctatggccactccatctacgctacgctatacatggacacctggcgcaaggactcggtggtcatgctgctccaccacgtggtcactctcatcctcatcgtctcctcctacgccttccggtaccacaatgtgggcatccttgtgctcttcctgcacgatatcagtgacgtgcagcttgagttcaccaagctcaacatttacttcaagtcccgcggcggctcctaccatcggctgcatgccttggcagcagacttgggctgcctcagcttcggcttcagctggttctggttccgcctctactggttcccgctcaaggtcctgtatgccaccagtcactgcagtctgcgcacggtgcctgacatccccttctacttcttcttcaatgcgctcctgctgctgctcacccttatgaacctctactggttcctgtacatcgtggcgtttgcagccaaggtgttgacaggccaggtgcacgagctgaaggacctgcgggagtatgacacagccgaggcccagagcctgaagcccagcaaagccgagaagccactgaggaacggcctggtgaaggacaagcgcttctgaacccctcggccccgcccccgtggacccggccccaccccgaataccccggccacgctccccgtccttggccgcccctccaccccctccaactctgctcctctagggccgccgccacctcccctgggaccccgccccctcatcctgcctccagttcccggccacgccccccaggacccctgcccctccggggacaccggccccgccctcagcccactggtcccgggccgccgcggaccctgcgcactctctggtcatcgcctgggaggaagatgccaccgccgcagcaaggtccctgcggccaccacctcctcctcctcctggccctgctgctgccctcgctgcccctgacccgcgcccccgtgcccccaggcccagccgccgccctgctccaggctctaggactgcgcgatgagccccagggtgcccccaggctccggccggttcccccggtcatgtggcgcctgtttcgacgccgggacccccaggagaccaggtctggctcgcggcggacgtccccaggggtcaccctgcaaccgtgccacgtggaggagctgggggtcgccggaaacatcgtgcgccacatcccggaccgcggtgcgcccacccgggcctcggagcctgcctcggccgcggggcattgccctgagtggacagtcgtcttcgacctgtcggctgtggaacccgctgagcgcccgagccgggcccgcctggagctgcgtttcgcggcggcggcggcggcagccccggagggcggctgggagctgagcgtggcgcaagcgggccagggcgcgggcgcggaccccgggccggtgctgctccgccagttggtgcccgccctggggccgccagtgcgcgcggagctgctgggcgccgcttgggctcgcaacgcctcatggccgcgcagcctccgcctggcgctggcgctacgcccccgggcccctgccgcctgcgcgcgcctggccgaggcctcgctgctgctggtgaccctcgacccgcgcctgtgccaccccctggcccggccgcggcgcgacgccgaacccgtgttgggcggcggccccgggggcgcttgtcgcgcgcggcggctgtacgtgagcttccgcgaggtgggctggcaccgctgggtcatcgcgccgcgcggcttcctggccaactactgccagggtcagtgcgcgctgcccgtcgcgctgtcggggtccggggggccgccggcgctcaaccacgctgtgctgcgcgcgctcatgcacgcggccgccccgggagccgccgacctgccctgctgcgtgcccgcgcgcctgtcgcccatctccgtgctcttctttgacaacagcgacaacgtggtgctgcggcagtatgaggacatggtggtggacgagtgcggctgccgctaacccggggcgggcagggacgcgggcccaacaataaatgccgcgtgg

SEQ ID NO: 116701 - DNA, 2544 bp, Homo sapiens
  Payload ID: 2757
  Gene Symbol: CERS2
  Gene Name: ceramide synthase 2
  Uniprot ID: Q96G23
  ENST ID: ENST00000271688
  CDS Start-End: 427-1569
agcgcaaggtgacgggcgtggacgcggctgtggggccgggagcggagggttggggtctggcctcccgcgccggggcgaaggggcagccgcagcgcagaggcccgccccgccctcccctcccgtcacgcccagcctcccggcccttgggctgctcgcggcctttttttcccggctgggctcgggctcagctcgactgggctcggcgggcggcggcggcggcgccggcggctggcggaggagggagggcgagggcgggcgcgggccggcgggcgggcggaagagggaggagaggcgcggggagccaggcctcggggcctcggagcaaccacccgagcagacggagtacacggagcagcggccccggccccgccaacgctgccgccggctactccctcttgatgccctcccctttgcccctcactcaggatgctccagaccttgtatgattacttctggtgggaacgtctgtggctgcctgtgaacttgacctgggccgatctagaagaccgagatggacgtgtctacgccaaagcctcagatctctatatcacgctgcccctggccttgctcttcctcatcgttcgatacttctttgagctgtacgtggctacaccactggctgccctcttgaacataaaggagaaaactcggctgcgggcacctcccaacgccaccttggaacatttctacctgaccagtggcaagcagcccaagcaggtggaagtagagcttttgtcccggcagagcgggctctctggccgccaggtagagcgttggttccgtcgccgccgcaaccaggaccggcccagtctcctcaagaagttccgagaagccagctggagattcacattttacctgattgccttcattgccggcatggccgtcattgtggataaaccctggttctatgacatgaagaaagtttgggagggatatcccatacagagcactatcccttcccagtattggtactacatgattgaactttccttctactggtccctgctcttcagcattgcctctgatgtcaagcgaaaggatttcaaggaacagatcatccaccatgtggccaccatcattctcatcagcttttcctggtttgccaattacatccgagctgggactctaatcatggctctgcatgactcttccgattacctgctggagtcagccaagatgtttaactacgcgggatggaagaacacctgcaacaacatcttcatcgtcttcgccattgtttttatcatcacccgactggtcatcctgcccttctggatcctgcattgcaccctggtgtacccactggagctctatcctgccttctttggctattacttcttcaattccatgatgggagttctacagctgctgcatatcttctgggcctacctcattttgcgcatggcccacaagttcataactggaaagctggtagaagatgaacgcagtgaccgggaagaaacagagagctcagagggggaggaggctgcagctgggggaggagcaaagagccggcccctagccaatggccaccccatcctcaataacaaccatcgtaagaatgactgaaccattactccagctgcctcccagattaatgcataaagccaaggaactaccccgctccctgcgctatagggtcactttaagctctggggaaaaaggagaaagtgagaggagagttctctgcatcctccctccttgcttgtcacccagttgcctttaaaccaaattctaaccagcctatccccaggtagggggacgttggttatattctgttagagggggacggtcgtattttcctccctacccgccaagtcatcctttctactgcttttgaggccctccctcagctctctgtgggtaggggttacaattcacattccttattctgagaatttggccccagctgtttgcctttgactccctgacctccagagccagggttgtgccttattgtcccatctgtgggcctcattctgccaaagctggaccaaggctaacctttctaagctccctaacttgggccagaaaccaaagctgagcttttaactttctccctctatgacacaaatgaattgagggtaggaggagggtgcacataacccttaccctacctctgccaaaaagtgggggctgtactggggactgctcggatgatctttcttagtgctacttctttcagctgtccctgtagcgacaggtctaagatctgactgcctcctcctttctctggcctcttcccccttccctcttctcttcagctaggctagctggtttggagtagaatggcaactaattctaatttttatttattaaatatttggggttttggttttaaagccagaattacggctagcacctagcatttcagcagagggaccattttagaccaaaatgtactgttaatgggttttttttaaaaattaaaagattaaataaaaaatattaaataaaacatggcaataagtgtcagactattaggaattgagaagggggatcaactaaataaacgaagagagtctttcttatgccttccttgca

SEQ ID NO: 116702 - DNA, 997 bp, Homo sapiens
  Payload ID: 2757
  Gene Symbol: CERS2
  Gene Name: ceramide synthase 2
  ENST ID: ENST00000361419
  CDS Start-End: 250-997
ctcgggctcagctcgactgggctcggcgggcggcggcggcggcgccggcggctggcggaggagggagggcgagggcgggcgcgggccggcgggcgggcggaagagggaggagaggcgcggggagccaggcctcggggcctcggagcaaccacccgagcagacggagtacacggagcagcggccccggccccgccaacgctgccgccggctactccctcttgatgccctcccctttgcccctcactcaggatgctccagaccttgtatgattacttctggtgggaacgtctgtggctgcctgtgaacttgacctgggccgatctagaagaccgagatggacgtgtctacgccaaagcctcagatctctatatcacgctgcccctggccttgctcttcctcatcgttcgatacttctttgagctgtacgtggctacaccactggctgccctcttgaacataaaggagaaaactcggctgcgggcacctcccaacgccaccttggaacatttctacctgaccagtggcaagcagcccaagcaggtggaagtagagcttttgtcccggcagagcgggctctctggccgccaggtagagcgttggttccgtcgccgccgcaaccaggaccggcccagtctcctcaagaagttccgagaagccagctggagattcacattttacctgattgccttcattgccggcatggccgtcattgtggataaaccctggttctatgacatgaagaaagtttgggagggatatcccatacagagcactatcccttcccagtattggtactacatgattgaactttccttctactggtccctgctcttcagcattgcctctgatgtcaagcgaaaggatttcaaggaacagatcatccaccatgtggccaccatcattctcatcagcttttcctggtttgccaattacatccgagctgggactctaatcatggctctgcatgactcttccgattacctgctggaggtcaggc

SEQ ID NO: 116703 - DNA, 1002 bp, Homo sapiens
  Payload ID: 2757
  Gene Symbol: CERS2
  Gene Name: ceramide synthase 2
  ENST ID: ENST00000368949
  CDS Start-End: 89-1002
atctgaagtctaggactgccagggcaacatggtacctttggctttacatttccctggagaagttgggctccaagagacagcagtcaggatgctccagaccttgtatgattacttctggtgggaacgtctgtggctgcctgtgaacttgacctgggccgatctagaagaccgagatggacgtgtctacgccaaagcctcagatctctatatcacgctgcccctggccttgctcttcctcatcgttcgatacttctttgagctgtacgtggctacaccactggctgccctcttgaacataaaggagaaaactcggctgcgggcacctcccaacgccaccttggaacatttctacctgaccagtggcaagcagcccaagcaggtggaagtagagcttttgtcccggcagagcgggctctctggccgccaggtagagcgttggttccgtcgccgccgcaaccaggaccggcccagtctcctcaagaagttccgagaagccagctggagattcacattttacctgattgccttcattgccggcatggccgtcattgtggataaaccctggttctatgacatgaagaaagtttgggagggatatcccatacagagcactatcccttcccagtattggtactacatgattgaactttccttctactggtccctgctcttcagcattgcctctgatgtcaagcgaaaggatttcaaggaacagatcatccaccatgtggccaccatcattctcatcagcttttcctggtttgccaattacatccgagctgggactctaatcatggctctgcatgactcttccgattacctgctggagtcagccaagatgtttaactacgcgggatggaagaacacctgcaacaacatcttcatcgtcttcgccattgtttttatcatcacccgactggtcatcctgcccttctggatcctgcattgcaccctggtgtacccactggagctctatcctgccttctttggctattacttctt

SEQ ID NO: 116704 - DNA, 2505 bp, Homo sapiens
  Payload ID: 2757
  Gene Symbol: CERS2
  Gene Name: ceramide synthase 2
  Uniprot ID: Q96G23
  ENST ID: ENST00000368954
  CDS Start-End: 388-1530
tagcgcaaggtgacgggcgtggacgcggctgtggggccgggagcggagggttggggtctggcctcccgcgccggggcgaaggggcagccgcagcgcagaggcccgccccgccctcccctcccgtcacgcccagcctcccggcccttgggctgctcgcggcctttttttcccggctgggctcgggctcagctcgactgggctcggcgggcggcggcggcggcgccggcggctggcggaggagggagggcgagggcgggcgcgggccggcgggcgggcggaagagggaggagaggcgcggggagccaggcctcggggcctcggagcaaccacccgagcagacggagtacacggagcagcggccccggccccgccaacgctgccgccgggatgctccagaccttgtatgattacttctggtgggaacgtctgtggctgcctgtgaacttgacctgggccgatctagaagaccgagatggacgtgtctacgccaaagcctcagatctctatatcacgctgcccctggccttgctcttcctcatcgttcgatacttctttgagctgtacgtggctacaccactggctgccctcttgaacataaaggagaaaactcggctgcgggcacctcccaacgccaccttggaacatttctacctgaccagtggcaagcagcccaagcaggtggaagtagagcttttgtcccggcagagcgggctctctggccgccaggtagagcgttggttccgtcgccgccgcaaccaggaccggcccagtctcctcaagaagttccgagaagccagctggagattcacattttacctgattgccttcattgccggcatggccgtcattgtggataaaccctggttctatgacatgaagaaagtttgggagggatatcccatacagagcactatcccttcccagtattggtactacatgattgaactttccttctactggtccctgctcttcagcattgcctctgatgtcaagcgaaaggatttcaaggaacagatcatccaccatgtggccaccatcattctcatcagcttttcctggtttgccaattacatccgagctgggactctaatcatggctctgcatgactcttccgattacctgctggagtcagccaagatgtttaactacgcgggatggaagaacacctgcaacaacatcttcatcgtcttcgccattgtttttatcatcacccgactggtcatcctgcccttctggatcctgcattgcaccctggtgtacccactggagctctatcctgccttctttggctattacttcttcaattccatgatgggagttctacagctgctgcatatcttctgggcctacctcattttgcgcatggcccacaagttcataactggaaagctggtagaagatgaacgcagtgaccgggaagaaacagagagctcagagggggaggaggctgcagctgggggaggagcaaagagccggcccctagccaatggccaccccatcctcaataacaaccatcgtaagaatgactgaaccattactccagctgcctcccagattaatgcataaagccaaggaactaccccgctccctgcgctatagggtcactttaagctctggggaaaaaggagaaagtgagaggagagttctctgcatcctccctccttgcttgtcacccagttgcctttaaaccaaattctaaccagcctatccccaggtagggggacgttggttatattctgttagagggggacggtcgtattttcctccctacccgccaagtcatcctttctactgcttttgaggccctccctcagctctctgtgggtaggggttacaattcacattccttattctgagaatttggccccagctgtttgcctttgactccctgacctccagagccagggttgtgccttattgtcccatctgtgggcctcattctgccaaagctggaccaaggctaacctttctaagctccctaacttgggccagaaaccaaagctgagcttttaactttctccctctatgacacaaatgaattgagggtaggaggagggtgcacataacccttaccctacctctgccaaaaagtgggggctgtactggggactgctcggatgatctttcttagtgctacttctttcagctgtccctgtagcgacaggtctaagatctgactgcctcctcctttctctggcctcttcccccttccctcttctcttcagctaggctagctggtttggagtagaatggcaactaattctaatttttatttattaaatatttggggttttggttttaaagccagaattacggctagcacctagcatttcagcagagggaccattttagaccaaaatgtactgttaatgggttttttttaaaaattaaaagattaaataaaaaatattaaataaaacatggcaataagtgtcagactattaggaattgagaagggggatcaactaaataaacgaagagagtctttcttatgccttccttgca

SEQ ID NO: 116705 - DNA, 738 bp, Homo sapiens
  Payload ID: 2757
  Gene Symbol: CERS2
  Gene Name: ceramide synthase 2
  ENST ID: ENST00000421609
  CDS Start-End: 162-738
gggaggcggcgctggcggggggcgctgcgggcgctcatggcggcggccgccgggtaaggcgggcgcagcgcctcaagggagcggccggggccggcgggcctggcgccgcggtgtccgcggcagcgccgccctgagccggagaagctttcccgggcaacaggatgctccagaccttgtatgattacttctggtgggaacgtctgtggctgcctgtgaacttgacctgggccgatctagaagaccgagatggacgtgtctacgccaaagcctcagatctctatatcacgctgcccctggccttgctcttcctcatcgttcgatacttctttgagctgtacgtggctacaccactggctgccctcttgaacataaaggagaaaactcggctgcgggcacctcccaacgccaccttggaacatttctacctgaccagtggcaagcagcccaagcaggtggaagtagagcttttgtcccggcagagcgggctctctggccgccaggtagagcgttggttccgtcgccgccgcaaccaggaccggcccagtctcctcaagaagttccgagaagccagctggagattcacattttacctgattgccttcattgccggcatggccgtcattgtggataaaccctggttctatgacatgaagaaagtttgggagggatatcccatacagagcactatcccttcccagtattggtactacatgattgaactttccttctactggtccc

SEQ ID NO: 116706 - DNA, 545 bp, Homo sapiens
  Payload ID: 2757
  Gene Symbol: CERS2
  Gene Name: ceramide synthase 2
  ENST ID: ENST00000457392
  CDS Start-End: 160-545
gcggccgccgggtaaggcgggcgcagcgcctcaagggagcggccggggccggcgggcctggcgccgcggtgtccgcggcagcgccgccctgagccggagaagctttcccgggcaacagctactccctcttgatgccctcccctttgcccctcactcaggatgctccagaccttgtatgattacttctggtgggaacgtctgtggctgcctgtgaacttgacctgggccgatctagaagaccgagatggacgtgtctacgccaaagcctcagatctctatatcacgctgcccctggccttgctcttcctcatcgttcgatacttctttgagctgtacgtggctacaccactggctgccctcttgaacataaaggagaaaactcggctgcgggcacctcccaacgccaccttggaacatttctacctgaccagtggcaagcagcccaagcaggtggaagtagagcttttgtcccggcagagcgggctctctggccgccaggtagagcgttggttccgtcgccgccgcaaccaggaccggcccagtct

SEQ ID NO: 116707 - DNA, 896 bp, Homo sapiens
  Payload ID: 2757
  Gene Symbol: CERS2
  Gene Name: ceramide synthase 2
  ENST ID: ENST00000558062
  CDS Start-End: 229-896
caggcatgagccatcacggccggcctaacagtaaatgttaaaactggaaagccaccgtattacagatgaggaaactgatttgcccaaggctacatagccaggatagggatctagagttcgactctctgcccccttctccttttgatacatcctgaaaacttttattcatctatctcttcctccatagctactccctcttgatgccctcccctttgcccctcactcaggatgctccagaccttgtatgattacttctggtgggaacgtctgtggctgcctgtgaacttgacctgggccgatctagaagaccgagatggacgtgtctacgccaaagcctcagatctctatatcacgctgcccctggccttgctcttcctcatcgttcgatacttctttgagctgtacgtggctacaccactggctgccctcttgaacataaaggagaaaactcggctgcgggcacctcccaacgccaccttggaacatttctacctgaccagtggcaagcagcccaagcaggtggaagtagagcttttgtcccggcagagcgggctctctggccgccaggtagagcgttggttccgtcgccgccgcaaccaggaccggcccagtctcctcaagaagttccgagaagccagctggagattcacattttacctgattgccttcattgccggcatggccgtcattgtggataaaccctggttctatgacatgaagaaagtttgggagggatatcccatacagagcactatcccttcccagtattggtactacatgattgaactttccttctactggtccctgctcttcagcattgcctctgatgtcaagcgaaaggatttcaaggaacagatcatccaccatgtggccaccatcattctcatcagcttttc

SEQ ID NO: 116708 - DNA, 1661 bp, Homo sapiens
  Payload ID: 2757
  Gene Symbol: CERS2
  Gene Name: ceramide synthase 2
  ENST ID: ENST00000560793
  CDS Start-End: 1-686
tctctctgcagaaaccctggttctatgacatgaagaaagtttgggagggatatcccatacagagcactatcccttcccagtattggtactacatgattgaactttccttctactggtccctgctcttcagcattgcctctgatgtcaagcgaaaggatttcaaggaacagatcatccaccatgtggccaccatcattctcatcagcttttcctggtttgccaattacatccgagctgggactctaatcatggctctgcatgactcttccgattacctgctggagtcagccaagatgtttaactacgcgggatggaagaacacctgcaacaacatcttcatcgtcttcgccattgtttttatcatcacccgactggtcatcctgcccttctggatcctgcattgcaccctggtgtacccactggagctctatcctgccttctttggctattacttcttcaattccatgatgggagttctacagctgctgcatatcttctgggcctacctcattttgcgcatggcccacaagttcataactggaaagctggtagaagatgaacgcagtgaccgggaagaaacagagagctcagagggggaggaggctgcagctgggggaggagcaaagagccggcccctagccaatggccaccccatcctcaataacaaccatcgtaagaatgactgaaccattactccagctgcctcccagattaatgcataaagccaaggaactaccccgctccctgcgctatagggtcactttaagctctggggaaaaaggagaaagtgagaggagagttctctgcatcctccctccttgcttgtcacccagttgcctttaaaccaaattctaaccagcctatccccaggtagggggacgttggttatattctgttagagggggacggtcgtattttcctccctacccgccaagtcatcctttctactgcttttgaggccctccctcagctctctgtgggtaggggttacaattcacattccttattctgagaatttggccccagctgtttgcctttgactccctgacctccagagccagggttgtgccttattgtcccatctgtgggcctcattctgccaaagctggaccaaggctaacctttctaagctccctaacttgggccagaaaccaaagctgagcttttaactttctccctctatgacacaaatgaattgagggtaggaggagggtgcacataacccttaccctacctctgccaaaaagtgggggctgtactggggactgctcggatgatctttcttagtgctacttctttcagctgtccctgtagcgacaggtctaagatctgactgcctcctcctttctctggcctcttcccccttccctcttctcttcagctaggctagctggtttggagtagaatggcaactaattctaatttttatttattaaatatttggggttttggttttaaagccagaattacggctagcacctagcatttcagcagagggaccattttagaccaaaatgtactgttaatgggttttttttaaaaattaaaagattaaataaaaaatattaaataaaacatggcaataagtgtcagactattaggaattgagaagggggatcaactaaataaacgaagagagtctttcttatgccttccttgca

SEQ ID NO: 116709 - DNA, 1803 bp, Homo sapiens
  Payload ID: 2757
  Gene Symbol: CERS2
  Gene Name: ceramide synthase 2
  ENST ID: ENST00000561294
  CDS Start-End: 23-1156
tcccctttgcccctcactcaggatgctccagaccttgtatgattacttctggtgggaacgtctgtggctgcctgtgaacttgacctgggccgatctagaagaccgagatggacgtgtctacgccaaagcctcagatctctatatcacgctgcccctggccttgctcttcctcatcgttcgatacttctttgagctgtacgtggctacaccactggctgccctcttgaacataaaggagaaaactcggctgcgggcacctcccaacgccaccttggaacatttctacctgaccagtggcaagcagcccaagcagagcgggctctctggccgccaggtagagcgttggttccgtcgccgccgcaaccaggaccggcccagtctcctcaagaagttccgagaagccagctggagattcacattttacctgattgccttcattgccggcatggccgtcattgtggataaaccctggttctatgacatgaagaaagtttgggagggatatcccatacagagcactatcccttcccagtattggtactacatgattgaactttccttctactggtccctgctcttcagcattgcctctgatgtcaagcgaaaggatttcaaggaacagatcatccaccatgtggccaccatcattctcatcagcttttcctggtttgccaattacatccgagctgggactctaatcatggctctgcatgactcttccgattacctgctggagtcagccaagatgtttaactacgcgggatggaagaacacctgcaacaacatcttcatcgtcttcgccattgtttttatcatcacccgactggtcatcctgcccttctggatcctgcattgcaccctggtgtacccactggagctctatcctgccttctttggctattacttcttcaattccatgatgggagttctacagctgctgcatatcttctgggcctacctcattttgcgcatggcccacaagttcataactggaaaggagctggggggagtagctagcccagagacttcgggtcagggttcaacaatcaggaagacccagttcctgaggaaacgacagttcaagaagggttgggaagaaggctgtcctctaaagaagacgtcctctgcattcaatggccccacagcaacagagtagctccttgccttccacactgcccacctcgtagttgtagtcccaagtaagttctgtcccagcccggattcttctgaagaggaagaaaaggatggtgtgtggcaaagacagcagataacccaggcacttggggttactgaatatgtaggtggagttggatcatgaatggaggaggggcccttagaacttcagtggtccttgcccctccccagtcatcccctttcctgactccttacttgctggcaaagaaggccacccaggggaagcgaagatcatgggtatccacgaagacattctggacaaacaggttggggctgcaactgtgctgtaggtttaaggacaggatcaaataagaaccagggaaactgaacctggctttgcagggagagtgagagttggaagaaaaatgatgccatctgaccctccccattataatagatgctttgaaagaaagctacctctttaagatcctttgagatcaagagtttataacaagaaaagggcttatagagtatgttaaaagaaatctgaggaccatgggataatccagcatctagaggtggggagaggggtctcacgttgaggtagcggcccaggttgccttcaagcttggcatcaatgatgtagcaagactcctcgccatcatagaa

SEQ ID NO: 116710 - DNA, 3894 bp, Homo sapiens
  Payload ID: 2758
  Gene Symbol: CERS3
  Gene Name: ceramide synthase 3
  Uniprot ID: Q8IU89
  ENST ID: ENST00000284382
  CDS Start-End: 425-1576
cgggatgcaccgctgcggggaccccccgcccggcctcgcggacccgcctcggcccaggacggaggaggaggtggtgaaacaggaagcaacatcccatcaggaagaacctgagggtgccatccagtagcttcgcctcacgtcactgactgccctcagtcagaaatcttgactcgcaactttggagggtgggtctctgaaggaatttcaggtcttacacagagatgagttgtgctgctctctgaggagaacgaagctggttggaacgttggaagctgctctctgactacacttcacaagcaaggggcaccttttgtggactgacatttcagaaagggatgttgtgaaacaaaagctgacatttatatatatatacatatatacagtatttgagttcctcagtagaaagctatcatatatactcagaatgttttggacgtttaaagaatggttctggttggaaagattctggcttcctccaacaataaagtggtcagatcttgaggatcacgatggactcgtctttgtaaaaccttctcatttatacgtgacaattccatatgcttttctcttgctgattatcagacgtgtatttgaaaaatttgttgcttcacctctagcaaaatcatttggcattaaagagacagttcgaaaggttacaccaaatactgtcttagagaattttttcaaacattccacaaggcaaccattgcaaactgatatttatggactggcaaagaagtgtaacttgacggagcgccaggtggaaagatggtttaggagtcggcggaatcaagagaggccttccaggctgaagaaattccaggaagcttgctggagatttgcattttacttaatgatcactgttgctggaattgcgtttctttatgataaaccttggctatatgacttatgggaggtttggaatggctatcccaaacagcccctgctgccatcccagtactggtactacattttagaaatgagtttttattggtctctgttatttagacttggctttgatgtcaagagaaaggattttctagctcatatcatccaccacctggctgctattagtctgatgagcttctcttggtgtgctaattatattcgcagtgggaccctcgtgatgattgtacacgatgtggctgacatttggctggagtctgctaagatgttttcttatgctggatggacgcagacctgtaacaccctgtttttcatcttctccaccatatttttcatcagccgcctcattgtttttcctttctggattttatattgcacgctgatcttgcctatgtatcacctcgagcctttcttttcatacatcttcctcaacctacagctcatgatcttgcaggtccttcacctttactggggttattacatcttgaagatgctcaacagatgtatattcatgaagagcatccaggatgtgaggagtgatgacgaggattatgaagaggaagaggaagaggaagaagaagaggctaccaaaggcaaagagatggattgtttaaagaacggcctcagggctgagaggcacctcattcccaatggccagcatggccattagctggaagcctacaggactcccatggcacagcatgctgcaagtactgttggcagcctggcttccaggccccacaccgaccccacattctgcccttccctctttctcaccaccgccttccctcccacctaagatgtgtttaccaaaatgttgttaacttgtgttaaaatgttaaatataagcatgcccatggatttttactgcagttaggactcagactggtcaaagatttcaaagatttctccacagaaccgtctcagttctaattgcactccctcatgcatgtcactttctcaggggctcgctttgttatagaccctttcgcctcgccaccttgcctgtcctcaggacgctttcacaggtgctaagtgatctcatttttcccaggtgtgtttggccacaaagagcagcttctttctcaaaatgagttagaagtggcagtgggacaggagcggaaggaccacaccaggagacacttccatcctgaagcttaggtgcctcatctccacagggcggtggcagtccctgcctgccaccccacagggttacagcaaggattaagtgagatcacagaagtttaagtacacactgtcaaccgtggggtcatcgtgaaccaacccactttgcactgtttgggagacagaaacctggctaaacatggcactgcaatgggcctgaacaaaaggcagaatctttaaaaattcctcttaaatgactctggagatacctggaaatgaaagtgccaagaaaggtgttccattttatttgctaactatttatgcattagctccccaagggtcattctcagattctcctggaattcttctccctcaggacccatggttcaaggaaggaagcttaggccctgttccttcctgtcctttgctggtctttcccttttttcctttctaggagggaagcttctgtgctgctgccctgagcccttccttcaggccagcacagtacctggggacctccacgggggaatgggatccaggccaggttgcttgctgagcctcatcacccaggaggcctgagcctctggggagggcacgcatgtacactgccagacccaggggagatcttgggaacagaggatgctacgtgatttcctctggcttccaacccaatcagcctgcatcacagtgaaacacaacacaaaaggccataaaaggcatacccctgagaaatgtttaagggcaggtgctagagtcagtgccagctccctgggaggagggatagggacgggcagatcagtagccagcttgtcctcaccctccggaagggagcaccggagaagacttgcacacgtccctgcctcccttgcggccttgtcaccagagggacacatctcctgggcacaatgtgcagggctgacctgggagacttctcaggtggctgctggctgaggagaggccaggccttcccaaggaagaccctgagtaaaatctgcatctgtcctcaccacctggcacagtctctcataacggtcagattttgtatgttcatcctatttattcaggggctcgtactagaaagccacaggagaggtcggcttgtagggactggaaaatcagccccaagcagagcagctgcagggcccctggagccggaaggacactgcacagaacagactgcgttattgttatttttaaataaaaatatacatttgaaaccttaaggctaaacaaaaataaacaaaaaatcctttagaattctttccacaacaatatctctttctgagaaattgttacaaacaaggtcagattttctctgtataacatttgcttttatgaggacaatatcatatgcattatatgcataatatgatattataaatcaaaatgcctgcacccactttagggtatagctattgacttattattaatattatattattattattttgctggaagaaggtcacactaagatataattttttatgttttcagttaacggtatgctttcttctttgcttatttggtttttgtctctgtaccaaatatcttcttgcttaaggtagaaaagtatttgtttacctctatctccagttttttttcttatttgaatgttgaaggtaaaattgatataccaattttaactatttctgatacagctgaaagcactaaactacttcataagaagtagatactcatttttgtaacactatttagggcttttgtggttaattttaaaggaaaccactctttctacaggaaacaagggctcaggattcttcagatgaccttataaaaatgcagtccacagtgctatcaatattgtaacagtaatgactacaataaagccaaaagtccagtgta

SEQ ID NO: 116711 - DNA, 2045 bp, Homo sapiens
  Payload ID: 2758
  Gene Symbol: CERS3
  Gene Name: ceramide synthase 3
  Uniprot ID: Q8IU89
  ENST ID: ENST00000394113
  CDS Start-End: 692-1843
gagggcccgtgtccccgcggaggtcaaggccgagagagggcccgtgtccccgcgcaggtcaaggcccagagtccccgtgctcgcacagatggtgtcctggggcccagtcgcgctccccgctcgcggcagcccccgtgtactgggccttgcaaagtccgttaggagcgctccagggcgacagtgcccagcggttaacaagtggtgaaacaggaagcaacatcccatcaggaagaacctgagggtgccatccagtagcttcgcctcacgtcactgactgccctcagtcagaaatcttgactcgcaactttggagggtgggtctctgaaggaatttcaggtcttacacagagatgagttgtgctgctctctgaggagaacgaagctggttggaacgttggaagctgctctctgactacacttcacaagcaaggggcaccttttgtggactgacatttcagaaagggatgttgtgaaacaaaagctgacatttatatatatatacatatatacagtatttgagttcctcagtagaaagctatcatatatactcagatggcgttattccctctggtccccactgctctggccaaaccttctctctgctgactgcatctattgctgtgagctgattgtcctctagtttctccatctcctgaggcatgcttcacaccactgccagaagagctgccagaatgttttggacgtttaaagaatggttctggttggaaagattctggcttcctccaacaataaagtggtcagatcttgaggatcacgatggactcgtctttgtaaaaccttctcatttatacgtgacaattccatatgcttttctcttgctgattatcagacgtgtatttgaaaaatttgttgcttcacctctagcaaaatcatttggcattaaagagacagttcgaaaggttacaccaaatactgtcttagagaattttttcaaacattccacaaggcaaccattgcaaactgatatttatggactggcaaagaagtgtaacttgacggagcgccaggtggaaagatggtttaggagtcggcggaatcaagagaggccttccaggctgaagaaattccaggaagcttgctggagatttgcattttacttaatgatcactgttgctggaattgcgtttctttatgataaaccttggctatatgacttatgggaggtttggaatggctatcccaaacagcccctgctgccatcccagtactggtactacattttagaaatgagtttttattggtctctgttatttagacttggctttgatgtcaagagaaaggattttctagctcatatcatccaccacctggctgctattagtctgatgagcttctcttggtgtgctaattatattcgcagtgggaccctcgtgatgattgtacacgatgtggctgacatttggctggagtctgctaagatgttttcttatgctggatggacgcagacctgtaacaccctgtttttcatcttctccaccatatttttcatcagccgcctcattgtttttcctttctggattttatattgcacgctgatcttgcctatgtatcacctcgagcctttcttttcatacatcttcctcaacctacagctcatgatcttgcaggtccttcacctttactggggttattacatcttgaagatgctcaacagatgtatattcatgaagagcatccaggatgtgaggagtgatgacgaggattatgaagaggaagaggaagaggaagaagaagaggctaccaaaggcaaagagatggattgtttaaagaacggcctcagggctgagaggcacctcattcccaatggccagcatggccattagctggaagcctacaggactcccatggcacagcatgctgcaagtactgttggcagcctggcttccaggccccacaccgaccccacattctgcccttccctctttctcaccaccgccttccctcccacctaagatgtgtttaccaaaatgttgttaacttgtgttaaaatgttaaatataagcatgcccatggatttttactgca

SEQ ID NO: 116712 - DNA, 1856 bp, Homo sapiens
  Payload ID: 2758
  Gene Symbol: CERS3
  Gene Name: ceramide synthase 3
  Uniprot ID: Q8IU89
  ENST ID: ENST00000538112
  CDS Start-End: 503-1654
ggccttgcaaagtccgttaggagcgctccagggcgacagtgcccagcggttaacaagtttgtaattactttcgtgggtttctacgttgcaaattgagaagagggttgctgggttgggcccccctcctctggacgctaaccccacccaggtggtgaaacaggaagcaacatcccatcaggaagaacctgagggtgccatccagtagcttcgcctcacgtcactgactgccctcagtcagaaatcttgactcgcaactttggagggtgggtctctgaaggaatttcaggtcttacacagagatgagttgtgctgctctctgaggagaacgaagctggttggaacgttggaagctgctctctgactacacttcacaagcaaggggcaccttttgtggactgacatttcagaaagggatgttgtgaaacaaaagctgacatttatatatatatacatatatacagtatttgagttcctcagtagaaagctatcatatatactcagaatgttttggacgtttaaagaatggttctggttggaaagattctggcttcctccaacaataaagtggtcagatcttgaggatcacgatggactcgtctttgtaaaaccttctcatttatacgtgacaattccatatgcttttctcttgctgattatcagacgtgtatttgaaaaatttgttgcttcacctctagcaaaatcatttggcattaaagagacagttcgaaaggttacaccaaatactgtcttagagaattttttcaaacattccacaaggcaaccattgcaaactgatatttatggactggcaaagaagtgtaacttgacggagcgccaggtggaaagatggtttaggagtcggcggaatcaagagaggccttccaggctgaagaaattccaggaagcttgctggagatttgcattttacttaatgatcactgttgctggaattgcgtttctttatgataaaccttggctatatgacttatgggaggtttggaatggctatcccaaacagcccctgctgccatcccagtactggtactacattttagaaatgagtttttattggtctctgttatttagacttggctttgatgtcaagagaaaggattttctagctcatatcatccaccacctggctgctattagtctgatgagcttctcttggtgtgctaattatattcgcagtgggaccctcgtgatgattgtacacgatgtggctgacatttggctggagtctgctaagatgttttcttatgctggatggacgcagacctgtaacaccctgtttttcatcttctccaccatatttttcatcagccgcctcattgtttttcctttctggattttatattgcacgctgatcttgcctatgtatcacctcgagcctttcttttcatacatcttcctcaacctacagctcatgatcttgcaggtccttcacctttactggggttattacatcttgaagatgctcaacagatgtatattcatgaagagcatccaggatgtgaggagtgatgacgaggattatgaagaggaagaggaagaggaagaagaagaggctaccaaaggcaaagagatggattgtttaaagaacggcctcagggctgagaggcacctcattcccaatggccagcatggccattagctggaagcctacaggactcccatggcacagcatgctgcaagtactgttggcagcctggcttccaggccccacaccgaccccacattctgcccttccctctttctcaccaccgccttccctcccacctaagatgtgtttaccaaaatgttgttaacttgtgttaaaatgttaaatataagcatgcccatggatttttactgca

SEQ ID NO: 116713 - DNA, 432 bp, Homo sapiens
  Payload ID: 2758
  Gene Symbol: CERS3
  Gene Name: ceramide synthase 3
  ENST ID: ENST00000559639
  CDS Start-End: 387-432
gtgtactgggccttgcaaagtccgttaggagcgctccagggcgacagtgcccagcggttaacaagtttgtaattactttcgtgggtttctacgttgcaaattgagaagagggttgctgggttgggcccccctcctctggacgctaaccccacccagggatgttgtgaaacaaaagctgacatttatatatatatacatatatacagtatttgagttcctcagtagaaagctatcatatatactcagatggcgttattccctctggtccccactgctctggccaaaccttctctctgctgactgcatctattgctgtgagctgattgtcctctagtttctccatctcctgaggcatgcttcacaccactgccagaagagctgccagaatgttttggacgtttaaagaatggttctggttggaaagattctggc

SEQ ID NO: 116714 - DNA, 920 bp, Homo sapiens
  Payload ID: 2758
  Gene Symbol: CERS3
  Gene Name: ceramide synthase 3
  ENST ID: ENST00000558884
  CDS Start-End: 433-920
tcgcggcagcccccgtgtactgggccttgcaaagtccgttaggagcgctccagggcgacagtgcccagcggttaacaagtggtgaaacaggaagcaacatcccatcaggaagaacctgagggtgccatccagtagcttcgcctcacgtcactgactgccctcagtcagaaatcttgactcgcaactttggagggtgggtctctgaaggaatttcaggtcttacacagagatgagttgtgctgctctctgaggagaacgaagctggttggaacgttggaagctgctctctgactacacttcacaagcaaggggcaccttttgtggactgacatttcagaaagggatgttgtgaaacaaaagctgacatttatatatatatacatatatacagtatttgagttcctcagtagaaagctatcatatatactcagaatgttttggacgtttaaagaatggttctggttggaaagattctggcttcctccaacaataaagtggtcagatcttgaggatcacgatggactcgtctttgtaaaaccttctcatttatacgtgacaattccatatgcttttctcttgctgattatcagacgtgtatttgaaaaatttgttgcttcacctctagcaaaatcatttggcattaaagagacagttcgaaaggttacaccaaatactgtcttagagaattttttcaaacattccacaaggcaaccattgcaaactgatatttatggactggcaaagaagtgtaacttgacggagcgccaggtggaaagatggtttaggagtcggcggaatcaagagaggccttccaggctgaagaaattccaggaagcttgctggagatttgcattttacttaatgatcactgttgctggaattgcgtttctttatgataaaccttggctatatgacttatg

SEQ ID NO: 116715 - DNA, 1797 bp, Homo sapiens
  Payload ID: 2759
  Gene Symbol: CERS4
  Gene Name: ceramide synthase 4
  Uniprot ID: Q9HA82
  ENST ID: ENST00000251363
  CDS Start-End: 301-1485
ggggccgaggcccggccaggagcagagtccggctgcctggggcgggcggcgcgtgtctgcagctgctccgggtagcccgctaggcgcgccgtccccagccccgccgccggccctcggtgcgcccggccgcctgcacccccaggagcagctgctgtgaataaacacagaagtggagctgggggactgattagaagcctcattcagtgcacctgggccccagcaggcccagccaggcgtggaggaagaggcattgaggactttccttacctgtttttccagctcacccactgccagcagagaatgctgtccagtttcaacgagtggttttggcaggacaggttctggttaccacccaatgtcacgtggacagagctagaagaccgggatggccgtgtctacccccacccccaggacttgttggcagccctgcccctggcgctggtcctcctggccatgcgccttgcctttgagagattcattggcctgcccctgagccggtggctgggtgtgagggatcagaccaggaggcaagtgaagcccaacgccacgctggagaaacacttcctcacggaagggcacaggcccaaggagccccagctgtctctcctggccgcccagtgtggcctcacgctgcagcagacccagcgatggttccggagacgccggaaccaggatcgaccccagctgaccaagaagttctgtgaggccagctggaggtttctcttctacctgtcctccttcgtgggcggcctctcggtcctgtaccacgagtcatggctgtgggcaccagtaatgtgctgggacaggtacccaaaccagactctgaagccatccctgtactggtggtacctcttggagctgggtttctacctctcactgctaatcaggctgccctttgatgtcaagcgcaaggatttcaaggagcaggtgatacaccacttcgtggcggtcatcctgatgaccttctcctacagtgccaacctgctgcgcattggctctctggtgctgctgttacacgattcctctgactacctgctggaggcctgtaagatggtcaactacatgcagtatcagcaagtgtgcgacgctctcttcctcatcttctcctttgtcttcttctacacccgactggtcctctttcccacccagatcctctacaccacatactacgagtccatcagcaacaggggccccttcttcggctactacttcttcaacgggcttctgatgttgctgcagctgctgcacgtgttctggtcttgcctcattctgcgcatgctctatagcttcatgaagaagggccagatggagaaggacattcgtagtgatgtagaagaatcagactccagtgaggaggcggcggcggcccaggaacctctgcagctaaagaacggggcagctggagggcccaggccagcccccactgatggccctcggagccgggtggccgggcgtctgaccaacaggcacacaacagccacatagccgggcggggctggctgtaaggggttgcccccccgccagtgccttggatatttctggggtgactggactggcgcccctgggccacctttctggagacagggagggccccacccggggtgggtgggaaggctgatgatctgtctccagccccttccttctgcccacccacccttcttccctctgggcaactggacagatctgggagccagcagctggatgctgtggctggccagagacacctccaggctgtggcctgggggctggggggagccccaggctgaaaagggtccaattaaaacaaatggagccaaa

SEQ ID NO: 116716 - DNA, 1803 bp, Homo sapiens
  Payload ID: 2759
  Gene Symbol: CERS4
  Gene Name: ceramide synthase 4
  ENST ID: ENST00000558331
  CDS Start-End: 460-1491
gccccgggctccccccactcaagccttttttcccctgctgggggccgaggcccggccaggagcagagtccggctgcctggggcgggcggcgcgtgtctgcagctgctccgggtagcccgctaggcgcgccgtccccagccccgccgccggccctcggtgcgcccggccgcctgcacccccaggagcagctgctgtgaataaacacagaagtggagctgggggactgattagaagcctcattcagtgcacctgggccccagcaggcccagccaggcgtggaggaagaggcattgaggactttccttacctgtttttccagctcacccactgccagcagaggacaggttctggttaccacccaatgtcacgtggacagagctagaagaccgggatggccgtgtctacccccacccccaggacttgttggcagccctgcccctggcgctggtcctcctggccatgcgccttgcctttgagagattcattggcctgcccctgagccggtggctgggtgtgagggatcagaccaggaggcaagtgaagcccaacgccacgctggagaaacacttcctcacggaagggcacaggcccaaggagccccagctgtctctcctggccgcccagtgtggcctcacgctgcagcagacccagcgatggttccggagacgccggaaccaggatcgaccccagctgaccaagaagttctgtgaggccagctggaggtttctcttctacctgtcctccttcgtgggcggcctctcggtcctgtaccacgagtcatggctgtgggcaccagtaatgtgctgggacaggtacccaaaccagactctgaagccatccctgtactggtggtacctcttggagctgggtttctacctctcactgctaatcaggctgccctttgatgtcaagcgcaaggatttcaaggagcaggtgatacaccacttcgtggcggtcatcctgatgaccttctcctacagtgccaacctgctgcgcattggctctctggtgctgctgttacacgattcctctgactacctgctggaggcctgtaagatggtcaactacatgcagtatcagcaagtgtgcgacgctctcttcctcatcttctcctttgtcttcttctacacccgactggtcctctttcccacccagatcctctacaccacatactacgagtccatcagcaacaggggccccttcttcggctactacttcttcaacgggcttctgatgttgctgcagctgctgcacgtgttctggtcttgcctcattctgcgcatgctctatagcttcatgaagaagggccagatggagaaggacattcgtagtgatgtagaagaatcagactccagtgaggaggcggcggcggcccaggaacctctgcagctaaagaacggggcagctggagggcccaggccagcccccactgatggccctcggagccgggtggccgggcgtctgaccaacaggcacacaacagccacatagccgggcggggctggctgtaaggggttgcccccccgccagtgccttggatatttctggggtgactggactggcgcccctgggccacctttctggagacagggagggccccacccggggtgggtgggaaggctgatgatctgtctccagccccttccttctgcccacccacccttcttccctctgggcaactggacagatctgggagccagcagctggatgctgtggctggccagagacacctccaggctgtggcctgggggctggggggagccccaggctgaaaagggtccaattaaaacaaatggagccaaa

SEQ ID NO: 116717 - DNA, 768 bp, Homo sapiens
  Payload ID: 2759
  Gene Symbol: CERS4
  Gene Name: ceramide synthase 4
  ENST ID: ENST00000561053
  CDS Start-End: 360-768
cccactcaagccttttttcccctgctgggggccgaggcccggccaggagcagagtccggctgcctggggcgggcggcgcgtgtctgcagctgctccgggtagcccgctaggcgcgccgtccccagccccgccgccggccctcggtgcgcccggccgcctgcacccccaggagcagctgctgtgaataaacacagaagtggagctgggggactgattagaagcctcattcagtgcacctgggccccagcaggcccagccaggcgtggaggaagaggcattgaggactttccttacctgtttttccagctcacccactgccagcagagacctcccagctaactggaacctgtgtccacagaatgctgtccagtttcaacgagtggttttggcaggacaggttctggttaccacccaatgtcacgtggacagagctagaagaccgggatggccgtgtctacccccacccccaggacttgttggcagccctgcccctggcgctggtcctcctggccatgcgccttgcctttgagagattcattggcctgcccctgagccggtggctgggtgtgagggatcagaccaggaggcaagtgaagcccaacgccacgctggagaaacacttcctcacggaagggcacaggcccaaggagccccagctgtctctcctggccgcccagtgtggcctcacgctgcagcagacccagcgatggttccggagacgccggaaccaggatcgaccccagctgaccaagaagttctgtgaggcca

SEQ ID NO: 116718 - DNA, 568 bp, Homo sapiens
  Payload ID: 2759
  Gene Symbol: CERS4
  Gene Name: ceramide synthase 4
  ENST ID: ENST00000560412
  CDS Start-End: 474-568
actgtccccctcggggcttcccatcatggccgtctccccgagctatccgcgctcccccacgagggccggggcgcaacgggtgcccgaggacgcggctgtgaaacgggctggagcgagtaggggcgatcctggcctcgtgacgcgggggaatccggatgtgtgagccgggggagcgccccgtttccccgacgtgccagggctggggacgcagctggggccctggcctcggagtccgcagcccggccgcgtagacggcttctgagaaccgcttaaacacgtcattccaagcccgagctaacccatcaggcggccggggagcagctgctgtgaataaacacagaagtggagctgggggactgattagaagcctcattcagtgcacctgggccccagcaggcccagccaggcgtggaggaagaggcattgaggactttccttacctgtttttccagctcacccactgccagcagagaatgctgtccagtttcaacgagtggttttggcaggacaggttctggttaccacccaatgtcacgtggacagagctagaagaccgggatggccgtgt

SEQ ID NO: 116719 - DNA, 713 bp, Homo sapiens
  Payload ID: 2759
  Gene Symbol: CERS4
  Gene Name: ceramide synthase 4
  ENST ID: ENST00000558268
  CDS Start-End: 374-713
ccacggccccgccccgggctccccccactcaagccttttttcccctgctgggggccgaggcccggccaggagcagagtccggctgcctggggcgggcggcgcgtgtctgcagctgctccgggtagcccgctaggcgcgccgtccccagccccgccgccggccctcggtgcgcccggccgcctgcacccccagcctcaaatgggtctgccttccaggagcagctgctgtgaataaacacagaagtggagctgggggactgattagaagcctcattcagtgcacctgggccccagcaggcccagccaggcgtggaggaagaggcattgaggactttccttacctgtttttccagctcacccactgccagcagagaatgctgtccagtttcaacgagtggttttggcaggacaggttctggttaccacccaatgtcacgtggacagagctagaagaccgggatggccgtgtctacccccacccccaggacttgttggcagccctgcccctggcgctggtcctcctggccatgcgccttgcctttgagagattcattggcctgcccctgagccggtggctgggtgtgagggatcagaccaggaggcaagtgaagcccaacgccacgctggagaaacacttcctcacggaagggcacaggcccaaggagccccagctgtctctcctggccgcccagtgtggcctcacgctgcagcaga

SEQ ID NO: 116720 - DNA, 1637 bp, Homo sapiens
  Payload ID: 2759
  Gene Symbol: CERS4
  Gene Name: ceramide synthase 4
  Uniprot ID: Q9HA82
  ENST ID: ENST00000559450
  CDS Start-End: 141-1325
gccgaggcccggccaggagcagagtccggctgcctggggcgggcggcgcgtgtctgcagctgctccgggtagcccgctaggcgcgccgtccccagccccgccgccggccctcggtgcgcccggccgcctgcacccccagaatgctgtccagtttcaacgagtggttttggcaggacaggttctggttaccacccaatgtcacgtggacagagctagaagaccgggatggccgtgtctacccccacccccaggacttgttggcagccctgcccctggcgctggtcctcctggccatgcgccttgcctttgagagattcattggcctgcccctgagccggtggctgggtgtgagggatcagaccaggaggcaagtgaagcccaacgccacgctggagaaacacttcctcacggaagggcacaggcccaaggagccccagctgtctctcctggccgcccagtgtggcctcacgctgcagcagacccagcgatggttccggagacgccggaaccaggatcgaccccagctgaccaagaagttctgtgaggccagctggaggtttctcttctacctgtcctccttcgtgggcggcctctcggtcctgtaccacgagtcatggctgtgggcaccagtaatgtgctgggacaggtacccaaaccagactctgaagccatccctgtactggtggtacctcttggagctgggtttctacctctcactgctaatcaggctgccctttgatgtcaagcgcaaggatttcaaggagcaggtgatacaccacttcgtggcggtcatcctgatgaccttctcctacagtgccaacctgctgcgcattggctctctggtgctgctgttacacgattcctctgactacctgctggaggcctgtaagatggtcaactacatgcagtatcagcaagtgtgcgacgctctcttcctcatcttctcctttgtcttcttctacacccgactggtcctctttcccacccagatcctctacaccacatactacgagtccatcagcaacaggggccccttcttcggctactacttcttcaacgggcttctgatgttgctgcagctgctgcacgtgttctggtcttgcctcattctgcgcatgctctatagcttcatgaagaagggccagatggagaaggacattcgtagtgatgtagaagaatcagactccagtgaggaggcggcggcggcccaggaacctctgcagctaaagaacggggcagctggagggcccaggccagcccccactgatggccctcggagccgggtggccgggcgtctgaccaacaggcacacaacagccacatagccgggcggggctggctgtaaggggttgcccccccgccagtgccttggatatttctggggtgactggactggcgcccctgggccacctttctggagacagggagggccccacccggggtgggtgggaaggctgatgatctgtctccagccccttccttctgcccacccacccttcttccctctgggcaactggacagatctgggagccagcagctggatgctgtggctggccagagacacctccaggctgtggcctgggggctggggggagccccaggctgaaaagggtccaattaaaacaaatggagccaaa

SEQ ID NO: 116721 - DNA, 531 bp, Homo sapiens
  Payload ID: 2759
  Gene Symbol: CERS4
  Gene Name: ceramide synthase 4
  ENST ID: ENST00000561008
  CDS Start-End: 255-531
attatctttcttttccaggtgtgcaaacaagctcttggagggaaggagaggagaaaataaacaggagcagctgctgtgaataaacacagaagtggagctgggggactgattagaagcctcattcagtgcacctgggccccagcaggcccagccaggcgtggaggaagaggcattgaggactttccttacctgtttttccagctcacccactgccagcagagacctcccagctaactggaacctgtgtccacagaatgctgtccagtttcaacgagtggttttggcaggacaggttctggttaccacccaatgtcacgtggacagagctagaagaccgggatggccgtgtctacccccacccccaggacttgttggcagccctgcccctggcgctggtcctcctggccatgcgccttgcctttgagagattcattggcctgcccctgagccggtggctgggtgtgagggatcagaccaggaggcaagtgaagcccaacgccacgctggagaaacacttcctcacggaagggc

SEQ ID NO: 116722 - DNA, 1515 bp, Homo sapiens
  Payload ID: 2759
  Gene Symbol: CERS4
  Gene Name: ceramide synthase 4
  ENST ID: ENST00000559336
  CDS Start-End: 283-1203
ggagcagagtccggctgcctggggcgggcggcgcgtgtctgcagctgctccgggtagcccgctaggcgcgccgtccccagccccgccgccggccctcggtgcgcccggccgcctgcacccccaggagcagctgctgtgaataaacacagaagtggagctgggggactgattagaagcctcattcagtgcacctgggccccagcaggcccagccaggcgtggaggaagaggcattgaggactttccttacctgtttttccagctcacccactgccagcagagaatgctgtccagtttcaacgagtggttttggcaggacaggttctggttaccacccaatgtcacgtggacagagctagaagaccgggatggccgtgtctacccccacccccaggacttgttggcagccctgcccctggcgctggtcctcctggccatgcgccttgcctttgagagattcattggcctgcccctgagccggtggctgggtgtgagggatcagaccaggaggcaagtgaagcccaacgccacgctggagaaacacttcctcacggaagggcacaggcccaaggagccccagctgtctctcctggccgcccagtgtggcctcacgctgcagcagacccagcgatggttccggagacgccggaaccaggatcgaccccagctgaccaagaagttctgtgaggccagctggaggtttctcttctacctgtcctccttcgtgggcggcctctcggtcctgtaccacgagtcatggctgtgggcaccagtaatgtgctgggacaggtacccaaaccagactctgaagccatccctgtactggtggtacctcttggagctgggtttctacctctcactgctaatcaggctgccctttgatgtcaagcgcaaggatttcaaggagcaggtgatacaccacttcgtggcggtcatcctgatgaccttctcctacagtgccaacctgctgcgcattggctctctggtgctgctgttacacgattcctctgactacctgctggagatggagaaggacattcgtagtgatgtagaagaatcagactccagtgaggaggcggcggcggcccaggaacctctgcagctaaagaacggggcagctggagggcccaggccagcccccactgatggccctcggagccgggtggccgggcgtctgaccaacaggcacacaacagccacatagccgggcggggctggctgtaaggggttgcccccccgccagtgccttggatatttctggggtgactggactggcgcccctgggccacctttctggagacagggagggccccacccggggtgggtgggaaggctgatgatctgtctccagccccttccttctgcccacccacccttcttccctctgggcaactggacagatctgggagccagcagctggatgctgtggctggccagagacacctccaggctgtggcctgggggctggggggagccccaggctgaaaagggtccaattaaaacaaatggagccaaa

SEQ ID NO: 116723 - DNA, 758 bp, Homo sapiens
  Payload ID: 2759
  Gene Symbol: CERS4
  Gene Name: ceramide synthase 4
  ENST ID: ENST00000558877
  CDS Start-End: 182-758
gtgacctgggagcagcagaaatctggaaactgacagcatggacgtgctggccgcagcttccaggatctgctccgtcacccaggctggagtgcagtggtgtgatcacagctcactgcagcctcaaactcctgggctcaaccagtcctctcacctcagcctcctgagtagccgggattacagaatgctgtccagtttcaacgagtggttttggcaggacaggttctggttaccacccaatgtcacgtggacagagctagaagaccgggatggccgtgtctacccccacccccaggacttgttggcagccctgcccctggcgctggtcctcctggccatgcgccttgcctttgagagattcattggcctgcccctgagccggtggctgggtgtgagggatcagaccaggaggcaagtgaagcccaacgccacgctggagaaacacttcctcacggaagggcacaggcccaaggagccccagctgtctctcctggccgcccagtgtggcctcacgctgcagcagacccagcgatggttccggagacgccggaaccaggatcgaccccagctgaccaagaagttctgtgaggccagctggaggtttctcttctacctgtcctccttcgtgggcggcctctcggtcctgtaccacgagtcatggctgtgggcaccagtaatgtgctgggacaggtacccaaaccagactctgaagccatccctgtactggtggtacctcttggagctgggtttctacctctcac

SEQ ID NO: 116724 - DNA, 2051 bp, Homo sapiens
  Payload ID: 2760
  Gene Symbol: CERS5
  Gene Name: ceramide synthase 5
  Uniprot ID: Q8N5B7
  ENST ID: ENST00000317551
  CDS Start-End: 126-1304
ccagaaggggccggaagggggtggccgccggccgggccccgccctggggccgcctccccgcgggttccgttggctgtggcggcagctgacgcttgtggcggcggtggcttcggggtgggcgtaagatggcgacagcagcgcagggacccctaagcttgctgtggggctggctgtggagcgagcgcttctggctacccgagaacgtgagctgggctgatctggaggggccggccgacggctacggttacccccgcggccggcacatcctctcggtgttcccgctggcggcgggcatcttcttcgtgaggctgctcttcgagcgatttattgccaaaccctgtgcactctgtattggcatcgaggacagtggtccttatcaggcccaacccaatgccatccttgaaaaggtgttcatatctattaccaagtatcctgataagaaaaggctggagggcctgtcaaagcagctggattggaatgtccgaaaaatccaatgctggtttcgccatcggaggaatcaggacaagcccccaacgcttactaaattctgtgaaagcatgtggagattcacattttatttatgtatattctgctatggaattagatttctctggtcgtcaccttggttctgggacatccgacagtgctggcataactatccatttcagcctctttcaagtgggctttatcactattatatcatggaattggccttctattggtcccttatgttttctcagtttacagacattaaaagaaaggacttcctgatcatgtttgtgcatcacttggtcaccattgggcttatctccttctcctacatcaacaatatggttcgagtgggaactctgatcatgtgtctacatgatgtctcagacttcttgctggaggcagccaaactggccaattatgccaagtatcagcggctctgtgacaccctttttgtgatcttcagtgctgtttttatggttacacgactaggaatctatccattctggattctgaacacgaccctctttgagagttgggagataatcgggccttatgcttcatggtggctcctcaatggcctgctgctgaccctacagcttctgcatgtcatctggtcctacctaattgcacggattgctttgaaagccttgatcaggggaaaggtatcgaaggatgatcgcagtgatgtggagagcagctcagaggaagaagatgtgaccacctgcacaaaaagtccctgtgacagtagctccagcaatggtgccaatcgggtgaatggtcacatgggaggcagctactgggctgaagagtaaggtggttgctatagggacttcagcacacatggacttgtagggccactggcaacatactcctcttggcccttcccatatctactcttctgtgattgggagactgcaaggcactgaggagtatcaaagaagcaaatattttcactttgaaagaaaactgccattttgtatttaatagcctccaggttctttcagtaatgttatttgctctgtgtgtttttgtgtgtttgttgatgtgcgtttgtgcatatgcgtgagtttcattgccggggttggggcacaattgtggactggggccatgaggccttccctggtccccactgaacccaccttagttccacatttggctgcatcttgaattatgccaactccagacttctccttcttttttgcccttggctcttgacactctaaacccctggaccatctgaatggagcagccaagttcagtcccacatttctgtactgttcctctttcacagctggaatatgtcacatgatgaagttgtatagaaacagaaccatggatggatggccaggattgccgtggtccctagctagatccccttcctatcaatcacctgatagcaacagggacagctgccaataccctgctctttactcaatggtacccagggagggagcatgggaagagggtgagctgagggctggaggagggcaacagccactgggtgagctgttcacggtcttatactattgtttgtttgtgattaaaagtgcttcaaccca

SEQ ID NO: 116725 - DNA, 2998 bp, Homo sapiens
  Payload ID: 2760
  Gene Symbol: CERS5
  Gene Name: ceramide synthase 5
  ENST ID: ENST00000380189
  CDS Start-End: 24-611
ggtggcttcggggtgggcgtaagatggcgacagcagcgcagggacccctaagcttgctgtggggctggctgtggagcgagcgcttctggctacccgagaacgtgagctgggctgatctggaggggccggccgacggctacggttacccccgcggccggcacatcctctcggtgttcccgctggcggcgggcatcttcttcgtgaggctgctcttcgagcgatttattgccaaaccctgtgcactctgtattggcatcgaggacagtggtccttatcaggcccaacccaatgccatccttgaaaaggtgttcatatctattaccaagtatcctgataagaaaaggctggagggcctgtcaaagcagctggattggaatgtccgaaaaatccaatgctggtttcgccatcggaggaatcaggacaagcccccaacgcttactaaattctgtgaaagcattcaccttggttctgggacatccgacagtgctggcataactatccatttcagcctctttcaagtgggctttatcactattatatcatggaattggccttctattggtcccttatgttttctcagtttacagacattaaaagaaaggacttcctgatcatgtttgtgcatcacttggtcaccattgggcttatctccttctcctacatcaacaatatggttcgagtgggaactctgatcatgtgtctacatgatgtctcagacttcttgctggaggcagccaaactggccaattatgccaagtatcagcggctctgtgacaccctttttgtgatcttcagtgctgtttttatggttacacgactaggaatctatccattctggattctgaacacgaccctctttgagagttgggagataatcgggccttatgcttcatggtggctcctcaatggcctgctgctgaccctacagcttctgcatgtcatctggtcctacctaattgcacggattgctttgaaagccttgatcaggggaaagatggaatctcgctctgttgcccaggctggagtgcaatgtcacgatcttggctcaccacaacctccacctcctgggttcaagcgattctcctgcctcagcctccctagtagctgggattacaggcgcatgccaccaggcctggctaatttttgtattcttagtagaaacggggtttcactatgttggccaggctggtctctaactcccgaccttgtgatctgcccaccttggcctcccgaagtgctgggattacaggcgtgagccaccgcacctggcctgcctgttttaccttttaagatgtgacttagacgcaagaggaaagttctaccttcttcctgtcccttaggaatggcttttgttaaaggatgatagggttaagagttttttaagagatggcctcaaccatttcctaccccttacctacctgcttcagtggatttcatatttttctttttgacatggggcccttttcaaaggaaatcatatgcagaaccatataaactgtataaaagcagattgttaagttgcctagaagtggtgtgtggtagttcacaagccaccacaaggtgaccatgctgtgatattcaagatatggtttatataaggaactaaatacccacctcaccccactagtgtatgaggcaagtgtcctaagtgaatgggtatgtagtgtttcaaatacccatcttatgccaagagcgaaagaaaggtgccacttaatgataaactcataattgaactttgcaagttttgaagcagtcagactgtagtcaaagggctagggatttcagcctaaaggaatacagaatcccaagtgggaggggctctgcttgagcaggtactgatactaggaccaagtgatggaatgtggcctagatattgatgatctcctgcatcattattccttatagctgccattggctcagaacttgctcagtgtgcctgtgcatcttgctgtagctactggacatctctgttctctcctgcttttctttcctgactaggtgacctgtccaggaaggattagaccctgtactctccactctttcctcacctccttccttttttctatgcctggcgggagctggacagtttcatctcttgcatgtatcgaaggatgatcgcagtgatgtggagagcagctcagaggaagaagatgtgaccacctgcacaaaaagtccctgtgacagtagctccagcaatggtgccaatcgggtgaatggtcacatgggaggcagctactgggctgaagagtaaggtggttgctatagggacttcagcacacatggacttgtagggccactggcaacatactcctcttggcccttcccatatctactcttctgtgattgggagactgcaaggcactgaggagtatcaaagaagcaaatattttcactttgaaagaaaactgccattttgtatttaatagcctccaggttctttcagtaatgttatttgctctgtgtgtttttgtgtgtttgttgatgtgcgtttgtgcatatgcgtgagtttcattgccggggttggggcacaattgtggactggggccatgaggccttccctggtccccactgaacccaccttagttccacatttggctgcatcttgaattatgccaactccagacttctccttcttttttgcccttggctcttgacactctaaacccctggaccatctgaatggagcagccaagttcagtcccacatttctgtactgttcctctttcacagctggaatatgtcacatgatgaagttgtatagaaacagaaccatggatggatggccaggattgccgtggtccctagctagatccccttcctatcaatcacctgatagcaacagggacagctgccaataccctgctctttactcaatggtacccagggagggagcatgggaagagggtgagctgagggctggaggagggcaacagccactgggtgagctgttcacggtcttatactattgtttgtttgtgattaaaagtgcttcaaccca

SEQ ID NO: 116726 - DNA, 2855 bp, Homo sapiens
  Payload ID: 2760
  Gene Symbol: CERS5
  Gene Name: ceramide synthase 5
  Uniprot ID: Q8N5B7
  ENST ID: ENST00000422340
  CDS Start-End: 612-1616
ggatccccggaggcggtccccgggttgcagtgagggaagtgggccgggaggagagatgggcggtgaagaggcccggccctgccagggaggcgggcggatccgtggcagtgaccagaaggggccggaagggggtggccgccggccgggccccgccctggggccgcctccccgcgggttccgttggctgtggcggcagctgacgcttgtggcggcggtggcttcggggtgggcgtaagatggcgacagcagcgcagggacccctaagcttgctgtggggctggctgtggagcgagcgcttctggctacccgagaacgtgagctgggctgatctggaggggccggccgacggctacggttacccccgcggccggcacatcctctcggtgttcccgctggcggcgggcatcttcttcgtgaggctgctcttcgagcgtagagacggggtttcactatgttgaccaggctggtctccaactcctgaccttgtgatcctcctgcctcagcctcccaaagtgctgggattacaggcgtgagccaccacgcccggcttttttattctttttaaaaatttaaatccttgggactctgcttgatataacctcttcttttagatgatgaaaccaagacccaagagatttattgccaaaccctgtgcactctgtattggcatcgaggacagtggtccttatcaggcccaacccaatgccatccttgaaaaggtgttcatatctattaccaagtatcctgataagaaaaggctggagggcctgtcaaagcagctggattggaatgtccgaaaaatccaatgctggtttcgccatcggaggaatcaggacaagcccccaacgcttactaaattctgtgaaagcatgtggagattcacattttatttatgtatattctgctatggaattagatttctctggtcgtcaccttggttctgggacatccgacagtgctggcataactatccatttcagcctctttcaagtgggctttatcactattatatcatggaattggccttctattggtcccttatgttttctcagtttacagacattaaaagaaaggacttcctgatcatgtttgtgcatcacttggtcaccattgggcttatctccttctcctacatcaacaatatggttcgagtgggaactctgatcatgtgtctacatgatgtctcagacttcttgctggaggcagccaaactggccaattatgccaagtatcagcggctctgtgacaccctttttgtgatcttcagtgctgtttttatggttacacgactaggaatctatccattctggattctgaacacgaccctctttgagagttgggagataatcgggccttatgcttcatggtggctcctcaatggcctgctgctgaccctacagcttctgcatgtcatctggtcctacctaattgcacggattgctttgaaagccttgatcaggggaaaggtatcgaaggatgatcgcagtgatgtggagagcagctcagaggaagaagatgtgaccacctgcacaaaaagtccctgtgacagtagctccagcaatggtgccaatcgggtgaatggtcacatgggaggcagctactgggctgaagagtaaggtggttgctatagggacttcagcacacatggacttgtagggccactggcaacatactcctcttggcccttcccatatctactcttctgtgattgggagactgcaaggcactgaggagtatcaaagaagcaaatattttcactttgaaagaaaactgccattttgtatttaatagcctccaggttctttcagtaatgttatttgctctgtgtgtttttgtgtgtttgttgatgtgcgtttgtgcatatgcgtgagtttcattgccggggttggggcacaattgtggactggggccatgaggccttccctggtccccactgaacccaccttagttccacatttggctgcatcttgaattatgccaactccagacttctccttcttttttgcccttggctcttgacactctaaacccctggaccatctgaatggagcagccaagttcagtcccacatttctgtactgttcctctttcacagctggaatatgtcacatgatgaagttgtatagaaacagaaccatggatggatggccaggattgccgtggtccctagctagatccccttcctatcaatcacctgatagcaacagggacagctgccaataccctgctctttactcaatggtacccagggagggagcatgggaagagggtgagctgagggctggaggagggcaacagccactgggtgagctgttcacggtcttatactattgtttgtttgtgattaaaagtgcttcaacccacctctactgtctcaacctcttcagtgactctatccgcagtttcctgaatccataagctaattaagagcttttccaggtctgattcagaaggccctggacaccaaatttttcctttctgtgcatggtaggaagagtcagccagggtgcttacattttagagctttatgttttttaagaaaaagaagaatcacttgaacctgggaggcagaggttgcagcgagccaagatcgtgccactgcactccagcctgggcgacagaccgagactctgtctaaaaaaaaaaaaaaaaaaaaaaattaggtcatacttttagttcctcaacttgctatattgaatagactaatattgttgtgaaatatgaatgaatatgcttttgaaagtcagatgagaaatgtattttgccttctgaaatttgaacaattgccttgttaatacaaactggattggttggtgtagctaatctgacaaaagatgcaattggataaaacaata

SEQ ID NO: 116727 - DNA, 945 bp, Homo sapiens
  Payload ID: 2760
  Gene Symbol: CERS5
  Gene Name: ceramide synthase 5
  ENST ID: ENST00000438450
  CDS Start-End: 97-636
ggccgggccccgccctggggccgcctccccgcgggttccgttggctgtggcggcagctgacgcttgtggcggcggtggcttcggggtgggcgtaagatggcgacagcagcgcagggacccctaagcttgctgtggggctggctgtggagcgagcgcttctggctacccgagaacgtgagctgggctgatctggaggggccggccgacggctacggttacccccgcggccggcacatcctctcggtgttcccgctggcggcgggcatcttcttcgtgaggctgctcttcgagcgtatcctgataagaaaaggctggagggcctgtcaaagcagctggattggaatgtccgaaaaatccaatgctggtttcgccatcggaggaatcaggacaagcccccaacgcttactaaattctgtgaaagcatgtggagattcacattttatttatgtatattctgctatggaattagatttctctggtcgtcaccttggttctgggacatccgacagtgctggcataactatccatttcagcctctttcaagtgggctttatcactattatatcatggaattggccttctattggtcccttatgttttctcagtttacagacattaaaagaaaggacttcctgatcatgtttgtgcatcacttggtcaccattgggcttatctccttctcctacatcaacaatatggttcgagtgggaactctgatcatgtgtctacatgatgtctcagacttcttgctggaggcagccaaactggccaattatgccaagtatcagcggctctgtgacaccctttttgtgatcttcagtgctgtttttatggttacacgactaggaatctatccattctggattctgaacacgaccctctttgagagttgggagataatcgggccttatgcttcatggtggctcctcaatggcctgctgctga

SEQ ID NO: 116728 - DNA, 951 bp, Homo sapiens
  Payload ID: 2760
  Gene Symbol: CERS5
  Gene Name: ceramide synthase 5
  ENST ID: ENST00000542320
  CDS Start-End: 4-591
aagatggcgacagcagcgcagggacccctaagcttgctgtggggctggctgtggagcgagcgcttctggctacccgagaacgtgagctgggctgatctggaggggccggccgacggctacggttacccccgcggccggcacatcctctcggtgttcccgctggcggcgggcatcttcttcgtgaggctgctcttcgagcgatttattgccaaaccctgtgcactctgtattggcatcgaggacagtggtccttatcaggcccaacccaatgccatccttgaaaaggtgttcatatctattaccaagtatcctgataagaaaaggctggagggcctgtcaaagcagctggattggaatgtccgaaaaatccaatgctggtttcgccatcggaggaatcaggacaagcccccaacgcttactaaattctgtgaaagcattcaccttggttctgggacatccgacagtgctggcataactatccatttcagcctctttcaagtgggctttatcactattatatcatggaattggccttctattggtcccttatgttttctcagtttacagacattaaaagaaaggacttcctgatcatgtttgtgcatcacttggtcaccattgggcttatctccttctcctacatcaacaatatggttcgagtgggaactctgatcatgtgtctacatgatgtctcagacttcttgctggaggcagccaaactggccaattatgccaagtatcagcggctctgtgacaccctttttgtgatcttcagtgctgtttttatggttacacgactaggaatctatccattctgtttttctgttctattctattctactttcgccaatagaacacaagaaccctattgccctgcttttaccttagcctgtgctgaccttctgtggactctcataggacctctgctgcctcagaccgtatttctagcaa

SEQ ID NO: 116729 - DNA, 522 bp, Homo sapiens
  Payload ID: 2760
  Gene Symbol: CERS5
  Gene Name: ceramide synthase 5
  ENST ID: ENST00000546514
  CDS Start-End: 63-296
gttccgttggctgtggcggcagctgacgcttgtggcggcggtggcttcggggtgggcgtaagatggcgacagcagcgcagggacccctaagcttgctgtggggctggctgtggagcgagcgcttctggctacccgagaacgtgagctgggctgatctggaggggccggccgacggctacggttacccccgcggccggcacatcctctcggtgttcccgctggcggcgggcatcttcttcgtgaggctgctcttcgagcgagtctgctttgtcgcccagactggagtgcagtggtgagatctcagctcactgcaacctctgtctcccgagttcaagagatcctctcacctcagcctcctgagcagctgggactacagatttattgccaaaccctgtgcactctgtattggcatcgaggacagtggtccttatcaggcccaacccaatgccatccttgaaaaggtgttcatatctattaccaagtatcctgataagaaaaggctggagggcctgtcaaagcagc

SEQ ID NO: 116730 - DNA, 579 bp, Homo sapiens
  Payload ID: 2760
  Gene Symbol: CERS5
  Gene Name: ceramide synthase 5
  ENST ID: ENST00000550258
  CDS Start-End: 30-230
ggcggcggtggcttcggggtgggcgtaagatggcgacagcagcgcagggacccctaagcttgctgtggggctggctgtggagcgagcgcttctggctacccgagaacgtgagctgggctgatctggaggggccggccgacggctacggttacccccgcggccggcacatcctctcggtgttcccgctggcggcgggcatcttcttcgtgaggctgctcttcgagcgataaagatattcactgaggctttggtgtgtgatattataatgtgaatttatacctgtgggtgattttgatcaagtctactcagactccaagaaaggagacatgtttctgccataggcctcagatttattgccaaaccctgtgcactctgtattggcatcgaggacagtggtccttatcaggcccaacccaatgccatccttgaaaaggtgttcatatctattaccaagtatcctgataagaaaaggctggagggcctgtcaaagcagctggattggaatgtccgaaaaatccaatgctggtttcgccatcggaggaatcaggacaagcccccaacgcttactaaattctgtga

SEQ ID NO: 116731 - DNA, 407 bp, Homo sapiens
  Payload ID: 2760
  Gene Symbol: CERS5
  Gene Name: ceramide synthase 5
  ENST ID: ENST00000550547
  CDS Start-End: 1-407
atttatgtatattctgctatggaattagatttctctggtcggacttcctgatcatgtttgtgcatcacttggtcaccattgggcttatctccttctcctacatcaacaatatggttcgagtgggaactctgatcatgtgtctacatgatgtctcagacttcttgctggaggcagccaaactggccaattatgccaagtatcagcggctctgtgacaccctttttgtgatcttcagtgctgtttttatggttacacgactaggaatctatccattctggattctgaacacgaccctctttgagagttgggagataatcgggccttatgcttcatggtggctcctcaatggcctgctgctgaccctacagcttctgcatgtcatctggtcctacctaattgcacggatt

SEQ ID NO: 116732 - DNA, 1218 bp, Homo sapiens
  Payload ID: 2760
  Gene Symbol: CERS5
  Gene Name: ceramide synthase 5
  ENST ID: ENST00000553122
  CDS Start-End: 1-335
ccctttttgtgatcttcagtgctgtttttatggttacacgactaggaatctatccattctggattctgaacacgaccctctttgagagttgggagataatcgggccttatgcttcatggtggctcctcaatggcctgctgctgaccctacagcttctgcatgtcatctggtcctacctaattgcacggattgctttgaaagccttgatcaggggaaaggtgacctgtccaggaaggattagaccctgtactctccactctttcctcacctccttccttttttctatgcctggcgggagctggacagtttcatctcttgcatgtatcgaaggatgatcgcagtgatgtggagagcagctcagaggaagaagatgtgaccacctgcacaaaaagtccctgtgacagtagctccagcaatggtgccaatcgggtgaatggtcacatgggaggcagctactgggctgaagagtaaggtggttgctatagggacttcagcacacatggacttgtagggccactggcaacatactcctcttggcccttcccatatctactcttctgtgattgggagactgcaaggcactgaggagtatcaaagaagcaaatattttcactttgaaagaaaactgccattttgtatttaatagcctccaggttctttcagtaatgttatttgctctgtgtgtttttgtgtgtttgttgatgtgcgtttgtgcatatgcgtgagtttcattgccggggttggggcacaattgtggactggggccatgaggccttccctggtccccactgaacccaccttagttccacatttggctgcatcttgaattatgccaactccagacttctccttcttttttgcccttggctcttgacactctaaacccctggaccatctgaatggagcagccaagttcagtcccacatttctgtactgttcctctttcacagctggaatatgtcacatgatgaagttgtatagaaacagaaccatggatggatggccaggattgccgtggtccctagctagatccccttcctatcaatcacctgatagcaacagggacagctgccaataccctgctctttactcaatggtacccagggagggagcatgggaagagggtgagctgagggctggaggagggcaacagccactgggtgagctgttcacggtcttatactattgtttgtttgtgattaaaagtgcttcaaccca

SEQ ID NO: 116733 - DNA, 2132 bp, Homo sapiens
  Payload ID: 2760
  Gene Symbol: CERS5
  Gene Name: ceramide synthase 5
  ENST ID: ENST00000547787
  CDS Start-End: 7-228
cgtaagatggcgacagcagcgcagggacccctaagcttgctgtggggctggctgtggagcgagcgcttctggctacccgagaacgtgagctgggctgatctggaggggccggccgacggctacggttacccccgcggccggcacatcctctcggtgttcccgctggcggcgggcatcttcttcgtgaggctgctcttcgagcgtagagacggggtttcactatgttgaccaggctggtctccaactcctgaccttgtgatcctcctgcctcagcctcccaaagtgctgggattacaggcgtgagccaccacgcccggcttttttattctttttaaaaatttaaatccttgggactctgcttgatataacctcttcttttagatgatgaaaccaagacccaagagatttattgccaaaccctgtgcactctgtattggcatcgaggacagtggtccttatcaggcccaacccaatgccatccttgaaaaggtgttcatatctattaccaagtatcctgataagaaaaggctggagggcctgtcaaagcagctggattggaatgtccgaaaaatccaatgctggtttcgccatcggaggaatcaggacaagcccccaacgcttactaaattctgtgaaagcatgtggagattcacattttatttatgtatattctgctatggaattagatttctctggtcgtcaccttggttctgggacatccgacagtgctggcataactatccatttcagcctctttcaagtgggctttatcactattatatcatggaattggccttctattggtcccttatgttttctcagtttacagacattaaaagaaaggacttcctgatcatgtttgtgcatcacttggtcaccattgggcttatctccttctcctacatcaacaatatggttcgagtgggaactctgatcatgtgtctacatgatgtctcagacttcttgctggaggcagccaaactggccaattatgccaagtatcagcggctctgtgacaccctttttgtgatcttcagtgctgtttttatggttacacgactaggaatctatccattctggattctgaacacgaccctctttgagagttgggagataatcgggccttatgcttcatggtggctcctcaatggcctgctgctgaccctacagcttctgcatgtcatctggtcctacctaattgcacggattgctttgaaagccttgatcaggggaaaggtatcgaaggatgatcgcagtgatgtggagagcagctcagaggaagaagatgtgaccacctgcacaaaaagtccctgtgacagtagctccagcaatggtgccaatcgggtgaatggtcacatgggaggcagctactgggctgaagagtaaggtggttgctatagggacttcagcacacatggacttgtagggccactggcaacatactcctcttggcccttcccatatctactcttctgtgattgggagactgcaaggcactgaggagtatcaaagaagcaaatattttcactttgaaagaaaactgccattttgtatttaatagcctccaggttctttcagtaatgttatttgctctgtgtgtttttgtgtgtttgttgatgtgcgtttgtgcatatgcgtgagtttcattgccggggttggggcacaattgtggactggggccatgaggccttccctggtccccactgaacccaccttagttccacatttggctgcatcttgaattatgccaactccagacttctccttcttttttgcccttggctcttgacactctaaacccctggaccatctgaatggagcagccaagttcagtcccacatttctgtactgttcctctttcacagctggaatatgtcacatgatgaagttgtatagaaacagaaccatggatggatggccaggattgccgtggtccctagctagatccccttcctatcaatcacctgatagcaacagggacagctgccaataccctgctctttactcaatggtacccagggagggagcatgggaagagggtgagctgagggctggaggagggcaacagccactgggtgagctgttcacggtcttatactattgtttgtttgtgattaaaagtgcttcaaccc

SEQ ID NO: 116734 - DNA, 565 bp, Homo sapiens
  Payload ID: 2760
  Gene Symbol: CERS5
  Gene Name: ceramide synthase 5
  ENST ID: ENST00000547455
  CDS Start-End: 73-354
ctccccgcgggttccgttggctgtggcggcagctgacgcttgtggcggcggtggcttcggggtgggcgtaagatggcgacagcagcgcagggacccctaagcttgctgtggggctggctgtggagcgagcgcttctggctacccgagaacgtgagctgggctgatctggaggggccggccgacggctacggttacccccgcggccggcacatcctctcggtgttcccgctggcggcgggcatcttcttcgtgaggctgctcttcgagcggtggtgttttgctcttgtcgcccaggctggagtccaatggtgcagtcacagctcactgcaacctctgcctcccaggttcaaatgattctcctgcctcagccttccaagtagctgggattatggatttattgccaaaccctgtgcactctgtattggcatcgaggacagtggtccttatcaggcccaacccaatgccatccttgaaaaggtgttcatatctattaccaagtatcctgataagaaaaggctggagggcctgtcaaagcagctggattggaatgtccgaaaaatccaat

SEQ ID NO: 116735 - DNA, 825 bp, Homo sapiens
  Payload ID: 2760
  Gene Symbol: CERS5
  Gene Name: ceramide synthase 5
  ENST ID: ENST00000547800
  CDS Start-End: 47-825
cggcagctgacgcttgtggcggcggtggcttcggggtgggcgtaagatggcgacagcagcgcagggacccctaagcttgctgtggggctggctgtggagcgagcgcttctggctacccgagaacgtgagctgggctgatctggaggggccggccgacggctacggttacccccgcggccggcacatcctctcggtgttcccgctggcggcgggcatcttcttcgtgaggctgctcttcgagcgatttattgccaaaccctgtgcactctgtattggcatcgaggacagtggtccttatcaggcccaacccaatgccatccttgaaaaggtgttcatatctattaccaagtatcctgataagaaaaggctggagggcctgtcaaagcagctggattggaatgtccgaaaaatccaatgctggtttcgccatcggaggaatcaggacaagcccccaacgcttactaaattctgtgaaagcatgtggagattcacattttatttatgtatattctgctatggaattagatttctctggtcgtcaccttggttctgggacatccgacagtgctggcataactatccatttcaggacttcctgatcatgtttgtgcatcacttggtcaccattgggcttatctccttctcctacatcaacaatatggttcgagtgggaactctgatcatgtgtctacatgatgtctcagacttcttgctggaggcagccaaactggccaattatgccaagtatcagcggctctgtgacaccctttttgtgatcttcagtgctgtttttatggttacacgactaggaatctatccattctg

SEQ ID NO: 116736 - DNA, 558 bp, Homo sapiens
  Payload ID: 2760
  Gene Symbol: CERS5
  Gene Name: ceramide synthase 5
  ENST ID: ENST00000549389
  CDS Start-End: 32-313
gtggcggcggtggcttcggggtgggcgtaagatggcgacagcagcgcagggacccctaagcttgctgtggggctggctgtggagcgagcgcttctggctacccgagaacgtgagctgggctgatctggaggggccggccgacggctacggttacccccgcggccggcacatcctctcggtgttcccgctggcggcgggcatcttcttcgtgaggctgctcttcgagcggctggagtgtagtggcgcgatctcactgcaaccttcgactccctggttcaagcgattctcctgcctcagcctcccgagtagctaggattacagatttattgccaaaccctgtgcactctgtattggcatcgaggacagtggtccttatcaggcccaacccaatgccatccttgaaaaggtgttcatatctattaccaagtatcctgataagaaaaggctggagggcctgtcaaagcagctggattggaatgtccgaaaaatccaatgctggtttcgccatcggaggaatcaggacaagcccccaacgcttactaaattctgtgaaagcat

SEQ ID NO: 116737 - DNA, 2260 bp, Homo sapiens
  Payload ID: 2760
  Gene Symbol: CERS5
  Gene Name: ceramide synthase 5
  ENST ID: ENST00000551697
  CDS Start-End: 6-1061
gtaagatggcgacagcagcgcagggacccctaagcttgctgtggggctggctgtggagcgagcgcttctggctacccgagaacgtgagctgggctgatctggaggggccggccgacggctacggttacccccgcggccggcacatcctctcggtgttcccgctggcggcgggcatcttcttcgtgaggctgctcttcgagcgatttattgccaaaccctgtgcactctgtattggcatcgaggacagtggtccttatcaggcccaacccaatgccatccttgaaaaggtgttcatatctattaccaagtatcctgataagaaaaggctggagggcctgtcaaagcagctggattggaatgtccgaaaaatccaatgctggtttcgccatcggaggaatcaggacaagcccccaacgcttactaaattctgtgaaagcatgtggagattcacattttatttatgtatattctgctatggaattagatttctctggtcgtcaccttggttctgggacatccgacagtgctggcataactatccatttcagcctctttcaagtgggctttatcactattatatcatggaattggccttctattggtcccttatgttttctcagtttacagacattaaaagaaaggacttcctgatcatgtttgtgcatcacttggtcaccattgggcttatctccttctcctacatcaacaatatggttcgagtgggaactctgatcatgtgtctacatgatgtctcagacttcttgctggaggcagccaaactggccaattatgccaagtatcagcggctctgtgacaccctttttgtgatcttcagtgctgtttttatggttacacgactaggaatctatccattctgtttttctgttctattctattctactttcgccaatagaacacaagaaccctattgccctgcttttaccttagcctgtgctgaccttctgtggactctcataggacctctgctgcctcagaccgtatttctagcaaggtcggatccagactcagagtacccggcttggttggcttctcaggactgactcatctctgaggaacagtcctcattttatgcctaagattctgaacacgaccctctttgagagttgggagataatcgggccttatgcttcatggtggctcctcaatggcctgctgctgaccctacagcttctgcatgtcatctggtcctacctaattgcacggattgctttgaaagccttgatcaggggaaaggtgacctgtccaggaaggattagaccctgtactctccactctttcctcacctccttccttttttctatgcctggcgggagctggacagtttcatctcttgcatgtatcgaaggatgatcgcagtgatgtggagagcagctcagaggaagaagatgtgaccacctgcacaaaaagtccctgtgacagtagctccagcaatggtgccaatcgggtgaatggtcacatgggaggcagctactgggctgaagagtaaggtggttgctatagggacttcagcacacatggacttgtagggccactggcaacatactcctcttggcccttcccatatctactcttctgtgattgggagactgcaaggcactgaggagtatcaaagaagcaaatattttcactttgaaagaaaactgccattttgtatttaatagcctccaggttctttcagtaatgttatttgctctgtgtgtttttgtgtgtttgttgatgtgcgtttgtgcatatgcgtgagtttcattgccggggttggggcacaattgtggactggggccatgaggccttccctggtccccactgaacccaccttagttccacatttggctgcatcttgaattatgccaactccagacttctccttcttttttgcccttggctcttgacactctaaacccctggaccatctgaatggagcagccaagttcagtcccacatttctgtactgttcctctttcacagctggaatatgtcacatgatgaagttgtatagaaacagaaccatggatggatggccaggattgccgtggtccctagctagatccccttcctatcaatcacctgatagcaacagggacagctgccaataccctgctctttactcaatggtacccagggagggagcatgggaagagggtgagctgagggctggaggagggcaacagccactgggtgagctgttcacggtcttatactattgtttgtttgtgattaaaagtgcttcaacccacctcta

SEQ ID NO: 116738 - DNA, 1077 bp, Homo sapiens
  Payload ID: 2760
  Gene Symbol: CERS5
  Gene Name: ceramide synthase 5
  ENST ID: ENST00000550919
  CDS Start-End: 1-235
ctacatcaacaatatggttcgagtgggaactctgatcatgtgtctacatgatgtctcagacttcttgctggaggcagccaaactggccaattatgccaagtatcagcggctctgtgacaccctttttgtgatcttcagtgctgtttttatggttacacgactaggaatctatccattctggtatcgaaggatgatcgcagtgatgtggagagcagctcagaggaagaagatgtgaccacctgcacaaaaagtccctgtgacagtagctccagcaatggtgccaatcgggtgaatggtcacatgggaggcagctactgggctgaagagtaaggtggttgctatagggacttcagcacacatggacttgtagggccactggcaacatactcctcttggcccttcccatatctactcttctgtgattgggagactgcaaggcactgaggagtatcaaagaagcaaatattttcactttgaaagaaaactgccattttgtatttaatagcctccaggttctttcagtaatgttatttgctctgtgtgtttttgtgtgtttgttgatgtgcgtttgtgcatatgcgtgagtttcattgccggggttggggcacaattgtggactggggccatgaggccttccctggtccccactgaacccaccttagttccacatttggctgcatcttgaattatgccaactccagacttctccttcttttttgcccttggctcttgacactctaaacccctggaccatctgaatggagcagccaagttcagtcccacatttctgtactgttcctctttcacagctggaatatgtcacatgatgaagttgtatagaaacagaaccatggatggatggccaggattgccgtggtccctagctagatccccttcctatcaatcacctgatagcaacagggacagctgccaataccctgctctttactcaatggtacccagggagggagcatgggaagagggtgagctgagggctggaggagggcaacagccactgggtgagctgttcacggtcttatactattgtttgtttgtgattaaaagtgcttcaaccca

SEQ ID NO: 116739 - DNA, 578 bp, Homo sapiens
  Payload ID: 2760
  Gene Symbol: CERS5
  Gene Name: ceramide synthase 5
  ENST ID: ENST00000550899
  CDS Start-End: 73-306
ctccccgcgggttccgttggctgtggcggcagctgacgcttgtggcggcggtggcttcggggtgggcgtaagatggcgacagcagcgcagggacccctaagcttgctgtggggctggctgtggagcgagcgcttctggctacccgagaacgtgagctgggctgatctggaggggccggccgacggctacggttacccccgcggccggcacatcctctcggtgttcccgctggcggcgggcatcttcttcgtgaggctgctcttcgagcgggttcaagcaattctcctgcctcagcctcccaagtagctgggattacaggcgcccaccaccacgcccagataatttttttttgtatttttagtagagacggggtttcactatgttgaccaggctggtctccaactcctgaccttgtgatcctcctgcctcagcctcccaaagtgctgggattacaggcgtgagccaccacgcccggcttttttattctttttaaaaatttaaatccttgggactctgcttgatataacctcttcttttagatgatgaaaccaagacccaagagattctgattttgcaag

SEQ ID NO: 116740 - DNA, 7217 bp, Homo sapiens
  Payload ID: 2761
  Gene Symbol: CERS6
  Gene Name: ceramide synthase 6
  Uniprot ID: Q6ZMG9
  ENST ID: ENST00000305747
  CDS Start-End: 588-1742
agggctggttctgaagcttggcggcagcccctacctgctgacccaccgcctccgggcgcacgggaagaggactgagagccctgaaaccccagcggggcaggagccagcattctgagcatgtgcgagccagccagggggctagggcggatttggggggtcgactttaggtcgtcgccctaagcgcaaagcgaaagagcggtgagagcaggggcgggcgacactccccggagcggtgcccctgcgcccagggcgcagcgactgcgccctgccctgcgggtgtgggcgagttggccgcgtgtgtgcctcgctgtttgacgcgaagacgagccaatcagggcgggcggcccgagctgccatgtgacgggcaaggcggcccctttccccagcgcggccagagggaggagagaaccggggctcgccgcgagccttcgagagcagcggccgcggaggaggcggcggcggcgggcgggagcagcggcggcggcggcacaggctcggggccagccgggcgcgcatccccgggcgccctgcgcggtggagagcttggcgggctgcgggtgccgcaggacaggagtggacaaagcaagatggcagggatcttagcctggttctggaacgagaggttttggctcccgcacaatgtcacctgggcggacctgaagaacacggaggaggccaccttcccgcaggctgaggacctctatctcgcttttcccctggccttctgtatcttcatggtgcggctcatcttcgagagatttgtagccaaaccgtgcgccatagccctcaacattcaggccaatggaccacaaattgctccgcccaatgccattctggaaaaggtcttcactgcaattacaaagcatcctgatgaaaagagattggaaggcctctccaagcaactggactgggatgttcgaagcattcagcgctggtttcgacaaagacgcaatcaggagaagccaagcacgctgacgaggttctgtgagagcatgtggagattttcattttacctttatgtatttacctacggagtcagattcctgaaaaagaccccctggttgtggaatacgaggcattgctggtacaactacccctatcagccactcacaactgaccttcactactattacatcctggagctgtcgttttattggtctttgatgttttctcagttcactgatatcaaaagaaaggactttggcattatgttcctgcaccaccttgtatctattttcttgattaccttttcatatgtcaacaatatggcccgagtaggaacgctggtcctttgtcttcatgattcagctgatgctcttctggaggctgccaaaatggcaaattatgccaagtttcagaaaatgtgtgatctcctgtttgttatgtttgccgtggtttttatcaccacacgactgggtatatttcctctctgggtgttaaataccacattatttgaaagctgggagatcgttggaccttacccttcctggtgggtttttaacctactgctattgctagtacaagggttgaactgcttctggtcttacttgattgtgaaaatagcttgcaaagctgtttcaagaggcaaggtgtccaaggatgatcgaagtgatattgagtctagctcagatgaggaggactcagaacctccgggaaagaatccccacactgcgacaaccaccaatgggaccagtggtaccaacgggtatctcctgactggctcctgctccatggatgattaattactcaaaactacaagtcccaagcaaagtgaactatttgttcctggaagtatttaataagttgcaaatgcagttcctttcataatatctcagcaccagaaacaaaaattaagattatcaaagcattttgaatagtgcactgccatgtgtcctgtctgtgaatgaagaagaattaccattctctctttgtaggcatgctgtatgtaattgacacaagggaacagtatttgcatttgtactgtcttagaatattatttatttttttgtatttgtaaatctgtggacaaaagagggtttcctcactccttttactcactgggctcatgacagtgaaggagatgctccatctgcttctccccctttctcttgctgtagtccaatgtgctatgagcatcagcttactttgtcacttagagcaagcaaaacccagtgcaagagtctcgttcagctctaaataggtttgctttcttttagttacagtgcccattttgaaattgcctatacagtcttagtgaccatttaaaccggacgaactaggtgtttaattttcactcttcatgttcaattagcagttcaaattaaagaagatggttattggagaacttttttgaatggttttgtattaaattgctttgaaatagatttcatttcttgtgcacacagccaagatttcttcaatgggtgtgagctagttgagggttaaccttgtaggttgcagagtgtatttgtttgtttgtttgtttttctctgtgatgaggtcagtgctctgattttgaaggaggatattcactgaagctcatagttataaacaaggaaatcactgttaagaatgggaatttgtcctgtgttctgggaataacataaagagagcaactgatttcagccaggttttgccactaccctataattagtgcagtcttatgttataaaagaaagaagttaactatatttggggacaaaaaaatatttcaagagttgataaagattacctgtgcagtgcagagcactttaatgcaaccagctttcaagaaaaagccctatctagtacttgatgttgatgtttttattttgctgagcaaaataaagccaatgggagaaagactattttaccctttgcttttctccttaaacgtaatccagatgactttcctgttactaaacactgagcagcattacactacaatgcttctttggtttccaggaatttttttcaaatggggctgtttctggaaaaatgaaaaattctattggacaatggcaatatcaacaatgaggaaaattactgaagaataagtttccataagtctcctacatagcagtgttatttatgtacagataagaaaaccatatgtcagccaaagattttatctcttcttctaacttttagtaagaggaaaaagggattataaaacccttcataaatcaagaaggccatcacttagaacgaaccccaaacaaaaatgccataatataaatgtgtgaatcagggctgtgaagacaacagcagaaatgctaacaagcgtgcagaaacaccagagagtgcgtatcctgctcagaaccattcacatttaattcaattcttggaaaaaattaaagctttttgcccacaatttgcaatctgtgggttaatagttaaaagaatgttcccaaccaaaaaattcttaccgtaatattatatcttgccctacttatttacaaaataatatgtttctgttatggtccttagtaataattgaagaggcttagaaatacatctgcttgtttattgagaaaacgatgcaaataattctgcttttagagccttgttattttatttcacaaaacaggcatatgtctaggagtgtaatttgtggatggttgagtttgtaagaacaatcataaaaggacttgttagtctccagaacatctgctaaaatgcaagtatatgtataaggtaatagcatattacagctgaaaattttgagaaggtaaaagtttcttaattaaaatatgaacatatttagcttgctttagtgtctggggcaagtcctctcaatggctaaaattaactttagagatccatgtgttcaggtttagatcatatgacactcgagcacagaagaataatttcaaggaggtcatcttgtaaattaaaggtttagaagaattgcataaaacgtagtaaatggggtctgtcattagcaaaggcaaatctaagcaatcatttttccccccagaagttacttagaaggagaactgggaacacttggggtctctctaactgatggcattcacttcacacagtcgtctatgttatccagagatttttatttcattttacattttagggcacagttctttggggctaattaaaatggggtttgcaggctttttatggtgaagaataatatatctctgtctatagctttcccatggtagcctgataaggctgagagagaaaaatatgtgcagtatctcatcctccccctgtaccaggccatagctttgaagtgtattttgtaaattcaactataggttagtcagaatgctgtttttcgttaattaacttagcctgtgttgatatctcctccttcctggtcacattcaaaccttcccagagtacaaaggggtatgtagaaaggattccagaagaagtaatactttattctctaatgttaatagcttttctggatctcttagtagggggaaagtagaaaatcgagtagaatttggcctcaggtcaataaatgatataaaaacatgtgttctatttatgtatatatatgtatgtttctccaaaaagtgataaaaccaaaatatcactgactcatccctacccatattcttttcataaaacccactcaccaggtacaatagaaacttccctccttgtttgtcagcctcctgttcatgttccccacacacctgaaggtggtagaatcttttcagcctcttagccagtgagctaaatatggctaagcacaggtcataagagcacctaaggccagcatataagccaactacagttcacctttccaaatttggtcctatggatgttgagcatagggaagcaactctcagtattttggattattcaagtgtatgtggtaaaaatgcagatgattgctgctttaccccagggtttattagcatcctacttctgctgggctgcatcattatataatgccacaggcatctagtcaaggtaaagaagccagaaaggttaggcaagaagtgagataaaatcagatcacctttgatcaaaatggttggtgaacctccacatgtccagttctgttgccaaactttccattcagagtatttggtggagtttgaatttgagcaaactaaatgccttcatcttaggtagaaagggcctgaatcttccattttatattcaaacctcattgttatttggcctaagtaaaaagtcagatttcatttccatttacctgagttcgctttaaagagcttttcaaagagagctttatagacacccacaattgtccccaatctcttcatgatgttgcattaatagttgtttttgtccctttcttggaaatgttaatgccaaagttgcctgaacattgggcggttttcttaatttgaagtataaaaattataaagagtaattccaaaggtattaaaagattgtttaacagtatgtgtggtgatgtcattatctccagagaggcttcaagaaatcctttggaaataaaaagttaaatgtttacatttcatgtggtatttcaggtcttcaggttctgattagcttacttttttcctttgtctttggctgatttctgctttgtagataaataataatagccctgagatgtttctaacatttaaataagaaaaaaatcaaatcgaagtcagcctgctggaaaagtgatcacatggcagttgcagtaacttgtatggaaagagaaaatgcaatgagcccagttactgcacttgccactaccatgctgtccatggaaggaataatcagcagttcagttgtcacaagccgcccttgaagaaaacgcagcaaaatattttaaaatgaagatattgcagtccccagagccagtgaaggtttcttttggtaaaatgaaattgtgccattgtcaaagtaccccgtagtgatgagcactgactggttcactggccacattttagttcttcataataataggccacaaaagggctctgtggtttgcctccatgtgcactggcccctccccacccctagggggcactcagtagctgctgagaaggcctgtccacgaggctgttggaacccctccaataaatacttagaggtagtgtatctgatgcttgttttcgtggagaaaattgtattggagaacttaaaacatcacgaatatttttaataggatccgcagacacccaaaggagaagcttggtcttttccaggtatttccaacttgagttcaacccaaagcctttgaaaggaatgcattaccacatgaccacatgctgagaccccatggggtctaacacgggacctaagaaagtctctgcagccagatagtacatggtgtctccacaaaactaggcattctggagattgcccagaaagggatgtgaggggaccgttaagatctgtcttgcttatctcatgcactcacattccttcagcctcctggagttcctgataaaaggaagccagggtgtggacattttttagctattgatttcccaatagcttgtggatcagttgtacacccacacttccttctctgcctaattccgtttttctggaaaaagtagtatgcccatgtatgtgtgtttttcttaacacaggtccatgaaagtttggcttcctggtttgatgtctgttgcgtggcctggaaaccagggagcagcaactattgagatggtttctgtgttcagtgaaaaattctatttcattgagacaattttttctttatccacagtaattttttgacactgtcatcatgaaactacccttaggaaaataagattacctgcaaaaaaaaaaaagaaatgagttatggaataggaacagttatgtgatgattctgaaactttaacttagagcttcattactttaagaatggaaaacaacctctgagtttgatttcccaaagtttcataaagcccctaagctcatgattttcatcaactctttgcccacatagtcatttacctccacagccgtttgttgtcatagaaggggtggtggtgtttggatttgatttttttcaacttgcagtgagaaataggataggtgacaaaaccttacttgttttcttaagacaattcagtgcttgagcatctctgtcagaaatggaatgaaatactgttagccaattagaattattttatgtattgttattgtgttttgctgatttttatatgaaaatataattattcattcttgatctctggaagcaatcattattatgaggatcattttactttggaaacactttcataataaagataagtattaagagtgcagtg

SEQ ID NO: 116741 - DNA, 6851 bp, Homo sapiens
  Payload ID: 2761
  Gene Symbol: CERS6
  Gene Name: ceramide synthase 6
  Uniprot ID: Q6ZMG9
  ENST ID: ENST00000392687
  CDS Start-End: 201-1379
gcggccagagggaggagagaaccggggctcgccgcgagccttcgagagcagcggccgcggaggaggcggcggcggcgggcgggagcagcggcggcggcggcacaggctcggggccagccgggcgcgcatccccgggcgccctgcgcggtggagagcttggcgggctgcgggtgccgcaggacaggagtggacaaagcaagatggcagggatcttagcctggttctggaacgagaggttttggctcccgcacaatgtcacctgggcggacctgaagaacacggaggaggccaccttcccgcaggctgaggacctctatctcgcttttcccctggccttctgtatcttcatggtgcggctcatcttcgagagatttgtagccaaaccgtgcgccatagccctcaacattcaggccaatggaccacaaattgctccgcccaatgccattctggaaaaggtcttcactgcaattacaaagcatcctgatgaaaagagattggaaggcctctccaagcaactggactgggatgttcgaagcattcagcgctggtttcgacaaagacgcaatcaggagaagccaagcacgctgacgaggttctgtgagagcatgtggagattttcattttacctttatgtatttacctacggagtcagattcctgaaaaagaccccctggttgtggaatacgaggcattgctggtacaactacccctatcagccactcacaactgaccttcactactattacatcctggagctgtcgttttattggtctttgatgttttctcagttcactgatatcaaaagaaaggactttggcattatgttcctgcaccaccttgtatctattttcttgattaccttttcatatgtcaacaatatggcccgagtaggaacgctggtcctttgtcttcatgattcagctgatgctcttctggaggctgccaaaatggcaaattatgccaagtttcagaaaatgtgtgatctcctgtttgttatgtttgccgtggtttttatcaccacacgactgggtatatttcctctctgggtgttaaataccacattatttgaaagctgggagatcgttggaccttacccttcctggtgggtttttaacctactgctattgctagtacaagggttgaactgcttctggtcttacttgattgtgaaaatagcttgcaaagctgtttcaagaggcaaggctgggaagtggaaccctttacatgtgtccaaggatgatcgaagtgatattgagtctagctcagatgaggaggactcagaacctccgggaaagaatccccacactgcgacaaccaccaatgggaccagtggtaccaacgggtatctcctgactggctcctgctccatggatgattaattactcaaaactacaagtcccaagcaaagtgaactatttgttcctggaagtatttaataagttgcaaatgcagttcctttcataatatctcagcaccagaaacaaaaattaagattatcaaagcattttgaatagtgcactgccatgtgtcctgtctgtgaatgaagaagaattaccattctctctttgtaggcatgctgtatgtaattgacacaagggaacagtatttgcatttgtactgtcttagaatattatttatttttttgtatttgtaaatctgtggacaaaagagggtttcctcactccttttactcactgggctcatgacagtgaaggagatgctccatctgcttctccccctttctcttgctgtagtccaatgtgctatgagcatcagcttactttgtcacttagagcaagcaaaacccagtgcaagagtctcgttcagctctaaataggtttgctttcttttagttacagtgcccattttgaaattgcctatacagtcttagtgaccatttaaaccggacgaactaggtgtttaattttcactcttcatgttcaattagcagttcaaattaaagaagatggttattggagaacttttttgaatggttttgtattaaattgctttgaaatagatttcatttcttgtgcacacagccaagatttcttcaatgggtgtgagctagttgagggttaaccttgtaggttgcagagtgtatttgtttgtttgtttgtttttctctgtgatgaggtcagtgctctgattttgaaggaggatattcactgaagctcatagttataaacaaggaaatcactgttaagaatgggaatttgtcctgtgttctgggaataacataaagagagcaactgatttcagccaggttttgccactaccctataattagtgcagtcttatgttataaaagaaagaagttaactatatttggggacaaaaaaatatttcaagagttgataaagattacctgtgcagtgcagagcactttaatgcaaccagctttcaagaaaaagccctatctagtacttgatgttgatgtttttattttgctgagcaaaataaagccaatgggagaaagactattttaccctttgcttttctccttaaacgtaatccagatgactttcctgttactaaacactgagcagcattacactacaatgcttctttggtttccaggaatttttttcaaatggggctgtttctggaaaaatgaaaaattctattggacaatggcaatatcaacaatgaggaaaattactgaagaataagtttccataagtctcctacatagcagtgttatttatgtacagataagaaaaccatatgtcagccaaagattttatctcttcttctaacttttagtaagaggaaaaagggattataaaacccttcataaatcaagaaggccatcacttagaacgaaccccaaacaaaaatgccataatataaatgtgtgaatcagggctgtgaagacaacagcagaaatgctaacaagcgtgcagaaacaccagagagtgcgtatcctgctcagaaccattcacatttaattcaattcttggaaaaaattaaagctttttgcccacaatttgcaatctgtgggttaatagttaaaagaatgttcccaaccaaaaaattcttaccgtaatattatatcttgccctacttatttacaaaataatatgtttctgttatggtccttagtaataattgaagaggcttagaaatacatctgcttgtttattgagaaaacgatgcaaataattctgcttttagagccttgttattttatttcacaaaacaggcatatgtctaggagtgtaatttgtggatggttgagtttgtaagaacaatcataaaaggacttgttagtctccagaacatctgctaaaatgcaagtatatgtataaggtaatagcatattacagctgaaaattttgagaaggtaaaagtttcttaattaaaatatgaacatatttagcttgctttagtgtctggggcaagtcctctcaatggctaaaattaactttagagatccatgtgttcaggtttagatcatatgacactcgagcacagaagaataatttcaaggaggtcatcttgtaaattaaaggtttagaagaattgcataaaacgtagtaaatggggtctgtcattagcaaaggcaaatctaagcaatcatttttccccccagaagttacttagaaggagaactgggaacacttggggtctctctaactgatggcattcacttcacacagtcgtctatgttatccagagatttttatttcattttacattttagggcacagttctttggggctaattaaaatggggtttgcaggctttttatggtgaagaataatatatctctgtctatagctttcccatggtagcctgataaggctgagagagaaaaatatgtgcagtatctcatcctccccctgtaccaggccatagctttgaagtgtattttgtaaattcaactataggttagtcagaatgctgtttttcgttaattaacttagcctgtgttgatatctcctccttcctggtcacattcaaaccttcccagagtacaaaggggtatgtagaaaggattccagaagaagtaatactttattctctaatgttaatagcttttctggatctcttagtagggggaaagtagaaaatcgagtagaatttggcctcaggtcaataaatgatataaaaacatgtgttctatttatgtatatatatgtatgtttctccaaaaagtgataaaaccaaaatatcactgactcatccctacccatattcttttcataaaacccactcaccaggtacaatagaaacttccctccttgtttgtcagcctcctgttcatgttccccacacacctgaaggtggtagaatcttttcagcctcttagccagtgagctaaatatggctaagcacaggtcataagagcacctaaggccagcatataagccaactacagttcacctttccaaatttggtcctatggatgttgagcatagggaagcaactctcagtattttggattattcaagtgtatgtggtaaaaatgcagatgattgctgctttaccccagggtttattagcatcctacttctgctgggctgcatcattatataatgccacaggcatctagtcaaggtaaagaagccagaaaggttaggcaagaagtgagataaaatcagatcacctttgatcaaaatggttggtgaacctccacatgtccagttctgttgccaaactttccattcagagtatttggtggagtttgaatttgagcaaactaaatgccttcatcttaggtagaaagggcctgaatcttccattttatattcaaacctcattgttatttggcctaagtaaaaagtcagatttcatttccatttacctgagttcgctttaaagagcttttcaaagagagctttatagacacccacaattgtccccaatctcttcatgatgttgcattaatagttgtttttgtccctttcttggaaatgttaatgccaaagttgcctgaacattgggcggttttcttaatttgaagtataaaaattataaagagtaattccaaaggtattaaaagattgtttaacagtatgtgtggtgatgtcattatctccagagaggcttcaagaaatcctttggaaataaaaagttaaatgtttacatttcatgtggtatttcaggtcttcaggttctgattagcttacttttttcctttgtctttggctgatttctgctttgtagataaataataatagccctgagatgtttctaacatttaaataagaaaaaaatcaaatcgaagtcagcctgctggaaaagtgatcacatggcagttgcagtaacttgtatggaaagagaaaatgcaatgagcccagttactgcacttgccactaccatgctgtccatggaaggaataatcagcagttcagttgtcacaagccgcccttgaagaaaacgcagcaaaatattttaaaatgaagatattgcagtccccagagccagtgaaggtttcttttggtaaaatgaaattgtgccattgtcaaagtaccccgtagtgatgagcactgactggttcactggccacattttagttcttcataataataggccacaaaagggctctgtggtttgcctccatgtgcactggcccctccccacccctagggggcactcagtagctgctgagaaggcctgtccacgaggctgttggaacccctccaataaatacttagaggtagtgtatctgatgcttgttttcgtggagaaaattgtattggagaacttaaaacatcacgaatatttttaataggatccgcagacacccaaaggagaagcttggtcttttccaggtatttccaacttgagttcaacccaaagcctttgaaaggaatgcattaccacatgaccacatgctgagaccccatggggtctaacacgggacctaagaaagtctctgcagccagatagtacatggtgtctccacaaaactaggcattctggagattgcccagaaagggatgtgaggggaccgttaagatctgtcttgcttatctcatgcactcacattccttcagcctcctggagttcctgataaaaggaagccagggtgtggacattttttagctattgatttcccaatagcttgtggatcagttgtacacccacacttccttctctgcctaattccgtttttctggaaaaagtagtatgcccatgtatgtgtgtttttcttaacacaggtccatgaaagtttggcttcctggtttgatgtctgttgcgtggcctggaaaccagggagcagcaactattgagatggtttctgtgttcagtgaaaaattctatttcattgagacaattttttctttatccacagtaattttttgacactgtcatcatgaaactacccttaggaaaataagattacctgcaaaaaaaaaaaagaaatgagttatggaataggaacagttatgtgatgattctgaaactttaacttagagcttcattactttaagaatggaaaacaacctctgagtttgatttcccaaagtttcataaagcccctaagctcatgattttcatcaactctttgcccacatagtcatttacctccacagccgtttgttgtcatagaaggggtggtggtgtttggatttgatttttttcaacttgcagtgagaaataggataggtgacaaaaccttacttgttttcttaagacaattcagtgcttgagcatctctgtcagaaatggaatgaaatactgttagccaattagaattattttatgtattgttattgtgttttgctgatttttatatgaaaatataattattcattcttgatctctggaagcaatcattattatgaggatcattttactttggaaacactttcataataaagataagtattaagagtgca

SEQ ID NO: 116742 - DNA, 2190 bp, Homo sapiens
  Payload ID: 2762
  Gene Symbol: CPTP
  Gene Name: ceramide-1-phosphate transfer protein
  Uniprot ID: Q5TA50
  ENST ID: ENST00000343938
  CDS Start-End: 412-1056
gagggcggggcgagggcggggcggtgggcggggacggggcccgcacggcggctacggcctaggtgagcggctcggactcggcggccgcacctgcccaacccaacccgcacggtccggaagtcgccgaggggccgggagcgggaggggacgtcgtcctagagggccggagcgggcgggcggccgaggacccggctcccgcgcaggacggagccgtggctcaggtcggcccctccccaacaccaccccgggcctccgccccttcctgggcctctcggtggagcagggacccgaaccggtgcccatccagtccggtgccatctgaagcccccttcccagaaaatgagccacagagcaagctgaccccagcgacacagccccccagccctactgtatttccgttcctatcaaaaaatggatgactcggagacaggtttcaatctgaaagtcgtcctggtcagtttcaagcagtgtctcgatgagaaggaagaggtcttgctggacccctacattgccagctggaagggcctggtcaggtttctgaacagcctgggcaccatcttctcattcatctccaaggacgtggtctccaagctgcggatcatggagcgcctcaggggcggcccgcagagcgagcactaccgcagcctgcaggccatggtggcccacgagctgagcaaccggctggtggacctggagcgccgctcccaccacccggagtctggctgccggacggtgctgcgcctgcaccgcgccctgcactggctgcagctgttcctggagggcctgcgtaccagccccgaggacgcacgcacctccgcgctctgcgccgactcctacaacgcctcgctggccgcctaccacccctgggtcgtgcgccgcgccgtcaccgtggccttctgcacgctgcccacacgcgaggtcttcctggaggccatgaacgtggggcccccggagcaggccgtgcagatgctaggcgaggccctccccttcatccagcgtgtctacaacgtctcccagaagctctacgccgagcactccctgctggacctgccctaggggcgggaagccagggccgcaccggctttcctgctgcagatctgggctgcggtggccagggccgtgagtcccgtggcagagccttctgggcgctgcgggaacaggagatcctctgtcgcccctgtgagctgagctggttaggaaccacagactgtgacagagaaggtggcgaccagcccagaagaggcccaccctctcggtccggaacaagacgcctcggccacggctccccctcggcctattacacgcgtgcgcagccaggcctcgccagggtgcggtgcagagcagagcaggcaggggtgggggccgggcctgcaagagcccgaaaggtcgccaccccctagcctgtggggtgcatctgcgaaccagggtgaagtcacaggtcccggggtgtggaggctccatcctttctcctttctgccagccgatgtgtcctcatctcaggcccgtgcctgggaccccgtgtctgcccaggtgggcagccttgagcccaggggactcagtgccctccatgccctggctggcagaaaccctcaacagcagtctgggcactgtggggctctccccgcctctcctgccttgtttgcccctcagcgtgccaggcagactgggggcaggacagccggaagctgagaccaaggctcctcacagaagggcccaggaagtccccgcccttgggacagcctcctccgtagcccctgcacggcaccagttccccgagggacgcagcaggccgcctcccgcagcggccgtgggtctgcacagcccagcccagcccaaggcccccaggagctgggactctgctacacccagtgaaatgctgtgtcccttctcccccgtgccccttgatgccccctccccacagtgctcaggagacccgtggggcacggaacaggagggtctggaccctgtggcccagccaaaggctaccagacagccacaaccagcccagccaccatccagtgcctggggcctggccactggctcttcacagtggaccccagcacctcggggtggcagagggacggcccccacggcccagcagacatgcgagcttccagagtgcaatctatgtgatgtcttccaacgttaataaatcacacagcctcccaggagggagacgctggggtgcac

SEQ ID NO: 116743 - DNA, 783 bp, Homo sapiens
  Payload ID: 2762
  Gene Symbol: CPTP
  Gene Name: ceramide-1-phosphate transfer protein
  ENST ID: ENST00000488011
  CDS Start-End: 431-783
cctgaccttgggccgttgggctgccctgggaaaggcctggaggtgtcctgggtcaccttcctgggctggcaagctgcctgcctcctgcacagccactgcccttcctgttgttaccgagccaccagccacagctctgagaagctcctggcagcttctgtttgccactggctcgaatctgggcaggaaggcaaggcccgcagaatatctggtgaccaagaaggaaaccccagagcctcagagaccatcttctcagtggacaaaattaaggcccgaggaggggaggggcgtgctggaagtctatgggactgcatctttctgaggcccaggagcagccatcccccacacctgaagcccgaaaatgagccacagagcaagctgaccccagcgacacagccccccagccctactgtatttccgttcctatcaaaaaatggatgactcggagacaggtttcaatctgaaagtcgtcctggtcagtttcaagcagtgtctcgatgagaaggaagaggtcttgctggacccctacattgccagctggaagggcctggtcaggtttctgaacagcctgggcaccatcttctcattcatctccaaggacgtggtctccaagctgcggatcatggagcgcctcaggggcggcccgcagagcgagcactaccgcagcctgcaggccatggtggcccacgagctgagcaaccggctggtggacctggagcgccgctcccaccacccggagtctggctgccggacggtgctgcgcctgcaccgcgccctgcactggct

SEQ ID NO: 116744 - DNA, 1215 bp, Homo sapiens
  Payload ID: 2763
  Gene Symbol: CER1
  Gene Name: cerberus 1, DAN family BMP antagonist
  Uniprot ID: O95813
  ENST ID: ENST00000380911
  CDS Start-End: 46-849
ctttgggcctcatcatttacaaaagaagcttgggcccctgacagcatgcatctcctcttatttcagctgctggtactcctgcctctaggaaagaccacacggcaccaggatggccgccagaatcagagttctctttcccccgtactcctgccaaggaatcaaagagagcttcccacaggcaaccatgaggaagctgaggagaagccagatctgtttgtcgcagtgccacaccttgtagccaccagccctgcaggggaaggccagaggcagagagagaagatgctgtccagatttggcaggttctggaagaagcctgagagagaaatgcatccatccagggactcagatagtgagcccttcccacctgggacccagtccctcatccagccgatagatggaatgaaaatggagaaatctcctcttcgggaagaagccaagaaattctggcaccacttcatgttcagaaaaactccggcttctcagggggtcatcttgcccatcaaaagccatgaagtacattgggagacctgcaggacagtgcccttcagccagactataacccacgaaggctgtgaaaaagtagttgttcagaacaacctttgctttgggaaatgcgggtctgttcattttcctggagccgcgcagcactcccatacctcctgctctcactgtttgcctgccaagttcaccacgatgcacttgccactgaactgcactgaactttcctccgtgatcaaggtggtgatgctggtggaggagtgccagtgcaaggtgaagacggagcatgaagatggacacatcctacatgctggctcccaggattcctttatcccaggagtttcagcttgaagagctatcccactattacctttgaaaagcaaaaccacaacagcaaagatgctgattattcagtctgaaaatgttaagtgggtacataacattttcagggaaaggtgacttgaaacgtagttttaaattagaacgatagaggaaatgatattagtctagttattggtacacgtttgagaccttgtctcagctctgccactaactagccgtagaatgttaagttgtaaaacctttctccatctaaagattttcatctataaatgacggacccgacctagatgattgctaaaatcctttccactactaatattccgtgatgcattttctccaagtttgggtaaaagccctccatctaaagaaggaaaa

SEQ ID NO: 116745 - DNA, 2467 bp, Homo sapiens
  Payload ID: 2764
  Gene Symbol: CDR1
  Gene Name: cerebellar degeneration-related protein 1, 34kDa
  Uniprot ID: P51861
  ENST ID: ENST00000370532
  CDS Start-End: 506-1294
ctgttggttcataagatctggtctataaggaggaatgtcccattaaatgtttttgaagctaattcaactagaagcagaaatagttgagttggaagatttttctgtagagtgattttaacatgggaaggctcagacaggggaagcctagatttgaaaaggcctggacctggggaaaggctggaagatctggactatagaacatgttagaatacctggatattgcagacactggaagacctgaatgtcagaagatcagcacactggagacgttggaagacatggatattgagccagttgatggaagactgggtagttgttggaagacatgaagatgctggaagacacagagatgctggaagacgtggagatgttggaagacgagcagatgctggaagccctggagatgctggaagacctggagatataggaagacatggatttgttggaagacgtagcttagttggaagacatatattttctggaagacgtggattttctggaagacatggcttggttggaagacgtggattttctggaagacgtacctttgttggaagacatacctttgttggaagacgtacctttgttggaagacgtacctttgttggaagacacaagtaggctggaagacattaatttgatggaagacatggctttgttggaagacgtggatttgctggaagacacggatttcctggaagacctggatttttcggaagctatggatttgagggaagacaaggattttctggaagacatggatagtctggaagacatggctttgttggaagacgtggacttgctggaagacacggatttcctggaagacccggattttttggaagctatagatttaagggaagacaaggattttctggaagacatggatagtctggaagacctggaggccattggaagatgtggattttctggaagacatggcttttttggaagacgtagattttcaggaagacccaaattatccggaagacttggattgttgggaagacgtggattttctggaagactgggaggttactggaagacatggattttctggaagacatggattttctggaagacgtggatcttcaggaagacatatattggctggaagacctggattttttccggaagatgtggattgactggaagacctggatttggtggaagacgtagatttttctggaagacactgactgactggaagacctggatttctttctggaagacactgattgactggaagacctggatttctttctggaagacactgattgactggaagatctagatttttctggaagaactagatttactggaagacttggatttggtggaagacacagatttttctggaagacatggattagctggaagatctgtatttgatggaagaccttgaaattattggaagacatggatttcctggaagacgtggattttcctggaagatctggatttggtggaagaccagtaattgctggaagactggatttgctggaagacttgatttactggaagacttggagcttcttggaagacatggattgtccggaagacatggattgtctggaagatgtggattttctggaagctcaggattatctggaagaccttgagattattggaagacttgaagtcgctggaagacccggagttgttggaagaccttgacacaggtgccatcggaaaccctggacattggaaacattgtaagcacaggatattggagacattgcaagccttggattttgaagacattggttactctggacattgatatttctggaggccctgaacattgggatattgaatattggaagtcatagacactgaaatctctggaaattagagatattgtaagtcctgtaccttggaactcctaaatactggcagatataaacaacagcagatgtagacatttataaatcctaaaatgagaagccctggatattgggagacattggtaagcatggatattgacatatttatgtcaaaaagacagtttggaagaattaaattttaaagatgctggatgtcaagaatactggcagcctggacaatatgagaccaggatattaagaggtctattcattcagacattgaggatattgatgtacctgaaagttcttgcaggtatttaaagacttgggcattggaggaattggcgataaaaatacactgtaaaactagaaagtaggagacatttaaaaatgtaaaaactgaatgatgtaagtgctggaagacattgaagaatctagacttaaacactatgaaatacatagcctctagaagacctgtatataggagacattggaggattaggaccatggaagacttgtaatttagaactctggattctgaaagacaagacctggactttgaagatgggttgttggagatattagaagacctaaatttttaatgacttgaatactgggaagtttagaaaacaagggcattg

SEQ ID NO: 116746 - DNA, 2702 bp, Homo sapiens
  Payload ID: 2765
  Gene Symbol: CDR2
  Gene Name: cerebellar degeneration-related protein 2, 62kDa
  Uniprot ID: Q01850
  ENST ID: ENST00000268383
  CDS Start-End: 309-1673
gccaaagtgccacgttgggcccggcggcggcgtgaagactggcggctgcgtgagactccggctccaggcgttcgcaccgtaatgcccggccgttggggccgtcggtaggcgcgaggcgagtcgaggcagccggccggtcggcggccgccggcgggaacggggctgaggcggcgcagcggagtctgggcggcggcgcgtcccgcccgagggcggctctggctgagggcggaggggccggggaagagcccggggcagcggctgaggcgggacggcggcgggggccgctgcccctagaagacccagccgagatgctggcggaaaacctggtagaggagtttgagatgaaggaggacgagccgtggtacgaccaccaggacctccagcaagatcttcaacttgctgctgagcttgggaagacattactggatcggaacacagagttggaggactctgttcagcagatgtatacaaccaatcaggagcagttacaggaaattgagtatctgacgaagcaagtggaacttctacggcagatgaacgaacaacatgcaaaggtttatgaacaattagacgtcacagcaagggaactggaagaaacaaatcaaaagctagttgctgacagcaaggcctcacagcaaaagattctgagcctgactgaaacgattgaatgcctgcaaaccaacattgatcacctccagagccaagtggaggagctgaagtcatctggccaagggagaaggagcccgggaaagtgtgaccaggagaaaccggcacccagctttgcatgtctgaaggagctgtatgacctccgccaacacttcgtgtatgatcatgtgttcgctgagaagatcacttccttgcaaggtcagccaagccctgatgaagaggaaaatgagcacttgaaaaaaacagtgacaatgttgcaggcccagctgagcctggagcggcagaagcgggtgactatggaggaggaatatgggctcgtgttaaaggagaacagtgaactggagcagcagctgggggccacaggtgcctaccgagcacgggcgctggaactagaggccgaggtggcagagatgcgacagatgttgcagtcagagcatccatttgtgaatggagttgagaagctggtgccagactctctgtatgttcctttcaaagagcccagccagagcctgctggaagagatgttcctgactgtgccggaatcacatagaaagcctctcaagcgcagcagcagtgagacgatcctcagcagcttggcagggagtgacatcgtgaagggccacgaggagacctgcatcaggagggccaaggctgtgaaacagaggggcatctcccttctgcacgaagtggacacgcagtacagcgccctgaaggtgaagtatgaagagttgctgaagaagtgccaagaggaacaggactccctgtcacacaaggctgtgcagacctccagggctgcagccaaggacctgactggagtgaacgcccagtctgagcctgttgccagcggctgggaactggcctctgtcaacccagagcccgtgagttcccctacaacacctccagaatacaaagcgttgtttaaggagatctttagttgcatcaagaaaactaagcaggaaatagatgaacagagaacaaaataccgatcactctcctctcattcttaattgaacctctagctctactactaatttgcctattgcctatcgcctctctctcccattcagacaagtgtttgtagactctgaagcctaatgttactcatgacgtttgcctcattgctttgcttatttagcaaatgcatacaacgaggaaaggaggtggctagtggtatcagttctctgatccacttccatttaagctccccaggaaatcccatgacaaactggcctctggctggcgcgctgattagacttcagttcctgaaaaggaccagtggagggaagagctatacttctggagaagtaggcctggagttactacagtatgggggaaaagggtcgagttagaacaaagctaaggcaattcctattgcttccttgcgcaacttctcaaaacgatgaaagtcagaaggctgtcaaactcaaatatctttgcaaacagtttgaatactgtgaattcattacgaagaatgttcgagagaaagcaggggtctaatccaaaagaaatgtcattaaccaatactccaagtccttgagttttgttatatctgaactagttgaactgtgactgacaggtaatcctaatatatccaaatccaactgaataccaaattgagatggcaaatttttgtttgatataagttagcttgttagcatatgccctagagggcctccatccctgtattctaatgtttttactcaaagctctagcctttaggataggtgaatatgtaaatcttttatcactttctcaaattcaaactaaaggggaaagatcaaaccccttcccttcctacctgttttctgagctggctgacttgccagccacaagctgctcttgcagagttcttaccattcctgtaaatgttttgacttgttgcagaaattcctatctactttattaagcagtattgatctgactgtggaaacatcctctcacttgcattcttttaacttaaaactatttaagaactgatgttccgattattgtatatatttttctaaaaaccaaataaagctacctatgaaaatgaa

SEQ ID NO: 116747 - DNA, 556 bp, Homo sapiens
  Payload ID: 2765
  Gene Symbol: CDR2
  Gene Name: cerebellar degeneration-related protein 2, 62kDa
  ENST ID: ENST00000563573
  CDS Start-End: 369-556
tatatgtttacctacatcctacatgcttctaaaagatgttgtatgaactagtaggatgaggttttatcacaaggtttgcagtatcttcagagtctgaattttgagcggatagtgatgagccagctaaatcccctgaagatttgcctgccctcagtggttaacttttttgctgcaatcacaaataagtaccagctcgtcttctgctacaccatcatcgagaggaacaatcgccagatgctgccagtcattaggagtaccactggaggagactcagtgcagacctgcacaaacccactggacaccttcgtcccctttgatccctgtgtgctgaagagtatctgacgaagcaagtggaacttctacggcagatgaacgaacaacatgcaaaggtttatgaacaattagacgtcacagcaagggaactggaagaaacaaatcaaaagctagttgctgacagcaaggcctcacagcaaaagattctgagcctgactgaaacgattgaatgcctgcaaaccaacattgatcacctccagagccaagtggaggagctgaagtc

SEQ ID NO: 116748 - DNA, 711 bp, Homo sapiens
  Payload ID: 2765
  Gene Symbol: CDR2
  Gene Name: cerebellar degeneration-related protein 2, 62kDa
  ENST ID: ENST00000561630
  CDS Start-End: 129-269
gtctgggcggcggcgcgtcccgcccgagggcggctctggctgagggcggaggggccggggaagagcccggggcagcggctgaggcgggacggcggcgggggccgctgcccctagaagacccagccgagatgctggcggaaaacctggtagaggagtttgagatgaaggaggacgagccgtggtacgaccaccaggacctccagcaagtatctgacgaagcaagtggaacttctacggcagatgaacgaacaacatgcaaaggtttatgaacaattagacgtcacagcaagggaactggaagaaacaaatcaaaagctagttgctgacagcaaggcctcacagcaaaagattctgagcctgactgaaacgattgaatgcctgcaaaccaacattgatcacctccagagccaagtggaggagctgaagtcatctggccaagggagaaggagcccgggaaagtgtgaccaggagaaaccggcacccagctttgcatgtctgaaggagctgtatgacctccgccaacacttcgtgtatgatcatgtgttcgctgagaagatcacttccttgcaaggtcagccaagccctgatgaagaggaaaatgagcacttgaaaaaaacagtgacaatgttgcaggcccagctgagcctggagcggcagaagcgggtgactatggaggaggaatatgggctcgtgttaaaggagaacagtgaa

SEQ ID NO: 116749 - DNA, 567 bp, Homo sapiens
  Payload ID: 2765
  Gene Symbol: CDR2
  Gene Name: cerebellar degeneration-related protein 2, 62kDa
  ENST ID: ENST00000567406
  CDS Start-End: 218-567
agagtcaagatgcgagaaggggtggccgggcggcggacctcaggcttccggcacccttgcgcttcccgccggcacgaaggactcccctggacaaccgcccgcctctcagaggccggagtcctaggccctccggcctgcgttgcctgtccacagacgcgccggcctcgggacacccaccacagggtatctgacgaagcaagtggaacttctacggcagatgaacgaacaacatgcaaaggtttatgaacaattagacgtcacagcaagggaactggaagaaacaaatcaaaagctagttgctgacagcaaggcctcacagcaaaagattctgagcctgactgaaacgattgaatgcctgcaaaccaacattgatcacctccagagccaagtggaggagctgaagtcatctggccaagggagaaggagcccgggaaagtgtgaccaggagaaaccggcacccagctttgcatgtctgaaggagctgtatgacctccgccaacacttcgtgtatgatcatgtgttcgctgagaagatcacttccttgcaaggtcagccaagccctgatga

SEQ ID NO: 116750 - DNA, 1056 bp, Homo sapiens
  Payload ID: 2765
  Gene Symbol: CDR2
  Gene Name: cerebellar degeneration-related protein 2, 62kDa
  ENST ID: ENST00000564542
  CDS Start-End: 355-1056
agcacgttggttaagatggtgagcagctcaaagagtgaggatggatgaagcaaagcagaggccgctgcccctgtaagtaccagctcgtcttctgctacaccatcatcgagaggaacaatcgccagatgctgccagtcattaggagtaccactggaggagactcagtgcagacctgcacaaacccactggacaccttcgtcccctttgatccctgtgtgctgaagagacctgcctttcgccttctgccatgattgggaggcctccccagccacatggaactatcttcaacttgctgctgagcttgggaagacattactggatcggaacacagagttggaggactctgttcagcagatgtatacaaccaatcaggagcagttacaggaaattgagtatctgacgaagcaagtggaacttctacggcagatgaacgaacaacatgcaaaggtttatgaacaattagacgtcacagcaagggaactggaagaaacaaatcaaaagctagttgctgacagcaaggcctcacagcaaaagattctgagcctgactgaaacgattgaatgcctgcaaaccaacattgatcacctccagagccaagtggaggagctgaagtcatctggccaagggagaaggagcccgggaaagtgtgaccaggagaaaccggcacccagctttgcatgtctgaaggagctgtatgacctccgccaacacttcgtgtatgatcatgtgttcgctgagaagatcacttccttgcaaggtcagccaagccctgatgaagaggaaaatgagcacttgaaaaaaacagtgacaatgttgcaggcccagctgagcctggagcggcagaagcgggtgactatggaggaggaatatgggctcgtgttaaaggagaacagtgaactggagcagcagctgggggccacaggtgcctaccgagcacgggcgctggaactagaggccgaggtggcagagatgcgacagatgttgcagtcagagcatccatttgtgaatggagttgagaagctggtgccagactctctgtatgttcctttcaaagag

SEQ ID NO: 116751 - DNA, 361 bp, Homo sapiens
  Payload ID: 2765
  Gene Symbol: CDR2
  Gene Name: cerebellar degeneration-related protein 2, 62kDa
  ENST ID: ENST00000567010
  CDS Start-End: 1-242
cagcaagggaactggaagaaacaaatcaaaagctagttgctgacagcaaggcctcacagcaaaagattctgagcctgactgaaacgattgaatgcctgcaaaccaacattgatcacctccagagccaagtggaggagctgaagtcatctggccaagggagaaggagcccgggaaagtgtgaccaggagaaaccggcacccagctttgcatgtctgaaggagctgtatgacctccgccagtaagagcctgcctttctgtggagttacagcagggactgtctcatgtcattggcacattctgatttccagtagattgaaagtaccattttaagaaaagtcacttagctattaagctaccattg

SEQ ID NO: 116752 - DNA, 3536 bp, Homo sapiens
  Payload ID: 2766
  Gene Symbol: CDR2L
  Gene Name: cerebellar degeneration-related protein 2-like
  Uniprot ID: Q86X02
  ENST ID: ENST00000337231
  CDS Start-End: 413-1810
aagatgcagcggcggctccggttgtcgccgggcgggccaggagcagcgcggacccgagccgggcagggggcgcccgccacggcacccgcgcgctcctagcgccccagacccgcctgcgggcccggatcctccttgccactgtcccacccgccgtccctgccactccaccctttgtgtcgccgcagcccggtgcccccggctctgcgggaccccggccgggccggaccctggcaaagcgccaggccccgcgtgggctcccggcgagcggttgatggcgagggggcgcggcgcgggctctgtagcccgagttcccgacgctggaggcccggcccgcctcagccgcattgtcccgggccgcgcgcaccggccctgagctgcgccgccgcagcacccgcccgccgcccgcggggccatgcggagagccgccgggatggaggacttctccgcggaggaagaggagtcctggtacgaccagcaggacctggagcaggacttgcacctagctgcggagctggggaagactctgctggagaggaacaaggagctggaggggtccctgcagcagatgtactccaccaatgaggaacaggtgcaggagatcgagtacctaaccaagcagctggacacgctgcggcacgtgaacgagcagcacgccaaagtctatgagcagctggacctgacagcccgggacctggagctgaccaaccacaggctggtgctggagagtaaggctgcccagcagaagatccatgggctgacggagaccattgagcgcctccaggctcaggtggaggagctgcaggcccaggtggagcaactgagaggcctggaacagctgcgagtgctccgggagaagcgggaacgcaggcgtaccatccacaccttcccctgcctcaaggagctgtgcaccagcccccggtgcaaggatgctttccgcctacacagttcctccctggagctgggcccgcggcccctggagcaggagaacgagcggctgcagaccctggtgggggcgctgcgctcccaggtgagccaggagcggcagcgcaaggagcgggcggagcgcgagtacaccgcggtgctgcaggagtactcggagctggagcgccagctgtgcgagatggaggcctgtcgcctgcgtgtgcaggagctggaggccgagctgctggagctgcagcagatgaagcaggccaagacctacctactgggtccggacgaccacctggccgaggccctgctcgcacccctcacgcaggcccctgaggccgacgatccccagcccggccgcggggacgacttgggcgcccaggacggggtctcctcaccggcagcctctccaggccacgtggtgcgcaagagctgcagcgacactgcgctcaacgccatcgtggccaaagacccagccagccggcacgcgggcaacctcacactgcacgccaacagcgtgcgcaagcggggcatgtccatcctgcgggaggtggacgagcagtaccacgcgctgctggagaagtacgaggagctgctgagcaagtgccggcagcacggggccggagtgcggcacgccggcgtgcagacctcgcgccccatctcccgggacagctcgtggagggacctgcgcgggggtgaggagggccagggtgaggtcaaggcaggagagaagagcctgagccagcacgtggaggccgtggacaagcggctggaacagagccagcccgagtacaaggcgctcttcaaagagatcttctccaggatccagaagaccaaggctgacatcaacgccaccaaagtcaagacgcacagcagcaagtgacccttctccggcctgcagcctcccccagggtggaagccgtggggtccctcaggcctgggcggtgcagcttccagagagcgagcgccctttagcggcctgccaccacagcacgcggcctcctgatccggaagcacgcagcatgttccctgctgagcggaggcagcccacctgtcctgcctcccaggagcccttggccacctcgcgccagcccaaaggcgcagctctgagttcaaagccaaatgtccccactaccccagggatcccccagctcccccagcccctggcttcctgaccctgcgcctcaccctcagactggtgaccaggcttctgaaagccattctggatcagttggctttttttttttttttggttaagtttgttttttctaagagatttgcaatgcaaggtctccttgaccccttgccacaactggaaacacttgaaaggggaccccagggccagctgtttcaggggtttcctggaccacccactgcttctccccaaccctgatgcgctgacattcccttagcaccagctgtcccacctccagggtcctgaccaggtcagagatgtcccctgccatgcagagcaggaagcctcagctgggcctggagtgtccctgctccagccctgccagggacaggtttctccctggatactcttggcccaccgcagatctgtagccagtcagaggaggaggagaaggagcccctcagcagagtggtgcagtttcgctcagagcttgtctccttggcttccaaccccagaaatgcctgctgggccttaagctttccaggggccggggcagtggggagcccccatcccttcacaccgccaccaactaaccaagcttggcctctgactcccgtctctgtgcttgcccccatctcagggaccatgatgtctcagtcactccacgctccccacaggccaaccctggcacaggtcatgtctgcagcccccagaatgttctggacatgcaccaccagccggtggtcccaatgtccacccctgcctccccttcactggggactggggttttcgccccatgctgcatcgtgttgtattgggatggggctgaggaacatgctccctccctccctcccataaaatgcctgctcttcacctcccacctttgtggggggcttttgaggacccagctgcgtcaggagttttgcttcaagatgtcagaaagtcaagttcagctaagagacacccaggtccccagcttgccctgagcagcccttcagggcttctggttccttctgccgcccttcctgagaccttagaaaccagaagagccatacagtcagtggaaggcgggggggccctggcctctgcaccgggatcccagtgggaaccttcatgccttatttatttctaatgggtaaaggggttttcttaccaagcatccctgacctcctggagacaccacctgctttccgggcggcactgtgatgggagctggtggcgactgagtccttctgtacgtgcaactgggaaacttttgtcctttgaggctaggcagctccctgccctccgtgtgtgtctgttatctgggggagaggagtgtggaagggttgggggaagagctccagcctgtctgctccccagctctgtagtggcagaccagcgtcacctttgaagtatacgtgagagaaatatatttacaaatgctttattctcttctttaataaaaaatgcaccagtattctaaaagcaaaaa

SEQ ID NO: 116753 - DNA, 2435 bp, Homo sapiens
  Payload ID: 2767
  Gene Symbol: CBLN1
  Gene Name: cerebellin 1 precursor
  Uniprot ID: P23435
  ENST ID: ENST00000219197
  CDS Start-End: 367-948
cgctccggctgcagcgccggctgcatcaataattcagagcggcggcggcggcggcagcggcgggtgcgggcaggaggcggcggcagcagcgggaccgagcagcagcggctatgcatccaagtgcggctgggcagccgcggcacccctgaggcccgggaggggctccgggaacacagcgcggaggggacgctagtcgcggaggggacgctagtcccggagtgcgaggaagaggtgtagtgtccagagcggcggcggcggagctgcgcacggagctgaggagggggcttcggagcgggactgggacggggggggcggctggcgcgagcagccctgggggtggggggcggggtgggcgccggcggcgcgatgctgggcgtcctggagctgctgctgctgggggctgcgtggctggcgggcccggcccgcgggcagaatgagacggagcccatcgtgctggagggcaagtgcctggtggtgtgcgactccaaccccacgtccgaccccacgggcactgccctgggcatctctgtgcgctctggcagcgccaaggtggctttctctgccatcaggagcaccaaccacgagccgtccgagatgagtaatcgcaccatgatcatctacttcgaccaggtactagtgaacattgggaacaactttgattcagaacgcagcactttcatcgccccgcgcaaagggatctacagttttaacttccacgtggtaaaagtctacaacagacaaaccatacaggtgagcctcatgctaaacgggtggccggtgatttcagccttcgctggtgaccaggacgtgacccgggaggccgccagcaacggagtcctaatccaaatggagaaaggcgaccgagcatacctcaagctggagcggggaaacttgatggggggctggaagtactcgaccttctccggattcctggtgtttcctctctgactggctcgtagccggaagggaggcagggagagggcgaaggcaggaaggggagtgagaaagaggctgaaattaagagggcgagaaagcagcacgacttgaaacttcctacatgttctctaactgtatctgggtaaaaaggtgcgcgccagctgtgggacaactttgtccatttccttattaggagaaataaatttcgcttagctctgcgcactcccatttccaaaaataaactcgcctcccccattccagttgcagtaatcaagaaagagactgccttgtcattgtttcttatcccccaacttcatgttccctgcaatttatttaaagaaactttgtatttcactacataatctgaaatctttctccctagccccctctgaatccttctgcctactgaaatctgatatattacacacccccaaccttttttttttcagtttggaaaggggtaaagttttgttgttgttgttgttttgttttggatggggaaggtagttttaatttggcaagtgttgctcttcttaaaacactgctcaaattaattagctgaagatacttagtatcctcggctgcttgttagcagagaaaggactcaccttagtggtgactggtttaaaaaatataaatatatatcatttgtatacgaagaactcttcccagtggaaactggctgtgtttccgtatttctatgttctattcggagtgatcgtgaaatctaaggctgcttgatgttctgatgcttgtcaatgccgtcgtgctctgtgactccacgaaacgccaaggagcttcttccggacgcctcctcttcctctgtaacatacgtgtgaatagtcaaggtttaattttgctttaatctaataaagtcgaagtgggacttttatttttctgaaacagctttctaaaatccgcatcttccccagctgcgaggttgggggtctggggtgccaaagggcgaggttccgaaaggcaggagacttgggggaacgcaaccatagaaaggcctgggcgcgagggcttccttgcaaagccggccttgcgctccttcctgcgccaggccggggaccagcactgcattcgcctgtgttcacagctttggcggaaacgtaagaaatgtggccgaaatcttgctaggccaggcgcggccgccggcccaggagcgaagtttgatttttttctttgcattccaaatgcatcaggaatagtcccagtttgaggacccaaacgaccctgcctggagcggcagactcctcaggccttctgtccccggatgtctcccaccgcgtccccctcgcagttcccgaagcagcgtatgttttatacaccgcctctgaatccggagtccacccgccgcatactcgggcgcccaggacctatgattccgctcattcacaggactttattcaagaggttcgtccaggagttttgattgtatcggaacataatgtgaaagcaaaaatgaaataaacgacttcgttttaagtctgaaa

SEQ ID NO: 116754 - DNA, 718 bp, Homo sapiens
  Payload ID: 2767
  Gene Symbol: CBLN1
  Gene Name: cerebellin 1 precursor
  Uniprot ID: P23435
  ENST ID: ENST00000536749
  CDS Start-End: 45-626
gagctgaggagggggcttcggagcgggactgggacggcggcgcgatgctgggcgtcctggagctgctgctgctgggggctgcgtggctggcgggcccggcccgcgggcagaatgagacggagcccatcgtgctggagggcaagtgcctggtggtgtgcgactccaaccccacgtccgaccccacgggcactgccctgggcatctctgtgcgctctggcagcgccaaggtggctttctctgccatcaggagcaccaaccacgagccgtccgagatgagtaatcgcaccatgatcatctacttcgaccaggtactagtgaacattgggaacaactttgattcagaacgcagcactttcatcgccccgcgcaaagggatctacagttttaacttccacgtggtaaaagtctacaacagacaaaccatacaggtgagcctcatgctaaacgggtggccggtgatttcagccttcgctggtgaccaggacgtgacccgggaggccgccagcaacggagtcctaatccaaatggagaaaggcgaccgagcatacctcaagctggagcggggaaacttgatggggggctggaagtactcgaccttctccggattcctggtgtttcctctctgactggctcgtagccggaagggaggcagggagagggcgaaggcaggaaggggagtgagaaagaggctgaaattaagagggcgagaaagcagcac

SEQ ID NO: 116755 - DNA, 872 bp, Homo sapiens
  Payload ID: 2767
  Gene Symbol: CBLN1
  Gene Name: cerebellin 1 precursor
  ENST ID: ENST00000564786
  CDS Start-End: 18-440
tgggcgccggcggcgcgatgctgggcgtcctggagctgctgctgctgggggctgcgtggctggcgggcccggcccgcgggcagaatgagacggagcccatcgtgctggagggcaagtgcctggtggtgtgcgactccaaccccacgtccgaccccacgggcactgccctgggcatctctgtgcgctctggcagcgccaaggtggctttctctgccatcaggagcaccaaccacgagccgtccgagatgagtaatcgcaccatgatcatctacttcgaccaggtgagtgttccttcctcccgcggcgtgcagattgggctggtgaaggagggatggatggaagaccgatgcccggtcctctccaagggctctgcggaggcgcggggacgacagtccgggaccgattcctgcccactccccttcgttcccgtctcgttataggtactagtgaacattgggaacaactttgattcagaacgcagcactttcatcgccccgcgcaaagggatctacagttttaacttccacgtggtaaaagtctacaacagacaaaccatacaggtgagcctcatgctaaacgggtggccggtgatttcagccttcgctggtgaccaggacgtgacccgggaggccgccagcaacggagtcctaatccaaatggagaaaggcgaccgagcatacctcaagctggagcggggaaacttgatggggggctggaagtactcgaccttctccggattcctggtgtttcctctctgactggctcgtagccggaagggaggcagggagagggcgaaggcaggaaggggagtgagaaagaggctgaaattaagagggcgagaaagcagcacgacttgaaacttcctacatgtt

SEQ ID NO: 116756 - DNA, 2945 bp, Homo sapiens
  Payload ID: 2768
  Gene Symbol: CBLN2
  Gene Name: cerebellin 2 precursor
  Uniprot ID: Q8IUK8
  ENST ID: ENST00000269503
  CDS Start-End: 775-1449
gtcttctgtcggagtccgccggtccgcagcctgcggcagggaggcccgggcacccgcaggtggcgccccacgtccgtgtttgcgccctcagccgagctccaggcgcagctgggaaacccagcgcgtctccccgggtcctttgagcgagcgcggacaccgcaatttaataaataagcgcaagcgccagccgctccaccagtccgaggtccagaggagcagacacacagacccgggccggaggcccctcttctagccctgcgggaaccggacagttccccaactgggactctggaaccacagctcctaaatcatcaaattctcaagctttttttttccctctcttcgtcccagccatcccagtcttcttcttcttttttttttttttaacttattgtttttttcgctcctgtcattatgaaagtggtcacgccattcaatattaagacttggagggaattggggaaagaaaagaaagaatctaaaagaagagaagcgaccggtgcttttaagggtgtctaattttcaaaagagacgtctgggagtattttgctctgggcgtttggagcaacttcgcggacagcggagctcgcccagcatggatgttccaggttcacaggcgcctttcttctgagaacgaccctggccttgaacgtcagagccggggacgaaggcccccggaggctgctgcgagctccgcgcgttccttcgcgcccttccgcgccgctcgcgccggcgccggcctccacccccgcgcgccgcctcccaccagtcccgatgcaggcgcccggccgggggccactcgggctgcggctgatgatgcccgggcgccggggggcgctgcgcgagccgggcggctgcggatcctgcctgggggtggcgctggccctgctgttgctgctactgcccgcctgctgccccgtgcgggcgcagaacgacacggagcccatcgtgctggagggcaagtgcctggtggtgtgcgactccagcccgtcggcggacggcgccgtcacctcctccctaggcatctccgtgcgctccggcagcgccaaggtggccttctccgccacgcggagcaccaaccacgagccgtccgagatgagcaaccgcaccatgaccatctatttcgaccaggtattagtaaatattggcaaccactttgatcttgcttccagtatatttgtagcaccgagaaaagggatttatagcttcagcttccacgtggtcaaagtgtataacagacaaaccatccaggtcagtttaatgcagaatggctacccagtgatctcggcctttgcaggagaccaggatgtcaccagagaagctgctagcaatggcgtgctgctgctcatggaaagggaagacaaagtgcatctcaaacttgagagaggcaacctcatggggggctggaaatactccacattctcgggcttcttggtgtttcctctataaacacagagccccctagatggtgggggaatggcaaactggacccaggactccgccctttaaaacaccctgaacttactggaattggacaccttgtttccaacctccgtcagactgttgcagtagaagaatgatttcctttgaaacctccagtacttttgtttttgttttttggaatactgacaattcctcgggaacctggcctctaattagttttagatgacaaggtcttaaggagaaatgaaattatcgatttgagcaatttgtacctgtgattgtaaagtcaatatcggattttattgttgggaccatggacctcttttgtttgtatgttgtattgtcgtcccaacggaaggagagctcctgactccaggatgggctgcaggttgcagtcagggcttgaagtaggagcccagcaaagaaccacctgctggacagtccttgacatgtgttctgtgtgtgtctgtatagccttaagaaaaagaatggcttcactttcattctgtattcttccccccaccatgtggctgggaggacttgggagggggatggggacattgggaacctgtcaagaagtgctttatccagagaagcaaattttgcacgattggactgcaatttttgttttgtattgtttgtgttttttcttgaaaagctttacttttctttccacactcagctctccctcctcaaccccacttttatttttcttgctggggttgaggagagaaaatatagaattcctggataagaccaaacaaaacaaaacattaaaatacctgtatgttttgttttagacgagaccaaactaaacaaaaagtatctgtttatcaaagtaaaagtaacacaatggacaattctgcttattctctcaaagagattctaagatgcacctttagaactattaatagcaacctgcatttttttttaatttatacttcagaatcctttaagaacctggtgttcctgagtggtcctgaatcatataagttggtaatggaagctgtaatgaccaagtcccctaaacatactatgtctttgccacgtgtgctgtgacttctctgtgggtgatttaatttatttggatccacctctgagtgagcgcacagtgatcaggtgcttcaaagccaacagaccagctcctcttcctccggatcctcttttgatctgcccaggaaagggatgcattgacactctcctgcatgcacctggcgagaagccacctgaaagtcactgtggttaaagatattggtggaggtaccccaggagcactgttacaaatccttcttgttttggcatctcgtacaacattattaagacacagctgagagttgatgggtgtgtaatgcatatgccaaggaaatgtcactaatcccaaagcaatcaaaaaggagacctcaaaccagatgttaatttgttctttgtgtaacaatgtaaccaaaatattgatgataaaagtcataatttaagattcagaataaatgggtttgatgtctggc

SEQ ID NO: 116757 - DNA, 537 bp, Homo sapiens
  Payload ID: 2768
  Gene Symbol: CBLN2
  Gene Name: cerebellin 2 precursor
  ENST ID: ENST00000581073
  CDS Start-End: 179-511
ataagcataaatgttctaagagtgtacaacaggactttgcgtccgtcagtgaggataacaagtctgtcattggatagatcctaagtgaaattagatataaaagagaaatgaattgaatttactggacaacattcttcagatctgctgggacatattttcattttctgtgagtactggaatggattgggacaaggtattagtaaatattggcaaccactttgatcttgcttccagtatatttgtagcaccgagaaaagggatttatagcttcagcttccacgtggtcaaagtgtataacagacaaaccatccaggtcagtttaatgcagaatggctacccagtgatctcggcctttgcaggagaccaggatgtcaccagagaagctgctagcaatggcgtgctgctgctcatggaaagggaagacaaagtgcatctcaaacttgagagaggcaacctcatggggggctggaaatactccacattctcgggcttcttggtgtttcctctataaacacagagccccctagatggtggggg

SEQ ID NO: 116758 - DNA, 2406 bp, Homo sapiens
  Payload ID: 2768
  Gene Symbol: CBLN2
  Gene Name: cerebellin 2 precursor
  Uniprot ID: Q8IUK8
  ENST ID: ENST00000585159
  CDS Start-End: 236-910
actcgcctcattttctctaagcagagcaacttcgcggacagcggagctcgcccagcatggatgttccaggttcacaggcgcctttcttctgagaacgaccctggccttgaacgtcagagccggggacgaaggcccccggaggctgctgcgagctccgcgcgttccttcgcgcccttccgcgccgctcgcgccggcgccggcctccacccccgcgcgccgcctcccaccagtcccgatgcaggcgcccggccgggggccactcgggctgcggctgatgatgcccgggcgccggggggcgctgcgcgagccgggcggctgcggatcctgcctgggggtggcgctggccctgctgttgctgctactgcccgcctgctgccccgtgcgggcgcagaacgacacggagcccatcgtgctggagggcaagtgcctggtggtgtgcgactccagcccgtcggcggacggcgccgtcacctcctccctaggcatctccgtgcgctccggcagcgccaaggtggccttctccgccacgcggagcaccaaccacgagccgtccgagatgagcaaccgcaccatgaccatctatttcgaccaggtattagtaaatattggcaaccactttgatcttgcttccagtatatttgtagcaccgagaaaagggatttatagcttcagcttccacgtggtcaaagtgtataacagacaaaccatccaggtcagtttaatgcagaatggctacccagtgatctcggcctttgcaggagaccaggatgtcaccagagaagctgctagcaatggcgtgctgctgctcatggaaagggaagacaaagtgcatctcaaacttgagagaggcaacctcatggggggctggaaatactccacattctcgggcttcttggtgtttcctctataaacacagagccccctagatggtgggggaatggcaaactggacccaggactccgccctttaaaacaccctgaacttactggaattggacaccttgtttccaacctccgtcagactgttgcagtagaagaatgatttcctttgaaacctccagtacttttgtttttgttttttggaatactgacaattcctcgggaacctggcctctaattagttttagatgacaaggtcttaaggagaaatgaaattatcgatttgagcaatttgtacctgtgattgtaaagtcaatatcggattttattgttgggaccatggacctcttttgtttgtatgttgtattgtcgtcccaacggaaggagagctcctgactccaggatgggctgcaggttgcagtcagggcttgaagtaggagcccagcaaagaaccacctgctggacagtccttgacatgtgttctgtgtgtgtctgtatagccttaagaaaaagaatggcttcactttcattctgtattcttccccccaccatgtggctgggaggacttgggagggggatggggacattgggaacctgtcaagaagtgctttatccagagaagcaaattttgcacgattggactgcaatttttgttttgtattgtttgtgttttttcttgaaaagctttacttttctttccacactcagctctccctcctcaaccccacttttatttttcttgctggggttgaggagagaaaatatagaattcctggataagaccaaacaaaacaaaacattaaaatacctgtatgttttgttttagacgagaccaaactaaacaaaaagtatctgtttatcaaagtaaaagtaacacaatggacaattctgcttattctctcaaagagattctaagatgcacctttagaactattaatagcaacctgcatttttttttaatttatacttcagaatcctttaagaacctggtgttcctgagtggtcctgaatcatataagttggtaatggaagctgtaatgaccaagtcccctaaacatactatgtctttgccacgtgtgctgtgacttctctgtgggtgatttaatttatttggatccacctctgagtgagcgcacagtgatcaggtgcttcaaagccaacagaccagctcctcttcctccggatcctcttttgatctgcccaggaaagggatgcattgacactctcctgcatgcacctggcgagaagccacctgaaagtcactgtggttaaagatattggtggaggtaccccaggagcactgttacaaatccttcttgttttggcatctcgtacaacattattaagacacagctgagagttgatgggtgtgtaatgcatatgccaaggaaatgtcactaatcccaaagcaatcaaaaaggagacctcaaaccagatgttaatttgttctttgtgtaacaatgtaaccaaaatattgatgataaaagtcataatttaagattcagaataaatgggtttgatgtctggc

SEQ ID NO: 116759 - DNA, 543 bp, Homo sapiens
  Payload ID: 2768
  Gene Symbol: CBLN2
  Gene Name: cerebellin 2 precursor
  ENST ID: ENST00000584764
  CDS Start-End: 61-387
actcgcctcattttctctaagcagagcaacttcgcggacagcggagctcgcccagcatggatgttccaggtattagtaaatattggcaaccactttgatcttgcttccagtatatttgtagcaccgagaaaagggatttatagcttcagcttccacgtggtcaaagtgtataacagacaaaccatccaggtcagtttaatgcagaatggctacccagtgatctcggcctttgcaggagaccaggatgtcaccagagaagctgctagcaatggcgtgctgctgctcatggaaagggaagacaaagtgcatctcaaacttgagagaggcaacctcatggggggctggaaatactccacattctcgggcttcttggtgtttcctctataaacacagagccccctagatggtgggggaatggcaaactggacccaggactccgccctttaaaacaccctgaacttactggaattggacaccttgtttccaacctccgtcagactgttgcagtagaagaatgatttcctttgaaacctccagtacttt

SEQ ID NO: 116760 - DNA, 2346 bp, Homo sapiens
  Payload ID: 2769
  Gene Symbol: CBLN3
  Gene Name: cerebellin 3 precursor
  Uniprot ID: Q6UW01
  ENST ID: ENST00000267406
  CDS Start-End: 472-1089
gggctgttgatttgtgggggattttgaagagaggaagagtaggaggaaggggttgaggggctgcctctggcatatgcacacactcacacattctgtcacacccgtcacacacacataccatgttctccatccccccaggtccagccctcagtgctgtcccatccagcagggctgccctgaagctctggctgcagccctcccgtccagtgggcaggcggcttcatccctcctttctctcccaaagcccaactgctgtcactgcatgctctgccaaggaggagggaactgcagtgacagcaggagtaagagtgggaggcaggacagagctgggacacaggtatggagagggggttcagcgagcctagagagggcagacgatcagggtgccggcggtgagaatccagggagaggagcggaaacagaagaggggcagaagaccggggcacttgtgggttgcagagcccctcagccatgttgggagccaagccacactggctaccaggtcccctacacagtcccgggctgcccttggttctggtgcttctggccctgggggccgggtgggcccaggaggggtcagagcccgtcctgctggagggggagtgcctggtggtctgtgagcctggccgagctgctgcaggggggcccgggggagcagccctgggagaggcaccccctgggcgagtggcatttgctgcggtccgaagccaccaccatgagccagcaggggaaaccggcaatggcaccagtggggccatctacttcgaccaggtcctggtgaacgagggcggtggctttgaccgggcctctggctccttcgtagcccctgtccggggtgtctacagcttccggttccatgtggtgaaggtgtacaaccgccaaactgtccaggtgagcctgatgctgaacacgtggcctgtcatctcagcctttgccaatgatcctgacgtgacccgggaggcagccaccagctctgtgctactgcccttggaccctggggaccgagtgtctctgcgcctgcgtcgggggaatctactgggtggttggaaatactcaagtttctctggcttcctcatcttccctctctgaggacccaagtctttcaagcacaagaatccagcccctgacaactttcttctgccctctcttgccccagaaacagcagaggcaggagagagactccctctggctcctatcccacctctttgcatgggaccctgtgccaaacacccaagtttaagagaagagtagagctgtggcatctccagaccaggcctttccacccacccacccccagttaccctcccagccacctgctgcatctgttcctgcctgcagccctaggatcagggcaaggtttggcaagaaggaagatctgcactactttgcggcctctgctcctccggttcccccaccccagcttcctgctcaatgctgatcagggacaggtggcgcaggtgagcctgacaggcccccacaggagcccagatggacaagcctcagcgtaccctgcaggcttcttcctgtgaggaaagccagcatcacggatctcagccagcaccgtcagaagctgaaccagcaccgtatgggctagggtgggaggctcagccacaggcagaagggtgggaagggcctggagtctgtggctggtgaggaaggaaggagggtgtattgtctagactgaacatggtacacattctgcatgtatagcagagcagccagcaggtagcaatcctggctgtccttctatgctggatcccagatggactctggcccttacctccccacctgagattagggtgagtgtgtttgctctggctgagagcagagctgagagcaggtatacagagctggaagtggaccatggaaaacatcgataaccatgcatcctcttgcttggccacctcctgaaactgctccacctttgaagtttgaactttagtccctccacactctgactgctgcctccttcctcccagctctctcactgagttatcttcactgtacctgttccagcatatccccactatctctctttctcctgatctgtgctgtcttattctcctccttaggcttcctattacctgggattccatgattcattccttcagaccctctcctgccagtatgctaaaccctccctctctctttcttatcccgctgtcccattggcccagcctggatgaatctatcaataaaacaactagagaatggtggtcagtgagacactatagaattactaaggagaagatgcctctggagtttggatcgggtgttacaggtacaagtaggtatgttgcagaggaaaataaatatcaaactgtatactaaaattacattttaaaa

SEQ ID NO: 116761 - DNA, 718 bp, Homo sapiens
  Payload ID: 2769
  Gene Symbol: CBLN3
  Gene Name: cerebellin 3 precursor
  ENST ID: ENST00000555436
  CDS Start-End: 70-534
gatgggggagagaaggcgttcaccttggctctgctggcgttttccttggggccctccagctgcagccagatgtgggggttgtccggacagtccttcggaaggacgctcacccccacgctgaagatgcgctccacatggggctgctgttcccgaaccttgttctcagcctccgcagacaccgcaaagcgatctggggacgcggggcgggccccccaggtcctggtgaacgagggcggtggctttgaccgggcctctggctccttcgtagcccctgtccggggtgtctacagcttccggttccatgtggtgaaggtgtacaaccgccaaactgtccaggtgagcctgatgctgaacacgtggcctgtcatctcagcctttgccaatgatcctgacgtgacccgggaggcagccaccagctctgtgctactgcccttggaccctggggaccgagtgtctctgcgcctgcgtcgggggaatctactgggtggttggaaatactcaagtttctctggcttcctcatcttccctctctgaggacccaagtctttcaagcacaagaatccagcccctgacaactttcttctgccctctcttgccccagaaacagcagaggcaggagagagactccctctggctcctatcccacctctttgcatgggaccctgtgccaaacacccaagtttaagagaagagtagagctgtggcatctccagaccag

SEQ ID NO: 116762 - DNA, 3024 bp, Homo sapiens
  Payload ID: 2770
  Gene Symbol: CBLN4
  Gene Name: cerebellin 4 precursor
  Uniprot ID: Q9NTU7
  ENST ID: ENST00000064571
  CDS Start-End: 1302-1907
ggggcgggctcccggccaggcgcggtcgggacgcccgccggtccccaggttcggggcagcgcgcagcgcgggtccgcggcggcttatcctttttcgcgacccggcctggcagcgccgcgctccgcttggagggcactcggcggcagagttccgcgctgggaggggtgaggggaccagccgcctcctctgcggactcagatcgagcaggagagagtgggcgcggagctggggccagcgcagggccgtgggctcctctctgggcacgcatcctttacgccacgggctttcaggggctgaggggcctcgaaccttgccaatcaccagtgctgtgcgccccgcttgctttggggtgcgttaaacgtcaggagagagctgctcagatggggtcaccagacgccttctcccccttttctcggagcccgcgggttgcgcgataagccaacccagccggacgctgcgctcctataaatagagcgcgtgtgcccgcttcgcgctctccgggctgcacgagggacgagaaagttgtgcgcagggactgggggcgggcggccaggcaggagaggaccccgccggaccagccgccctgaacgctgcgcccggcgccctggacctgatcctgcgaatccgcgctttcggtgcgagggacctggctagccgctgcctccctccctacctctgggtgacaccaggtttgggggatttttttgaccaggcgaaagtgggagtcgctggcgtcctggccatgaacacagcctcgcgttcttctcagcctgggaaggaccttctgcctctgtaactcgtccctgccgcaagccagacaggactggcacccgcgccgctgggcacccgccacccttgtggcttctctttgagtcccctctttttgttcctgctccgtggtttagctggtggtgcttgagtttggggtgagaatttattattattattattttttgccttgaggtgtgaatgtgagggtttgatgactttcagatgtctaggaaccagagtgggtgcaggggccccaggcagggctgattcttgggcggaggagagtagggtaaagggtgctgcatgagctccttaaaggacaaaggtaacagagccagcgagagagctcgaggggagactttgacttcaagccacagaattggtggaagtgtgcgcgccgccgccgccgtcgctcctgcagcgctgtcgacctagccgctagcatcttcccgagcaccgggatcccggggtaggaggcgacgcgggcgagcaccagcgccagccggctgcggctgcccacacggctcaccatgggctccgggcgccgggcgctgtccgcggtgccggccgtgctgctggtcctcacgctgccggggctgcccgtctgggcacagaacgacacggagcccatcgtgctggagggcaagtgtctggtggtgtgcgactcgaacccggccacggactccaagggctcctcttcctccccgctggggatatcggtccgggcggccaactccaaggtcgccttctcggcggtgcggagcaccaaccacgagccatccgagatgagcaacaagacgcgcatcatttacttcgatcagatcctggtgaatgtgggtaattttttcacattggagtctgtctttgtagcaccaagaaaaggaatttacagtttcagttttcacgtgattaaagtctaccagagccaaactatccaggttaacttgatgttaaatggaaaaccagtaatatctgcctttgcgggggacaaagatgttactcgtgaagctgccacgaatggtgtcctgctctacctagataaagaggataaggtttacctaaaactggagaaaggtaatttggttggaggctggcagtattccacgttttctggctttctggtgttccccctataggattcaatttctccatgatgttcatccaggtgagggatgacccactcctgagttattggaagatcattttttcatcattggattgatgtcttttattggtttctcatgggtggatatggattctaaggattctagcctgtctgaaccaatacaaaatttcacagattatttgtgtgtgtctgtttcagtatatttggattgggactctaagcagataatacctatgcttaaatgtaacagtcaaaagctgtctgcaagacttattctgaatttcatttcctgggattactgaattagttacagatgtggaattttatttgtttagttttaaaagactggcaaccaggtctaaggattagaaaactctaaagttctgacttcaatcaacggttagtgtgatactgccaaagaactgtatactgtgttaatatattgattatatttgtttttattcctttggaattagtttgtttggttcttgtaaaaaacttggattttttttttcagtaactggtattatgttttctcttaaaataaggtaatgaatggcttgcccacaaatttaccttgactacgatatcatcgacatgacttctctcaaaaaaaaagaatgcttcatagttgtattttaattgtatatgtgaaagagtcatattttccaagttatattttctaagaagaagaatagatcataaatctgacaaggaaaaagttgcttacccaaaatctaagtgctcaatccctgagcctcagcaaaacagctcccctccgagggaaatcttatactttattgctcaactttaattaaaatgattgataataaccactttattaaaaacctaaggttttttttttttccgtagacatgaccactttattaactggtggtgggatgctgttgtttctaattatacctatttttcaaggcttctgttgtatttgaagtatcatctggttttgccttaactctttaaattgtatatatttatctgtttagctaatattaaattcaaatatcccatatctaaatttagtgcaatatcttgtcttttgtataggtcatatgaattcataaaattatttatgtctgttatagaataaagattaatatatgtta

SEQ ID NO: 116763 - DNA, 2206 bp, Homo sapiens
  Payload ID: 2771
  Gene Symbol: CRBN
  Gene Name: cereblon
  Uniprot ID: Q96SW2
  ENST ID: ENST00000231948
  CDS Start-End: 24-1352
gcctcctttgcgggtaaacagacatggccggcgaaggagatcagcaggacgctgcgcacaacatgggcaaccacctgccgctcctgcctgcagagagtgaggaagaagatgaaatggaagttgaagaccaggatagtaaagaagccaaaaaaccaaacatcataaattttgacaccagtctgccgacatcacatacatacctaggtgctgatatggaagaatttcatggcaggactttgcacgatgacgacagctgtcaggtgattccagttcttccacaagtgatgatgatcctgattcccggacagacattacctcttcagctttttcaccctcaagaagtcagtatggtgcggaatttaattcagaaagatagaacctttgctgttcttgcatacagcaatgtacaggaaagggaagcacagtttggaacaacagcagagatatatgcctatcgagaagaacaggattttggaattgagatagtgaaagtgaaagcaattggaagacaaaggttcaaagtccttgagctaagaacacagtcagatggaatccagcaagctaaagtgcaaattcttcccgaatgtgtgttgccttcaaccatgtctgcagttcaattagaatccctcaataagtgccagatatttccttcaaaacctgtctcaagagaagaccaatgttcatataaatggtggcagaaataccagaagagaaagtttcattgtgcaaatctaacttcatggcctcgctggctgtattccttatatgatgctgagaccttaatggacagaatcaagaaacagctacgtgaatgggatgaaaatctaaaagatgattctcttccttcaaatccaatagatttttcttacagagtagctgcttgtcttcctattgatgatgtattgagaattcagctccttaaaattggcagtgctatccagcgacttcgctgtgaattagacattatgaataaatgtacttccctttgctgtaaacaatgtcaagaaacagaaataacaaccaaaaatgaaatattcagtttatccttatgtgggccgatggcagcttatgtgaatcctcatggatatgtgcatgagacacttactgtgtataaggcttgcaacttgaatctgataggccggccttctacagaacacagctggtttcctgggtatgcctggactgttgcccagtgtaagatctgtgcaagccatattggatggaagtttacggccaccaaaaaagacatgtcacctcaaaaattttggggcttaacgcgatctgctctgttgcccacgatcccagacactgaagatgaaataagtccagacaaagtaatactttgcttgtaaacagatgtgatagagataaagttatctaacaaattggttatattctaagatctgctttggaaattattgcctctgatacatacctaagtaaacataacattaatacctaagtaaacataacattacttggagggttgcagtttctaagtgaaactgtatttgaaacttttaagtatactttaggaaacaagcatgaacggcagtctagaataccagaaacatctacttgggtagcttggtgccattatcctgtggaatctgatatgtctggtagcatgtcattgatgggacatgaagacatctttggaaatgatgagattatttcctgtgttaaaaaaaaaaaaaatcttaaattcctacaatgtgaaactgaaactaataatttgatcctgatgtatgggacagcgtatctgtaccagtgctctaaataacaaaagctagggtgacaagtacatgttccttttggaaagaagcaaggcaatgtatattaattattctaaaagggctttgttcctttccattttctttaacttctctgagatactgatttgtaaattttgaaaattagttaaaatatgcagttttttgagcccacgaatagttgtcatttcctttatgtgcctgttagtaaaaagtagtattgtgtatttgctcagtatctgaactataagcccatttatactgttccatacaaaagctatttttcaaaaattaatttgaaccaaaactactactatagggaaaagatgccaaaacatgtcccctcacccagactaaacttgatactgtattattttgttcaatgtaaattgaagaaaatctgtaagtaagtaaaccttaagtgtgaaactaaa

SEQ ID NO: 116764 - DNA, 878 bp, Homo sapiens
  Payload ID: 2771
  Gene Symbol: CRBN
  Gene Name: cereblon
  ENST ID: ENST00000450014
  CDS Start-End: 1-686
gagatcagcaggacgctgcgcacaacatgggcaaccacctgccgctcctgcctgcagagagtgaggaagaagatgaaatggaagttgaagaccaggatagtaaagaagccaaaaaaccaaacatcataaattttgacaccagtctgccgacatcacatacatacctaggtgctgatatggaagaatttcatggcaggactttgcacgatgacgacagctgtcaggtgattccagttcttccacaagtgatgatgatcctgattcccggacagacattacctcttcagctttttcaccctcaagaagtcagtatggtgcggaatttaattcagaaagatagaacctttgctgttcttgcatacagcaatgtacaggaaagggaagcacagtttggaacaacagcagagatatatgcctatcgagaagaacaggattttggaattgagatagtgaaagtgaaagcaattggaagacaaaggttcaaagtccttgagctaagaacacagtcagatggaatccagcaagctaaagtgcaaattcttcccgaatgtgtgttgccttcaaccatgtctgcagttcaattagaatccctcaataagtgccagatatttccttcaaaacctgtctcaagagaagaccaatgttcatataaatggtggcagaaataccagaaggtgagaaactaattttttatgcatcttcaaaaaatgaagacaggttgttttttttcctgttttaagaaagaaacacaactttcatgattcattacccagccaccttgtatggcaatattccagctacatttgatcctctaaaaattgcacaggcagctactttatgtaaaagcagtttacaaaagcaataaaatgtcacacagc

SEQ ID NO: 116765 - DNA, 2038 bp, Homo sapiens
  Payload ID: 2771
  Gene Symbol: CRBN
  Gene Name: cereblon
  ENST ID: ENST00000424814
  CDS Start-End: 1-1184
gagatcagcaggacgctgcgcacaacatgggcaaccacctgccgctcctgcctgcagagagtgaggaagaagatgaaatggaagttgaagaccaggatagtaaagaagccaaaaaaccaaacatcataaattttgacaccagtctgccgacatcacatacatacctaggtgctgatatggaagaatttcatggcaggactttgcacgatgacgacagctgtcaggtgattccagttcttccacaagtgatgatgatcctgattcccggacagacattacctcttcagctttttcaccctcaagaagtcagtatggtgcggaatttaattcagaaagatagaacctttgctgttcttgcatacagcaatgtacaggaaagggaagcacagtttggaacaacagcagagatatatgcctatcgagaagaacaggattttggaattgagatagtgaaagtgaaagcaattggaagacaaaggttcaaagtccttgagctaagaacacagtcagatggaatccagcaagctaaagtgcaaattcttcccgaatgtgtgttgccttcaaccatgtctgcagttcaattagaatccctcaataagtgccagatatttccttcaaaacctgtctcaagagaagaccaatgttcatataaatggtggcagaaataccagaagagaaagtttcattgtgcaaatctaacttcatggcctcgctggctgtattccttatatgatgctgagaccttaatggacagaatcaagaaacagctacgtgaatgggatgaaaatctaaaagatgattctcttccttcaaatccaatagatttttcttacagagtagctgcttgtcttcctattgatgatgtattgagaattcagctccttaaaattggcagtgctatccagcgacttcgctgtgaattagacattatgaataaatgtacttccctttgctgtaaacaatgtcaagaaacagaaataacaaccaaaaatgaaatattcaggtatgcctggactgttgcccagtgtaagatctgtgcaagccatattggatggaagtttacggccaccaaaaaagacatgtcacctcaaaaattttggggcttaacgcgatctgctctgttgcccacgatcccagacactgaagatgaaataagtccagacaaagtaatactttgcttgtaaacagatgtgatagagataaagttatctaacaaattggttatattctaagatctgctttggaaattattgcctctgatacatacctaagtaaacataacattaatacctaagtaaacataacattacttggagggttgcagtttctaagtgaaactgtatttgaaacttttaagtatactttaggaaacaagcatgaacggcagtctagaataccagaaacatctacttgggtagcttggtgccattatcctgtggaatctgatatgtctggtagcatgtcattgatgggacatgaagacatctttggaaatgatgagattatttcctgtgttaaaaaaaaaaaaaatcttaaattcctacaatgtgaaactgaaactaataatttgatcctgatgtatgggacagcgtatctgtaccagtgctctaaataacaaaagctagggtgacaagtacatgttccttttggaaagaagcaaggcaatgtatattaattattctaaaagggctttgttcctttccattttctttaacttctctgagatactgatttgtaaattttgaaaattagttaaaatatgcagttttttgagcccacgaatagttgtcatttcctttatgtgcctgttagtaaaaagtagtattgtgtatttgctcagtatctgaactataagcccatttatactgttccatacaaaagctatttttcaaaaattaatttgaaccaaaactactactatagggaaaagatgccaaaacatgtcccctcacccagactaaacttgatactgtattattttgttcaatgtaaattgaagaaaatctgtaagtaagtaaaccttaagtgtgaaactaaa

SEQ ID NO: 116766 - DNA, 2203 bp, Homo sapiens
  Payload ID: 2771
  Gene Symbol: CRBN
  Gene Name: cereblon
  Uniprot ID: Q96SW2
  ENST ID: ENST00000432408
  CDS Start-End: 24-1349
gcctcctttgcgggtaaacagacatggccggcgaaggagatcagcaggacgctgcgcacaacatgggcaaccacctgccgctcctgcctgagagtgaggaagaagatgaaatggaagttgaagaccaggatagtaaagaagccaaaaaaccaaacatcataaattttgacaccagtctgccgacatcacatacatacctaggtgctgatatggaagaatttcatggcaggactttgcacgatgacgacagctgtcaggtgattccagttcttccacaagtgatgatgatcctgattcccggacagacattacctcttcagctttttcaccctcaagaagtcagtatggtgcggaatttaattcagaaagatagaacctttgctgttcttgcatacagcaatgtacaggaaagggaagcacagtttggaacaacagcagagatatatgcctatcgagaagaacaggattttggaattgagatagtgaaagtgaaagcaattggaagacaaaggttcaaagtccttgagctaagaacacagtcagatggaatccagcaagctaaagtgcaaattcttcccgaatgtgtgttgccttcaaccatgtctgcagttcaattagaatccctcaataagtgccagatatttccttcaaaacctgtctcaagagaagaccaatgttcatataaatggtggcagaaataccagaagagaaagtttcattgtgcaaatctaacttcatggcctcgctggctgtattccttatatgatgctgagaccttaatggacagaatcaagaaacagctacgtgaatgggatgaaaatctaaaagatgattctcttccttcaaatccaatagatttttcttacagagtagctgcttgtcttcctattgatgatgtattgagaattcagctccttaaaattggcagtgctatccagcgacttcgctgtgaattagacattatgaataaatgtacttccctttgctgtaaacaatgtcaagaaacagaaataacaaccaaaaatgaaatattcagtttatccttatgtgggccgatggcagcttatgtgaatcctcatggatatgtgcatgagacacttactgtgtataaggcttgcaacttgaatctgataggccggccttctacagaacacagctggtttcctgggtatgcctggactgttgcccagtgtaagatctgtgcaagccatattggatggaagtttacggccaccaaaaaagacatgtcacctcaaaaattttggggcttaacgcgatctgctctgttgcccacgatcccagacactgaagatgaaataagtccagacaaagtaatactttgcttgtaaacagatgtgatagagataaagttatctaacaaattggttatattctaagatctgctttggaaattattgcctctgatacatacctaagtaaacataacattaatacctaagtaaacataacattacttggagggttgcagtttctaagtgaaactgtatttgaaacttttaagtatactttaggaaacaagcatgaacggcagtctagaataccagaaacatctacttgggtagcttggtgccattatcctgtggaatctgatatgtctggtagcatgtcattgatgggacatgaagacatctttggaaatgatgagattatttcctgtgttaaaaaaaaaaaaaatcttaaattcctacaatgtgaaactgaaactaataatttgatcctgatgtatgggacagcgtatctgtaccagtgctctaaataacaaaagctagggtgacaagtacatgttccttttggaaagaagcaaggcaatgtatattaattattctaaaagggctttgttcctttccattttctttaacttctctgagatactgatttgtaaattttgaaaattagttaaaatatgcagttttttgagcccacgaatagttgtcatttcctttatgtgcctgttagtaaaaagtagtattgtgtatttgctcagtatctgaactataagcccatttatactgttccatacaaaagctatttttcaaaaattaatttgaaccaaaactactactatagggaaaagatgccaaaacatgtcccctcacccagactaaacttgatactgtattattttgttcaatgtaaattgaagaaaatctgtaagtaagtaaaccttaagtgtgaaactaaa

SEQ ID NO: 116767 - DNA, 1894 bp, Homo sapiens
  Payload ID: 2772
  Gene Symbol: CCM2
  Gene Name: cerebral cavernous malformation 2
  Uniprot ID: Q9BSQ5
  ENST ID: ENST00000258781
  CDS Start-End: 150-1484
ggggcgcggccggggcggagacttcgggcccggctggcgggcggcgccgggagcgcgggggcggcgggcccgggtcgagcatgtagcggctgctggcggcggggctcccggggcgggccgggcgggccgcgggagccgcacgcggcgatatggaagaggagggcaagaagggcaagaagcctggaattgtctcgccatttaaacgagtattcctaaaaggtgaaaagagtagagataagaaagcccatgagaaggtgacagagaggcgccctctgcacactgtggtgttgtcattgcctgagcgcgtcgagccagacagactgctgagcgactatattgagaaggaggtaaagtatttaggtcagttaacgtccataccaggatacctgaatccctccagtaggactgaaatcctgcatttcatagacaatgcaaagagagcccaccagcttccgggacacttgactcaggagcacgatgctgtgctcagcctgtctgcgtacaacgtcaagctggcctggagggacggggaggatatcatcctcagggtgcccatccatgacatcgccgccgtctcctatgttcgggatgacgctgcacacctggtggtcctgaagacagcccaggacccagggatctcccccagccagagtctgtgtgcggaaagttccagaggcctcagtgcaggctccctgtcggagagtgcagttgggcccgtggaggcatgctgcctggtcatcctggctgcagagagcaaggtcgctgcggaggagctttgctgtctgctaggccaggtcttccaggttgtttacacggagtccaccatcgactttctggacagagcgatatttgatggggcctctaccccgacccaccacctgtccctgcacagcgatgactcttctacaaaagtggacattaaggagacctacgaggtggaagccagcactttctgcttccctgaatctgtggatgtgggtggtgcatcaccccacagcaagaccatcagtgagagcgagctgagcgccagcgccactgagctgctgcaggactacatgctgacgctgcgcaccaagctgtcatcacaggagatccagcagtttgcagcactgctgcacgagtaccgcaatggggcctctatccacgagttctgcatcaacctgcggcagctctacggggacagccgcaagttcctgctgcttggtctgaggcccttcatccctgagaaggacagccagcacttcgagaacttcctggagaccattggcgtgaaggatggccgcggcatcatcactgacagctttggcaggcaccggcgggccctgagcaccacatccagttccaccaccaatgggaacagggccacgggcagctctgatgaccggtcggcaccctcagagggggatgagtgggaccgcatgatctcggacatcagcagcgacattgaggcgctgggctgcagcatggaccaggactcagcatgatggacagtggatgggggggcacccacaccttccgcgcagtcgtcataggccttcccagaaggagctgcccagacctgcgtgtcagcccttggtggtggccagggagaggcgcccggtgcagatggccccgggcggcccaggtcctctactgtgaaggagcagggagctgccgagggacacgagcctcagtgcggggtggaaggctctttgccttgtccaccagggctcagccaagccctgcagtgtgtccccgctcggggagggcccggccgagcgggcagggagagccagtcctgtcggctgggcccttggacggctgtcagttttgcacatgatgttcctattgtaactctcagagaccttaaaaagaagtttactgcaatgtgaataatttaatctctggttgccaa

SEQ ID NO: 116768 - DNA, 1881 bp, Homo sapiens
  Payload ID: 2772
  Gene Symbol: CCM2
  Gene Name: cerebral cavernous malformation 2
  Uniprot ID: Q9BSQ5
  ENST ID: ENST00000381112
  CDS Start-End: 72-1469
agtcatgtttttttcagagggagggctaacatctggccatatttttcaacaaattcagaagtgagtagagaatgcatagtagctgtcggcagaggaggaaccagaatctctccaaagaaattcctcaaacagaatttcacacagggtattccatggagaatgagcctggaattgtctcgccatttaaacgagtattcctaaaaggtgaaaagagtagagataagaaagcccatgagaaggtgacagagaggcgccctctgcacactgtggtgttgtcattgcctgagcgcgtcgagccagacagactgctgagcgactatattgagaaggaggtaaagtatttaggtcagttaacgtccataccaggatacctgaatccctccagtaggactgaaatcctgcatttcatagacaatgcaaagagagcccaccagcttccgggacacttgactcaggagcacgatgctgtgctcagcctgtctgcgtacaacgtcaagctggcctggagggacggggaggatatcatcctcagggtgcccatccatgacatcgccgccgtctcctatgttcgggatgacgctgcacacctggtggtcctgaagacagcccaggacccagggatctcccccagccagagtctgtgtgcggaaagttccagaggcctcagtgcaggctccctgtcggagagtgcagttgggcccgtggaggcatgctgcctggtcatcctggctgcagagagcaaggtcgctgcggaggagctttgctgtctgctaggccaggtcttccaggttgtttacacggagtccaccatcgactttctggacagagcgatatttgatggggcctctaccccgacccaccacctgtccctgcacagcgatgactcttctacaaaagtggacattaaggagacctacgaggtggaagccagcactttctgcttccctgaatctgtggatgtgggtggtgcatcaccccacagcaagaccatcagtgagagcgagctgagcgccagcgccactgagctgctgcaggactacatgctgacgctgcgcaccaagctgtcatcacaggagatccagcagtttgcagcactgctgcacgagtaccgcaatggggcctctatccacgagttctgcatcaacctgcggcagctctacggggacagccgcaagttcctgctgcttggtctgaggcccttcatccctgagaaggacagccagcacttcgagaacttcctggagaccattggcgtgaaggatggccgcggcatcatcactgacagctttggcaggcaccggcgggccctgagcaccacatccagttccaccaccaatgggaacagggccacgggcagctctgatgaccggtcggcaccctcagagggggatgagtgggaccgcatgatctcggacatcagcagcgacattgaggcgctgggctgcagcatggaccaggactcagcatgatggacagtggatgggggggcacccacaccttccgcgcagtcgtcataggccttcccagaaggagctgcccagacctgcgtgtcagcccttggtggtggccagggagaggcgcccggtgcagatggccccgggcggcccaggtcctctactgtgaaggagcagggagctgccgagggacacgagcctcagtgcggggtggaaggctctttgccttgtccaccagggctcagccaagccctgcagtgtgtccccgctcggggagggcccggccgagcgggcagggagagccagtcctgtcggctgggcccttggacggctgtcagttttgcacatgatgttcctattgtaactctcagagaccttaaaaagaagtttactgcaatgtgaataatttaatctctggttgccaagc

SEQ ID NO: 116769 - DNA, 2471 bp, Homo sapiens
  Payload ID: 2772
  Gene Symbol: CCM2
  Gene Name: cerebral cavernous malformation 2
  ENST ID: ENST00000475551
  CDS Start-End: 761-2077
gaagaagtgagcttggccagaggcacgctgtttaatttcaaagtgctgctgactcaaactcatgagtcctggaggcaggtagaggcacttgtaggctgaggacccgtagagcccggtgtgccctgcccaagccccacctgggaatggagttatctctgtaaagatcttgctgcctttgagcaagcactgcaaatggggtaactggaacagccttgtcgcgtgtttccacccttcgtatgaggcaggtaccatgggtcttcaccaacagcacggcctgttgtctccaggaaatggtagcccctcacagtgctttctgtctgcttgtttagctttggcatttgaatgtgcagaatggtggactttgaaattaatgtccttctgttgactgcagaatttctgctggaaatgcagggaggctgcttgtggggttcgcgtgctgtgggaagtagggaaaatgagctggtttactttgtgtctttttgtgcatgcagactgtttggattttgccaacagtttctgggtgctgcctgctttttaaacttttaaaaaattgtaaacagcttcagtggctttgcagaaggaagctgtggtttctggtcttcctgttcagtcatgtttttttcagagggagggctaacatctggccatatttttcaacaaattcagaagtgagtagagaatgcatagtagctgtcggcagaggaggaaccagaatctctccaaagaaattcctcaaacagaatttcacacagggtattccatggagaatgagcctggaattgtctcgccatttaaacgagtattcctaaaaggtgaaaagagtagagataagaaagcccatgagaaggtgacagagaggcgccctctgcacactgtggtgttgtcattgcctgagcgcgtcgagccagacagactgctgagcgactatattgagaaggaggtaaagtatttaggtcagttaacgtccataccaggatacctgaatccctccagtaggactgaaatcctgcatttcatagacaatgcaaagagagcccaccagcttccgggacacttgactcaggagcacgatgctgtgctcagcctgtctgcgtacaacgtcaagctggcctggagggacggggaggatatcatcctcagggtgcccatccatgacatcgccgccgtctcctatgttcgggatgacgctgcacacctggtggtcctgaagacagcccaggacccagggatctcccccagccagagtctgtgtgcggaaagttccagaggcctcagtgcaggctccctgtcggagagtgcagttgggcccgtggaggcatgctgcctggtcatcctggctgcagagagcaaggtcgctgcggaggagctttgctgtctgctaggccaggtcttccaggttgtttacacggagtccaccatcgactttctggacagagcgatatttgatggggcctctaccccgacccaccacctgtccctgcacagcgatgactcttctacaaaagtggacattaaggagacctacgaggtggaagccagcactttctgcttccctgaatctgtggatgtgggtggtgcatcaccccacagcaagaccatcagtgagagcgagctgagcgccagcgccactgagctgctgcaggactacatgctgacgctgcgcaccaagctgtcatcacaggagatccagcagtttgcagcactgctgcacgagtaccgcaatggggcctctatccacgagttctgcatcaacctgcggcagctctacggggacagccgcaagttcctgctgcttggtctgaggcccttcatccctgagaaggacagccagcacttcgagaacttcctggagaccattggcgtgaaggatggccgcggcatcatcactgacagctttggcaggcaccggcgggccctgagcaccacatccagttccaccaccaatgggaacagggccacgggcagctctgatgaccggtcggcaccctcagagggggatgagtgggaccgcatgatctcggacatcagcagcgacattgaggcgctgggctgcagcatggaccaggactcagcatgatggacagtggatgggggggcacccacaccttccgcgcagtcgtcataggccttcccagaaggagctgcccagacctgcgtgtcagcccttggtggtggccagggagaggcgcccggtgcagatggccccgggcggcccaggtcctctactgtgaaggagcagggagctgccgagggacacgagcctcagtgcggggtggaaggctctttgccttgtccaccagggctcagccaagccctgcagtgtgtccccgctcggggagggcccggccgagcgggcagggagagccagtcctgtcggctgggcccttggacggctgtcagttttgcacatgatgttcctattgtaactctcagagaccttaaaaagaagtttactgcaatgtgaataattt

SEQ ID NO: 116770 - DNA, 1719 bp, Homo sapiens
  Payload ID: 2772
  Gene Symbol: CCM2
  Gene Name: cerebral cavernous malformation 2
  ENST ID: ENST00000488727
  CDS Start-End: 86-901
cgggcccgggtcgagcatgtagcggctgctggcggcggggctcccggggcgggccgggcgggccgcgggagccgcacgcggcgatatggaagaggagggcaagaagggcaagaagcctggaattgtctcgccatttaaacgagtattcctaaaaggtgaaaagagtagagataagaaagcccatgagaaggtgacagagaggcgccctctgcacactgtggtgttgtcattgcctgagcgcgtcgagccagacagactgctgagcgactatattgagaaggaggtaaagtatttaggtcagttaacgtccataccaggatacctgaatccctccagtaggactgaaatcctgcatttcatagacaatgcaaagagagcccaccagcttccgggacacttgactcaggagcacgatgctgtgctcagcctgtctgcgtacaacgtcaagctggcctggagggacggggaggatatcatcctcagggtgcccatccatgacatcgccgccgtctcctatgttcgggatgacgctgcacacctggtggtcctgaagacagcccaggacccagggatctcccccagccagagtctgtgtgcggaaagttccagaggcctcagtgcaggctccctgtcggagagtgcagttgggcccgtggaggcatgctgcctggtcatcctggctgcagagagcaaggtcgctgcggaggagctttgctgtctgctaggccaggtcttccaggttgtttacacggagtccaccatcgactttctggacagagcgatatttgatggggcctctaccccgacccaccacctgtccctgcacagcgctgcttccctgaatctgtggatgtgggtggtgcatcaccccacagcaagaccatcagtgagagcgagctgagcgccagcgccactgagctgctgcaggactacatgctgacgctgcgcaccaagctgtcatcacaggagatccagcagtttgcagcactgctgcacgagtaccgcaatggggcctctatccacgagttctgcatcaacctgcggcagctctacggggacagccgcaagttcctgctgcttggtctgaggcccttcatccctgagaaggacagccagcacttcgagaacttcctggagaccattggcgtgaaggatggccgcggcatcatcactgacagctttggcaggcaccggcgggccctgagcaccacatccagttccaccaccaatgggaacagggccacgggcagctctgatgaccggtcggcaccctcagagggggatgagtgggaccgcatgatctcggacatcagcagcgacattgaggcgctgggctgcagcatggaccaggactcagcatgatggacagtggatgggggggcacccacaccttccgcgcagtcgtcataggccttcccagaaggagctgcccagacctgcgtgtcagcccttggtggtggccagggagaggcgcccggtgcagatggccccgggcggcccaggtcctctactgtgaaggagcagggagctgccgagggacacgagcctcagtgcggggtggaaggctctttgccttgtccaccagggctcagccaagccctgcagtgtgtccccgctcggggagggcccggccgagcgggcagggagagccagtcctgtcggctgggcccttggacggctgtcagttttgcacatgatgttcctattgtaactctcaga

SEQ ID NO: 116771 - DNA, 406 bp, Homo sapiens
  Payload ID: 2772
  Gene Symbol: CCM2
  Gene Name: cerebral cavernous malformation 2
  ENST ID: ENST00000480382
  CDS Start-End: 1-406
gaggcctcagtgcaggctccctgtcggagagtgcagttgggcccgtggaggcatgctgcctggtcatcctggctgcagagagcaaggtcgctgcggaggagctttgctgtctgctaggccaggtcttccaggttgtttacacggagtccaccatcgactttctggacagagcgatatttgatggggcctctaccccgacccaccacctgtccctgcacagcgccagccacgtgacctcttccacagtcacatcttcctttgactgtcagcttcctctgcatttcaggactcttgcaatcacattgagcccacccaaattctccagggtcatctccctatttcaagatgactcttctacaaaagtggacattaaggagacctacgaggtggaagccagcactttgtg

SEQ ID NO: 116772 - DNA, 1532 bp, Homo sapiens
  Payload ID: 2772
  Gene Symbol: CCM2
  Gene Name: cerebral cavernous malformation 2
  ENST ID: ENST00000474617
  CDS Start-End: 115-1158
atatttttcaacaaattcagaagtgagtagagaatgcatagtagctgtcggcagaggaggaaccagaatctctccaaagaaattcctcaaacagaatttcacacagggtattccatggagaatgagcctggaattgtctcgccatttaaacgagtattcctaaaaggtgaaaagagtagagataagaaagcccatgagaaggtgacagagaggcgccctctgcacactgtggtgttgtcattgcctgagcgcgtcgagccagacagactgctgagcgactatattgagaaggaggtaaagtatttaggtcagttaacgtccataccaggatacctgaatccctccagtaggactgaaatcctgcatttcatagacaatgcaaagagagcccaccagcttccgggacacttgactcaggagcacgatgctgtgctcagcctgtctgcgtacaacgtcaagctggcctggagggacggggaggatatcatcctcagggtgcccatccatgacatcgccgccgtctcctatgttcgggatgacgctgcacacctggtggtcctgaagacagatgactcttctacaaaagtggacattaaggagacctacgaggtggaagccagcactttctgcttccctgaatctgtggatgtgggtggtgcatcaccccacagcaagaccatcagtgagagcgagctgagcgccagcgccactgagctgctgcaggactacatgctgacgctgcgcaccaagctgtcatcacaggagatccagcagtttgcagcactgctgcacgagtaccgcaatggggcctctatccacgagttctgcatcaacctgcggcagctctacggggacagccgcaagttcctgctgcttggtctgaggcccttcatccctgagaaggacagccagcacttcgagaacttcctggagaccattggcgtgaaggatggccgcggcatcatcactgacagctttggcaggcaccggcgggccctgagcaccacatccagttccaccaccaatgggaacagggccacgggcagctctgatgaccggtcggcaccctcagagggggatgagtgggaccgcatgatctcggacatcagcagcgacattgaggcgctgggctgcagcatggaccaggactcagcatgatggacagtggatgggggggcacccacaccttccgcgcagtcgtcataggccttcccagaaggagctgcccagacctgcgtgtcagcccttggtggtggccagggagaggcgcccggtgcagatggccccgggcggcccaggtcctctactgtgaaggagcagggagctgccgagggacacgagcctcagtgcggggtggaaggctctttgccttgtccaccagggctcagccaagccctgcagtgtgtccccgctcggggagggcccggccgagcgggcagggagagccagtcctgtcggctgggcccttggacggctgtcagttttgcacatgatgttcctattgtaactctcagagaccttaaaaagaagtt

SEQ ID NO: 116773 - DNA, 1620 bp, Homo sapiens
  Payload ID: 2772
  Gene Symbol: CCM2
  Gene Name: cerebral cavernous malformation 2
  Uniprot ID: Q9BSQ5
  ENST ID: ENST00000544363
  CDS Start-End: 147-1208
gcgcggccggggcggagacttcgggcccggctggcgggcggcgccgggagcgcgggggcggcgggcccgggtcgagcatgtagcggctgctggcggcggggctcccggggcgggccgggcgggccgcgggagccgcacgcggcgatatggaagaggagggcaagaagggcaagaagcctggaattgtctcgccatttaaacgagtattcctaaaaggtgaaaagagtagagataagaaagcccatgagaaggtgacagagaggcgccctctgcacactgtggtgttgtcattgcctgagcgcgtcgagccagacagactgctgagcgactatattgagaaggaggtaaagtatttaggtcagttaacgtccataccaggatacctgaatccctccagtaggactgaaatcctgcatttcatagacaatgcaaagagagcccaccagcttccgggacacttgactcaggagcacgatgctgtgctcagcctgtctgcgtacaacgtcaagctggcctggagggacggggaggatatcatcctcagggtgcccatccatgacatcgccgccgtctcctatgttcgggatgacgctgcacacctggtggtcctgaagacagatgactcttctacaaaagtggacattaaggagacctacgaggtggaagccagcactttctgcttccctgaatctgtggatgtgggtggtgcatcaccccacagcaagaccatcagtgagagcgagctgagcgccagcgccactgagctgctgcaggactacatgctgacgctgcgcaccaagctgtcatcacaggagatccagcagtttgcagcactgctgcacgagtaccgcaatggggcctctatccacgagttctgcatcaacctgcggcagctctacggggacagccgcaagttcctgctgcttggtctgaggcccttcatccctgagaaggacagccagcacttcgagaacttcctggagaccattggcgtgaaggatggccgcggcatcatcactgacagctttggcaggcaccggcgggccctgagcaccacatccagttccaccaccaatgggaacagggccacgggcagctctgatgaccggtcggcaccctcagagggggatgagtgggaccgcatgatctcggacatcagcagcgacattgaggcgctgggctgcagcatggaccaggactcagcatgatggacagtggatgggggggcacccacaccttccgcgcagtcgtcataggccttcccagaaggagctgcccagacctgcgtgtcagcccttggtggtggccagggagaggcgcccggtgcagatggccccgggcggcccaggtcctctactgtgaaggagcagggagctgccgagggacacgagcctcagtgcggggtggaaggctctttgccttgtccaccagggctcagccaagccctgcagtgtgtccccgctcggggagggcccggccgagcgggcagggagagccagtcctgtcggctgggcccttggacggctgtcagttttgcacatgatgttcctattgtaactctcagagaccttaaaaagaagtttactgcaatgtgaataatttaatctctggttgccaagc

SEQ ID NO: 116774 - DNA, 1719 bp, Homo sapiens
  Payload ID: 2772
  Gene Symbol: CCM2
  Gene Name: cerebral cavernous malformation 2
  Uniprot ID: Q9BSQ5
  ENST ID: ENST00000541586
  CDS Start-End: 147-1307
gcgcggccggggcggagacttcgggcccggctggcgggcggcgccgggagcgcgggggcggcgggcccgggtcgagcatgtagcggctgctggcggcggggctcccggggcgggccgggcgggccgcgggagccgcacgcggcgatatggaagaggagggcaagaagggcaagaagtatttaggtcagttaacgtccataccaggatacctgaatccctccagtaggactgaaatcctgcatttcatagacaatgcaaagagagcccaccagcttccgggacacttgactcaggagcacgatgctgtgctcagcctgtctgcgtacaacgtcaagctggcctggagggacggggaggatatcatcctcagggtgcccatccatgacatcgccgccgtctcctatgttcgggatgacgctgcacacctggtggtcctgaagacagcccaggacccagggatctcccccagccagagtctgtgtgcggaaagttccagaggcctcagtgcaggctccctgtcggagagtgcagttgggcccgtggaggcatgctgcctggtcatcctggctgcagagagcaaggtcgctgcggaggagctttgctgtctgctaggccaggtcttccaggttgtttacacggagtccaccatcgactttctggacagagcgatatttgatggggcctctaccccgacccaccacctgtccctgcacagcgatgactcttctacaaaagtggacattaaggagacctacgaggtggaagccagcactttctgcttccctgaatctgtggatgtgggtggtgcatcaccccacagcaagaccatcagtgagagcgagctgagcgccagcgccactgagctgctgcaggactacatgctgacgctgcgcaccaagctgtcatcacaggagatccagcagtttgcagcactgctgcacgagtaccgcaatggggcctctatccacgagttctgcatcaacctgcggcagctctacggggacagccgcaagttcctgctgcttggtctgaggcccttcatccctgagaaggacagccagcacttcgagaacttcctggagaccattggcgtgaaggatggccgcggcatcatcactgacagctttggcaggcaccggcgggccctgagcaccacatccagttccaccaccaatgggaacagggccacgggcagctctgatgaccggtcggcaccctcagagggggatgagtgggaccgcatgatctcggacatcagcagcgacattgaggcgctgggctgcagcatggaccaggactcagcatgatggacagtggatgggggggcacccacaccttccgcgcagtcgtcataggccttcccagaaggagctgcccagacctgcgtgtcagcccttggtggtggccagggagaggcgcccggtgcagatggccccgggcggcccaggtcctctactgtgaaggagcagggagctgccgagggacacgagcctcagtgcggggtggaaggctctttgccttgtccaccagggctcagccaagccctgcagtgtgtccccgctcggggagggcccggccgagcgggcagggagagccagtcctgtcggctgggcccttggacggctgtcagttttgcacatgatgttcctattgtaactctcagagaccttaaaaagaagtttactgcaatgtgaataatttaatctctggttgccaagc

SEQ ID NO: 116775 - DNA, 2523 bp, Homo sapiens
  Payload ID: 2773
  Gene Symbol: CCM2L
  Gene Name: cerebral cavernous malformation 2-like
  Uniprot ID: Q9NUG4
  ENST ID: ENST00000262659
  CDS Start-End: 6-1307
tcaccatggaatatgaagtcaagaaagggaagaagggctttgtatcccccatccgaaggctggtgttccccaaggccgggcgccgggcagcctgtaggagcagcgtgagccgccggcccctgcactcgatgcccctttatccccccgactacctcatcgacccccagattctgctgtgtgactacctggagaaagaggtcaagttcctgggccaccttacctgggtgacttcctcactgaacccctccagtcgggacgagctcctgcagctgctagacaccgccaggcagctgaaggagctgccgctgaagaccacggcggagcaggacagcatcctgagcctgtctgcccgctgcctgctgctcacctggcgcgacaatgaagagctcattctgcgaatccctacgcacgagatcgccgccgcctcctacctgcaggacgacgcgctgcacctgctagtgctcaagaccggtctgggtgtggacccggtgccggccggcgtggatgccagcccaggcggcgcaggacgcgaccccggcccgccaggcggggcgcccgagaagcggcgggtgggcaccgcggagcggcgccacaccatctgcagcctggactggcggatggggtggggtgggggcgccgcggaggcccgggccgggggaggcggcggcggcagcttggagcgccagcgcgccggggcgcgggcgtcgggcagctgggagcgacggcagacgttcagcggcagctgggagcggcggcacggaggcggcggcggcggcggcggcgcgggaaagccgggcggtagctgggagcggaggcaggcgggcagcggcgggggaggcagctgggagcggcgccaccccggccccaacccgctcgacccgcaggaccccagccccgacgcctactgcaacctggtcatcctggctgtagccaacagggacgctgcagaggagtcctgcgcactcatctgtcaggtcttccagatcatctacggggaccagagtattgagtgtgtggaccgggctggctaccactacacatccacacctgaacggccatggctctgcagccgcataatggctcccaggacacctttgaagcatgttacagcggcacgtccacaccttctttccatggctcccactgcagcggcagcgaccacagcagtctgggcttggagcagttacaggattacatggtcacgttgcggagtaagctggggcccctcgagatccagcagtttgcgatgctgctgcgggagtaccggctggggctgcccatccaggactattgcacaggcctgctgaagctctacggagaccggcgcaagttcctcctccttgggatgcggcccttcatcccggaccaggacatcggctacttcgagggcttcctggagggcgtgggcatccgcgagggcggcatcctcactgacagcttcggccgcatcaagcgcagcatgagctccacgtcggcctccgcagtgcgcagctacgatggcgcggcgcagcggcccgaggcacaggccttccaccggctgctggctgacatcacgcacgacatcgaggcgctggcccccgatgacgacgacgacgacgaggatgagccccggggctccaggggcgggagcgacgccgcagaagacaactacctgtagccaccgcccctgcggacggcgtggctcagcagcccacctctgagtctcagctttgcttcggggaccctatccccagggcccccccatcacacctggcggggccggggggtcttcactccagggtctcgctccctgcccttggggcccggggccatgcagtacctggagtgtcctgcagggggaaagcgaagccgggccctgaagtccggggcagtcacccggggctcctgggccgctctgccgggctggggctgagcagcgatcctgctttgtcccagaagtccagagggatcagccccagaacacaccctcctccccgggacgccgcagctttctggaggctgaggaaggcatgaagagtgggctccacctgctggccgactgagaaaagaatttccagaactcggtcctattttacagattgagaaactatggttcaagaagagaggacggggcttgagggaatctcctgattctccttatatgacctcaaactgaccatactaaacagtgtagaaggtctttttaaggctctaaatgtcagggtctcccatcccctgatgcctgacttgtacagtcagtgtggagtagacggtttcctccacccagggttgactcagggggatgatctgggtcccattctggtcttaagaccccaaacaagggttttttcagctccaggatctggagcctctatctggttagtgtcgtaacctctgtgtgcctcccgttaccccatctgtccagtgagctcagcccccatccacctaacagggtggccacagggattactgagggttaagaccttagaactgggtctagcacccgataagagctcaataaatgttgttcctttccacatcaaa

SEQ ID NO: 116776 - DNA, 1841 bp, Homo sapiens
  Payload ID: 2773
  Gene Symbol: CCM2L
  Gene Name: cerebral cavernous malformation 2-like
  ENST ID: ENST00000452892
  CDS Start-End: 1-975
gagcggcggcacggaggcggcggcggcggcggcggcgcgggaaagccgggcggtagctgggagcggaggcaggcgggcagcggcgggggaggcagctgggagcggcgccaccccggccccaacccgctcgacccgcaggaccccagccccgacgcctactgcaacctggtcatcctggctgtagccaacagggacgctgcagaggagtcctgcgcactcatctgtcaggtcttccagatcatctacggggaccagagtattgagtgtgtggaccgggctggctaccactacacatccacacctgaacggccatggctctgcagccgcagtgagagctgccacacagatgggacgtatgcctatgatgccgacttcagctgctgcagctcctttaatggctcccaggacacctttgaagcatgttacagcggcacgtccacaccttctttccatggctcccactgcagcggcagcgaccacagcagtctgggcttggagcagttacaggattacatggtcacgttgcggagtaagctggggcccctcgagatccagcagtttgcgatgctgctgcgggagtaccggctggggctgcccatccaggactattgcacaggcctgctgaagctctacggagaccggcgcaagttcctcctccttgggatgcggcccttcatcccggaccaggacatcggctacttcgagggcttcctggagggcgtgggcatccgcgagggcggcatcctcactgacagcttcggccgcatcaagcgcagcatgagctccacgtcggcctccgcagtgcgcagctacgatggcgcggcgcagcggcccgaggcacaggccttccaccggctgctggctgacatcacgcacgacatcgaggcgctggcccccgatgacgacgacgacgacgaggatgagccccggggctccaggggcgggagcgacgccgcagaagacaactacctgtagccaccgcccctgcggacggcgtggctcagcagcccacctctgagtctcagctttgcttcggggaccctatccccagggcccccccatcacacctggcggggccggggggtcttcactccagggtctcgctccctgcccttggggcccggggccatgcagtacctggagtgtcctgcagggggaaagcgaagccgggccctgaagtccggggcagtcacccggggctcctgggccgctctgccgggctggggctgagcagcgatcctgctttgtcccagaagtccagagggatcagccccagaacacaccctcctccccgggacgccgcagctttctggaggctgaggaaggcatgaagagtgggctccacctgctggccgactgagaaaagaatttccagaactcggtcctattttacagattgagaaactatggttcaagaagagaggacggggcttgagggaatctcctgattctccttatatgacctcaaactgaccatactaaacagtgtagaaggtctttttaaggctctaaatgtcagggtctcccatcccctgatgcctgacttgtacagtcagtgtggagtagacggtttcctccacccagggttgactcagggggatgatctgggtcccattctggtcttaagaccccaaacaagggttttttcagctccaggatctggagcctctatctggttagtgtcgtaacctctgtgtgcctcccgttaccccatctgtccagtgagctcagcccccatccacctaacagggtggccacagggattactgagggttaagaccttagaactgggtctagcacccgataagagctcaataaatgttgttcctttccacatcaaa

SEQ ID NO: 116777 - DNA, 1492 bp, Homo sapiens
  Payload ID: 2774
  Gene Symbol: CDNF
  Gene Name: cerebral dopamine neurotrophic factor
  Uniprot ID: Q49AH0
  ENST ID: ENST00000378442
  CDS Start-End: 505-762
gccactccacgacatccctaggccggcgacacgccgctctcaagcctgtggatgacccagcgccagaaaaccgggtggccgtcatgaagccctagcccagctccgcagcccctcaccttatagacggccacacaggctgaggtgcagcccaggtaaagaagcttgtgtaatcgcagaggaaggacataacagtttgagcctcactctgtcacccaggttggagtacagtggaacagtctcagctcactgcaacttccgtcttccaggctcaagtgatcctccctcctcagcctcctgagtagctggactacagtatgtaaagaattcttgaaccgattctacaagtcactgatagacagaggagttaacttttcgctggacactatagagaaagaattgatcagtttttgcttggacaccaaaggaaaagaaaaccgcctgtgctattatctaggagccacaaaagacgcagccacaaagatcctaagtgaagtcactcgcccaatgagtgtgcatatgcctgcaatgaagatttgtgagaagctgaagaagttggatagccagatctgtgagctgaaatatgaaaaaacactggacttggcatcagttgacctgcggaagatgagagtggcagagctgaagcagatcctgcatagctggggggaggagtgcagggcctgtgcagaaaaaactgactatgtgaatctcattcaagagctggcccccaagtatgcagcgacacaccccaaaacagagctctgatctccaatgccagcacatttgtgacttgtaattagagagaaaagtgactctctaggatatggacatgttgattaaggataactgggaatgcatcatatttggtctcatgctttttgtgttggtattattcctcagaattttgttacgtgggtttatgagtgaaactaatactactgataacttacatttgcagtgtaccaaaagctaaaagttcctttctcataagtttcttggaatgactatgccagttttcattgcctgtctcctaaaagtgacctactgacaaattgatggagtaaattgattccaagaaagaagaaggcattcagagactcctctctggatgcaattttaaaatatattggactaaaacaaaagacacaacagtcagcttatctaatgcacaacttcaatcccaaatacagaatcaaaagtttttttcaagtgaattttctgttttcactctatattgtagctctctttggtatcagaaatggtcaggcaggagtactcgtttttcccattggaagaaaacccacttaaacctacttaaagaaaatagagagatcaagaaaccgtataagtatagccaatgtttggcaattatatcaacatttacattgttaattgaaccaagctcaaggtctttttcattccttacagtcacatatcagacaagtttttgatggaagattaaagcatattaaaaacactcataggcaacttggaa

SEQ ID NO: 116778 - DNA, 690 bp, Homo sapiens
  Payload ID: 2774
  Gene Symbol: CDNF
  Gene Name: cerebral dopamine neurotrophic factor
  Uniprot ID: Q49AH0
  ENST ID: ENST00000465530
  CDS Start-End: 127-690
gttgcgtcatttgtcctggcaactactggcagattctttccaacctcgaattctgctcagctcgctttggcagcttggtgggcggtgggcgcgggtggcggaggcgattgaagctgctggcccagcatgtggtgcgcgagcccagttgctgtggtggccttttgcgccgggcttttggtctctcacccggtgctgacgcagggccaggaggccggggggcggccaggggccgactgtgaagtatgtaaagaattcttgaaccgattctacaagtcactgatagacagaggagttaacttttcgctggacactatagagaaagaattgatcagtttttgcttggacaccaaaggaaaagaaaaccgcctgtgctattatctaggagccacaaaagacgcagccacaaagatcctaagtgaagtcactcgcccaatgagtgtgcatatgcctgcaatgaagatttgtgagaagctgaagaagttggatagccagatctgtgagctgaaatatgaaaaaacactggacttggcatcagttgacctgcggaagatgagagtggcagagctgaagcagatcctgcatagctggggggaggagtgcagggcctgtgcagaaaaaactgactatgtgaatctcattcaagagctggcccccaagtatgcagcgacacaccccaaaacagagctctga

SEQ ID NO: 116779 - DNA, 2685 bp, Homo sapiens
  Payload ID: 2775
  Gene Symbol: CERCAM
  Gene Name: cerebral endothelial cell adhesion molecule
  Uniprot ID: Q5T4B2
  ENST ID: ENST00000372838
  CDS Start-End: 399-2186
ccggggaatccggattccgggggttcaacgcccaggggttccatgagcccctactgttctcggacgcccggccggccccgacgcactcgtcctagcacccctcccctgtccggtcctccggcccctccgccgtcgcccctccggggtccagccgggcggggctgctccagggtcgcggctggcgcgggtccccgggccctggccctccggtgccccgggccaaggagagaaaacttgagcatccacgcacaggggtggggagcaggatcccactctgagggtgcactgccccgccctctccgggtctgcctcggccccgcccgggccccaggccccgccccctcccctcggccggcccgagagctccgggggccgctgcagccgcccaagcgcccgccatgcgcgctgcccgcgccgcgccgctgctccagctgctgctcctgctggggccgtggctggaggctgcgggcgttgcggagtcgccgctgcccgccgtggtccttgccatcctggcccgcaatgccgaacactcgctgccccactacctgggcgctctggagcggctggactacccccgggccaggatggccctctggtgtgccacggaccacaatgtggacaacaccacagagatgctgcaggagtggctggcggctgtgggcgatgactatgctgctgtggtctggaggcctgagggcgagcccaggttctacccagatgaagagggtcccaagcactggaccaaagaaaggcaccagtttctgatggagctgaagcaggaagccctcacctttgccaggaactggggggccgactatatcctgtttgcagacacagacaacattctgaccaacaatcagactctgcggcttctcatggggcaggggcttccagtggtggccccaatgctggactcccagacctactactccaacttctggtgtgggatcaccccccagggctactaccgccgcacagccgagtacttccccaccaagaaccgccagcgccggggctgcttccgtgtccccatggtccactccaccttccttgcatccctgcgggctgaaggggcagaccagcttgctttctacccgccacatcccaactacacttggcctttcgacgacatcatcgtcttcgcctatgcctgccaggctgctggggtctccgtccacgtgtgcaatgagcaccgttatgggtacatgaatgtgccggtgaaatcccaccaggggctggaagacgagagggtcaacttcatccacctgatcttagaagcactagtggacggcccccgcatgcaggcctcagctcatgtgactcggccctctaagaggcccagcaagatagggtttgacgaggtctttgtcatcagcctggctcgcaggcctgaccgtcgggaacgcatgctcgcctcgctctgggagatggagatctctgggagggtggtggacgctgtggatggctggatgctcaacagcagtgccatcaggaacctcggcgtagacctgctcccgggctaccaggacccttactcgggccgcactctgaccaagggcgaggtgggctgcttcctcagccattactccatctgggaagaggtggttgccaggggcctggcccgggtcctggtgtttgaggatgacgtgcgctttgagagcaacttcagggggcggctggagcggctgatggaggatgtggaggcagagaaactgtcttgggacctgatctacctcggacggaagcaggtgaaccctgagaaggagacggccgtggaggggctgccgggcctggtggtggctgggtactcctactggacgctggcctatgccctgcgtctggcgggtgcccgcaagctgctggcctcacagcctctgcgccgcatgctgcccgtggacgagttcctgcccatcatgttcgaccagcaccccaacgagcagtacaaggcacacttctggccacgggacctggtggccttctccgcccagcccctgctcgctgcccctacccactatgccggggacgccgagtggctcagtgacacggagacatcctctccatgggatgatgacagcggccgcctcatcagctggagcggctcccaaaagaccctgcgcagcccccgcctggacctgactggcagcagcgggcacagcctccaaccccagccccgagatgagctctaggtccaggtgatgactgcaaagcagtgtccaggagcaggccactactgcccagagagcagaggaggaggttgttggcagggactgcagatcctgtcagacctggccaccaccttgggcatggccactctgccctctggacctgtctttcatcgggagaaaccactcagagatggatcccattccctaaaggtctcacagcaaaggagcaggactcccaggcccctgtaccctgcctggcctgattcagggccttgtggcccccagcttctgtttcaagctgggcagaccccaggatcccttccctccctaaggactcagctgaggggcccctctgcccccttctacctccacctcagcaccctcccccagcttgatgtttgggtctccccagcaccctcctccctggccggtgcaaagtacagggaggtaaagcaggacccttgcagacatgttgcccagcacacagtaggccctcaataaaagccatttgcactttaaa

SEQ ID NO: 116780 - DNA, 5201 bp, Homo sapiens
  Payload ID: 2775
  Gene Symbol: CERCAM
  Gene Name: cerebral endothelial cell adhesion molecule
  Uniprot ID: Q5T4B2
  ENST ID: ENST00000372842
  CDS Start-End: 3145-4698
gggcagagatgcctccagctgggctttgagggtgtcagtcttccctcaaataggaaagatgaggggcaggggaggatattggggacaagcctctgctcagccctgggtcctcttggaaccgggcttggagccggaggtggggagggtgtccaagctgagctcctggattcccatctgccgaactgcacccagaaccaggagtggggtgcgggcccatcctctggccaggatcctgggctcccttggccacaaagcaggacaggggaccagagatcccccaactcaggagacgtgaagctggcagctgggccgctggcctagaaatggcctcaaatggaagctgccacccgatcctggtggaggctttgagctaggctagagatcaggactccagggttcagtgcgcacgtgctgcccctgcactagggccgaagcaatgcgggtgctggcgaccgacgcaaggaggtgacgcacaggggacttaaggagcggaccgccgcgggaggacgcgcccagctcagggggactccctctgcgccccccacgctgggtctccggcccacgcgtggcccggctggtctgcggagctagcgccagggccgccagagggcgcccggggcggaggatggggcgggagccggggaagcccgggaggtggtggccgagtgggcgccgcccctctgggtctgcggctcaggtcgaagagtcggctgcgtgggccggggaatccggattccgggggttcaacgcccaggggttccatgagcccctactgttctcggacgcccggccggccccgacgcactcgtcctagcacccctcccctgtccggtcctccggcccctccgccgtcgcccctccggggtccagccgggcggggctgctccagggtcgcggctggcgcgggtccccgggccctggccctccggtgccccgggccaaggagagaaaacttgagcatccacgcacaggggtggggagcaggatcccactctgagggtgcactgccccgccctctccgggtctgcctcggccccgcccgggccccaggccccgccccctcccctcggccggcccgagagctccgggggccgctgcagccgcccaagcgcccgccatgcgcgctgcccgcgccgcgccgctgctccagctgctgctcctgctggggccgtggctggaggctgcgggcgttgcggagtcgccgctgcccgccgtggtccttgccatcctggcccgcaatgccgaacactcgctgccccactacctgggcgctctggagcggctggactacccccgggccaggatggccctctggtgagagacccgggcattggcaccgagtgggcacctaacccccagcttcgcagatggcccccgcccccggcggccctgtctgctcgctccctgcccagacaccacctagacaggcccctcccctcacagacggccctgccagcccgagccgccagagaggaccccgagccccctgctgggagacgacagacctctgaggccacaggccgacgcgggacacccacccctccttctggtcccctactccttcctcttggggccttccctgggtgtaggttgggcccagccagcccttttcaccccagccttcagggcccagctcaaccccagtgggacctgtggttggctggatttgaagaggagcagacaggaacctctgaagtccactggggcccaacgtggcagggatcgaccacgctggaggcttccgggcacaggttgggggtgccatcagcactgggctccgggctgtgcaggggagtcagaccggcccccccaccgcccccgtgctggggccagctctcttggtagatcttggtagaggggcgggatcctgtcagccaagggcagtcccccttcctggagcctctcccctctggcatctctgtacccccagggcactgggatcgaaggccacaacccctggtctgtagacaccagaacagggaggagtccctggctgaggttgggggtaaactgagaaaaatgacaagccaccctcttcaacacaccacagttgggctgggggggtggagccctggcctggggaggccgcccacaattaccacagtttgggagtttgttagttcccacccctgtaagacttgacacgtagtcttcatttctggggaattggcttaaaggggcagcatcacccaaaacctgggcacttggctaaacccccacctctgttatgggggccccttccccaggagaggggaggctgtgccccatgacagcagagcttggacccatctgcattcttagggacgcttagagcatggtttggtccttattacaacctgggggtggaggaaagcagcagctcttctgtctagtccccattcagagagggacaggggctggcctgtggtcacacagccacaggtcacataggtaggtatctgcccacctaacgaaggtaaccagggaatgcaccaggtgtgatccttaaagtcgaggtacttttcatctttcaaaatgcattcgttggccaggtgtggtggctcacgcctgtaatttcagcactttgggaggccgaagtgggcagatcacctgaggtgaggagttcaagaccagcctggctaacatggtgaaaccccatctctactaaacaaacaaaaattagccgggcatggtggtgcacacctgtaatcccaggtactcaggaggctgaggcaggagaatcacttgaacccgggaggcggaggttgcagtgagtcgagatcataccactgcactacagcctgggcgacagagcaagattccatctcaaaaaaaatgcattattcttctcttatctttgtccatgacataagcaggacagcttaagttatagagggaggacgtgaagcccagagaaagatgggacttgcctgaggtcacacagcaggtcacagaactgtggtggggacctggctgtgctgcctccagcctctctgctgtagcacacctacccttcactgttccaaggagagctcgacctcaaaggtgttagtgctttggggtcaaggctgccttggggttcaatcctgtggctgtgccccctcagccttttttcttcccgtccccaggtgtgccacggaccacaatgtggacaacaccacagagatgctgcaggagtggctggcggctgtgggcgatgactatgctgctgtggtctggaggcctgagggcgagcccaggttctacccagatgaagagggtcccaagcactggaccaaagaaaggcaccagtttctgatggagctgaagcaggaagccctcacctttgccaggaactggggggccgactatatcctgtttgcagacacagacaacattctgaccaacaatcagactctgcggcttctcatggggcaggggcttccagtggtggccccaatgctggactcccagacctactactccaacttctggtgtgggatcaccccccagggctactaccgccgcacagccgagtacttccccaccaagaaccgccagcgccggggctgcttccgtgtccccatggtccactccaccttccttgcatccctgcgggctgaaggggcagaccagcttgctttctacccgccacatcccaactacacttggcctttcgacgacatcatcgtcttcgcctatgcctgccaggctgctggggtctccgtccacgtgtgcaatgagcaccgttatgggtacatgaatgtgccggtgaaatcccaccaggggctggaagacgagagggtcaacttcatccacctgatcttagaagcactagtggacggcccccgcatgcaggcctcagctcatgtgactcggccctctaagaggcccagcaagatagggtttgacgaggtctttgtcatcagcctggctcgcaggcctgaccgtcgggaacgcatgctcgcctcgctctgggagatggagatctctgggagggtggtggacgctgtggatggctggatgctcaacagcagtgccatcaggaacctcggcgtagacctgctcccgggctaccaggacccttactcgggccgcactctgaccaagggcgaggtgggctgcttcctcagccattactccatctgggaagaggtggttgccaggggcctggcccgggtcctggtgtttgaggatgacgtgcgctttgagagcaacttcagggggcggctggagcggctgatggaggatgtggaggcagagaaactgtcttgggacctgatctacctcggacggaagcaggtgaaccctgagaaggagacggccgtggaggggctgccgggcctggtggtggctgggtactcctactggacgctggcctatgccctgcgtctggcgggtgcccgcaagctgctggcctcacagcctctgcgccgcatgctgcccgtggacgagttcctgcccatcatgttcgaccagcaccccaacgagcagtacaaggcacacttctggccacgggacctggtggccttctccgcccagcccctgctcgctgcccctacccactatgccggggacgccgagtggctcagtgacacggagacatcctctccatgggatgatgacagcggccgcctcatcagctggagcggctcccaaaagaccctgcgcagcccccgcctggacctgactggcagcagcgggcacagcctccaaccccagccccgagatgagctctaggtccaggtgatgactgcaaagcagtgtccaggagcaggccactactgcccagagagcagaggaggaggttgttggcagggactgcagatcctgtcagacctggccaccaccttgggcatggccactctgccctctggacctgtctttcatcgggagaaaccactcagagatggatcccattccctaaaggtctcacagcaaaggagcaggactcccaggcccctgtaccctgcctggcctgattcagggccttgtggcccccagcttctgtttcaagctgggcagaccccaggatcccttccctccctaaggactcagctgaggggcccctctgcccccttctacctccacctcagcaccctcccccagcttgatgtttgggtctccccagcaccctcctccctggccggtgcaaagtacagggaggtaaagcaggacccttgcagacatgttgcccagcacacagtaggccctcaataaaagccatttgcactttaaatata

SEQ ID NO: 116781 - DNA, 551 bp, Homo sapiens
  Payload ID: 2775
  Gene Symbol: CERCAM
  Gene Name: cerebral endothelial cell adhesion molecule
  ENST ID: ENST00000420034
  CDS Start-End: 360-551
aagtctaagcagaatgggcagagatgcctccagctgggctttgagggtgtcagtcttccctcaaataggaaagatgaggggcaggggaggatattggggacaagcctctgctcagccctgggtcctcttggaaccgggcttggagccggaggtggggagggtgtccaagctgagctcctggattcccatctgccgaactgcacccagaaccaggagtggggtgcgggcccatcctctggccaggatcctgggctcccttggccacaaagcaggacaggggaccagagatcccccaactcaggagacgtgaagctggcagctggtgtgccacggaccacaatgtggacaacaccacagagatgctgcaggagtggctggcggctgtgggcgatgactatgctgctgtggtctggaggcctgagggcgagcccaggttctacccagatgaagagggtcccaagcactggaccaaagaaaggcaccagtttctgatggagctgaagcaggaagccctcacctttgccaggaactggggggccgactatatcctg

SEQ ID NO: 116782 - DNA, 530 bp, Homo sapiens
  Payload ID: 2775
  Gene Symbol: CERCAM
  Gene Name: cerebral endothelial cell adhesion molecule
  ENST ID: ENST00000447915
  CDS Start-End: 203-530
aagggagaagaaatctggcatctctccagaatgcttctcattgcagggccgctggcctagaaatggcctcaaatggaagctgccacccgatcctggtggaggctttgagctaggctagagatcaggactccagggttcagtgcgcacgtgctgcccctgcactaggtgtgccacggaccacaatgtggacaacaccacagagatgctgcaggagtggctggcggctgtgggcgatgactatgctgctgtggtctggaggcctgagggcgagcccaggttctacccagatgaagagggtcccaagcactggaccaaagaaaggcaccagtttctgatggagctgaagcaggaagccctcacctttgccaggaactggggggccgactatatcctgtttgcagacacagacaacattctgaccaacaatcagactctgcggcttctcatggggcaggggcttccagtggtggccccaatgctggactcccagacctactactccaacttctggtgtgggatcaccccccagg

SEQ ID NO: 116783 - DNA, 1176 bp, Homo sapiens
  Payload ID: 2775
  Gene Symbol: CERCAM
  Gene Name: cerebral endothelial cell adhesion molecule
  ENST ID: ENST00000411852
  CDS Start-End: 940-1176
cggggaatccggattccgggggttcaacgcccaggggttccatgagcccctactgttctcggacgcccggccggccccgacgcactcgtcctagcacccctcccctgtccggtcctccggcccctccgccgtcgcccctccggggtccagccgggcggggctgctccagggtcgcggctggcgcgggtccccgggccctggccctccggtgccccgggccaaggagagaaaacttgagcatccacgcacaggggtggggagcaggatcccactctgagggtgcactgccccgccctctccgggtctgcctcggccccgcccgggccccaggccccgccccctcccctcggccggcccgagagctccgggggccgctgcagccgcccaagcgcccgccatgcgcgctgcccgcgccgcgccgctgctccagctgctgctcctgctggggccgtggctggaggctgcgggcgttgcggagtcgccgctgcccgccgtggtccttgccatcctggcccgcaatgccgaacactcgctgccccactacctgggcgctctggagcggctggactacccccgggccaggatggccctctgacggccctgccagcccgagccgccagagaggaccccgagccccctgctgggagacgacagacctctgaggccacaggccgacgcgggacacccacccctccttctggtcccctactccttcctcttggggccttccctgggtgtaggttgggcccagccagcccttttcaccccagccttcagggcccagctcaaccccagtgggacctgtggttggctggatttgaagaggagcagacaggaacctctgaagtccactggggcccaacgtggcagggatcgaccacgctggaggcttccgggcacaggtgtgccacggaccacaatgtggacaacaccacagagatgctgcaggagtggctggcggctgtgggcgatgactatgctgctgtggtctggaggcctgagggcgagcccaggttctacccagatgaagagggtcccaagcactggaccaaagaaaggcaccagtttctgatggagctgaagcaggaagccctcacctttgccaggaactggggggccgactatatcctgtttgcagacacagacaacattctgaccaacaatcagactctgcgg

SEQ ID NO: 116784 - DNA, 887 bp, Homo sapiens
  Payload ID: 2775
  Gene Symbol: CERCAM
  Gene Name: cerebral endothelial cell adhesion molecule
  ENST ID: ENST00000420512
  CDS Start-End: 234-887
ggaaagggacctgtctgaggttggtgacagacacccagttcgatcccatctgtggtgccgccaggccgctcccttttctgctcctctcccgagaggctgcagagttctttccctcccagcagggtcctaaggaccccggcggtgctccaggggagccaacatcccctgctttggaggacggacgggtcgggtcgcagtgtgccacggaccacaatgtggacaacaccacagagatgctgcaggagtggctggcggctgtgggcgatgactatgctgctgtggtctggaggcctgagggcgagcccaggttctacccagatgaagagggtcccaagcactggaccaaagaaaggcaccagtttctgatggagctgaagcaggaagccctcacctttgccaggaactggggggccgactatatcctgtttgcagacacagacaacattctgaccaacaatcagactctgcggcttctcatggggcaggggcttccagtggtggccccaatgctggactcccagacctactactccaacttctggtgtgggatcaccccccagggctactaccgccgcacagccgagtacttccccaccaagaaccgccagcgccggggctgcttccgtgtccccatggtccactccaccttccttgcatccctgcgggctgaaggggcagaccagcttgctttctacccgccacatcccaactacacttggcctttcgacgacatcatcgtcttcgcctatgcctgccaggctgctggggtctccgtccacgtgtgcaatgagcaccgttatgggtacatgaatgtgccggtgaaatcccaccaggggctggaagacgagagggtcaacttcatccacctgatcttagaagcactaggt

SEQ ID NO: 116785 - DNA, 1429 bp, Homo sapiens
  Payload ID: 2775
  Gene Symbol: CERCAM
  Gene Name: cerebral endothelial cell adhesion molecule
  ENST ID: ENST00000613052
  CDS Start-End: 946-1413
gtcaacttcatccacctgatcttagaagcactagtggacggcccccgcatgcaggcctcagctcatgtgactcggccctctaagaggcccagcaagatagggtttgacgaggtctttgtcatcagcctggctcgcaggcctgaccgtcgggaacgcatgctcgcctcgctctgggagatggagatctctgggagggtggtggacgctgtggatggctggatgctcaacagcagtgccatcaggaacctcggcgtagacctgctcccgggctaccaggacccttactcgggccgcactctgaccaagggcgaggtgggctgcttcctcagccattactccatctgggaagaggtggttgccaggggcctggcccgggtcctggtgtttgaggatgacgtgcgctttgagagcaacttcagggggcggctggagcggctgatggaggatgtggaggcagagaaactgtcttgggacctgatctacctcggacggaagcaggtgaaccctgagaaggagacggccgtggaggggctgccgggcctggtggtggctgggtactcctactggacgctggcctatgccctgcgtctggcgggtgcccgcaagctgctggcctcacagcctctgcgccgcatgctgcccgtggacgagttcctgcccatcatgttcgaccagcaccccaacgagcagtacaaggcacacttctggccacgggacctggtggccttctccgcccagcccctgctcgctgcccctacccactatgccggggacgccgagtggctcagtgacacggagacatcctctccatgggatgatgacagcggccgcctcatcagctggagcggctcccaaaagaccctgcgcagcccccgcctggacctgactggcagcagcgggcacagcctccaaccccagccccgagatgagctctaggtccaggtgatgactgcaaagcagtgtccaggagcaggccactactgcccagagagcagaggaggaggttgttggcagggactgcagatcctgtcagacctggccaccaccttgggcatggccactctgccctctggacctgtctttcatcgggagaaaccactcagagatggatcccattccctaaaggtctcacagcaaaggagcaggactcccaggcccctgtaccctgcctggcctgattcagggccttgtggcccccagcttgtttcaagctgggcagaccccaggatcccttccctccctaaggactcagctgaggggcccctctgccccttctacctccacctcagcaccctcccccagcttgatgtttgggtctccccagcaccctcctccctggccggtgcaaagtacagggaggtaaagcaggacccttgcagacatgttgcccagcacacagtaggccctcaataaaagccatttgcacttt

SEQ ID NO: 116786 - DNA, 1554 bp, Homo sapiens
  Payload ID: 2775
  Gene Symbol: CERCAM
  Gene Name: cerebral endothelial cell adhesion molecule
  ENST ID: ENST00000612334
  CDS Start-End: 1-1554
atgctgcaggagtggctggcggctgtgggcgatgactatgctgctgtggtctggaggcctgagggcgagcccaggttctacccagatgaagagggtcccaagcactggaccaaagaaaggcaccagtttctgatggagctgaagcaggaagccctcacctttgccaggaactggggggccgactatatcctgtttgcagacacagacaacattctgaccaacaatcagactctgcggcttctcatggggcaggggcttccagtggtggccccaatgctggactcccagacctactactccaacttctggtgtgggatcaccccccagggctactaccgccgcacagccgagtacttccccaccaagaaccgccagcgccggggctgcttccgtgtccccatggtccactccaccttccttgcatccctgcgggctgaaggggcagaccagcttgctttctacccgccacatcccaactacacttggcctttcgacgacatcatcgtcttcgcctatgcctgccaggctgctggggtctccgtccacgtgtgcaatgagcaccgttatgggtacatgaatgtgccggtgaaatcccaccaggggctggaagacgagagggtcaacttcatccacctgatcttagaagcactagtggacggcccccgcatgcaggcctcagctcatgtgactcggccctctaagaggcccagcaagatagggtttgacgaggtctttgtcatcagcctggctcgcaggcctgaccgtcgggaacgcatgctcgcctcgctctgggagatggagatctctgggagggtggtggacgctgtggatgctgggatgctcaacagcagtgccatcaggaacctcggcgtagacctgctcccgggctaccaggacccttactcgggccgcactctgaccaagggcgaggtgggctgcttcctcagccattactccatctgggaagaggtggttgccaggggcctggcccgggtcctggtgtttgaggatgacgtgcgctttgagagcaacttcagggggcggctggagcggctgatggaggatgtggaggcagagaaactgtcttgggacctgatctacctcggacggaagcaggtgaaccctgagaaggagacggccgtggaggggctgccgggcctggtggtggctgggtactcctactggacgctggcctatgccctgcgtctggcgggtgcccgcaagctgctggcctcacagcctctgcgccgcatgctgcccgtggacgagttcctgcccatcatgttcgaccagcaccccaacgagcagtacaaggcacacttctggccacgggacctggtggccttctccgcccagcccctgctcgctgcccctacccactatgccggggacgccgagtggctcagtgacacggagacatcctctccatgggatgatgacagcggccgcctcatcagctggagcggctcccaaaagaccctgcgcagcccccgcctggacctgactggcagcagcgggcacagcctccaaccccagccccgagatgagctctag

SEQ ID NO: 116787 - DNA, 1580 bp, Homo sapiens
  Payload ID: 2776
  Gene Symbol: CLN3
  Gene Name: ceroid-lipofuscinosis, neuronal 3
  Uniprot ID: Q13286
  ENST ID: ENST00000333496
  CDS Start-End: 100-1344
agaacattctgctgctcttaaagaccctcatccctcccgtgggagccccctttggacactctatgaccctggaccctcgggggacctgaacttgatgcgatgggaggctgtgcaggctcgcggcggcgcttttcggattccgagggggaggagaccgtcccggagccccggctccctctgttggaccatcagggcgcgcattggaagaacgcggtgggcttctggctgctgggcctttgcaacaacttctcttatgtggtgatgctgagtgccgcccacgacatccttagccacaagaggacatcgggaaaccagagccatgctgtgctcctggcggacatcctccccacactcgtcatcaaattgttggctcctcttggccttcacctgctgccctacagcccccgggttctcgtcagtgggatttgtgctgctggaagcttcgtcctggttgccttttctcattctgtggggaccagcctgtgtggtgtggtcttcgctagcatctcatcaggccttggggaggtcaccttcctctccctcactgccttctaccccagggccgtgatctcctggtggtcctcagggactgggggagctgggctgctgggggccctgtcctacctgggcctcacccaggccggcctctcccctcagcagaccctgctgtccatgctgggtatccctgccctgctgctggccagctatttcttgttgctcacatctcctgaggcccaggaccctggaggggaagaagaagcagagagcgcagcccggcagcccctcataagaaccgaggccccggagtcgaagccaggctccagctccagcctctcccttcgggaaaggtggacagtgttcaagggtctgctgtggtacattgttcccttggtcgtagtttactttgccgagtatttcattaaccagggactttttgaactcctctttttctggaacacttccctgagtcacgctcagcaataccgctggtaccagatgctgtaccaggctggcgtctttgcctcccgctcttctctccgctgctgtcgcatccgtttcacctgggccctggccctgctgcagtgcctcaacctggtgttcctgctggcagacgtgtggttcggctttctgccaagcatctacctcgtcttcctgatcattctgtatgaggggctcctgggaggcgcagcctacgtgaacaccttccacaacatcgccctggagaccagtgatgagcaccgggagtttgcaatggcggccacctgcatctctgacacactggggatctccctgtcggggctcctggctttgcctctgcatgacttcctctgccagctctcctgatactcgggatcctcaggacgcaggtcacattcacctgtgggcagagggacaggtcagacacccaggcccaccccagagaccctccatgaactgtgctcccagccttcccggcaggtctgggagtagggaagggctgaagccttgtttcccttgcaggggggccagccattgtctcccacttggggagtttcttcctggcatcatgccttctgaataaatgccgattttatccatgg

SEQ ID NO: 116788 - DNA, 1660 bp, Homo sapiens
  Payload ID: 2776
  Gene Symbol: CLN3
  Gene Name: ceroid-lipofuscinosis, neuronal 3
  ENST ID: ENST00000355477
  CDS Start-End: 324-869
gtgctgtcacgtgatccgacaaacggcctctgcatagtgcagaacattctgctgctcttaaaggtacaggcctcagggtccctgctgtagacggggcgggggagagtacgatgggtggggcgtggtgggtcgtagggcgctcgagatggagcccccagcttccttgatggatcgcggggcgcgagtgccctagacaagccggagctgggaccggcaatcgggcgttgatccttgtcacctgtcgcagaccctcatccctcccgtgggagccccctttggacactctatgaccctggaccctcgggggacctgaacttgatgcgatgggaggctgtgcaggctcgcggcggcgcttttcggattccgagggggaggagaccgtcccggagccccggctccctctgttggaccatcagggcgcgcattggaagaacgcggtgggcttctggctgctgggcctttgcaacaacttctcttatgtggtgatgctgagtgccgcccacgacatccttagccacaagaggacatcgggaaaccagagccatgtggacccaggcccaacgccgatcccccacaacagctcatcacgatttgactgcaactctgtctctacggctgctgtgctcctggcggacatcctccccacactcgtcatcaaattgttggctcctcttggccttcacctgctgccctacagcccccgggttctcgtcagtgggatttgtgctgctggaagcttcgtcctggttgccttttctcattctgtggggaccagcctgtgtgctatttcttgttgctcacatctcctgaggcccaggaccctggaggggaagaagaagcagagagcgcagcccggcagcccctcataagaaccgaggccccggagtcgaagccaggctccagctccagcctctcccttcgggaaaggtggacagtgttcaagggtctgctgtggtacattgttcccttggtcgtagtttactttgccgagtatttcattaaccagggactttttgaactcctctttttctggaacacttccctgagtcacgctcagcaataccgctggtaccagatgctgtaccaggctggcgtctttgcctcccgctcttctctccgctgctgtcgcatccgtttcacctgggccctggccctgctgcagtgcctcaacctggtgttcctgctggcagacgtgtggttcggctttctgccaagcatctacctcgtcttcctgatcattctgtatgaggggctcctgggaggcgcagcctacgtgaacaccttccacaacatcgccctggagaccagtgatgagcaccgggagtttgcaatggcggccacctgcatctctgacacactggggatctccctgtcggggctcctggctttgcctctgcatgacttcctctgccagctctcctgatactcgggatcctcaggacgcaggtcacattcacctgtgggcagagggacaggtcagacacccaggcccaccccagagaccctccatgaactgtgctcccagccttcccggcaggtctgggagtagggaagggctgaagccttgtttcccttgcaggggggccagccattgtctcccacttggggagtttcttcctggcatcatgccttctgaataaatgccgattttatccatgga

SEQ ID NO: 116789 - DNA, 1469 bp, Homo sapiens
  Payload ID: 2776
  Gene Symbol: CLN3
  Gene Name: ceroid-lipofuscinosis, neuronal 3
  Uniprot ID: Q13286
  ENST ID: ENST00000357806
  CDS Start-End: 225-1244
gggagagtacgatgggtggggcgtggtgggtcgtagggcgctcgagatggagcccccagcttccttgatggatcgcggggcgcgagtgccctagacaagccggagctgggaccggcaatcgggcgttgatccttgtcacctgtcgcagaccctcatccctcccgtgggagccccctttggacactctatgaccctggaccctcgggggacctgaacttgatgcgatgggaggctgtgcaggctcgcggcggcgcttttcggattccgagggggaggagaccgtcccggagccccggctccctctgttggaccatcagggcgcgcattggaagaacgcggtgggcttctggctgctgggcctttgcaacaacttctcttatgtggtgatgctgagtgccgcccacgacatccttagccacaagaggacatcgggaaaccagagccatgtggacccaggcccaacgccgatcccccacaacagctcatcacgatttgactgcaactctgtctctacggctcccccgggttctcgtcagtgggatttgtgctgctggaagcttcgtcctggttgccttttctcattctgtggggaccagcctgtgtgctatttcttgttgctcacatctcctgaggcccaggaccctggaggggaagaagaagcagagagcgcagcccggcagcccctcataagaaccgaggccccggagtcgaagccaggctccagctccagcctctcccttcgggaaaggtggacagtgttcaagggtctgctgtggtacattgttcccttggtcgtagtttactttgccgagtatttcattaaccagggactttttgaactcctctttttctggaacacttccctgagtcacgctcagcaataccgctggtaccagatgctgtaccaggctggcgtctttgcctcccgctcttctctccgctgctgtcgcatccgtttcacctgggccctggccctgctgcagtgcctcaacctggtgttcctgctggcagacgtgtggttcggctttctgccaagcatctacctcgtcttcctgatcattctgtatgaggggctcctgggaggcgcagcctacgtgaacaccttccacaacatcgccctggagaccagtgatgagcaccgggagtttgcaatggcggccacctgcatctctgacacactggggatctccctgtcggggctcctggctttgcctctgcatgacttcctctgccagctctcctgatactcgggatcctcaggacgcaggtcacattcacctgtgggcagagggacaggtcagacacccaggcccaccccagagaccctccatgaactgtgctcccagccttcccggcaggtctgggagtagggaagggctgaagccttgtttcccttgcaggggggccagccattgtctcccacttggggagtttcttcctggcatcatgccttctgaataaatgccgat

SEQ ID NO: 116790 - DNA, 1519 bp, Homo sapiens
  Payload ID: 2776
  Gene Symbol: CLN3
  Gene Name: ceroid-lipofuscinosis, neuronal 3
  ENST ID: ENST00000357857
  CDS Start-End: 178-1332
ccttgtcacctgtcgcagaccctcatccctcccgtgggagccccctttggacactctatgaccctggaccctcgggggacctgaacttgatgcgatgggaggctgtgcaggctcgcggcggcgcttttcggattccgagggctgctgggcctttgcaacaacttctcttatgtggtgatgctgagtgccgcccacgacatccttagccacaagaggacatcgggaaaccagagccatgtggacccaggcccaacgccgatcccccacaacagctcatcacgatttgactgcaactctgtctctacggctgctgtgctcctggcggacatcctccccacactcgtcatcaaattgttggctcctcttggccttcacctgctgccctacagcccccgggttctcgtcagtgggatttgtgctgctggaagcttcgtcctggttgccttttctcattctgtggggaccagcctgtgtggtgtggtcttcgctagcatctcatcaggccttggggaggtcaccttcctctccctcactgccttctaccccagggccgtgatctcctggtggtcctcagggactgggggagctgggctgctgggggccctgtcctacctgggcctcacccaggccggcctctcccctcagcagaccctgctgtccatgctgggtatccctgccctgctgctggccagctatttcttgttgctcacatctcctgaggcccaggaccctggaggggaagaagaagcagagagcgcagcccggcagcccctcataagaaccgaggccccggagtcgaagccaggctccagctccagcctctcccttcgggaaaggtggacagtgttcaagggtctgctgtggtacattgttcccttggtcgtagtttactttgccgagtatttcattaaccagggactttttgaactcctctttttctggaacacttccctgagtcacgctcagcaataccgctggtaccagatgctgtaccaggctggcgtctttgcctcccgctcttctctccgctgctgtcgcatccgtttcacctgggccctggccctgctgcagtgcctcaacctggtgttcctgctggcagacgtgtggttcggctttctgccaagcatctacctcgtcttcctgatcattctgtatgaggggctcctgggaggcgcagcctacgtgaacaccttccacaacatcgccctggagaccagtgatgagcaccgggagtttgcaatggcggccacctgcatctctgacacactggggatctccctgtcggggctcctggctttgcctctgcatgacttcctctgccagctctcctgatactcgggatcctcaggacgcaggtcacattcacctgtgggcagagggacaggtcagacacccaggcccaccccagagaccctccatgaactgtgctcccagccttcccggcaggtctgggagtagggaagggctgaagccttgtttcccttgcaggggggccagccattgtctcccacttggggag

SEQ ID NO: 116791 - DNA, 1733 bp, Homo sapiens
  Payload ID: 2776
  Gene Symbol: CLN3
  Gene Name: ceroid-lipofuscinosis, neuronal 3
  ENST ID: ENST00000359984
  CDS Start-End: 486-1496
gtgctgtcacgtgatccgacaaacggcctctgcatagtgcagaacattctgctgctcttaaaggtacaggcctcagggtccctgctgtagacggggcgggggagagtacgatgggtggggcgtggtgggtcgtagggcgctcgagatggagcccccagcttccttgatggatcgcggggcgcgagtgccctagacaagccggagctgggaccggcaatcgggcgttgatccttgtcacctgtcgcagaccctcatccctcccgtgggagccccctttggacactctatgaccctggaccctcgggggacctgaacttgatgcgatgggaggctgtgcaggctcgcggcggcgcttttcggattccgagggggaggagaccgtcccggagccccggctccctctgttggaccatcagggcgcgcattggaagaacgcggtgggcttctggctgctgggcctttgcaacaacttctcttatgtggtgatgctgagtgccgcccacgacatccttagccacaagaggacatcgggaaaccagagccatgtggacccaggcccaacgccgatcccccacaacagctcatcacgatttgactgcaactctgtctctacggctgctgtgctcctggcggacatcctccccacactcgtcatcaaattgttggctcctcttggccttcacctgctgccctacagcccccgggttctcgtcagtgggatttgtgctgctggaagcttcgtcctggttgccttttctcattctgtggggaccagcctgtgtggtgtggtcttcgctagcatctcatcaggccttggggaggtcaccttcctctccctcactgccttctaccccagctatttcttgttgctcacatctcctgaggcccaggaccctggaggggaagaagaagcagagagcgcagcccggcagcccctcataagaaccgaggccccggagtcgaagccaggctccagctccagcctctcccttcgggaaaggtggacagtgttcaagggtctgctgtggtacattgttcccttggtcgtagtttactttgccgagtatttcattaaccagggactttttgaactcctctttttctggaacacttccctgagtcacgctcagcaataccgctggtaccagatgctgtaccaggctggcgtctttgcctcccgctcttctctccgctgctgtcgcatccgtttcacctgggccctggccctgctgcagtgcctcaacctggtgttcctgctggcagacgtgtggttcggctttctgccaagcatctacctcgtcttcctgatcattctgtatgaggggctcctgggaggcgcagcctacgtgaacaccttccacaacatcgccctggagaccagtgatgagcaccgggagtttgcaatggcggccacctgcatctctgacacactggggatctccctgtcggggctcctggctttgcctctgcatgacttcctctgccagctctcctgatactcgggatcctcaggacgcaggtcacattcacctgtgggcagagggacaggtcagacacccaggcccaccccagagaccctccatgaactgtgctcccagccttcccggcaggtctgggagtagggaagggctgaagccttgtttcccttgcaggggggccagccattgtctcccacttggggagtttcttcctggcatcatgccttctgaataaatgccgattttatccatgga

SEQ ID NO: 116792 - DNA, 1913 bp, Homo sapiens
  Payload ID: 2776
  Gene Symbol: CLN3
  Gene Name: ceroid-lipofuscinosis, neuronal 3
  Uniprot ID: Q13286
  ENST ID: ENST00000360019
  CDS Start-End: 360-1676
ataactggtgctggcaggctactgtctcggtcttgggcgccactgatctaaggtcacggctctgcttgctgctcccacccgctccagtttaaaacctgcggttccagggttctccagcccctccctttttcacgctccgaagccgagaaggcccaaagcgaagacagagaggacccggaagtagggaaaacctctgagcacgtgatgggggaacacgcgggtgctgtcacgtgatccgacaaacggcctctgcatagtgcagaacattctgctgctcttaaagaccctcatccctcccgtgggagccccctttggacactctatgaccctggaccctcgggggacctgaacttgatgcgatgggaggctgtgcaggctcgcggcggcgcttttcggattccgagggggaggagaccgtcccggagccccggctccctctgttggaccatcagggcgcgcattggaagaacgcggtgggcttctggctgctgggcctttgcaacaacttctcttatgtggtgatgctgagtgccgcccacgacatccttagccacaagaggacatcgggaaaccagagccatgtggacccaggcccaacgccgatcccccacaacagctcatcacgatttgactgcaactctgtctctacggctgctgtgctcctggcggacatcctccccacactcgtcatcaaattgttggctcctcttggccttcacctgctgccctacagcccccgggttctcgtcagtgggatttgtgctgctggaagcttcgtcctggttgccttttctcattctgtggggaccagcctgtgtggtgtggtcttcgctagcatctcatcaggccttggggaggtcaccttcctctccctcactgccttctaccccagggccgtgatctcctggtggtcctcagggactgggggagctgggctgctgggggccctgtcctacctgggcctcacccaggccggcctctcccctcagcagaccctgctgtccatgctgggtatccctgccctgctgctggccagctatttcttgttgctcacatctcctgaggcccaggaccctggaggggaagaagaagcagagagcgcagcccggcagcccctcataagaaccgaggccccggagtcgaagccaggctccagctccagcctctcccttcgggaaaggtggacagtgttcaagggtctgctgtggtacattgttcccttggtcgtagtttactttgccgagtatttcattaaccagggactttttgaactcctctttttctggaacacttccctgagtcacgctcagcaataccgctggtaccagatgctgtaccaggctggcgtctttgcctcccgctcttctctccgctgctgtcgcatccgtttcacctgggccctggccctgctgcagtgcctcaacctggtgttcctgctggcagacgtgtggttcggctttctgccaagcatctacctcgtcttcctgatcattctgtatgaggggctcctgggaggcgcagcctacgtgaacaccttccacaacatcgccctggagaccagtgatgagcaccgggagtttgcaatggcggccacctgcatctctgacacactggggatctccctgtcggggctcctggctttgcctctgcatgacttcctctgccagctctcctgatactcgggatcctcaggacgcaggtcacattcacctgtgggcagagggacaggtcagacacccaggcccaccccagagaccctccatgaactgtgctcccagccttcccggcaggtctgggagtagggaagggctgaagccttgtttcccttgcaggggggccagccattgtctcccacttggggagtttcttcctggcatcatgccttctgaataaatgccgattttatccatgga

SEQ ID NO: 116793 - DNA, 1577 bp, Homo sapiens
  Payload ID: 2776
  Gene Symbol: CLN3
  Gene Name: ceroid-lipofuscinosis, neuronal 3
  ENST ID: ENST00000395653
  CDS Start-End: 406-1422
aaaggtacaggcctcagggtccctgctgtagacggggcgggggagagtacgatgggtggggcgtggtgggtcgtagggcgctcgagatggagcccccagcttccttgatggatcgcggggcgcgagtgccctagacaagccggagctgggaccggcaatcgggcgttgatccttgtcacctgtcgcagaccctcatccctcccgtgggagccccctttggacactctatgaccctggaccctcgggggacctgaacttgatgcgatgggaggctgtgcaggctcgcggcggcgcttttcggattccgagggctgctgggcctttgcaacaacttctcttatgtggtgatgctgagtgccgcccacgacatccttagccacaagaggacatcgggaaaccagagccatgtggacccaggcccaacgccgatcccccacaacagctcatcacgatttgactgcaactctgtctctacggctcccccgggttctcgtcagtgggatttgtgctgctggaagcttcgtcctggttgccttttctcattctgtggggaccagcctgtgtggtgtggtcttcgctagcatctcatcaggccttggggaggtcaccttcctctccctcactgccttctaccccagggccgtgatctcctggtggtcctcagggactgggggagctgggctgctgggggccctgtcctacctgggcctcacccaggccggcctctcccctcagcagaccctgctgtccatgctgggtatccctgccctgctgctggccagctatttcttgttgctcacatctcctgaggcccaggaccctggaggggaagaagaagcagagagcgcagcccggcagcccctcataagaaccgaggccccggagtcgaagccaggctccagctccagcctctcccttcgggaaaggtggacagtgttcaagggtctgctgtggtacattgttcccttggtcgtagtttactttgccgagtatttcattaaccagggactttttgaactcctctttttctggaacacttccctgagtcacgctcagcaataccgctggtaccagatgctgtaccaggctggcgtctttgcctcccgctcttctctccgctgctgtcgcatccgtttcacctgggccctggccctgctgcagtgcctcaacctggtgttcctgctggcagacgtgtggttcggctttctgccaagcatctacctcgtcttcctgatcattctgtatgaggggctcctgggaggcgcagcctacgtgaacaccttccacaacatcgccctggagaccagtgatgagcaccgggagtttgcaatggcggccacctgcatctctgacacactggggatctccctgtcggggctcctggctttgcctctgcatgacttcctctgccagctctcctgatactcgggatcctcaggacgcaggtcacattcacctgtgggcagagggacaggtcagacacccaggcccaccccagagaccctccatgaactgtgctcccagccttcccggcaggtctgggagtagggaagggctgaagccttgtttcccttgca

SEQ ID NO: 116794 - DNA, 2374 bp, Homo sapiens
  Payload ID: 2776
  Gene Symbol: CLN3
  Gene Name: ceroid-lipofuscinosis, neuronal 3
  Uniprot ID: Q13286
  ENST ID: ENST00000569430
  CDS Start-End: 821-2137
gctcatgggactcctgcctctcctgggcttggccgctcctgtcttggcaagccccagaccctgccttggatttctttctggcctccaagtgggcgcttggctcctggcacctggcagccttggctgtctccccagccccactgtcctgcctctctgcttgggacccatgggagctgccatctccccagccccagtgctgggatgacaggcatgagccaccacacccagacgagagggcacatttccaactgcattctgaaggcctggtggtgagaaagagcatatagaggtggcacagcccatagcagagatgaggccaaggacaagaagagaatgcaggatgccgctttccacctagaagaagtttaaaacctgcggttccagggttctccagcccctccctttttcacgctccgaagccgagaaggcccaaagcgaagacagagaggacccggaagtagggaaaacctctgagcacgtgatgggggaacacgcgggtgctgtcacgtgatccgacaaacggcctctgcatagtgcagaacattctgctgctcttaaaggtacaggcctcagggtccctgctgtagacggggcgggggagagtacgatgggtggggcgtggtgggtcgtagggcgctcgagatggagcccccagcttccttgatggatcgcggggcgcgagtgccctagacaagccggagctgggaccggcaatcgggcgttgatccttgtcacctgtcgcagaccctcatccctcccgtgggagccccctttggacactctatgaccctggaccctcgggggacctgaacttgatgcgatgggaggctgtgcaggctcgcggcggcgcttttcggattccgagggggaggagaccgtcccggagccccggctccctctgttggaccatcagggcgcgcattggaagaacgcggtgggcttctggctgctgggcctttgcaacaacttctcttatgtggtgatgctgagtgccgcccacgacatccttagccacaagaggacatcgggaaaccagagccatgtggacccaggcccaacgccgatcccccacaacagctcatcacgatttgactgcaactctgtctctacggctgctgtgctcctggcggacatcctccccacactcgtcatcaaattgttggctcctcttggccttcacctgctgccctacagcccccgggttctcgtcagtgggatttgtgctgctggaagcttcgtcctggttgccttttctcattctgtggggaccagcctgtgtggtgtggtcttcgctagcatctcatcaggccttggggaggtcaccttcctctccctcactgccttctaccccagggccgtgatctcctggtggtcctcagggactgggggagctgggctgctgggggccctgtcctacctgggcctcacccaggccggcctctcccctcagcagaccctgctgtccatgctgggtatccctgccctgctgctggccagctatttcttgttgctcacatctcctgaggcccaggaccctggaggggaagaagaagcagagagcgcagcccggcagcccctcataagaaccgaggccccggagtcgaagccaggctccagctccagcctctcccttcgggaaaggtggacagtgttcaagggtctgctgtggtacattgttcccttggtcgtagtttactttgccgagtatttcattaaccagggactttttgaactcctctttttctggaacacttccctgagtcacgctcagcaataccgctggtaccagatgctgtaccaggctggcgtctttgcctcccgctcttctctccgctgctgtcgcatccgtttcacctgggccctggccctgctgcagtgcctcaacctggtgttcctgctggcagacgtgtggttcggctttctgccaagcatctacctcgtcttcctgatcattctgtatgaggggctcctgggaggcgcagcctacgtgaacaccttccacaacatcgccctggagaccagtgatgagcaccgggagtttgcaatggcggccacctgcatctctgacacactggggatctccctgtcggggctcctggctttgcctctgcatgacttcctctgccagctctcctgatactcgggatcctcaggacgcaggtcacattcacctgtgggcagagggacaggtcagacacccaggcccaccccagagaccctccatgaactgtgctcccagccttcccggcaggtctgggagtagggaagggctgaagccttgtttcccttgcaggggggccagccattgtctcccacttggggagtttcttcctggcatcatgccttctgaataaatgccgattttatccatgga

SEQ ID NO: 116795 - DNA, 539 bp, Homo sapiens
  Payload ID: 2776
  Gene Symbol: CLN3
  Gene Name: ceroid-lipofuscinosis, neuronal 3
  ENST ID: ENST00000564091
  CDS Start-End: 1-406
actcctctttttctggaacacttccctgagtcacgctcagcaataccgctggtaccagatgctgtaccaggctggcgtctttgcctcccgctcttctctccgctgctgtcgcatccgtttcacctgggccctggccctgctgcagtgcctcaacctggtgttcctgctggcagacgtgtggttcggctttctgccaagcatctacctcgtcttcctgatcattctgtatgaggggctcctgggaggcgcagcctacgtgaacaccttccacaacatcgccctggagaccagtgatgagcaccgggagtttgcaatggcggccacctgcatctctgacacactggggatctccctgtcggggctcctggctttgcctctgcatgacttcctctgccagctctcctgatactcgggatcctcaggacgcaggtcacattcacctgtgggcagagggacaggggggccagccattgtctcccacttggggagtttcttcctggcatcatgccttctgaataaatgccgattttatccatgga

SEQ ID NO: 116796 - DNA, 1109 bp, Homo sapiens
  Payload ID: 2776
  Gene Symbol: CLN3
  Gene Name: ceroid-lipofuscinosis, neuronal 3
  Uniprot ID: Q13286
  ENST ID: ENST00000569030
  CDS Start-End: 1-762
atgggaggctgtgcaggctcgcggcggcgcttttcggattccgagggggaggagaccgtcccggagccccggctccctctgttggaccatcagggcgcgcattggaagaacgcggtgggcttctggctgctgggcctttgcaacaacttctcttatgtggtgatgctgagtgccgcccacgacatccttagccacaagaggacatcgggaaaccagagccatgtggacccaggcccaacgccgatcccccacaacagctcatcacgatttgactgcaactctgtctctacggctgctgtgctcctggcggacatcctccccacactcgtcatcaaattgttggctcctcttggccttcacctgctgccctacagcccccgggttctcgtcagtgggatttgtgctgctggaagcttcgtcctggttgccttttctcattctgtggggaccagcctgtgtggctccagctccagcctctcccttcgggaaaggtggacagtgttcaagggtctgctgtggtacattgttcccttggtcgtagtttactttgccgagtatttcattaaccagggactttttgaactcctctttttctggaacacttccctgagtcacgctcagcaataccgctggtaccagatgctgtaccaggctggcgtctttgcctcccgctcttctctccgctgctgtcgcatccgtttcacctgggccctggccctgctgcagatggagtctcgctctgttgcccaggctggaatgtagcggtgcaatcttggctcactgcaacccctgcctcccagattcaagcgattctcaagcctcagccttccgagtagctgggattacagtgcctcaacctggtgttcctgctggcagacgtgtggttcggctttctgccaagcatctacctcgtcttcctgatcattctgtatgaggggctcctgggaggcgcagcctacgtgaacaccttccacaacatcgccctggagaccagtgatgagcaccgggagtttgcaatggcggccacctgcatctctgacacactggggatctccctgtcggggctcctggctttgcctctgcatgacttcctctgccagctctcctga

SEQ ID NO: 116797 - DNA, 886 bp, Homo sapiens
  Payload ID: 2776
  Gene Symbol: CLN3
  Gene Name: ceroid-lipofuscinosis, neuronal 3
  ENST ID: ENST00000568443
  CDS Start-End: 360-886
ataactggtgctggcaggctactgtctcggtcttgggcgccactgatctaaggtcacggctctgcttgctgctcccacccgctccagtttaaaacctgcggttccagggttctccagcccctccctttttcacgctccgaagccgagaaggcccaaagcgaagacagagaggacccggaagtagggaaaacctctgagcacgtgatgggggaacacgcgggtgctgtcacgtgatccgacaaacggcctctgcatagtgcagaacattctgctgctcttaaagaccctcatccctcccgtgggagccccctttggacactctatgaccctggaccctcgggggacctgaacttgatgcgatgggaggctgtgcaggctcgcggcggcgcttttcggattccgagggtgagtattcccgcccaccctcatggaacgaccacctctggctcgcagcccacctgaggggaatgagagctgactcggccccgggaggacacgcaaggagcggtcgtgcacctgagagtaggtgggggtcatgccctcttctcgctctcccaggggaggagaccgtcccggagccccggctccctctgttggaccatcagggcgcgcattggaagaacgcggtgggcttctggctgctgggcctttgcaacaacttctcttatgtggtgatgctgagtgccgcccacgacatccttagccacaagaggacatcgggaaaccagagccatgtggacccaggcccaacgccgatcccccacaacagctcatcacgatttgactgcaactctgtctctacggctgctgtgctcctggcggacatcctccccacactcgtcatcaaattgttggctcctcttggccttcacctgctgccctacag

SEQ ID NO: 116798 - DNA, 1225 bp, Homo sapiens
  Payload ID: 2776
  Gene Symbol: CLN3
  Gene Name: ceroid-lipofuscinosis, neuronal 3
  ENST ID: ENST00000565140
  CDS Start-End: 1-546
atgggaggctgtgcaggctcgcggcggcgcttttcggattccgagggggaggagaccgtcccggagccccggctccctctgttggaccatcagggcgcgcattggaagaacgcggtgggcttctggctgctgggcctttgcaacaacttctcttatgtggtgatgctgagtgccgcccacgacatccttagccacaagaggacatcgggaaaccagagccatgtggacccaggcccaacgccgatcccccacaacagctcatcacgatttgactgcaactctgtctctacggctgctgtgctcctggcggacatcctccccacactcgtcatcaaattgttggctcctcttggccttcacctgctgccctacagcccccgggttctcgtcagtgggatttgtgctgctggaagcttcgtcctggttgccttttctcattctgtggggaccagcctgtgtgctatttcttgttgctcacatctcctgaggcccaggaccctggaggggaagaagaagcagagagcgcagcccggcagcccctcataagaaccgaggccccggagtcgaagccaggctccagctccagcctctcccttcgggaaaggtggacagtgttcaagggtctgctgtggtacattgttcccttggtcgtagtttactttgccgagtatttcattaaccagggactttttgaactcctctttttctggaacacttccctgagtcacgctcagcaataccgctggtaccagatgctgtaccaggctggcgtctttgcctcccgctcttctctccgctgctgtcgcatccgtttcacctgggccctggccctgctgcagagacagagttttgctcttgtagctcaggctagagtacaatggcgtgatcttggctcactgcaacctccgcctcccaggttcaggcgattcttctgcctcagcctcctgcgtagctgggattacagtgcctcaacctggtgttcctgctggcagacgtgtggttcggctttctgccaagcatctacctcgtcttcctgatcattctgtatgaggggctcctgggaggcgcagcctacgtgaacaccttccacaacatcgccctggagaccagtgatgagcaccgggagtttgcaatggcggccacctgcatctctgacacactggggatctccctgtcggggctcctggctttgcctctgcatgacttcctctgccagctctcctga

SEQ ID NO: 116799 - DNA, 557 bp, Homo sapiens
  Payload ID: 2776
  Gene Symbol: CLN3
  Gene Name: ceroid-lipofuscinosis, neuronal 3
  ENST ID: ENST00000567804
  CDS Start-End: 336-557
atcatagctcactgtagcttcaacctcctgggcacaagtgatcctcccacctcagcttccaagtttaaaacctgcggttccagggttctccagcccctccctttttcacgctccgaagccgagaaggcccaaagcgaagacagagaggacccggaagtagggaaaacctctgagcacgtgatgggggaacacgcgggtgctgtcacgtgatccgacaaacggcctctgcatagtgcagaacattctgctgctcttaaagaccctcatccctcccgtgggagccccctttggacactctatgaccctggaccctcgggggacctgaacttgatgcgatgggaggctgtgcaggctcgcggcggcgcttttcggattccgagggggaggagaccgtcccggagccccggctccctctgttggaccatcagggcgcgcattggaagaacgcggtgggcttctggctgctgggcctttgcaacaacttctcttatgtggtgatgctgagtgccgcccacgacatccttagccacaagaggacatcgggaaaccagagccat

SEQ ID NO: 116800 - DNA, 1325 bp, Homo sapiens
  Payload ID: 2776
  Gene Symbol: CLN3
  Gene Name: ceroid-lipofuscinosis, neuronal 3
  ENST ID: ENST00000567963
  CDS Start-End: 113-1138
ctctgcatagtgcagaacattctgctgctcttaaagaccctcatccctcccgtgggagccccctttggacactctatgaccctggaccctcgggggacctgaacttgatgcgatgggaggctgtgcaggctcgcggcggcgcttttcggattccgagggggaggagaccgtcccggagccccggctccctctgttggaccatcagggcgcgcattggaagaacgcggtgggcttctggctgctgggcctttgcaacaacttctcttatgtggtgatgctgagtgccgcccacgacatccttagccacaagaggacatcgggaaaccagagccatgtggacccaggcccaacgccgatcccccacaacagctcatcacgatttgactgcaactctgtctctacggctgctgtgctcctggcggacatcctccccacactcgtcatcaaattgttggctcctcttggccttcacctgctgccctacagcccccgggttctcgtcagtgggatttgtgctgctggaagcttcgtcctggttgccttttctcattctgtggggaccagcctgtgtggtgtggtcttcgctagcatctcatcaggccttggggaggtcaccttcctctccctcactgccttctaccccagggccgtgatctcctggtggtcctcagggactgggggagctgggctgctgggggccctgtcctacctgggcctcacccaggccggcctctcccctcagcagaccctgctgtccatgctgggtatccctgccctgctgctggccagctatttcttgttgctcacatctcctgaggcccaggaccctggaggggaagaagaagcagagagcgcagcccggcagcccctcataagaaccgaggccccggagtcgaagccaggctccagctccagcctctcccttcgggaaaggtggacagtgttcaagggtctgctgtggtacattgttcccttggtcgtagtttactttgccgagtatttcattaaccagggacttaccagtgatgagcaccgggagtttgcaatggcggccacctgcatctctgacacactggggatctccctgtcggggctcctggctttgcctctgcatgacttcctctgccagctctcctgatactcgggatcctcaggacgcaggtcacattcacctgtgggcagagggacaggtcagacacccaggcccaccccagagaccctccatgaactgtgctcccagccttcccggcaggtctgggagtagggaagggctgaagccttgtttcccttgcaggggggccagccattgtctcccacttggggag

SEQ ID NO: 116801 - DNA, 1224 bp, Homo sapiens
  Payload ID: 2776
  Gene Symbol: CLN3
  Gene Name: ceroid-lipofuscinosis, neuronal 3
  ENST ID: ENST00000568422
  CDS Start-End: 239-637
gatccttgtcacctgtcgcagaccctcatccctcccgtgggagccccctttggacactctatgaccctggaccctcgggggacctgaacttgatgcgatgggaggctgtgcaggctcgcggcggcgcttttcggattccgagggctgctgggcctttgcaacaacttctcttatgtggtgatgctgagtgccgcccacgacatccttagccacaagaggacatcgggaaaccagagccatgtggacccaggcccaacgccgatcccccacaacagctcatcacgatttgactgcaactctgtctctacggctgctgtgctcctggcggacatcctccccacactcgtcatcaaattgttggctcctcttggccttcacctgctgccctacagcccccgggttctcgtcagtgggatttgtgctgctggaagcttcgtcctggttgccttttctcattctgtggggaccagcctgtgtggtgtggtcttcgctagcatctcatcaggccttggggaggtcaccttcctctccctcactgccttctaccccagctatttcttgttgctcacatctcctgaggcccaggaccctggaggggaagaagaagcagagagcgcagcccggcagcccctcataagaaccgaggccccggagtcgaagccaggctccagctccagcctctcccttcgggaaaggtggacagtgttcaagggtctgctgtggtacattgttcccttggtcgtagtttactttgccgagtatttcattaaccagggactttttgaactcctctttttctggaacacttccctgagtcacgctcagcaataccgctggtaccagatgctgtaccaggctggcgtctttgcctcccgctcttctctccgctgctgtcgcatccgtttcacctgggccctggccctgctgcagtgcctcaacctggtgttcctgctggcagacgtgtggttcggctttctgccaagcatctacctcgtcttcctgatcattctgtatgaggggctcctgggaggcgcagcctacgtgaacaccttccacaacatcgccctggagaccagtgatgagcaccgggagtttgcaatggcggccacctgcatctctgacacactggggatctccctgtcggggctcctggctttgcctctgcatgacttcctctgccagctctcctgatactcgggatcctcaggacgcaggtcacattca

SEQ ID NO: 116802 - DNA, 735 bp, Homo sapiens
  Payload ID: 2776
  Gene Symbol: CLN3
  Gene Name: ceroid-lipofuscinosis, neuronal 3
  ENST ID: ENST00000568558
  CDS Start-End: 184-735
gttgatccttgtcacctgtcgcagaccctcatccctcccgtgggagccccctttggacactctatgaccctggaccctcgggggacctgaacttgatgcgatgggaggctgtgcaggctcgcggcggcgcttttcggattccgagggctgctgggcctttgcaacaacttctcttatgtggtgatgctgagtgccgcccacgacatccttagccacaagaggacatcgggaaaccagagccatgtggacccaggcccaacgccgatcccccacaacagctcatcacgatttgactgcaactctgtctctacggctcccccgggttctcgtcagtgggatttgtgctgctggaagcttcgtcctggttgccttttctcattctgtggggaccagcctgtgtgctatttcttgttgctcacatctcctgaggcccaggaccctggaggggaagaagaagcagagagcgcagcccggcagcccctcataagaaccgaggccccggagtcgaagccaggctccagctccagcctctcccttcgggaaaggtggacagtgttcaagggtctgctgtggtacattgttcccttggtcgtagtttactttgccgagtatttcattaaccagggactttttgaactcctctttttctggaacacttccctgagtcacgctcagcaataccgctggtaccagatgctgtaccaggctggcgtctttgcctcccgctcttctctc

SEQ ID NO: 116803 - DNA, 762 bp, Homo sapiens
  Payload ID: 2776
  Gene Symbol: CLN3
  Gene Name: ceroid-lipofuscinosis, neuronal 3
  ENST ID: ENST00000567495
  CDS Start-End: 74-619
ctcatccctcccgtgggagccccctttggacactctatgaccctggaccctcgggggacctgaacttgatgcgatgggaggctgtgcaggctcgcggcggcgcttttcggattccgagggggaggagaccgtcccggagccccggctccctctgttggaccatcagggcgcgcattggaagaacgcggtgggcttctggctgctgggcctttgcaacaacttctcttatgtggtgatgctgagtgccgcccacgacatccttagccacaagaggacatcgggaaaccagagccatgtggacccaggcccaacgccgatcccccacaacagctcatcacgatttgactgcaactctgtctctacggctgctgtgctcctggcggacatcctccccacactcgtcatcaaattgttggctcctcttggccttcacctgctgccctacagcccccgggttctcgtcagtgggatttgtgctgctggaagcttcgtcctggttgccttttctcattctgtggggaccagcctgtgtgctatttcttgttgctcacatctcctgaggcccaggaccctggaggggaagaagaagcagagagcgcagcccggcagcccctcataagaaccgaggccccggagtcgaagccaggctccagctccagcctctcccttcgggaaaggtggacagtgttcaagggtctgctgtggtacattgttcccttggtcgtagtttactttgccgagtatttcattaaccagggactt

SEQ ID NO: 116804 - DNA, 1266 bp, Homo sapiens
  Payload ID: 2776
  Gene Symbol: CLN3
  Gene Name: ceroid-lipofuscinosis, neuronal 3
  Uniprot ID: Q13286
  ENST ID: ENST00000565316
  CDS Start-End: 1-1266
atgggaggctgtgcaggctcgcggcggcgcttttcggattccgagggggaggagaccgtcccggagccccggctccctctgttggaccatcagggcgcgcattggaagaacgcggtgggcttctggctgctgggcctttgcaacaacttctcttatgtggtgatgctgagtgccgcccacgacatccttagccacaagaggacatcgggaaaccagagccatgtggacccaggcccaacgccgatcccccacaacagctcatcacgatttgactgcaactctgtctctacggctgctgtgctcctggcggacatcctccccacactcgtcatcaaattgttggctcctcttggccttcacctgctgccctacagcccccgggttctcgtcagtgggatttgtgctgctggaagcttcgtcctggttgccttttctcattctgtggggaccagcctgtgtggtgtggtcttcgctagcatctcatcaggccttggggaggtcaccttcctctccctcactgccttctaccccagggccgtgatctcctggtggtcctcagggactgggggagctgggctgctgggggccctgtcctacctgggcctcacccaggccggcctctcccctcagcagaccctgctgtccatgctgggtatccctgccctgctgctggccagctatttcttgttgctcacatctcctgaggcccaggaccctggaggggaagaagaagcagagagcgcagcccggcagcccctcataagaaccgaggccccggagtcgaagccaggctccagctccagcctctcccttcgggaaaggtggacagtgttcaaggttcggatgatggctgggtttgaactcctctttttctggaacacttccctgagtcacgctcagcaataccgctggtaccagatgctgtaccaggctggcgtctttgcctcccgctcttctctccgctgctgtcgcatccgtttcacctgggccctggccctgctgcagtgcctcaacctggtgttcctgctggcagacgtgtggttcggctttctgccaagcatctacctcgtcttcctgatcattctgtatgaggggctcctgggaggcgcagcctacgtgaacaccttccacaacatcgccctggagaccagtgatgagcaccgggagtttgcaatggcggccacctgcatctctgacacactggggatctccctgtcggggctcctggctttgcctctgcatgacttcctctgccagctctcctga

SEQ ID NO: 116805 - DNA, 650 bp, Homo sapiens
  Payload ID: 2776
  Gene Symbol: CLN3
  Gene Name: ceroid-lipofuscinosis, neuronal 3
  ENST ID: ENST00000565688
  CDS Start-End: 121-650
caaacggcctctgcatagtgcagaacattctgctgctcttaaagaccctcatccctcccgtgggagccccctttggacactctatgaccctggaccctcgggggacctgaacttgatgcgatgggaggctgtgcaggctcgcggcggcgcttttcggattccgagggggaggagaccgtcccggagccccggctccctctgttggaccatcagggcgcgcattggaagaacgcggtgggcttctgcccccgggttctcgtcagtgggatttgtgctgctggaagcttcgtcctggttgccttttctcattctgtggggaccagcctgtgtggtgtggtcttcgctagcatctcatcaggccttggggaggtcaccttcctctccctcactgccttctaccccagggccgtgatctcctggtggtcctcagggactgggggagctgggctgctgggggccctgtcctacctgggcctcacccaggccggcctctcccctcagcagaccctgctgtccatgctgggtatccctgccctgctgctggccagctatttcttgttgctcacatctcctgaggcccaggaccctggaggggaagaagaagcagagagcgcagcccggcagcccctcataagaaccgaggccccgga

SEQ ID NO: 116806 - DNA, 577 bp, Homo sapiens
  Payload ID: 2776
  Gene Symbol: CLN3
  Gene Name: ceroid-lipofuscinosis, neuronal 3
  ENST ID: ENST00000568497
  CDS Start-End: 100-348
ttgatccttgtcacctgtcgcagaccctcatccctcccgtgggagccccctttggacactctatgaccctggaccctcgggggacctgaacttgatgcgatgggaggctgtgcaggctcgcggcggcgcttttcggattccgagggggaggagaccgtcccggagccccggctccctctgttggaccatcagggcgcgcattggaagaacgcggtgggcttctggctgctgggcctttgcaacaacttctcttatgtggtgatgctgagtgccgcccacgacatccttagccacaagaggacatcgggaaaccagagccatctatttcttgttgctcacatctcctgaggcccaggaccctggaggggaagaagaagcagagagcgcagcccggcagcccctcataagaaccgaggccccggagtcgaagccaggctccagctccagcctctcccttcgggaaaggtggacagtgttcaagggtctgctgtggtacattgttcccttggtcgtagtttactttgccgagtatttcattaaccagggactttttgaactcctctttttctggaacact

SEQ ID NO: 116807 - DNA, 931 bp, Homo sapiens
  Payload ID: 2776
  Gene Symbol: CLN3
  Gene Name: ceroid-lipofuscinosis, neuronal 3
  ENST ID: ENST00000566057
  CDS Start-End: 1-318
atgggaggctgtgcaggctcgcggcggcgcttttcggattccgagggggaggagaccgtcccggagccccggctccctctgttggaccatcagggcgcgcattggaagaacgcggtgggcttctggctgtgctcctggcggacatcctccccacactcgtcatcaaattgttggctcctcttggccttcacctgctgccctacagcccccgggttctcgtcagtgggatttgtgctgctggaagcttcgtcctggttgccttttctcattctgtggggaccagcctgtgtgctatttcttgttgctcacatctcctgaggcccaggaccctggaggggaagaagaagcagagagcgcagcccggcagcccctcataagaaccgaggccccggagtcgaagccaggctccagctccagcctctcccttcgggaaaggtggacagtgttcaagggtctgctgtggtacattgttcccttggtcgtagtttactttgccgagtatttcattaaccagggactttttgaactcctctttttctggaacacttccctgagtcacgctcagcaataccgctggtaccagatgctgtaccaggctggcgtctttgcctcccgctcttctctccgctgctgtcgcatccgtttcacctgggccctggccctgctgcagtgcctcaacctggtgttcctgctggcagacgtgtggttcggctttctgccaagcatctacctcgtcttcctgatcattctgtatgaggggctcctgggaggcgcagcctacgtgaacaccttccacaacatcgccctggagaccagtgatgagcaccgggagtttgcaatggcggccacctgcatctctgacacactggggatctccctgtcggggctcctggctttgcctctgcatgacttcctctgccagctctcctga

SEQ ID NO: 116808 - DNA, 609 bp, Homo sapiens
  Payload ID: 2776
  Gene Symbol: CLN3
  Gene Name: ceroid-lipofuscinosis, neuronal 3
  ENST ID: ENST00000561505
  CDS Start-End: 248-609
atagtgcagaacattctgctgctcttaaagaccctcatccctcccgtgggagccccctttggacactctatgaccctggaccctcgggggacctgaacttgatgcgatgggaggctgtgcaggctcgcggcggcgcttttcggattccgagggctgctgggcctttgcaacaacttctcttatgtggtgatgctgagtgccgcccacgacatccttagccacaagaggacatcgggaaaccagagccatgtggacccaggcccaacgccgatcccccacaacagctcatcacgatttgactgcaactctgtctctacggctcccccgggttctcgtcagtgggatttgtgctgctggaagcttcgtcctggttgccttttctcattctgtggggaccagcctgtgtggtgtggtcttcgctagcatctcatcaggccttggggaggtcaccttcctctccctcactgccttctaccccagggccgtgatctcctggtggtcctcagggactgggggagctgggctgctgggggccctgtcctacctgggcctcacccaggccggcctctcccctcagcagaccctgctgtccatgctgggtatccctgc

SEQ ID NO: 116809 - DNA, 569 bp, Homo sapiens
  Payload ID: 2776
  Gene Symbol: CLN3
  Gene Name: ceroid-lipofuscinosis, neuronal 3
  ENST ID: ENST00000565778
  CDS Start-End: 69-569
ccctcccgtgggagccccctttggacactctatgaccctggaccctcgggggacctgaacttgatgcgatgggaggctgtgcaggctcgcggcggcgcttttcggattccgagggggaggagaccgtcccggagccccggctccctctgttggaccatcagggcgcgcattggaagaacgcggtgggcttctggctgctgggcctttgcaacaacttctcttatgtggtgatgctgagtgccgcccacgacatccttagccacaagaggacatcgggaaaccagagccatcccccgggttctcgtcagtgggatttgtgctgctggaagcttcgtcctggttgccttttctcattctgtggggaccagcctgtgtgctatttcttgttgctcacatctcctgaggcccaggaccctggaggggaagaagaagcagagagcgcagcccggcagcccctcataagaaccgaggccccggagtcgaagccaggctccagctccagcctctcccttcgggaaaggtggacagtgttcaagggtctgctgtggtacattgttcccttggtcgta

SEQ ID NO: 116810 - DNA, 1422 bp, Homo sapiens
  Payload ID: 2776
  Gene Symbol: CLN3
  Gene Name: ceroid-lipofuscinosis, neuronal 3
  ENST ID: ENST00000628023
  CDS Start-End: 324-572
gtgctgtcacgtgatccgacaaacggcctctgcatagtgcagaacattctgctgctcttaaaggtacaggcctcagggtccctgctgtagacggggcgggggagagtacgatgggtggggcgtggtgggtcgtagggcgctcgagatggagcccccagcttccttgatggatcgcggggcgcgagtgccctagacaagccggagctgggaccggcaatcgggcgttgatccttgtcacctgtcgcagaccctcatccctcccgtgggagccccctttggacactctatgaccctggaccctcgggggacctgaacttgatgcgatgggaggctgtgcaggctcgcggcggcgcttttcggattccgagggggaggagaccgtcccggagccccggctccctctgttggaccatcagggcgcgcattggaagaacgcggtgggcttctggctgctgggcctttgcaacaacttctcttatgtggtgatgctgagtgccgcccacgacatccttagccacaagaggacatcgggaaaccagagccatctatttcttgttgctcacatctcctgaggcccaggaccctggaggggaagaagaagcagagagcgcagcccggcagcccctcataagaaccgaggccccggagtcgaagccaggctccagctccagcctctcccttcgggaaaggtggacagtgttcaagggtctgctgtggtacattgttcccttggtcgtagtttactttgccgagtatttcattaaccagggactttttgaactcctctttttctggaacacttccctgagtcacgctcagcaataccgctggtaccagatgctgtaccaggctggcgtctttgcctcccgctcttctctccgctgctgtcgcatccgtttcacctgggccctggccctgctgcagtgcctcaacctggtgttcctgctggcagacgtgtggttcggctttctgccaagcatctacctcgtcttcctgatcattctgtatgaggggctcctgggaggcgcagcctacgtgaacaccttccacaacatcgccctggagaccagtgatgagcaccgggagtttgcaatggcggccacctgcatctctgacacactggggatctccctgtcggggctcctggctttgcctctgcatgacttcctctgccagctctcctgatactcgggatcctcaggacgcaggtcacattcacctgtgggcagagggacaggtcagacacccaggcccaccccagagaccctccatgaactgtgctcccagccttcccggcaggtctgggagtagggaagggctgaagccttgtttcccttgcaggggggccagccattgtctcccacttggggagtttcttcctggcatcatgccttctgaataaatgccgattttatccatgga

SEQ ID NO: 116811 - DNA, 1586 bp, Homo sapiens
  Payload ID: 2776
  Gene Symbol: CLN3
  Gene Name: ceroid-lipofuscinosis, neuronal 3
  ENST ID: ENST00000631023
  CDS Start-End: 324-1349
gtgctgtcacgtgatccgacaaacggcctctgcatagtgcagaacattctgctgctcttaaaggtacaggcctcagggtccctgctgtagacggggcgggggagagtacgatgggtggggcgtggtgggtcgtagggcgctcgagatggagcccccagcttccttgatggatcgcggggcgcgagtgccctagacaagccggagctgggaccggcaatcgggcgttgatccttgtcacctgtcgcagaccctcatccctcccgtgggagccccctttggacactctatgaccctggaccctcgggggacctgaacttgatgcgatgggaggctgtgcaggctcgcggcggcgcttttcggattccgagggggaggagaccgtcccggagccccggctccctctgttggaccatcagggcgcgcattggaagaacgcggtgggcttctggctgctgggcctttgcaacaacttctcttatgtggtgatgctgagtgccgcccacgacatccttagccacaagaggacatcgggaaaccagagccatgtggacccaggcccaacgccgatcccccacaacagctcatcacgatttgactgcaactctgtctctacggctgctgtgctcctggcggacatcctccccacactcgtcatcaaattgttggctcctcttggccttcacctgctgccctacagcccccgggttctcgtcagtgggatttgtgctgctggaagcttcgtcctggttgccttttctcattctgtggggaccagcctgtgtggtgtggtcttcgctagcatctcatcaggccttggggaggtcaccttcctctccctcactgccttctaccccagggccgtgatctcctggtggtcctcagggactgggggagctgggctgctgggggccctgtcctacctgggcctcacccaggccggcctctcccctcagcagaccctgctgtccatgctgggtatccctgccctgctgctggccagctatttcttgttgctcacatctcctgaggcccaggaccctggaggggaagaagaagcagagagcgcagcccggcagcccctcataagaaccgaggccccggagtcgaagccaggctccagctccagcctctcccttcgggaaaggtggacagtgttcaagggtctgctgtggtacattgttcccttggtcgtagtttactttgccgagtatttcattaaccagggacttaccagtgatgagcaccgggagtttgcaatggcggccacctgcatctctgacacactggggatctccctgtcggggctcctggctttgcctctgcatgacttcctctgccagctctcctgatactcgggatcctcaggacgcaggtcacattcacctgtgggcagagggacaggtcagacacccaggcccaccccagagaccctccatgaactgtgctcccagccttcccggcaggtctgggagtagggaagggctgaagccttgtttcccttgcaggggggccagccattgtctcccacttggggagtttcttcctggcatcatgccttctgaataaatgccgattttatccatgga

SEQ ID NO: 116812 - DNA, 4064 bp, Homo sapiens
  Payload ID: 2777
  Gene Symbol: CLN5
  Gene Name: ceroid-lipofuscinosis, neuronal 5
  ENST ID: ENST00000377453
  CDS Start-End: 1293-2516
tttttttttttttttaaagctgttcctgctgattgctttttaagctaggctcaagtgtggggccacggaatccttcaggtgcccttcaaatcagacattacatttcagctctcagggctagaatgcttccccctcttatcttgggcaggtctttgaagaagccagtttagccttggtaattttgaatttggccatagtatacggaggagagctaggtagctatcaaaacgcttagacaaacgtatggtaaaatgcagcccagcctgaacctccgcaaaacccccaaacctggagcagcaagtgggcaaaggagtgtgtgtttggggcagggtactgagtcccatatgtaatcaagagacctggagggcccaaggaagtcagtgacacccccacaagctacatatcctccaatggattgtggtggtcatctccggctaccgaagccaccttgcttattcccataggcttacaaacattatgatgcttcacacgagttgtgggtgaagtgaaggaattggaaagtcccggtctaaggccctgcaaaactgctgtctggtaaaaacaagtgactatggcaaggccctgaatgtactacgtatagacttaagtcagtatttgtgcctaacagcaaagcatgccacaagaggctcctcaaaagccgggtaattgatgccattgttttcttgacctagttgaagagtcaaagaagagaaggtgatgcagaaacttctttccagtgaagtgacagatccaagcaaggaacacctgcctgtgaggggagcggtaggggagggggtagattcggcagcactcgggtagtggcagggaccacatattgtcggtgttaaccactgttatcactggcccaggtcgagtgaggacgagtcatttccccactaagcacttggggagtggcagggaccacatattgtcagtgttaaccactgttatgactggcccaggtcgggtgacgacgagccatttccgcactattgtcccttcttcctcactgcacccccagccctgcaccctcagctccaaatacacattctcgttcactcaacgtttgttgacacctagcgtgggccctgtgggatggggtaaaagttcggtgttgggaggagccccggtgacagatttttggttttggtggtggcttttgggcaaggacaggtcaattcataaaagatgacgccccaggtctggatcgaattctcctgggagccagaccaaagcaccttcctggactgcaaagtgtggaagccgccgcgggccgggcgcggggaggtgtcatgcgccggaacctgcgcttggggccaagctctggagctgacgcgcaggggcaaggcgccccgcgtcccggactggcggctccgcgcatgctcctcccaccggcgtcgcaggcctcgagaggctccggaagtactgggtgcagcctgatggcgcaggaggtagacacggcacagggcgccgagatgcggcggggcgcgggcgcggctcggggacgcgcttcctggtgctgggccctggcgctgctttggctcgcggtggttccgggctggtcccgggtctcgggcatcccctcccggcgccactggccggtgccctacaagcgctttgacttccgtccaaaacctgatccttattgtcaagctaagtatactttctgtccaactggctcacctatcccagttatggagggtgatgatgacattgaagtttttcgattacaagccccagtatgggaatttaaatatggagacctcctgggacacttgaaaattatgcatgatgccattggattcagaagtacattaactggcaagaactacacaatggaatggtatgaacttttccaacttggcaactgtacatttccccatctccgacctgaaatggatgcccctttctggtgtaatcaaggcgctgcctgcttttttgagggaattgatgatgttcactggaaggaaaatgggacattagttcaagtagcaactatatcaggaaacatgttcaaccaaatggcaaagtgggtgaaacaggacaatgaaacaggaatttattatgagacatggaatgtaaaagccagcccagaaaagggggcagagacatggtttgattcctacgactgttccaaatttgtgttaaggacctttaacaagttggctgaatttggagcagagttcaagaacatagaaaccaactatacaagaatatttctttacagtggagaacctacttatctgggaaatgaaacatctgtttttgggccaacaggaaacaagactcttggtttagccataaaaagattttattaccccttcaaaccacatttgccaactaaagaatttctgttgagtctcttgcaaatttttgatgcagtgattgtgcacaaacagttctatttgttttataattttgaatattggtttttacctatgaaattcccttttattaaaataacatatgaagaaatccctttacctatcagaaacaaaacactctctggtttataaaacaccttaattctactgctcttttttctccaatcaccagcatctgtttttcagggggtgattttacttttgtgaattccttagcctttcttccttggtgcataaagttaaaatgcacatcagcagaattgctgcatattaacatctcaggactcttctcttgtaaagaagctgaaattcgtactatattggccaaagtgagcgagttaggtgatcttggtttcaatttccgagcctttgttaatatggagaattatggttcatatcagttatgtaggacctttggacccagggtcctacagatagatatggtgtgcccagattttaaaaataccttcaaaaataaaaaatacattcagtgacattttcatggtgggagctcttctttctgatatggcagttacactttttcacttaagtgctttagtttagactaactttacaacttctataacttttggaaccaagtttagtatagtctgattacattccattcacctaactttagacattcgtttagacaccataactggagtgattgtgcttctagatgtggcaaatccagtgttaacacatatttctggctgagattttggaactagctagtaactggcttgtgttctttaagcatactaacatcactaaatcttaggatttaggattgctgtaaagatgtaagttgtgtatgtttggcaggtcacattgaatggcagtgataatgattaatcaaagaacaaatgtcatccttgatcttgcctaatgtagtttatgtgccaaactttccagggttttgtagtcacctagattttaagctgatagcatagtgcttcagcggttcttctaaccggggtatgcaggaacatggctgcagacacgtttgggtaaacaggcaccttctgacttcttcattgtttcctgtagttctccctcttcccacaaagctgtcagcgcagtggaagaggttgcacttctccgagagaggacaggtttctgttaagatcaccaagtagctgtgctttaattagagccagacaagctttcaaggtcctttaagtatttgatgatcaactgaacacgtttctattcaaggagaaaacaccattcagtaagaagatggagtagatatcagataaaacaattcacgtttaatatgtaaatgtaccaattatgtgattcagtttcaactttcaagtacttcctgagaggttagtacattattattgagctctcacagaaagcttaatcatagatataattaacctgatccaaatgagtaaagtggaccttagaaaggctaagtgatctttctctggctatccagctagtagtaatgaagtcaggtcttgaaccccggttctgctgactgaattggatgcactatagtacaggcttttagcaccgaagtgtggtcctcagaccagtgcctgccaaccagatgttactggtctgtgaggaaataagtacagatactgacaggaagcttttataaacaatttattggagtgtttttgtttctgttgggtctaattaaaaaaattggagcttgta

SEQ ID NO: 116813 - DNA, 1931 bp, Homo sapiens
  Payload ID: 2777
  Gene Symbol: CLN5
  Gene Name: ceroid-lipofuscinosis, neuronal 5
  Uniprot ID: O75503
  ENST ID: ENST00000616833
  CDS Start-End: 16-1092
actgggtgcagcctgatggcgcaggaggtagacacggcacagggcgccgagatgcggcggggcgcgggcgcggctcggggacgcgcttcctggtgctgggccctggcgctgctttggctcgcggtggttccgggctggtcccgggtctcgggcatcccctcccggcgccactggccggtgccctacaagcgctttgacttccgtccaaaacctgatccttattgtcaagctaagtatactttctgtccaactggctcacctatcccagttatggagggtgatgatgacattgaagtttttcgattacaagccccagtatgggaatttaaatatggagacctcctgggacacttgaaaattatgcatgatgccattggattcagaagtacattaactggcaagaactacacaatggaatggtatgaacttttccaacttggcaactgtacatttccccatctccgacctgaaatggatgcccctttctggtgtaatcaaggcgctgcctgcttttttgagggaattgatgatgttcactggaaggaaaatgggacattagttcaagtagcaactatatcaggaaacatgttcaaccaaatggcaaagtgggtgaaacaggacaatgaaacaggaatttattatgagacatggaatgtaaaagccagcccagaaaagggggcagagacatggtttgattcctacgactgttccaaatttgtgttaaggacctttaacaagttggctgaatttggagcagagttcaagaacatagaaaccaactatacaagaatatttctttacagtggagaacctacttatctgggaaatgaaacatctgtttttgggccaacaggaaacaagactcttggtttagccataaaaagattttattaccccttcaaaccacatttgccaactaaagaatttctgttgagtctcttgcaaatttttgatgcagtgattgtgcacaaacagttctatttgttttataattttgaatattggtttttacctatgaaattcccttttattaaaataacatatgaagaaatccctttacctatcagaaacaaaacactctctggtttataaaacaccttaattctactgctcttttttctccaatcaccagcatctgtttttcagggggtgattttacttttgtgaattccttagcctttcttccttggtgcataaagttaaaatgcacatcagcagaattgctgcatattaacatctcaggactcttctcttgtaaagaagctgaaattcgtactatattggccaaagtgagcgagttaggtgatcttggtttcaatttccgagcctttgttaatatggagaattatggttcatatcagttatgtaggacctttggacccagggtcctacagatagatatggtgtgcccagattttaaaaataccttcaaaaataaaaaatacattcagtgacattttcatggtgggagctcttctttctgatatggcagttacactttttcacttaagtgctttagtttagactaactttacaacttctataacttttggaaccaagtttagtatagtctgattacattccattcacctaactttagacattcgtttagacaccataactggagtgattgtgcttctagatgtggcaaatccagtgttaacacatatttctggctgagattttggaactagctagtaactggcttgtgttctttaagcatactaacatcactaaatcttaggatttaggattgctgtaaagatgtaagttgtgtatgtttggcaggtcacattgaatggcagtgataatgattaatcaaagaacaaatgtcatccttgatcttgcctaatgtagtttatgtgccaaactttccagggttttgtagtcacctagattttaagctgatagcatagtgcttcagcggttct

SEQ ID NO: 116814 - DNA, 710 bp, Homo sapiens
  Payload ID: 2777
  Gene Symbol: CLN5
  Gene Name: ceroid-lipofuscinosis, neuronal 5
  ENST ID: ENST00000485938
  CDS Start-End: 1-559
cacggcacagggcgccgagatgcggcggggcgcgggcgcggctcggggacgcgcttcctggtgctgggccctggcgctgctttggctcgcggtggttccgggctggtcccgggtctcgggcatcccctcccggcgccactggccggtgccctacaagcgctttgacttccgtccaaaacctgatccttattgtcaagctaagtatactttctgtccaactggctcacctatcccagttatggagggtgatgatgacattgaagtttttcgattacaagccccagtatgggaatttaaatatggagacctcctgggacacttgaaaattatgcatgatgccattggattcagaagtacattaactggcaagaactacacaatggaatggtatgaacttttccaacttggcaactgtacatttccccatctccgacctgaaatggatgcccctttctggtgtaatcaaggcgctgcctgcttttttgagggaattgatgatgttcactggaaggaaaatgggacattagttcaagtagcaactatatcaggtaagttgtgaaaatatagcaatatttgatcattgcatcaaaaaccaaatgaaagaaattgttatacttccattgaaacatttcagtaatgttttacttagaggtcatttgtaaaatgtacttttggaaccattaaactttgggaatttttttcatctctta

SEQ ID NO: 116815 - DNA, 2242 bp, Homo sapiens
  Payload ID: 2778
  Gene Symbol: CLN6
  Gene Name: ceroid-lipofuscinosis, neuronal 6, late infantile, variant
  Uniprot ID: Q9NWW5
  ENST ID: ENST00000249806
  CDS Start-End: 159-1094
gtccgcagccccgcctgttcctcccgagggccgcgcgctctcgccggcccgccccgaaccgccccgcgctgggaatttgcggcggcctccgccggggcagccgagctgaaccggtctcttcctcggaaaggcagggccgaggggcctgcggggcagccatggaggcgacgcggaggcggcagcacctgggagcgacgggcggcccaggcgcgcagctgggcgcctccttcctgcaggccaggcatggctctgtgagcgctgatgaggctgcccgcacggctcccttccacctcgacctctggttctacttcacactgcagaactgggttctggactttgggcgtcccattgccatgctggtattccctctcgagtggtttccactcaacaagcccagtgttggggactacttccacatggcctacaacgtcatcacgccctttctcttgctcaagctcatcgagcggtccccccgcaccctgccacgctccatcacgtacgtgagcatcatcatcttcatcatgggtgccagcatccacctggtgggtgactctgtcaaccaccgcctgctcttcagtggctaccagcaccacctgtctgtccgtgagaaccccatcatcaagaatctcaagccggagacgctgatcgactcctttgagctgctctactattatgatgagtacctgggtcactgcatgtggtacatccccttcttcctcatcctcttcatgtacttcagcggctgctttactgcctctaaagctgagagcttgattccagggcctgccctgctcctggtggcacccagtggcctgtactactggtacctggtcaccgagggccagatcttcatcctcttcatcttcaccttcttcgccatgctggccctcgtcctgcaccagaagcgcaagcgcctcttcctggacagcaacggcctcttcctcttctcctccttcgcactgaccctcttgcttgtggcgctctgggtcgcctggctgtggaatgaccctgttctcaggaagaagtacccgggtgtcatctacgtccctgagccctgggctttctacacccttcacgtcagcagtcggcactgagtccctggcaccaggctctggcgctctgctgggtgggagggtgggccatggagggcatctgaatacaggagtagggggggtgtgggtgtgtaaccagagaccgagagcatgagtggggtgtgcctcgtgtgcgtggattcgtgtgtgtgtgtgtgtgtgtcttgtatatgtgtgcgcagagtgcatcattttcagactctactatttccgtcaagtttctgtttgatttggatcatctcaggatcggattctgttttagagtgtttctgggccaggatccgggcccctgccctcctctgcacctgaccacactccctactcagggctagtctgttcttcccggacatcttctggtagccgtgcaggagagggctgggtggggcagaggccaggaggggacctggtgtgtcacctgcccaccacctggctcatccctcaggcccaccctgaccctacattacataggttacgtcagcctactgtggctgttgagcaaagcatttctcctttctgggcctcatttgcactagatgggcctgtggtcccaaagtaggtcagtaggttggggttgctgacaccccttgggtgcagctttgggacagatgagtggctctgtcctgtcactgccctctccctgcctgggggctatgtgcactccagacccctgcccaggctcaggcccatgaggtatggagacaccctggcccccaggagctggaggcaccgcccactcccctggcattccagctttgcaggtgaccctcctctacccaaagctctgtccccctgctcccactccagaagaactgcggcacgcgcttcgggcagcctagccacaggctttgagcgcctgcattcctgggggctggagggtggggtgccaaaggccctgagcaaaagccagagctcctctcatcaaagcctttacaaggtgctgggcccagaggctttgccttgacagagtggcccagggtttcaagggaggaggaacctccccctacctaggacccttcctgtggggggtctacagagtcagggacagaagggaagggacccacaggaagtcacagtggtgcccagggatgtgtcagcccccagccacggggacgcgggattcaagaatgaagtaaatacagtcacagccccaa

SEQ ID NO: 116816 - DNA, 1343 bp, Homo sapiens
  Payload ID: 2778
  Gene Symbol: CLN6
  Gene Name: ceroid-lipofuscinosis, neuronal 6, late infantile, variant
  Uniprot ID: Q9NWW5
  ENST ID: ENST00000538696
  CDS Start-End: 239-1270
agaagtcaggccaggtgtctctctttcccttgggcccgcggcccaaccgcatggcaccaggcagcccccagcggtattgcgacctctgcgtcagtcgcgctcagtccctagatacaggtgtgccggagaagcccagggaagggatgcgtgaccatcactacaccctgccccacgacgcggtgggacgcgcaccctgaccctccccagagccgcgcccaggaccttgcctgggcggaaaatggcagccgttgccgggaaggagcggcgagcgagaggcaggccccggccagagacactgggagccatccctaggagggagggaggcgaggcgggcttgagccgagccttcaagccactggcgcaggcgccattgtcctgtgagacttcgctgagaaaactcaaattcaaaggtaaaaagcatggctctgtgagcgctgatgaggctgcccgcacggctcccttccacctcgacctctggttctacttcacactgcagaactgggttctggactttgggcgtcccattgccatgctggtattccctctcgagtggtttccactcaacaagcccagtgttggggactacttccacatggcctacaacgtcatcacgccctttctcttgctcaagctcatcgagcggtccccccgcaccctgccacgctccatcacgtacgtgagcatcatcatcttcatcatgggtgccagcatccacctggtgggtgactctgtcaaccaccgcctgctcttcagtggctaccagcaccacctgtctgtccgtgagaaccccatcatcaagaatctcaagccggagacgctgatcgactcctttgagctgctctactattatgatgagtacctgggtcactgcatgtggtacatccccttcttcctcatcctcttcatgtacttcagcggctgctttactgcctctaaagctgagagcttgattccagggcctgccctgctcctggtggcacccagtggcctgtactactggtacctggtcaccgagggccagatcttcatcctcttcatcttcaccttcttcgccatgctggccctcgtcctgcaccagaagcgcaagcgcctcttcctggacagcaacggcctcttcctcttctcctccttcgcactgaccctcttgcttgtggcgctctgggtcgcctggctgtggaatgaccctgttctcaggaagaagtacccgggtgtcatctacgtccctgagccctgggctttctacacccttcacgtcagcagtcggcactgagtccctggcaccaggctctggcgctctgctgggtgggagggtgggccatggagggcatctgaatacaggagta

SEQ ID NO: 116817 - DNA, 945 bp, Homo sapiens
  Payload ID: 2778
  Gene Symbol: CLN6
  Gene Name: ceroid-lipofuscinosis, neuronal 6, late infantile, variant
  ENST ID: ENST00000567060
  CDS Start-End: 87-404
gaatttgcggcggcctccgccggggcagccgagctgaaccggtctcttcctcggaaaggcagggccgaggggcctgcggggcagccatggaggcgacgcggaggcggcagcacctgggagcgacgggcggcccaggcgcgcagctgggcgcctccttcctgcaggccaggcatggctctgtgagcgctgatgaggctgcccgcacggctcccttccacctcgacctctggttctacttcacactgcagaactgggttctggactttgggcgtcccattgccatgctggtattccctctcgagtggtttccactcaacaagcccagtgttggggactacttccacatggcctacaacgtcatcacgccctttctcttgctcaagcggctgctttactgcctctaaagctgagagcttgattccagggcctgccctgctcctggtggcacccagtggcctgtactactggtacctggtcaccgagggccagatcttcatcctcttcatcttcaccttcttcgccatgctggccctcgtcctgcaccagaagcgcaagcgcctcttcctggacagcaacggcctcttcctcttctcctccttcgcactgaccctcttgcttgtggcgctctgggtcgcctggctgtggaatgaccctgttctcaggaagaagtacccgggtgtcatctacgtccctgagccctgggctttctacacccttcacgtcagcagtcggcactgagtccctggcaccaggctctggcgctctgctgggtgggagggtgggccatggagggcatctgaatacaggagtagggggggtgtgggtgtgtaaccagagaccgagagcatgagtggggtgtgcctcgtgtgcgtggattcgtgtgtgtgtgtgtgtgtgtcttgtatatgtgtgcgcagagtgcatcattttcagactctactattt

SEQ ID NO: 116818 - DNA, 1074 bp, Homo sapiens
  Payload ID: 2778
  Gene Symbol: CLN6
  Gene Name: ceroid-lipofuscinosis, neuronal 6, late infantile, variant
  ENST ID: ENST00000565471
  CDS Start-End: 88-564
ggaatttgcggcggcctccgccggggcagccgagctgaaccggtctcttcctcggaaaggcagggccgaggggcctgcggggcagccatggaggcgacgcggaggcggcagcacctgggagcgacgggcggcccaggcgcgcagctgggcgcctccttcctgcaggccaggtacatccccttcttcctcatcctcttcatgtacttcagcggctgctttactgcctctaaagctgagagcttgattccagggcctgccctgctcctggtggcacccagtggcctgtactactggtacctggtcaccgagggccagatcttcatcctcttcatcttcaccttcttcgccatgctggccctcgtcctgcaccagaagcgcaagcgcctcttcctggacagcaacggcctcttcctcttctcctccttcgcactgaccctcttgcttgtggcgctctgggtcgcctggctgtggaatgaccctgttctcaggaagaagtacccgggtgtcatctacgtccctgagccctgggctttctacacccttcacgtcagcagtcggcactgagtccctggcaccaggctctggcgctctgctgggtgggagggtgggccatggagggcatctgaatacaggagtagggggggtgtgggtgtgtaaccagagaccgagagcatgagtggggtgtgcctcgtgtgcgtggattcgtgtgtgtgtgtgtgtgtgtcttgtatatgtgtgcgcagagtgcatcattttcagactctactatttccgtcaagtttctgtttgatttggatcatctcaggatcggattctgttttagagtgtttctgggccaggatccgggcccctgccctcctctgcacctgaccacactccctactcagggctagtctgttcttcccggacatcttctggtagccgtgcaggagagggctgggtggggcagaggccaggaggggacctggtgtgtcacctgcccaccacctggctcatccctcaggcccaccctgaccctacattacataggttacgtcagcctactgtggctgttgagcaaagcatttctccttt

SEQ ID NO: 116819 - DNA, 981 bp, Homo sapiens
  Payload ID: 2778
  Gene Symbol: CLN6
  Gene Name: ceroid-lipofuscinosis, neuronal 6, late infantile, variant
  ENST ID: ENST00000566347
  CDS Start-End: 135-881
cgagggccgcgcgctctcgccggcccgccccgaaccgccccgcgctgggaatttgcggcggcctccgccggggcagccgagctgaaccggtctcttcctcggaaaggcagggccgaggggcctgcggggcagccatggaggcgacgcggaggcggcagcacctgggagcgacgggcggcccaggcgcgcagctgggcgcctccttcctgcaggccaggcatggctctgtgagcgctgatgaggctgcccgcacggctcccttccacctcgacctctggttctacttcacactgcagaactgggttctggactttgggcgtcccattgccatgctggtattccctctcgagtggtttccactcaacaagcccagtgttggggactacttccacatggcctacaacgtcatcacgccctttctcttgctcaagatcgactcctttgagctgctctactattatgatgagtacctgggtcactgcatgtggtacatccccttcttcctcatcctcttcatgtacttcagcggctgctttactgcctctaaagctgagagcttgattccagggcctgccctgctcctggtggcacccagtggcctgtactactggtacctggtcaccgagggccagatcttcatcctcttcatcttcaccttcttcgccatgctggccctcgtcctgcaccagaagcgcaagcgcctcttcctggacagcaacggcctcttcctcttctcctccttcgcactgaccctcttgcttgtggcgctctgggtcgcctggctgtggaatgaccctgttctcaggaagaagtacccgggtgtcatctacgtccctgagccctgggctttctacacccttcacgtcagcagtcggcactgagtccctggcaccaggctctggcgctctgctgggtgggagggtgggccatggagggcatctgaatacaggagtagggggggtgtgggtgtgtaaccagaga

SEQ ID NO: 116820 - DNA, 900 bp, Homo sapiens
  Payload ID: 2778
  Gene Symbol: CLN6
  Gene Name: ceroid-lipofuscinosis, neuronal 6, late infantile, variant
  ENST ID: ENST00000564752
  CDS Start-End: 126-767
cgcgctctcgccggcccgccccgaaccgccccgcgctgggaatttgcggcggcctccgccggggcagccgagctgaaccggtctcttcctcggaaaggcagggccgaggggcctgcggggcagccatggaggcgacgcggaggcggcagcacctgggagcgacgggcggcccaggcgcgcagctgggcgcctccttcctgcaggccaggcatggctctgtgagcgctgatgaggctgcccgcacggctcccttccacctcgacctctggttctacttcacactgcagaactgggttctggactttgggcgtcccattgccatgctggtattccctctcgagtggtttccactcaacaagcccagtgttggggactacttccacatggcctacaacgtcatcacgccctttctcttgctcaagctcatcgagcggtccccccgcaccctgccacgctccatcacgtacgtgagcatcatcatcttcatcatgggtgccagcatccacctggtgggtgactctgtcaaccaccgcctgctcttcagtggctaccagcaccacctgtctgtccgtgagaaccccatcatcaagaatctcaagccggagacgctggtgaggccacctcctgctccctgcctatcgactcctttgagctgctctactattatgatgagtacctgggtcactgcatgtggtacatccccttcttcctcatcctcttcatgtacttcagcggctgctttactgcctctaaagctgagagcttgattccagggcctgccctgctcctggtggcacccagtggcctgtactactggtacctggtcaccgagggccagatcttcatcctcttcatcttcaccttcttcgccatgctggccctcgtcctgcaccagaagcg

SEQ ID NO: 116821 - DNA, 7113 bp, Homo sapiens
  Payload ID: 2779
  Gene Symbol: CLN8
  Gene Name: ceroid-lipofuscinosis, neuronal 8
  Uniprot ID: Q9UBY8
  ENST ID: ENST00000331222
  CDS Start-End: 248-1108
gtgcgcgggcggtgtttgaggccggccagtcgtgactgggcggcaatgaggtcagtgactgccgggagtcctgcaggggcggggcggcgccaagcgcagggagcccggctgagtggcagcccagattgaagatggatacgtgacaatcccagggaccgctgcactgacttcatttccttagacaagacacagtgtagggcccggcccgtgttggccccaggactcctttggaatatagctgtggacaatgaatcctgcgagcgatgggggcacatcagagagcatttttgacctggactatgcatcctgggggatccgctccacgctgatggtcgctggctttgtcttctacttgggcgtctttgtggtctgccaccagctgtcctcttccctgaatgccacttaccgttctttggtggccagagagaaggtcttctgggacctggcggccacgcgtgcagtctttggtgttcagagcacagccgcaggcctgtgggctctgctgggggaccctgtgctgcatgccgacaaggcgcgtggccagcagaactggtgctggtttcacatcacgacagcaacgggattcttttgctttgaaaatgttgcagtccacctgtccaacttgatcttccggacatttgacttgtttctggttatccaccatctctttgcctttcttgggtttcttggctgcttggtcaatctccaagctggccactatctagctatgaccacgttgctcctggagatgagcacgccctttacctgcgtttcctggatgctcttaaaggcgggctggtccgagtctctgttttggaagctcaaccagtggctgatgattcacatgtttcactgccgcatggttctaacctaccacatgtggtgggtgtgtttctggcactgggacggcctggtcagcagcctgtatctgcctcatttgacactgttccttgtcggactggctctgcttacgctaatcattaatccatattggacccataagaagactcagcagcttctcaatccggtggactggaacttcgcacagccagaagccaagagcaggccagaaggcaacgggcagctgctgcggaagaagaggccatagctgctccagccggggctccggggcggcagcagagctggcacaccgattctgggaagccccgcgaatgatggcttttgaattaatgaggcagtgaatgttttgtgtttacttctaagggaaatactaactttctttcgcattagtattaattttgaagtagctacaaagtatttttaagaaattataattttatgactgtctggcaggctctgtcagtttagccgcgccggaccgtgtcaagcatctaggagaggagtccatggtgtccaggcatcggggcgtcacacctgttgaggagtggggtggctttgaatgctggaaatggcttcatagtgaagtgcctcccacagggcgggtgggtcagcgttgactctttccagctgcacactcatatgccgtgtgtcttattcagaagtcacattcttttcagttggagagaattgggctaagatagaaaataacatgatttgttccttattaaagcttcccagcgtatgaaattctaagctgggtggggtggctcacacccgacgtaatcccagcacgttgggaggccgaggcaggtggatcacttgaggccaggagttcgagaccagcctggtcaagatggtgaaaccccatctctactaaaattacaaaaattagccgggtgtcgtggcacacacctgtaatcccagctatttgggaggccaaggcaggagaattgcctgaacccgggaggcggaggttgcagtgagctgagatcgcaccactgcactccagcactccagcctgggtgacagagcaagactctctctcaaaaaaaaaaaaaaaaaaaaattctagaccgaagtgtacggcagtgccatctggtggcaagtggtacaaagacaacgctgaggggtagtgactcctgtagcagcagagacgccttggagtttaacccccaccaaccagagcgtgggctggtaaagatgaaatcttgcaagttttttttttttttaaatcatggtacctgttttaaaatgagaagttattattcatactgtgttgctcatttgacaaaataaggtaaggatttcataatcaggttgtctgggtttcagagctgtttttaattgactgagttacctacaggcacccaatctagaccctaattctgtggttggtgttcctctgtagatttcaagacaagtagtgatgtcattttctccctgagctgtagggtggacctggacccctcagagatgctcgactgcagggtcctggggtccctagagtggtcctgcagcagcccctggcaatgagctgcctgatgatgagtcccaaggtacattgttctactgttttatacccaggtagaagttacacagcaatttagcaatgttgttaacagacatacagaattgtgtgtgtgtgtgtgtgtgtgtgtgtgagtgttttgatataaacgtgcaattaaaattcaaagtttattttttatcacaagcacctttgaaatgtacgtggaaaacgtcggctgctcgtgagaatcatgtgtgacttacgttccttatgttttatggaactctcggaacagtgttttgtttttgtttagtttttgttttcgtttttttgagacggagcctggctttggctcccaggctggagtccagtggtgtgatctcggctcactgcaacctccacctcccgggttccagggattctcctgcctcaccctttcaagtagctgggattacaggtacctctaccatgcctggctgattttttgtatttttagtagagacagggtttcaccatgttggccaggctggtctctgactcctgactaaaagtgatctgcccacctcggcctcccaaagttctgggattacgggcgtgagccacttcacccggcccggagcggtgtattttgattgctggtgctttaactatattgaccaaggtgtatagtaacctatttatcacattttacgaagcaattttaatcttaaacacatccagcaaatggtgtccctgctgaaacttttaactggaaacctcacacctggcaggcagcactctctgcagccgtgcccttgtggagtcagcaggagctggtgtttttcagccagacagaggcataataaagtgactgatgtttacagaacccaaatgatgtcttcctctctctcaaaataaactaacctattcatattgctgtgaatgctttatcttggagatagaaaatataatgataaattcatcatgtgttcagaattcgatttggagttggaagtggacagcctaatttttatctcacctccactaggactttgaccttcccaggggtccacactttacctcctgtatcttcatacgcgtgtgtggatgcatagagatggaggtgctgtagagaagcacaggctcacccgctccgtccagtgtcacccacacattggtccggggacccctcagtgcagagcctgaagttgggggtttaggggtggaaaaggcttcgtgaaatgttaatgatgcgtacaccttccagatggcacagcactttcccatggtcctcactggcctcagtctccctgaccggcagtgtgaggggatgtagctatagtggagcatggtacaagcgacattcatgagctctgacttcttggtgccaggttggtgtgagcctgggcccggcccactcagcggcccacattggccagcattcagctgcacgtgtgtgctgcgtgcttcacatcctctattgagagttacagcaagtgttaaacgaggtgagttcacataacaggaattctggaactgcttgaaaactaggacgattgggcaatatcggccttaactccacctgatggcaggtgacccggatagaaaatggccctgcgtttagccaggatgtggctctccagcttggcttcagtgtgatcacttgtcagtgcgctttctctttcgatagtgaaatccttctctatacctatgttttgttttgtttcttaagttgggaaacagaatgggccagggaggttgagtgactgaagaccaagggttggtgcagcctcctcgccgcgctgcgggggctgggccgcacaggcttctgcccttctcggtgtccaggctccttgggtgatgctggagttgtcatggccgcagttcagtgtgagattttttaccaggtattgcgcttaagggacatgattttccattttcttcgcccggacaacttgaatgaaatgggcactgttgattccacttctgtcgaggagcttcggggctcagagaggtgatgacgtgcccaaggtgacgcaactcgtgaacagccgtgcctgccttgggcgcagcctccggcgccagagctgggctcttcaacacggcatttagcgcagaaagtcgtggttcaggcagtatgggccgctgtgacaaaacacctaagactgggtagtttataaagaacagacattcaggccaggcacggtgactcacgcctgtaatcccagcactttgggaggccgaggcgggtggatcatttgaggtcaggagtttgaaaccagcctggccaacatggtgaaaccccatctctactaaaaaaacaaaactagctgggggtggtggtgcatgcctgtggtcccagctacttgggaggctaaggtagaagaattgcttgaacctgggaggcagagattgcagtgagccgagatcacgccattgcactccagcctgggtgacacagtgagactccatctcaaaaaaaaaaaaagaacggacatcatttctcacagttctggaggctggaagtccaagataaaggtgtgggctgattagtttctgctgggaacactgcatcctcacgtggtggaggggatggaaggtcaacaggcctcagctagttctccgctgcctttttatgaggcattaagccatttgcaagagtagggggccccacctcttaataccaccgcaatgacaattacaatgtcatgtgaattctggaggggacacggtcacactgcagcatcagcacccggtgaatgtggttctcttcccatgtccgaattttgtgagctccacacgggcagggttgcatctgttttattctctgattgattctaagccccatgtccctggcacaggatggctgcttggcagtagggagtggatgaaccagtagtacccagggctgccaggcagggccctgcaggggacagacccaagggctgatatggggacacctgctgaggggggaatttaccacggtaagggcagggctgggaggctgggcagccagtttcaccctcgcacaggctgcctggcaagaccagcggctggaggtgatgtcctcagtagagaacggtggccactggaaacgtgtggccagaaggggaaacgctcgggcctctggtgggggccagcctggggtggggtcggccagggtcagctgcctttccttcatgctggggaggagatgttgtgtgcatgtgagaaagcatttgatagcatgccaaaagtttcctccattatgtgcgtgtcaagtgtttgaccaggtcagaactcttgttctatgcgaatgtgctcacgcagacagaagcggaggggctccgtcgctctgccctcacgccgctgaaccgcgagggtctcccgctcctcaggcttgcggctcggccgcgaagtgtgtcaggtgtgcatcctgggtgctcctttgtgctctgtcctacggtgacacaggcggcgtggggttagacaggtaccggtcagactacggtgacacaggcggcgtgcggttagacaggtaccggtcagattacggtggcacaggcggcgtggggttagacaggtaccggtcagattacggtggcacaggcggcgtggggttagacaggtaccggtcagattacggtggcacaggcggcgtggggttagacaggtaccggtcagattacggtggcacaggcggcgtggggttagacaggtaccggtcagattacggtggcacaggcagcgtggggttagacaggtaccggtcagattacggtggcacaggcggcgtggggttagacaggtaccggtcagattacggtggcacaggcggcgtggggttagacaggtaccggtcagattacggtgacacaggcggcgtggggttagacaggtaccggtcagattacggtggcacaggctgcgtggggttagacaggtaccggtcagattacggtggcacaggcggcgtggggttagacaggtactggtcagatgcacgggctccctaaacccctgctgtggcttcggcagtaaagacaggacgcacccatgtcacaagaggagcacaggcaggggtgttggtgttggggcagccctcagggtctccagaccccagccccactcacacagcagcctaggaaggaagggcagagtcccaggtgtcagctggtgggtctcccaggagctgcccctccctggaagtcacaggacaggaatgacagatcagggaactgcaggaagctgccacctctggggtcagaatatgcccagcctgcgggggctctctatcggggtcttcgagagccagacagcctgccttgtgctgcatacctggctttgctctgtgcagaacccagcacacgtgattttgtgtgacatgccagcagcctggctcccaggacaggaggcctgccctgggggaggggctgcaggaggagggggggcaggcacccatgagtctgtccagccttgtcacagatgcatcgcccaccctgcggtcctgatttcagctcacctcagagtaaatcagaataaactgcacccagactttcacgaatgcatgttgacgctttcagttcacccctttctttgctaactttcttcctattttcttctaatgcgagagcttattaattccatatttatcattttgaataacttttctcctttttagtaacaaaatgtacttcactcttagtaaaatgtatttactattttagtaacaaaaatatacttgcctaatcatgtttaaaatatagtgatgtgaaaaattcaga

SEQ ID NO: 116822 - DNA, 7111 bp, Homo sapiens
  Payload ID: 2779
  Gene Symbol: CLN8
  Gene Name: ceroid-lipofuscinosis, neuronal 8
  Uniprot ID: Q9UBY8
  ENST ID: ENST00000619400
  CDS Start-End: 248-1108
gtgcgcgggcggtgtttgaggccggccagtcgtgactgggcggcaatgaggtcagtgactgccgggagtcctgcaggggcggggcggcgccaagcgcagggagcccggctgagtggcagcccagattgaagatggatacgtgacaatcccagggaccgctgcactgacttcatttccttagacaagacacagtgtagggcccggcccgtgttggccccaggactcctttggaatatagctgtggacaatgaatcctgcgagcgatgggggcacatcagagagcatttttgacctggactatgcatcctgggggatccgctccacgctgatggtcgctggctttgtcttctacttgggcgtctttgtggtctgccaccagctgtcctcttccctgaatgccacttaccgttctttggtggccagagagaaggtcttctgggacctggcggccacgcgtgcagtctttggtgttcagagcacagccgcaggcctgtgggctctgctgggggaccctgtgctgcatgccgacaaggcgcgtggccagcagaactggtgctggtttcacatcacgacagcaacgggattcttttgctttgaaaatgttgcagtccacctgtccaacttgatcttccggacatttgacttgtttctggttatccaccatctctttgcctttcttgggtttcttggctgcttggtcaatctccaagctggccactatctagctatgaccacgttgctcctggagatgagcacgccctttacctgcgtttcctggatgctcttaaaggcgggctggtccgagtctctgttttggaagctcaaccagtggctgatgattcacatgtttcactgccgcatggttctaacctaccacatgtggtgggtgtgtttctggcactgggacggcctggtcagcagcctgtatctgcctcatttgacactgttccttgtcggactggctctgcttacgctaatcattaatccatattggacccataagaagactcagcagcttctcaatccggtggactggaacttcgcacagccagaagccaagagcaggccagaaggcaacgggcagctgctgcggaagaagaggccatagctgctccagccggggctccggggcggcagcagagctggcacaccgattctgggaagccccgcgaatgatggcttttgaattaatgaggcagtgaatgttttgtgtttacttctaagggaaatactaactttctttcgcattagtattaattttgaagtagctacaaagtatttttaagaaattataattttatgactgtctggcaggctctgtcagtttagccgcgccggaccgtgtcaagcatctaggagaggagtccatggtgtccaggcatcggggcgtcacacctgttgaggagtggggtggctttgaatgctggaaatggcttcatagtgaagtgcctcccacagggcgggtgggtcagcgttgactctttccagctgcacactcatatgccgtgtgtcttattcagaagtcacattcttttcagttggagagaattgggctaagatagaaaataacatgatttgttccttattaaagcttcccagcgtatgaaattctaagctgggtggggtggctcacacccgacgtaatcccagcacgttgggaggccgaggcaggtggatcacttgaggccaggagttcgagaccagcctggtcaagatggtgaaaccccatctctactaaaattacaaaaattagccgggtgtcgtggcacacacctgtaatcccagctatttgggaggccaaggcaggagaattgcctgaacccgggaggcggaggttgcagtgagctgagatcgcaccactgcactccagcactccagcctgggtgacagagcaagactctctctcaaaaaaaaaaaaaaaaaaaaattctagaccgaagtgtacggcagtgccatctggtggcaagtggtacaaagacaacgctgaggggtagtgactcctgtagcagcagagacgccttggagtttaacccccaccaaccagagcgtgggctggtaaagatgaaatcttgcaagttttttttttttttaaatcatggtacctgttttaaaatgagaagttattattcatactgtgttgctcatttgacaaaataaggtaaggatttcataatcaggttgtctgggtttcagagctgtttttaattgactgagttacctacaggcacccaatctagaccctaattctgtggttggtgttcctctgtagatttcaagacaagtagtgatgtcattttctccctgagctgtagggtggacctggacccctcagagatgctcgactgcagggtcctggggtccctagagtggtcctgcagcagcccctggcaatgagctgcctgatgatgagtcccaaggtacattgttctactgttttatacccaggtagaagttacacagcaatttagcaatgttgttaacagacatacagaattgtgtgtgtgtgtgtgtgtgtgtgtgtgagtgttttgatataaacgtgcaattaaaattcaaagtttattttttatcacaagcacctttgaaatgtacgtggaaaacgtcggctgctcgtgagaatcatgtgtgacttacgttccttatgttttatggaactctcggaacagtgttttgtttttgtttagtttttgttttcgtttttttgagacggagcctggctttggctcccaggctggagtccagtggtgtgatctcggctcactgcaacctccacctcccgggttccagggattctcctgcctcaccctttcaagtagctgggattacaggtacctctaccatgcctggctgattttttgtatttttagtagagacagggtttcaccatgttggccaggctggtctctgactcctgactaaaagtgatctgcccacctcggcctcccaaagttctgggattacgggcgtgagccacttcacccggcccggagcggtgtattttgattgctggtgctttaactatattgaccaaggtgtatagtaacctatttatcacattttacgaagcaattttaatcttaaacacatccagcaaatggtgtccctgctgaaacttttaactggaaacctcacacctggcaggcagcactctctgcagccgtgcccttgtggagtcagcaggagctggtgtttttcagccagacagaggcataataaagtgactgatgtttacagaacccaaatgatgtcttcctctctctcaaaataaactaacctattcatattgctgtgaatgctttatcttggagatagaaaatataatgataaattcatcatgtgttcagaattcgatttggagttggaagtggacagcctaatttttatctcacctccactaggactttgaccttcccaggggtccacactttacctcctgtatcttcatacgcgtgtgtggatgcatagagatggaggtgctgtagagaagcacaggctcacccgctccgtccagtgtcacccacacattggtccggggacccctcagtgcagagcctgaagttgggggtttaggggtggaaaaggcttcgtgaaatgttaatgatgcgtacaccttccagatggcacagcactttcccatggtcctcactggcctcagtctccctgaccggcagtgtgaggggatgtagctatagtggagcatggtacaagcgacattcatgagctctgacttcttggtgccaggttggtgtgagcctgggcccggcccactcagcggcccacattggccagcattcagctgcacgtgtgtgctgcgtgcttcacatcctctattgagagttacagcaagtgttaaacgaggtgagttcacataacaggaattctggaactgcttgaaaactaggacgattgggcaatatcggccttaactccacctgatggcaggtgacccggatagaaaatggccctgcgtttagccaggatgtggctctccagcttggcttcagtgtgatcacttgtcagtgcgctttctctttcgatagtgaaatccttctctatacctatgttttgttttgtttcttaagttgggaaacagaatgggccagggaggttgagtgactgaagaccaagggttggtgcagcctcctcgccgcgctgcgggggctgggccgcacaggcttctgcccttctcggtgtccaggctccttgggtgatgctggagttgtcatggccgcagttcagtgtgagattttttaccaggtattgcgcttaagggacatgattttccattttcttcgcccggacaacttgaatgaaatgggcactgttgattccacttctgtcgaggagcttcggggctcagagaggtgatgacgtgcccaaggtgacgcaactcgtgaacagccgtgcctgccttgggcgcagcctccggcgccagagctgggctcttcaacacggcatttagcgcagaaagtcgtggttcaggcagtatgggccgctgtgacaaaacacctaagactgggtagtttataaagaacagacattcaggccaggcacggtgactcacgcctgtaatcccagcactttgggaggccgaggcgggtggatcatttgaggtcaggagtttgaaaccagcctggccaacatggtgaaaccccatctctactaaaaaaacaaaactagctgggggtggtggtgcatgcctgtggtcccagctacttgggaggctaaggtagaagaattgcttgaacctgggaggcagagattgcagtgagccgagatcacgccattgcactccagcctgggtgacacagtgagactccatctcaaaaaaaaaaaaagaacggacatcatttctcacagttctggaggctggaagtccaagataaaggtgtgggctgattagtttctgctgggaacactgcatcctcacgtggtggaggggatggaaggtcaacaggcctcagctagttctccgctgcctttttatgaggcattaagccatttgcaagagtagggggccccacctcttaataccaccgcaatgacaattacaatgtcatgtgaattctggaggggacacggtcacactgcagcatcagcacccggtgaatgtggttctcttcccatgtccgaattttgtgagctccacacgggcagggttgcatctgttttattctctgattgattctaagccccatgtccctggcacaggatggctgcttggcagtagggagtggatgaaccagtagtacccagggctgccaggcagggccctgcaggggacagacccaagggctgatatggggacacctgctgaggggggaatttaccacggtaagggcagggctgggaggctgggcagccagtttcaccctcgcacaggctgcctggcaagaccagcggctggaggtgatgtcctcagtagagaacggtggccactggaaacgtgtggccagaaggggaaacgctcgggcctctggtgggggccagcctggggtggggtcggccagggtcagctgcctttccttcatgctggggaggagatgttgtgtgcatgtgagaaagcatttgatagcatgccaaaagtttcctccattatgtgcgtgtcaagtgtttgaccaggtcagaactcttgttctatgcgaatgtgctcacgcagacagaagcggaggggctccgtcgctctgccctcacgccgctgaaccgcgagggtctcccgctcctcaggcttgcggctcggccgcgaagtgtgtcaggtgtgcatcctgggtgctcctttgtgctctgtcctacggtgacacaggcggcgtggggttagacaggtaccggtcagactacggtgacacaggcggcgtgcggttagacaggtaccggtcagattacggtggcacaggcggcgtggggttagacaggtaccggtcagattacggtggcacaggcggcgtggggttagacaggtaccggtcagattacggtggcacaggcggcgtggggttagacaggtaccggtcagattacggtggcacaggcggcgtggggttagacaggtaccggtcagattacggtggcacaggcagcgtggggttagacaggtaccggtcagattacggtggcacaggcggcgtggggttagacaggtaccggtcagattacggtggcacaggcggcgtggggttagacaggtaccggtcagattacggtgacacaggcggcgtggggttagacaggtaccggtcagattacggtggcacaggctgcgtggggttagacaggtaccggtcagattacggtggcacaggcggcgtggggttagacaggtactggtcagatgcacgggctccctaaacccctgctgtggcttcggcagtaaagacaggacgcacccatgtcacaagaggagcacaggcaggggtgttggtgttggggcagccctcagggtctccagaccccagccccactcacacagcagcctaggaaggaagggcagagtcccaggtgtcagctggtgggtctcccaggagctgcccctccctggaagtcacaggacaggaatgacagatcagggaactgcaggaagctgccacctctggggtcagaatatgcccagcctgcgggggctctctatcggggtcttcgagagccagacagcctgccttgtgctgcatacctggctttgctctgtgcagaacccagcacacgtgattttgtgtgacatgccagcagcctggctcccaggacaggaggcctgccctgggggaggggctgcaggaggagggggggcaggcacccatgagtctgtccagccttgtcacagatgcatcgcccaccctgcggtcctgatttcagctcacctcagagtaaatcagaataaactgcacccagactttcacgaatgcatgttgacgctttcagttcacccctttctttgctaactttcttcctattttcttctaatgcgagagcttattaattccatatttatcattttgaataacttttctcctttttagtaacaaaatgtacttcactcttagtaaaatgtatttactattttagtaacaaaaatatacttgcctaatcatgtttaaaatatagtgatgtgaaaaattca

SEQ ID NO: 116823 - DNA, 779 bp, Homo sapiens
  Payload ID: 2779
  Gene Symbol: CLN8
  Gene Name: ceroid-lipofuscinosis, neuronal 8
  ENST ID: ENST00000520991
  CDS Start-End: 247-779
ggcaatgaggtcagtgactgccgggagtcctgcaggggcggggcggcgccaagcgcagggagcccggctgagtggcagcccaggtgagcgctcagggagcccgggtgagggccgggaacccagattgaagatggatacgtgacaatcccagggaccgctgcactgacttcatttccttagacaagacacagtgtagggcccggcccgtgttggccccaggactcctttggaatatagctgtggacaatgaatcctgcgagcgatgggggcacatcagagagcatttttgacctggactatgcatcctgggggatccgctccacgctgatggtcgctggctttgtcttctacttgggcgtctttgtggtctgccaccagctgtcctcttccctgaatgccacttaccgttctttggtggccagagagaaggtcttctgggacctggcggccacgcgtgcagtctttggtgttcagagcacagccgcaggcctgtgggctctgctgggggaccctgtgctgcatgccgacaaggcgcgtggccagcagaactggtgctggtttcacatcacgacagcaacgggattcttttgctttgaaaatgttgcagtccacctgtccaacttgatcttccggacatttgacttgtttctggttatccaccatctctttgcctttcttgggtttcttggctgcttggtcaatctccaagctggccactatctagctatgaccacgttgctcctggagatgagcacgccctttacctgcgtttcctggat

SEQ ID NO: 116824 - DNA, 759 bp, Homo sapiens
  Payload ID: 2779
  Gene Symbol: CLN8
  Gene Name: ceroid-lipofuscinosis, neuronal 8
  ENST ID: ENST00000632266
  CDS Start-End: 247-759
ggcaatgaggtcagtgactgccgggagtcctgcaggggcggggcggcgccaagcgcagggagcccggctgagtggcagcccaggtgagcgctcagggagcccgggtgagggccgggaacccagattgaagatggatacgtgacaatcccagggaccgctgcactgacttcatttccttagacaagacacagtgtagggcccggcccgtgttggccccaggactcctttggaatatagctgtggacaatgaatcctgcgagcgatgggggcacatcagagagcatttttgacctggactatgcatcctgggggatccgctccacgctgatggtcgctggctttgtcttctacttgggcgtctttgtggtctgccaccagctgtcctcttccctgaatgccacttaccgttctttggtggccagagagaaggtcttctgggacctggcggccacgcgtgcagtctttggtgttcagagcacagccgcaggcctgtgggctctgctgggggaccctgtgctgcatgccgacaaggcgcgtggccagcagaactggtgctggtttcacatcacgacagcaacgggattcttttgctttgaaaatgttgcagtccacctgtccaacttgatcttccggacatttgacttgtttctggttatccaccatctctttgcctttcttgggtttcttggctgcttggtcaatctccaagctggccactatctagctatgaccacgttgctcctggagatgagcacgccc

SEQ ID NO: 116825 - DNA, 668 bp, Homo sapiens
  Payload ID: 2779
  Gene Symbol: CLN8
  Gene Name: ceroid-lipofuscinosis, neuronal 8
  ENST ID: ENST00000631624
  CDS Start-End: 429-668
aatgaactccatgcttgcagagtcatcttcagaatgagtcagctccgcttgtcccaggcaggagactcacgagttgatgtgaaatgcggattccctatgagacggaggacattgcatgtctcatcccatcacgaccgtgtgggtctcgttatttcataagagagggggaaaatgtgaattggaattttatttcctaagtactgttcttggtttctgaccagctgatcccaagtttcacatccttgtctgtgaagctaaactcaatgctgctgtgtgggaagaagatttgtaaagaaaactcttagattgaagatggatacgtgacaatcccagggaccgctgcactgacttcatttccttagacaagacacagtgtagggcccggcccgtgttggccccaggactcctttggaatatagctgtggacaatgaatcctgcgagcgatgggggcacatcagagagcatttttgacctggactatgcatcctgggggatccgctccacgctgatggtcgctggctttgtcttctacttgggcgtctttgtggtctgccaccagctgtcctcttccctgaatgccacttaccgttctttggtggccagagagaaggtcttctgggacctggcggccacgcgtgcagtctttggtgttcagagcacagccgca

SEQ ID NO: 116826 - DNA, 668 bp, Homo sapiens; identical to SEQ ID NO: 116825
  Payload ID: 2779
  Gene Symbol: CLN8
  Gene Name: ceroid-lipofuscinosis, neuronal 8
  ENST ID: ENST00000524258
  CDS Start-End: 429-668

SEQ ID NO: 116827 - DNA, 4676 bp, Homo sapiens
  Payload ID: 2780
  Gene Symbol: CP
  Gene Name: ceruloplasmin (ferroxidase)
  Uniprot ID: P00450
  ENST ID: ENST00000264613
  CDS Start-End: 264-3461
agagttatgcacaccctaatgcctccaacaataactgttgactttttattttcagtcagagaagcctggcaaccaagaactgtttttttggtggtttacgagaacttaactgaattggaaaatatttgctttaatgaaacaatttactcttgtgcaacactaaattgtgtcaatcaagcaaataaggaagaaagtcttatttataaaattgcctgctcctgattttacttcatttcttctcaggctccaagaaggggaaaaaaatgaagattttgatacttggtatttttctgtttttatgtagtaccccagcctgggcgaaagaaaagcattattacattggaattattgaaacgacttgggattatgcctctgaccatggggaaaagaaacttatttctgttgacacggaacattccaatatctatcttcaaaatggcccagatagaattgggagactatataagaaggccctttatcttcagtacacagatgaaacctttaggacaactatagaaaaaccggtctggcttgggtttttaggccctattatcaaagctgaaactggagataaagtttatgtacacttaaaaaaccttgcctctaggccctacacctttcattcacatggaataacttactataaggaacatgagggggccatctaccctgataacaccacagattttcaaagagcagatgacaaagtatatccaggagagcagtatacatacatgttgcttgccactgaagaacaaagtcctggggaaggagatggcaattgtgtgactaggatttaccattcccacattgatgctccaaaagatattgcctcaggactcatcggacctttaataatctgtaaaaaagattctctagataaagaaaaagaaaaacatattgaccgagaatttgtggtgatgttttctgtggtggatgaaaatttcagctggtacctagaagacaacattaaaacctactgctcagaaccagagaaagttgacaaagacaacgaagacttccaggagagtaacagaatgtattctgtgaatggatacacttttggaagtctcccaggactctccatgtgtgctgaagacagagtaaaatggtacctttttggtatgggtaatgaagttgatgtgcacgcagctttctttcacgggcaagcactgactaacaagaactaccgtattgacacaatcaacctctttcctgctaccctgtttgatgcttatatggtggcccagaaccctggagaatggatgctcagctgtcagaatctaaaccatctgaaagccggtttgcaagcctttttccaggtccaggagtgtaacaagtcttcatcaaaggataatatccgtgggaagcatgttagacactactacattgccgctgaggaaatcatctggaactatgctccctctggtatagacatcttcactaaagaaaacttaacagcacctggaagtgactcagcggtgttttttgaacaaggtaccacaagaattggaggctcttataaaaagctggtttatcgtgagtacacagatgcctccttcacaaatcgaaaggagagaggccctgaagaagagcatcttggcatcctgggtcctgtcatttgggcagaggtgggagacaccatcagagtaaccttccataacaaaggagcatatcccctcagtattgagccgattggggtgagattcaataagaacaacgagggcacatactattccccaaattacaacccccagagcagaagtgtgcctccttcagcctcccatgtggcacccacagaaacattcacctatgaatggactgtccccaaagaagtaggacccactaatgcagatcctgtgtgtctagctaagatgtattattctgctgtggaacccactaaagatatattcactgggcttattgggccaatgaaaatatgcaagaaaggaagtttacatgcaaatgggagacagaaagatgtagacaaggaattctatttgtttcctacagtatttgatgagaatgagagtttactcctggaagataatattagaatgtttacaactgcacctgatcaggtggataaggaagatgaagactttcaggaatctaataaaatgcactccatgaatggattcatgtatgggaatcagccgggtctcactatgtgcaaaggagattcggtcgtgtggtacttattcagcgccggaaatgaggccgatgtacatggaatatacttttcaggaaacacatatctgtggagaggagaacggagagacacagcaaacctcttccctcaaacaagtcttacgctccacatgtggcctgacacagaggggacttttaatgttgaatgccttacaactgatcattacacaggcggcatgaagcaaaaatatactgtgaaccaatgcaggcggcagtctgaggattccaccttctacctgggagagaggacatactatatcgcagcagtggaggtggaatgggattattccccacaaagggagtgggaaaaggagctgcatcatttacaagagcagaatgtttcaaatgcatttttagataagggagagttttacataggctcaaagtacaagaaagttgtgtatcggcagtatactgatagcacattccgtgttccagtggagagaaaagctgaagaagaacatctgggaattctaggtccacaacttcatgcagatgttggagacaaagtcaaaattatctttaaaaacatggccacaaggccctactcaatacatgcccatggggtacaaacagagagttctacagttactccaacattaccaggtgaaactctcacttacgtatggaaaatcccagaaagatctggagctggaacagaggattctgcttgtattccatgggcttattattcaactgtggatcaagttaaggacctctacagtggattaattggccccctgattgtttgtcgaagaccttacttgaaagtattcaatcccagaaggaaactggaatttgcccttctgtttctagtttttgatgagaatgaatcttggtacttagatgacaacatcaaaacatactctgatcaccccgagaaagtaaacaaagatgatgaggaattcatagaaagcaataaaatgcatgctattaatggaagaatgtttggaaacctacaaggcctcacaatgcacgtgggagatgaagtcaactggtatctgatgggaatgggcaatgaaatagacttacacactgtacattttcacggccatagcttccaatacaagcacaggggagtttatagttctgatgtctttgacattttccctggaacataccaaaccctagaaatgtttccaagaacacctggaatttggttactccactgccatgtgaccgaccacattcatgctggaatggaaaccacttacaccgttctacaaaatgaagacaccaaatctggctgaatgaaataaattggtgataagtggaaaaaagagaaaaaccaatgattcataacaatgtatgtgaaagtgtaaaatagaatgttactttggaatgactataaacattaaaagaagactggaagcatacaactttgtacatttgtgggggaaaactattaattttttgcaaatggaaagatcaacagactatataatgatacatgactgacacttgtacactaggtaataaaactgattcatacagtctaatgatatcaccgctgttagggttttataaaactgcatttaaaaaaagatctatgaccagatattctcctgggtgctcctcaaaggaacactattaaggttcattgaaatgttttcaatcattgccttcccattgatccttctaacatgctgttgacatcacacctaatattcagagggaatgggcaaggtatgagggaaggaaataaaaaataaaataaataaaatagaatgacacaaatttgagttttgtgaacccctgaacagatggtcttaaggacgttatctggaactggagaaaagcagagttgagagacaattctatagattaaatcctggtaaggacaaacattgccattagaagaaaagcttcaaaatagacctgtggcagatgtcacatgagtagaatttctgcccagccttaactgcattcagaggataatatcaatgaactaaacttgaactaaaaattttttaaacaaaaagttataaatgaagacacatggttgtgaatacaatgatgtatttctttattttcacatacactctagctaaaagagcaagagtacacatcaacaaaaatggaaacaaggctttggctgaaaaaaacatgcatttgacaaatcatgttaatagctagacaagaagaaagttagctttgtaaacttctacttcatttgattcagagaaacagagcatgagttttcttaaaagtaacaagaaaaggaacaaaaaaaatgaggtttgaaatcttttaccatggcaaaacattaacatctttctcaaaaacatagagaaatctggaaaaatcaagaagataaaattctggaccagttagtgacattctttcaagcatacttgtaaaatgtttccttaaagtgttcttgggatgaaaatgattgtcatgtctccaacaacagtgaactgatgttgttccttggaataaaagtcaatccccaccttaaaaaa

SEQ ID NO: 116828 - DNA, 3411 bp, Homo sapiens
  Payload ID: 2780
  Gene Symbol: CP
  Gene Name: ceruloplasmin (ferroxidase)
  ENST ID: ENST00000481169
  CDS Start-End: 36-2876
ttcatttcttctcaggctccaagaaggggaaaaaaatgaagattttgatacttggtatttttctgtttttatgtagtaccccagcctgggcgaaagaaaagcattattacattggaattattgaaacgacttgggattatgcctctgaccatggggaaaagaaacttatttctgttgacacggaacattccaatatctatcttcaaaatggcccagatagaattgggagactatataagaaggccctttatcttcagtacacagatgaaacctttaggacaactatagaaaaaccggtctggcttgggtttttaggccctattatcaaagctgaaactggagataaagtttatgtacacttaaaaaaccttgcctctaggccctacacctttcattcacatggaataacttactataaggaacatgagggggccatctaccctgataacaccacagattttcaaagagcagatgacaaagtatatccaggagagcagtatacatacatgttgcttgccactgaagaacaaagtcctggggaaggagatggcaattgtgtgactaggatttaccattcccacattgatgctccaaaagatattgcctcaggactcatcggacctttaataatctgtaaaaaagattctctagataaagaaaaagaaaaacatattgaccgagaatttgtggtgatgttttctgtggtggatgaaaatttcagctggtacctagaagacaacattaaaacctactgctcagaaccagagaaagttgacaaagacaacgaagacttccaggagagtaacagaatgtattctgtgaatggatacacttttggaagtctcccaggactctccatgtgtgctgaagacagagtaaaatggtacctttttggtatgggtaatgaagttgatgtgcacgcagctttctttcacgggcaagcactgactaacaagaactaccgtattgacacaatcaacctctttcctgctaccctgtttgatgcttatatggtggcccagaaccctggagaatggatgctcagctgtcagaatctaaaccatctgaaagccggtttgcaagcctttttccaggtccaggagtgtaacaagtcttcatcaaaggataatatccgtgggaagcatgttagacactactacattgccgctgaggaaatcatctggaactatgctccctctggtatagacatcttcactaaagaaaacttaacagcacctggaagtgactcagcggtgttttttgaacaaggtaccacaagaattggaggctcttataaaaagctggtttatcgtgagtacacagatgcctccttcacaaatcgaaaggagagaggccctgaagaagagcatcttggcatcctgggtcctgtcatttgggcagaggtgggagacaccatcagagtaaccttccataacaaaggagcatatcccctcagtattgagccgattggggtgagattcaataagaacaacgagggcacatactattccccaaattacaacccccagagcagaagtgtgcctccttcagcctcccatgtggcacccacagaaacattcacctatgaatggactgtccccaaagaagtaggacccactaatgcagatcctgtgtgtctagctaagatgtattattctgctgtggaacccactaaagatatattcactgggcttattgggccaatgaaaatatgcaagaaaggaagtttacatgcaaatgggagacagaaagatgtagacaaggaattctatttgtttcctacagtatttgatgagaatgagagtttactcctggaagataatattagaatgtttacaactgcacctgatcaggtggataaggaagatgaagactttcaggaatctaataaaatgcactggacttttaatgttgaatgccttacaactgatcattacacaggcggcatgaagcaaaaatatactgtgaaccaatgcaggcggcagtctgaggattccaccttctacctgggagagaggacatactatatcgcagcagtggaggtggaatgggattattccccacaaagggagtgggaaaaggagctgcatcatttacaagagcagaatgtttcaaatgcatttttagataagggagagttttacataggctcaaagtacaagaaagttgtgtatcggcagtatactgatagcacattccgtgttccagtggagagaaaagctgaagaagaacatctgggaattctaggtccacaacttcatgcagatgttggagacaaagtcaaaattatctttaaaaacatggccacaaggccctactcaatacatgcccatggggtacaaacagagagttctacagttactccaacattaccaggtgaaactctcacttacgtatggaaaatcccagaaagatctggagctggaacagaggattctgcttgtattccatgggcttattattcaactgtggatcaagttaaggacctctacagtggattaattggccccctgattgtttgtcgaagaccttacttgaaagtattcaatcccagaaggaaactggaatttgcccttctgtttctagtttttgatgagaatgaatcttggtacttagatgacaacatcaaaacatactctgatcaccccgagaaagtaaacaaagatgatgaggaattcatagaaagcaataaaatgcatgctattaatggaagaatgtttggaaacctacaaggcctcacaatgcacgtgggagatgaagtcaactggtatctgatgggaatgggcaatgaaatagacttacacactgtacattttcacggccatagcttccaatacaagcatcttctgagactcacaggagaatatggaatgtgatctacccaatcacagtcagtgtgattattttattccaaatatctaccaaggaatgaccaggagaataagatcctccgatgttcgcaatggtgtggtgtcaggaggctgcctcttagacaatctccagatgtactgtgatgtgagtttgaaaaagagttcctgaagtaccacatctgggagacatgccactagctgagcttcccaaaagtctaccaagagctgaggaattgtatcttcatccttagcacaaagcaccttaaaaacagtaaaaggagcctctatattccagataaatatagcactgataaagcgacagctgggctgaatatcacagcatcacatgggccacgcaatcaataatttaccattagcattagcgccatggcaaaagcaaatttagacatttttaaaaggaaacagattctaggatgtacaaataaagtttctacagatatagtcttttaattagtacttttatcttataaactgattatgtatgtctgttttttcaataaacaaacaaatgaaaaactca

SEQ ID NO: 116829 - DNA, 1150 bp, Homo sapiens
  Payload ID: 2780
  Gene Symbol: CP
  Gene Name: ceruloplasmin (ferroxidase)
  ENST ID: ENST00000479771
  CDS Start-End: 1-678
ggagctggaacagaggattctgcttgtattccatgggcttattattcaactgtggatcaagttaaggacctctacagtggattaattggccccctgattgtttgtcgaagaccttacttgaaagtattcaatcccagaaggaaactggaatttgcccttctgtttctagtttttgatgagaatgaatcttggtacttagatgacaacatcaaaacatactctgatcaccccgagaaagtaaacaaagatgatgaggaattcatagaaagcaataaaatgcatgctattaatggaagaatgtttggaaacctacaaggcctcacaatgcacgtgggagatgaagtcaactggtatctgatgggaatgggcaatgaaatagacttacacactgtacattttcacggccatagcttccaatacaagcacaggggagtttatagttctgatgtctttgacattttccctggaacataccaaaccctagaaatgtttccaagaacacctggaatttggttactccactgccatgtgaccgaccacattcatgctggaatggaaaccacttacaccgttctacaaaatgaagcatcttctgagactcacaggagaatatggaatgtgatctacccaatcacagtcagtgtgattattttattccaaatatctaccaaggaatgaccaggagaataagatcctccgatgttcgcaatggtgtggtgtcaggaggctgcctcttagacaatctccagatgtactgtgatgtgagtttgaaaaagagttcctgaagtaccacatctgggagacatgccactagctgagcttcccaaaagtctaccaagagctgaggaattgtatcttcatccttagcacaaagcaccttaaaaacagtaaaaggagcctctatattccagataaatatagcactgataaagcgacagctgggctgaatatcacagcatcacatgggccacgcaatcaataatttaccattagcattagcgccatggcaaaagcaaatttagacatttttaaaaggaaacagattctaggatgtacaaataaagtttctacagatatagtcttttaattagtacttttatcttataaactgattatgtatgtctgttttttcaataaacaaacaaatgaa

SEQ ID NO: 116830 - DNA, 2806 bp, Homo sapiens
  Payload ID: 2780
  Gene Symbol: CP
  Gene Name: ceruloplasmin (ferroxidase)
  ENST ID: ENST00000494544
  CDS Start-End: 1-2559
gtggtgatgttttctgtggtggatgaaaatttcagctggtacctagaagacaacattaaaacctactgctcagaaccagagaaagttgacaaagacaacgaagacttccaggagagtaacagaatgtattctgtgaatggatacacttttggaagtctcccaggactctccatgtgtgctgaagacagagtaaaatggtacctttttggtatgggtaatgaagttgatgtgcacgcagctttctttcacgggcaagcactgactaacaagaactaccgtattgacacaatcaacctctttcctgctaccctgtttgatgcttatatggtggcccagaaccctggagaatggatgctcagctgtcagaatctaaaccatctgaaagccggtttgcaagcctttttccaggtccaggagtgtaacaagtcttcatcaaaggataatatccgtgggaagcatgttagacactactacattgccgctgaggaaatcatctggaactatgctccctctggtatagacatcttcactaaagaaaacttaacagcacctggaagtgactcagcggtgttttttgaacaaggtaccacaagaattggaggctcttataaaaagctggtttatcgtgagtacacagatgcctccttcacaaatcgaaaggagagaggccctgaagaagagcatcttggcatcctgggtcctgtcatttgggcagaggtgggagacaccatcagagtaaccttccataacaaaggagcatatcccctcagtattgagccgattggggtgagattcaataagaacaacgagggcacatactattccccaaattacaacccccagagcagaagtgtgcctccttcagcctcccatgtggcacccacagaaacattcacctatgaatggactgtccccaaagaagtaggacccactaatgcagatcctgtgtgtctagctaagatgtattattctgctgtggaacccactaaagatatattcactgggcttattgggccaatgaaaatatgcaagaaaggaagtttacatgcaaatgggagacagaaagatgtagacaaggaattctatttgtttcctacagtatttgatgagaatgagagtttactcctggaagataatattagaatgtttacaactgcacctgatcaggtggataaggaagatgaagactttcaggaatctaataaaatgcactccatgaatggattcatgtatgggaatcagccgggtctcactatgtgcaaaggagattcggtcgtgtggtacttattcagcgccggaaatgaggccgatgtacatggaatatacttttcaggaaacacatatctgtggagaggagaacggagagacacagcaaacctcttccctcaaacaagtcttacgctccacatgtggcctgacacagaggggacttttaatgttgaatgccttacaactgatcattacacaggcggcatgaagcaaaaatatactgtgaaccaatgcaggcggcagtctgaggattccaccttctacctgggagagaggacatactatatcgcagcagtggaggtggaatgggattattccccacaaagggagtgggaaaaggagctgcatcatttacaagagcagaatgtttcaaatgcatttttagataagggagagttttacataggctcaaagtacaagaaagttgtgtatcggcagtatactgatagcacattccgtgttccagtggagagaaaagctgaagaagaacatctgggaattctaggtccacaacttcatgcagatgttggagacaaagtcaaaattatctttaaaaacatggccacaaggccctactcaatacatgcccatggggtacaaacagagagttctacagttactccaacattaccaggtgaaactctcacttacgtatggaaaatcccagaaagatctggagctggaacagaggattctgcttgtattccatgggcttattattcaactgtggatcaagttaaggacctctacagtggattaattggccccctgattgtttgtcgaagaccttacttgaaagtattcaatcccagaaggaaactggaatttgcccttctgtttctagtttttgatgagaatgaatcttggtacttagatgacaacatcaaaacatactctgatcaccccgagaaagtaaacaaagatgatgaggaattcatagaaagcaataaaatgcatgctattaatggaagaatgtttggaaacctacaaggcctcacaatgcacgtgggagatgaagtcaactggtatctgatgggaatgggcaatgaaatagacttacacactgtacattttcacggccatagcttccaatacaagcacaggggagtttatagttctgatgtctttgacattttccctggaacataccaaaccctagaaatgtttccaagaacacctggaatttggttactccactgccatgtgaccgaccacattcatgctggaatggaaaccacttacaccgttctacaaaatgaaggtgaatatccagacaccaaatctggctgaatgaaataaattggtgataagtggaaaaaagagaaaaaccaatgattcataacaatgtatgtgaaagtgtaaaatagaatgttactttggaatgactataaacattaaaagaagactggaagcatacaactttgtacatttgtgggggaaaactattaattttttgcaaatggaaagatcaacagactatataatgatacatgactgacacttgtacactaggtaataaaactgattcatacagtct

SEQ ID NO: 116831 - DNA, 571 bp, Homo sapiens
  Payload ID: 2780
  Gene Symbol: CP
  Gene Name: ceruloplasmin (ferroxidase)
  ENST ID: ENST00000455472
  CDS Start-End: 36-571
ttcatttcttctcaggctccaagaaggggaaaaaaatgaagattttgatacttggtatttttctgtttttatgtagtaccccagcctgggcgaaagaaaagcattattacattggaattattgaaacgacttgggattatgcctctgaccatggggaaaagaaacttatttctgttgacacaggtttccaaaacaaatggtacagtgaagatgtcactataagcaggcctaatgaccaagaagaaataacagctcaaatcctgaccaaaaaactagacaacaaagaacattccaccttacgggaacattccaatatctatcttcaaaatggcccagatagaattgggagactatataagaaggccctttatcttcagtacacagatgaaacctttaggacaactatagaaaaaccggtctggcttgggtttttaggccctattatcaaagctgaaactggagataaagtttatgtacacttaaaaaaccttgcctctaggccctacacctttcattcacatggaataacttactataaggaacatgagggggccatctaccctgataacac

SEQ ID NO: 116832 - DNA, 2037 bp, Homo sapiens
  Payload ID: 2781
  Gene Symbol: FIGF
  Gene Name: c-fos induced growth factor (vascular endothelial growth factor D)
  Uniprot ID: O43915
  ENST ID: ENST00000297904
  CDS Start-End: 431-1495
caaaaaagtttcaatccagagttgggttccagctttctgtagctgtaagcattggtggccacaccacctccttacaaagcaactagaacctgcggcatacattggagagatttttttaattttctggacatgaagtaaatttagagtgctttctaatttcaggtagaagacatgtccaccttctgattatttttggagaacattttgatttttttcatctctctctccccacccctaagattgtgcaaaaaaagcgtaccttgcctaattgaaataatttcattggattttgatcagaactgattatttggttttctgtgtgaagttttgaggtttcaaactttccttctggagaatgccttttgaaacaattttctctagctgcctgatgtcaactgcttagtaatcagtggatattgaaatattcaaaatgtacagagagtgggtagtggtgaatgttttcatgatgttgtacgtccagctggtgcagggctccagtaatgaacatggaccagtgaagcgatcatctcagtccacattggaacgatctgaacagcagatcagggctgcttctagtttggaggaactacttcgaattactcactctgaggactggaagctgtggagatgcaggctgaggctcaaaagttttaccagtatggactctcgctcagcatcccatcggtccactaggtttgcggcaactttctatgacattgaaacactaaaagttatagatgaagaatggcaaagaactcagtgcagccctagagaaacgtgcgtggaggtggccagtgagctggggaagagtaccaacacattcttcaagcccccttgtgtgaacgtgttccgatgtggtggctgttgcaatgaagagagccttatctgtatgaacaccagcacctcgtacatttccaaacagctctttgagatatcagtgcctttgacatcagtacctgaattagtgcctgttaaagttgccaatcatacaggttgtaagtgcttgccaacagccccccgccatccatactcaattatcagaagatccatccagatccctgaagaagatcgctgttcccattccaagaaactctgtcctattgacatgctatgggatagcaacaaatgtaaatgtgttttgcaggaggaaaatccacttgctggaacagaagaccactctcatctccaggaaccagctctctgtgggccacacatgatgtttgacgaagatcgttgcgagtgtgtctgtaaaacaccatgtcccaaagatctaatccagcaccccaaaaactgcagttgctttgagtgcaaagaaagtctggagacctgctgccagaagcacaagctatttcacccagacacctgcagctgtgaggacagatgcccctttcataccagaccatgtgcaagtggcaaaacagcatgtgcaaagcattgccgctttccaaaggagaaaagggctgcccaggggccccacagccgaaagaatccttgattcagcgttccaagttccccatccctgtcatttttaacagcatgctgctttgccaagttgctgtcactgtttttttcccaggtgttaaaaaaaaaatccattttacacagcaccacagtgaatccagaccaaccttccattcacaccagctaaggagtccctggttcattgatggatgtcttctagctgcagatgcctctgcgcaccaaggaatggagaggaggggacccatgtaatccttttgtttagttttgtttttgttttttggtgaatgagaaaggtgtgctggtcatggaatggcaggtgtcatatgactgattactcagagcagatgaggaaaactgtagtctctgagtcctttgctaatcgcaactcttgtgaattattctgattcttttttatgcagaatttgattcgtatgatcagtactgactttctgattactgtccagcttatagtcttccagtttaatgaactaccatctgatgtttcatatttaagtgtatttaaagaaaataaacaccattattcaagccatataa

SEQ ID NO: 116833 - DNA, 4495 bp, Homo sapiens
  Payload ID: 2782
  Gene Symbol: CGGBP1
  Gene Name: CGG triplet repeat binding protein 1
  Uniprot ID: Q9UFW8
  ENST ID: ENST00000309534
  CDS Start-End: 463-966
aatgctgctcggcggttgctggggaccgcctacgggctctgccataggcggtgcaggcggacggggcgcggcgggggacacggcggccgccgcggggctcgatcgggcaacggcggcgacggcggcagcgacggatcctcctcctcccttattcccttgctcctctttcttccttttcttttcctttccggccgggcctcgtccactttccctaacggcggcctcgatcctacgtaaaggcatgacttcctggcaccacagggaaaatcgggtgcaagcccagaaactatttccccaccaccacttgttgaaaaactgatttgaaggcatctccggggttgaacaaacggaaagtgccaggatttgatgcgtctctggtttcgctctggagaccattccctgctaagtatcaagacgaaaaaaactggaaactaatccgaaccatatttatttagagtcagaatggagcgatttgtagtaacagcaccacctgctcgaaaccgttctaagactgctttgtatgtgactcccctggatcgagtcactgagtttggaggtgagctgcatgaagatggaggaaaactcttctgcacttcttgcaatgtggttctgaatcatgttcgcaagtctgccattagtgaccacctcaagtcaaagactcataccaagaggaaggcagaatttgaagagcagaatgtgagaaagaagcagaggcccctaactgcatctcttcagtgcaacagtactgcgcaaacagagaaagtcagtgttatccaggactttgtgaaaatgtgcctggaagccaacatcccacttgagaaggctgatcacccagcagtccgtgctttcctatctcgccatgtgaagaatggaggctccatacctaagtcagaccagctacggagggcatatcttcctgatggatatgagaatgagaatcaactcctcaactcacaagattgttgactaggaggttaccaccattgtgatcaagataaatgtggagtattaaagttatgtgttgattgtgtggttcatttttgtatttatttcatttaaaatcatgtgacgcagaatagttttgcaatgtgtatatagttgcaggcaaaaaaaaaaccacctcactgcaaaacttattgttaattttagtcaccaatggtataaagcaaaacctaggtttagagtgtgctaggatacctgaaacctgatggttatctttaaaattaatggtttttctcctgaaatgtttgtgcatggaagaactgccctgcttttttaccctgttgccatgtatgattattccttgtgagattacttaattacttggattgaagactagcctattgaagctgctgccaggcaacaccacttaacagtaacttaaaggaattattttctttagaggatcctcttcaaaaaggaagggagatagtggaaaactgttcttatatcttcagatccctagcagaaatgactgtttatttcaaactatgttttacttgtatatgatgtagtcaccttaactatctttcaattccatacttcccccgcccccattttaaaggcttattgttgtattttgtagcagcttcaagtgaccaaaagactaaaatctttcaacgtcaatgccaaaagccaaggggaattttgcagtgacaggattttagtctcttactatgaatactaatttcgaaccatagctttcattttaagcatcatcttgaatttctaaacttttttctatgtcttggtgttaaaagatttcaagattggcatttttacttaaacagacattttatggttgagttttctctttattatagagaattagtaatttttttttggctgacagatcagataaaattactttctattcattaatttttctctacaactttatgagtttatttaggtgaatagtctagactagaaacaagtttactttatctgctttgcctctggtggtacaaggtttttaacatggatggtaaacaattgtctagaaattctggcaggttttttgtattggagatctggcagtatcctgcataactttgggtgaggaaattgttctcttaaagatcagccatgttcaggaaatgatctctgtttgaacctcactatcctgtaaggttatccaagtagcttagcccagctaagttctatcagagacccaaattatattttttaaaaatttaacagctggaaacttggactagagctttaataaaaaatcttaaattctttgaaattcaagttaaaaatacttatatatttctattacaaagcagtgacaaatgatgccctgtgtgacttggagttatctttgacttttaccacaaatcttcatttataaaagaaaaagccaaagtgaaaaaaagttagattgtgtatttttcagtaacagctttccatgtcttaagatttttttacagacttaagtttctaattcaggttgtcaaactggccatttgacttcagagatttgttttcattaaaaaataagcctgccgccaaaataaatcacttatcaaaatgtgaactgttttcctcatgttcagttatgttaaagtagtatgataaatgcatgcctagagtagtgctctcgttgatgaagcacatgtatgaggagaccagcagcaaaacataaccatatgtgttttgcgtttacttcctctagaaaagaatttgcaggcaaccatgtttaatttgaactatctaagatggtagattttagaagctaggaataattgagttttatagcactattttcagaatacgaaaagatacacaatcattctgttttttgaaattccatgtgattcaaactgctccctattatttgggtattaatttgcactaatagcaaaatgtaatggcagatcagctttgagagtggtcctaagcagtaaactggatgatgttgcattagaaaaacatcaataattcatatttaagttttagtagttactactgatttgataatcacttaaattttatatatcttaatgtattttttcagactcctaattaattcccacattcactgtaactaggggcatagtccattctgttaggattatatcctctccttagaaatgttttccatcctgttgtggggatttggtattaatgtttcttcattgattatggaacttttgttccctgaagctagttaactgtgtctaaagttaaataaatacagcagaatgattgttttagcctgctcgaactgatacaaatccctgaaaccatgattggcatatgttagataacaaatgaggatgtctaagaggcatatgctgctttggaggtgtagtgaacgtgtgtacagaagttttcaatcttaactatatagtgttagtgtgatgctatactattggaaaaatagcagcttttttctattttataagttgtatgcataaacataagatttgtaatgtttcatttataaactgccttcttcaacacatgttaatagtgttttctcaaagtattgatagtatgtcttccagaatttcacaatatgcttacagtaaatatttcctagcttgttgaaatgttcaattctttgttggctttcttcttgattctgtgggggtgtataacaagcctgaaggacattgtaatcatttcttacaaggtgaaaattaagaaagattgtgtatgagagcctatatagttgttttatccattatcatctttgattaagactttaaaaaaatgctatttccagttaatgcatttggccctattgaattttcagggaccagaaaacattaaaaagttctgcatcttataatggtaaccaattaagcttgagattgttctgaaagtatcaattgctttaaaactgttgtaagtacagttggcaagatctccaagctgaaacttccacgttaaaacttttgcctgtaagaatttgcacatgaatgttaatggaaaacacaaaacttaagatggcccaaaacaaaagccacaaacagttcatcatttggtgcttagtctttgtaagggctctctgtggtttgacttaccccagctaccgttaaatgaggacaaatcaccttaaaacatgttcatttgattcataacaaggaaaattgggtctatgattttttgccaatcttagcctaaaagaaattgctttagcttctggtcagcactgattaaaatgtgaatagtgaagtggctatcctaaactggtttatctccacccacactatcatagatttcttaggtaaatacaattcttatctagtggtattctacttgtattcagaatactgtattaaaattttactatttcatttttgtattctgtgcttattttttttgctcacgcatgtatgcttagtataaatgtgtcacttctaaagttttgtctctgacttttagaaataaatttcagaaaaattgtttcaaaagattttgaaagcacattttgttttgtgagtcaatgacaaatatatttcctgattacaaaacagcagaa

SEQ ID NO: 116834 - DNA, 5298 bp, Homo sapiens
  Payload ID: 2782
  Gene Symbol: CGGBP1
  Gene Name: CGG triplet repeat binding protein 1
  Uniprot ID: Q9UFW8
  ENST ID: ENST00000398392
  CDS Start-End: 1334-1837
tttatcgtacttttcagaatttctgtggaatgtttaatcttctggatccatgactgtctgatacgttggcaatttaaagtccttttgaaagagagttcatgttacccagctattctctagtatgtattcatggaatactccatcgtttctgattacacttatgagacataattcttcagagcacacttagaattatttctctaacatatttatgcagacagaattccatcttgaattttatcaaattcactttaacttcttaagtcttggttattgtaagagcccaaaggtatggccccagggaacaattaagacttgatgatttgtcacctaccaaaatatgttcattatgtaaaggtttcaatgcccataaggctgtcatttggtatttagtgcagtgctcataaaagtgtgttattaggataaattgagaaattaattaagctgcttctagattaaataaatataaatatttggacaaatattgaagatacgtactttttccatcaaattttaattgaggttctgctgtatactagactctatgttcttgattttgttcttactagttaagtgaagtaagtattaacaaatgtaattattaattttaatgggaaaaggaaacaagtattagagaagtaagactttgcatatcttaacaccttttggaaaacggaggtatacatgcattacaaaataactttgaactgtatattttggctttacaatttaatgtcattgttgcttttagttgtatttggtctggtttttttttgtggtttttcctcagaacaattttggaaactatattcatcttcatatagaattatggcagtttataggcccacctgtttgaaaaaactttatccacagttgtgttcctaaaatcagttgtcccagaattgtgacaggaaagaagctcttttgaacttgaatgcatatctaagttagatgagattaatacaatttatatcctgaatgtaatttatatcctaaatgttgaactgtgattaggtttccctaaataatggtgacatctgggatagtttgagttctttctttatagtctaatttacttgaatttcgtaaaaatcaaggaatggacctgattgcgactggttagtaacttgttctagttttgccttcccttatatatttcaggtaagttaagattaatagacacacagtctactaatttgaattaagttttttgaagtatttgaagtgtttatatactgccttttattgttcattacttccagaatgaactgttgttataatactcatctttgtttcttttgtcttgaaagaaccatatttatttagagtcagaatggagcgatttgtagtaacagcaccacctgctcgaaaccgttctaagactgctttgtatgtgactcccctggatcgagtcactgagtttggaggtgagctgcatgaagatggaggaaaactcttctgcacttcttgcaatgtggttctgaatcatgttcgcaagtctgccattagtgaccacctcaagtcaaagactcataccaagaggaaggcagaatttgaagagcagaatgtgagaaagaagcagaggcccctaactgcatctcttcagtgcaacagtactgcgcaaacagagaaagtcagtgttatccaggactttgtgaaaatgtgcctggaagccaacatcccacttgagaaggctgatcacccagcagtccgtgctttcctatctcgccatgtgaagaatggaggctccatacctaagtcagaccagctacggagggcatatcttcctgatggatatgagaatgagaatcaactcctcaactcacaagattgttgactaggaggttaccaccattgtgatcaagataaatgtggagtattaaagttatgtgttgattgtgtggttcatttttgtatttatttcatttaaaatcatgtgacgcagaatagttttgcaatgtgtatatagttgcaggcaaaaaaaaaaccacctcactgcaaaacttattgttaattttagtcaccaatggtataaagcaaaacctaggtttagagtgtgctaggatacctgaaacctgatggttatctttaaaattaatggtttttctcctgaaatgtttgtgcatggaagaactgccctgcttttttaccctgttgccatgtatgattattccttgtgagattacttaattacttggattgaagactagcctattgaagctgctgccaggcaacaccacttaacagtaacttaaaggaattattttctttagaggatcctcttcaaaaaggaagggagatagtggaaaactgttcttatatcttcagatccctagcagaaatgactgtttatttcaaactatgttttacttgtatatgatgtagtcaccttaactatctttcaattccatacttcccccgcccccattttaaaggcttattgttgtattttgtagcagcttcaagtgaccaaaagactaaaatctttcaacgtcaatgccaaaagccaaggggaattttgcagtgacaggattttagtctcttactatgaatactaatttcgaaccatagctttcattttaagcatcatcttgaatttctaaacttttttctatgtcttggtgttaaaagatttcaagattggcatttttacttaaacagacattttatggttgagttttctctttattatagagaattagtaatttttttttggctgacagatcagataaaattactttctattcattaatttttctctacaactttatgagtttatttaggtgaatagtctagactagaaacaagtttactttatctgctttgcctctggtggtacaaggtttttaacatggatggtaaacaattgtctagaaattctggcaggttttttgtattggagatctggcagtatcctgcataactttgggtgaggaaattgttctcttaaagatcagccatgttcaggaaatgatctctgtttgaacctcactatcctgtaaggttatccaagtagcttagcccagctaagttctatcagagacccaaattatattttttaaaaatttaacagctggaaacttggactagagctttaataaaaaatcttaaattctttgaaattcaagttaaaaatacttatatatttctattacaaagcagtgacaaatgatgccctgtgtgacttggagttatctttgacttttaccacaaatcttcatttataaaagaaaaagccaaagtgaaaaaaagttagattgtgtatttttcagtaacagctttccatgtcttaagatttttttacagacttaagtttctaattcaggttgtcaaactggccatttgacttcagagatttgttttcattaaaaaataagcctgccgccaaaataaatcacttatcaaaatgtgaactgttttcctcatgttcagttatgttaaagtagtatgataaatgcatgcctagagtagtgctctcgttgatgaagcacatgtatgaggagaccagcagcaaaacataaccatatgtgttttgcgtttacttcctctagaaaagaatttgcaggcaaccatgtttaatttgaactatctaagatggtagattttagaagctaggaataattgagttttatagcactattttcagaatacgaaaagatacacaatcattctgttttttgaaattccatgtgattcaaactgctccctattatttgggtattaatttgcactaatagcaaaatgtaatggcagatcagctttgagagtggtcctaagcagtaaactggatgatgttgcattagaaaaacatcaataattcatatttaagttttagtagttactactgatttgataatcacttaaattttatatatcttaatgtattttttcagactcctaattaattcccacattcactgtaactaggggcatagtccattctgttaggattatatcctctccttagaaatgttttccatcctgttgtggggatttggtattaatgtttcttcattgattatggaacttttgttccctgaagctagttaactgtgtctaaagttaaataaatacagcagaatgattgttttagcctgctcgaactgatacaaatccctgaaaccatgattggcatatgttagataacaaatgaggatgtctaagaggcatatgctgctttggaggtgtagtgaacgtgtgtacagaagttttcaatcttaactatatagtgttagtgtgatgctatactattggaaaaatagcagcttttttctattttataagttgtatgcataaacataagatttgtaatgtttcatttataaactgccttcttcaacacatgttaatagtgttttctcaaagtattgatagtatgtcttccagaatttcacaatatgcttacagtaaatatttcctagcttgttgaaatgttcaattctttgttggctttcttcttgattctgtgggggtgtataacaagcctgaaggacattgtaatcatttcttacaaggtgaaaattaagaaagattgtgtatgagagcctatatagttgttttatccattatcatctttgattaagactttaaaaaaatgctatttccagttaatgcatttggccctattgaattttcagggaccagaaaacattaaaaagttctgcatcttataatggtaaccaattaagcttgagattgttctgaaagtatcaattgctttaaaactgttgtaagtacagttggcaagatctccaagctgaaacttccacgttaaaacttttgcctgtaagaatttgcacatgaatgttaatggaaaacacaaaacttaagatggcccaaaacaaaagccacaaacagttcatcatttggtgcttagtctttgtaagggctctctgtggtttgacttaccccagctaccgttaaatgaggacaaatcaccttaaaacatgttcatttgattcataacaaggaaaattgggtctatgattttttgccaatcttagcctaaaagaaattgctttagcttctggtcagcactgattaaaatgtgaatagtgaagtggctatcctaaactggtttatctccacccacactatcatagatttcttaggtaaatacaattcttatctagtggtattctacttgtattcagaatactgtattaaaattttactatttcatttttgtattctgtgcttattttttttgctcacgcatgtatgcttagtataaatgtgtcacttctaaagttttgtctctgacttttagaaataaatttcagaaaaattgtttcaaaa

SEQ ID NO: 116835 - DNA, 1063 bp, Homo sapiens
  Payload ID: 2782
  Gene Symbol: CGGBP1
  Gene Name: CGG triplet repeat binding protein 1
  Uniprot ID: Q9UFW8
  ENST ID: ENST00000462901
  CDS Start-End: 513-1016
aaacgcagtgccctcacttgtggttccgggctggggacggagtgaagtcccacgtatctcaattaagggaagtgctgggtttatatggagaacatagactatccgcaagggagctggttaccgaaagagaagtccctcctccaaaagagcgccttggagggctgcgcaggtgcagatacctctactaagaagacagaagacttactttcatcatctgaatcaaatccaaagagtgtctgacatttcttttgtgcaagatgagcctcaagtgcttctgcattacataaaggcatgacttcctggcaccacagggaaaatcgggtgcaagcccagaaactatttccccaccaccacttgttgaaaaactgatttgaaggcatctccggggttgaacaaacggaaagtgccaggatttgatgcgtctctggtttcgctctggagaccattccctgctaagtatcaagacgaaaaaaactggaaactaatccgaaccatatttatttagagtcagaatggagcgatttgtagtaacagcaccacctgctcgaaaccgttctaagactgctttgtatgtgactcccctggatcgagtcactgagtttggaggtgagctgcatgaagatggaggaaaactcttctgcacttcttgcaatgtggttctgaatcatgttcgcaagtctgccattagtgaccacctcaagtcaaagactcataccaagaggaaggcagaatttgaagagcagaatgtgagaaagaagcagaggcccctaactgcatctcttcagtgcaacagtactgcgcaaacagagaaagtcagtgttatccaggactttgtgaaaatgtgcctggaagccaacatcccacttgagaaggctgatcacccagcagtccgtgctttcctatctcgccatgtgaagaatggaggctccatacctaagtcagaccagctacggagggcatatcttcctgatggatatgagaatgagaatcaactcctcaactcacaagattgttgactaggaggttaccaccattgtgatcaagataaatgtggagtattaaa

SEQ ID NO: 116836 - DNA, 556 bp, Homo sapiens
  Payload ID: 2782
  Gene Symbol: CGGBP1
  Gene Name: CGG triplet repeat binding protein 1
  ENST ID: ENST00000467332
  CDS Start-End: 238-556
agtgctgggtttatatggagaacatagactatccgcaagggagctggttaccgaaagagaagtccctcctccaaaagagcgccttggagggctgcgcaggtgcagatacctctactaagaagacagaagacttactttcatcatctgaatcaaatccaaagagtgtctgacatttcttttgtgcaagatgagcctcaagtgcttctgcattacaaaccatatttatttagagtcagaatggagcgatttgtagtaacagcaccacctgctcgaaaccgttctaagactgctttgtatgtgactcccctggatcgagtcactgagtttggaggtgagctgcatgaagatggaggaaaactcttctgcacttcttgcaatgtggttctgaatcatgttcgcaagtctgccattagtgaccacctcaagtcaaagactcataccaagaggaaggcagaatttgaagagcagaatgtgagaaagaagcagaggcccctaactgcatctcttcagtgcaacagtactgcgcaaacagagaaagtcagtgttatccaggact

SEQ ID NO: 116837 - DNA, 1147 bp, Homo sapiens
  Payload ID: 2782
  Gene Symbol: CGGBP1
  Gene Name: CGG triplet repeat binding protein 1
  Uniprot ID: Q9UFW8
  ENST ID: ENST00000482016
  CDS Start-End: 585-1088
aaaccggccgtctgttggtcaatgctgctcggcggttgctggggaccgcctacgggctctgccataggcggtgcaggcggacggggcgcggcgggggacacggcggccgccgcggggctcgatcgggcaacggcggcgacggcggcagcgacggatcctcctcctcccttattcccttgctcctctttcttccttttcttttcctttccggccgggcctcgtccactttccctaacggcggcctcgatcctacgtaaaggcatgacttcctggcaccacagggaaaatcgggtgcaagcccagaaactatttccccaccaccacttgttgaaaaactgatttgaaggcatctccggggttgaacaaacggaaagtgccaggatttgatgcgtctctggtttcgctctggagaccattccctgctaagtatcaagacgaaaaaaactggaaactaatccgaatttctgtggaatgtttaatcttctggatccatgactgtctgatacgttggcaatttaaagtccttttgaaagagagttcatgttacccagctattctctaaaccatatttatttagagtcagaatggagcgatttgtagtaacagcaccacctgctcgaaaccgttctaagactgctttgtatgtgactcccctggatcgagtcactgagtttggaggtgagctgcatgaagatggaggaaaactcttctgcacttcttgcaatgtggttctgaatcatgttcgcaagtctgccattagtgaccacctcaagtcaaagactcataccaagaggaaggcagaatttgaagagcagaatgtgagaaagaagcagaggcccctaactgcatctcttcagtgcaacagtactgcgcaaacagagaaagtcagtgttatccaggactttgtgaaaatgtgcctggaagccaacatcccacttgagaaggctgatcacccagcagtccgtgctttcctatctcgccatgtgaagaatggaggctccatacctaagtcagaccagctacggagggcatatcttcctgatggatatgagaatgagaatcaactcctcaactcacaagattgttgactaggaggttaccaccattgtgatcaagataaatgtggagtattaaagttatgtgttga

SEQ ID NO: 116838 - DNA, 1393 bp, Homo sapiens
  Payload ID: 2783
  Gene Symbol: CRCP
  Gene Name: CGRP receptor component
  Uniprot ID: O75575
  ENST ID: ENST00000338592
  CDS Start-End: 114-461
gagcaccttggcgcgcggagctggcaccttggcgctgttggtggcggcggagacagctgtgaagtgtgaggttctttgtctgctggcagctaggggcgacgaggcgggacgtcatggaagtgaaggatgccaattctgcgcttctcagtaactacgagacgttaaaatacatatcaaaaacaccatgcaggcaccagagtcctgaaattgtcagagaatttctcacagcattgaaaagccacaagttgaccaaagctgagaagctccagctgctgaaccaccggcctgtgactgctgtggagatccagctgatggtggaagagagtgaagagcggctcacggaggagcagattgaagctcttctccacaccgtcaccagcattctgcctgcagagccagaggctgagcagaagaagaatacaaacagcaatgtggcaatggacgaagaggacccagcatagaagagcacagctggccccggcgtttcatgaagtcagaaggcctggcagccatttcctggacgttgagaggattgtttatttgatttttatcctcatcccagcaggcctggctttgtggttagttgggtacatcacaaaaataagttaaaaagaaatatttgtgccttggggagaagaaacatggtgaaaacaggctgaggttgtcagggcagagagctgaaggtggggacagtgaccgcggacccctctgtgcttgaaagatttcctccacggcctttgccccagttgtggggaggtctctgtgcacagcggggaaaatgcttgtgtcgcctttggtgggccatgtcctaattagtttcatctgcttccctgggaacttactaaggggcccagagcactgttggaagtctggttagagtccccagagagttactctaagttaaaatgagccactgaccttggctcaccttagaggaatttcctcgagaacaacagagataagaaaagaaccggcctggccaatccttcaacagctctagagccccttttctctgctggcaggggctttgtttaccagctcactgtttaggctaaatgttagggaccagatcactgcagttgaaaacgggcactccaggcttagtgacagtggcagcagaaacagtgttggctgcctttctgaccaccccactttcctgccctgagacagcagcccagggcaggtgcttcatattcagaccaggtaagcctcatttgcacaacagtcaaattgtttgttcctttaaaaaggacacaattagcctggcacggtgactcatgcttgtaatcccagcactttgggagggcaaggcaggcggatcacctgaggtcaggagtttgagaccagcctcaccaacatggaaaaaccccatctctactaaaaaaatacaaaa

SEQ ID NO: 116839 - DNA, 3139 bp, Homo sapiens
  Payload ID: 2783
  Gene Symbol: CRCP
  Gene Name: CGRP receptor component
  ENST ID: ENST00000360415
  CDS Start-End: 360-488
ggttgcagtaagccgagatccagcctgggcgacagagcgagactccgtctcaaaaaaaaaaaaaggttaaagaaaaaaagaaaagaaaacacaagataatcctgtccgcaaacgcttagcagtcttaaatcggcctggtggaaggatgcagggacactcccccaccctgccccccgaaaaaggggaacgcgcagcgcgaggttccgggtccgccaagctcccggcatgcagcgcggcgatcccggcgagcaccttggcgcgcggagctggcaccttggcgctgttggtggcggcggagacagctgtgaagtgtgaggttctttgtctgctggcagctaggggcgacgaggcgggacgtcatggaagtgaaggatgccaattctgcgcttctcagtaactacgagatggagtctcgctctgtcacccaggctggagtacagtggcaccatccaggctcactgcaacctctgcctcccggattcaagtgattctcctgcctcagcctcccgagtagctgggactacaggtatttcagttactaactgatctgaaagagcagcgtaaagaaagtggaaagaataaacacagctctgggcaacagaacttgaacactatcacctatgaaacgttaaaatacatatcaaaaacaccatgcaggcaccagagtcctgaaattgtcagagaatttctcacagcattgaaaagccacaagttgaccaaagctgagaagctccagctgctgaaccaccggcctgtgactgctgtggagatccagctgatggtggaagagagtgaagagcggctcacggaggagcagattgaagctcttctccacaccgtcaccagcattctgcctgcagagccagaggctgagcagaagaagaatacaaacagcaatgtggcaatggacgaagaggacccagcatagaagagcacagctggccccggcgtttcatgaagtcagaaggcctggcagccatttcctggacgttgagaggattgtttatttgatttttatcctcatcccagcaggcctggctttgtggttagttgggtacatcacaaaaataagttaaaaagaaatatttgtgccttggggagaagaaacatggtgaaaacaggctgaggttgtcagggcagagagctgaaggtggggacagtgaccgcggacccctctgtgcttgaaagatttcctccacggcctttgccccagttgtggggaggtctctgtgcacagcggggaaaatgcttgtgtcgcctttggtgggccatgtcctaattagtttcatctgcttccctgggaacttactaaggggcccagagcactgttggaagtctggttagagtccccagagagttactctaagttaaaatgagccactgaccttggctcaccttagaggaatttcctcgagaacaacagagataagaaaagaaccggcctggccaatccttcaacagctctagagccccttttctctgctggcaggggctttgtttaccagctcactgtttaggctaaatgttagggaccagatcactgcagttgaaaacgggcactccaggcttagtgacagtggcagcagaaacagtgttggctgcctttctgaccaccccactttcctgccctgagacagcagcccagggcaggtgcttcatattcagaccaggtaagcctcatttgcacaacagtcaaattgtttgttcctttaaaaaggacacaattagcctggcacggtgactcatgcttgtaatcccagcactttgggagggcaaggcaggcggatcacctgaggtcaggagtttgagaccagcctcaccaacatggaaaaaccccatctctactaaaaaaatacaaaattaaccaggggtgatggcacattcctgtaatcccagctactcgggaggccgaggcaggagaatcgcttgaacccgggaggcagaggttgaggtgagccaagattgcaccattgcactccagcctgggcaacaagagcaaaacttcatctaaaaaacagaaaatattaagatgattaccatgtgaaaacctttttaatattcaggatttggaaagtatagttgccccaggcatgtggttgttgccttaggtcctgcgaatattgctgaaaatcggattttccacattcactttcttccctgttttagggaagaaaatgatcatagacattcgattttccaaattggcgctcttattttcaatgctaattggattacttctcttccaaccctcctgcccgtccatccatcccagtccccaggcatcttaaccttaccatctgagcttcagctgaaatctgtttataggcaacattgaaagtaccagattggggccaggtgtagcggcccacacctgtaatcccagcactttgggaggcggaggctagcggatcatgaggtcaggagttcaagaccagcctggccaacatggtgaaacccccatctctactaaagatataaaaaactagccgagcgtggtgttgcatgcctgtgatcccagctactcgggaggctgaggcgggggaatcgcttgaaccggggaggcagaggttgcagtgagccagatcgtgcattgcactccagcctggccgacagggtgagactccatctcaaaaaagagaaagtaccagattgtacttttaaatctgtctagcgtattgagaattttagtgggagctgttgatttatttctcagggcatacatgtgccaatctgtctcattgttgtctctctcttttttttttttttttttgagacagtctcgctgtgttgcccaggagtgcagtggcacgatctctgctcactgcaacctctgcctcccagattcaagcgattctggtgccttagcctcctgagtagctgggacttacaggcacgtaccactataccctgctaaaatttgtatttttagtagagacagggttttgccatattggccaggctagtcgtaatgtctctttttaacactgaatatgttaggtggtttttcttgatggatttagggttaacctagttaataataaattgtttccaggtaattatcaagttttgtcattttataaatctgaagagttaatattgtcatcgatacaaataaagtgaaatctgactgaggctaaaa

SEQ ID NO: 116840 - DNA, 3009 bp, Homo sapiens
  Payload ID: 2783
  Gene Symbol: CRCP
  Gene Name: CGRP receptor component
  Uniprot ID: O75575
  ENST ID: ENST00000395326
  CDS Start-End: 359-805
gttgcagtaagccgagatccagcctgggcgacagagcgagactccgtctcaaaaaaaaaaaaaggttaaagaaaaaaagaaaagaaaacacaagataatcctgtccgcaaacgcttagcagtcttaaatcggcctggtggaaggatgcagggacactcccccaccctgccccccgaaaaaggggaacgcgcagcgcgaggttccgggtccgccaagctcccggcatgcagcgcggcgatcccggcgagcaccttggcgcgcggagctggcaccttggcgctgttggtggcggcggagacagctgtgaagtgtgaggttctttgtctgctggcagctaggggcgacgaggcgggacgtcatggaagtgaaggatgccaattctgcgcttctcagtaactacgaggtatttcagttactaactgatctgaaagagcagcgtaaagaaagtggaaagaataaacacagctctgggcaacagaacttgaacactatcacctatgaaacgttaaaatacatatcaaaaacaccatgcaggcaccagagtcctgaaattgtcagagaatttctcacagcattgaaaagccacaagttgaccaaagctgagaagctccagctgctgaaccaccggcctgtgactgctgtggagatccagctgatggtggaagagagtgaagagcggctcacggaggagcagattgaagctcttctccacaccgtcaccagcattctgcctgcagagccagaggctgagcagaagaagaatacaaacagcaatgtggcaatggacgaagaggacccagcatagaagagcacagctggccccggcgtttcatgaagtcagaaggcctggcagccatttcctggacgttgagaggattgtttatttgatttttatcctcatcccagcaggcctggctttgtggttagttgggtacatcacaaaaataagttaaaaagaaatatttgtgccttggggagaagaaacatggtgaaaacaggctgaggttgtcagggcagagagctgaaggtggggacagtgaccgcggacccctctgtgcttgaaagatttcctccacggcctttgccccagttgtggggaggtctctgtgcacagcggggaaaatgcttgtgtcgcctttggtgggccatgtcctaattagtttcatctgcttccctgggaacttactaaggggcccagagcactgttggaagtctggttagagtccccagagagttactctaagttaaaatgagccactgaccttggctcaccttagaggaatttcctcgagaacaacagagataagaaaagaaccggcctggccaatccttcaacagctctagagccccttttctctgctggcaggggctttgtttaccagctcactgtttaggctaaatgttagggaccagatcactgcagttgaaaacgggcactccaggcttagtgacagtggcagcagaaacagtgttggctgcctttctgaccaccccactttcctgccctgagacagcagcccagggcaggtgcttcatattcagaccaggtaagcctcatttgcacaacagtcaaattgtttgttcctttaaaaaggacacaattagcctggcacggtgactcatgcttgtaatcccagcactttgggagggcaaggcaggcggatcacctgaggtcaggagtttgagaccagcctcaccaacatggaaaaaccccatctctactaaaaaaatacaaaattaaccaggggtgatggcacattcctgtaatcccagctactcgggaggccgaggcaggagaatcgcttgaacccgggaggcagaggttgaggtgagccaagattgcaccattgcactccagcctgggcaacaagagcaaaacttcatctaaaaaacagaaaatattaagatgattaccatgtgaaaacctttttaatattcaggatttggaaagtatagttgccccaggcatgtggttgttgccttaggtcctgcgaatattgctgaaaatcggattttccacattcactttcttccctgttttagggaagaaaatgatcatagacattcgattttccaaattggcgctcttattttcaatgctaattggattacttctcttccaaccctcctgcccgtccatccatcccagtccccaggcatcttaaccttaccatctgagcttcagctgaaatctgtttataggcaacattgaaagtaccagattggggccaggtgtagcggcccacacctgtaatcccagcactttgggaggcggaggctagcggatcatgaggtcaggagttcaagaccagcctggccaacatggtgaaacccccatctctactaaagatataaaaaactagccgagcgtggtgttgcatgcctgtgatcccagctactcgggaggctgaggcgggggaatcgcttgaaccggggaggcagaggttgcagtgagccagatcgtgcattgcactccagcctggccgacagggtgagactccatctcaaaaaagagaaagtaccagattgtacttttaaatctgtctagcgtattgagaattttagtgggagctgttgatttatttctcagggcatacatgtgccaatctgtctcattgttgtctctctcttttttttttttttttttgagacagtctcgctgtgttgcccaggagtgcagtggcacgatctctgctcactgcaacctctgcctcccagattcaagcgattctggtgccttagcctcctgagtagctgggacttacaggcacgtaccactataccctgctaaaatttgtatttttagtagagacagggttttgccatattggccaggctagtcgtaatgtctctttttaacactgaatatgttaggtggtttttcttgatggatttagggttaacctagttaataataaattgtttccaggtaattatcaagttttgtcattttataaatctgaagagttaatattgtcatcgatacaaataaagtgaaatctgactgag

SEQ ID NO: 116841 - DNA, 492 bp, Homo sapiens
  Payload ID: 2783
  Gene Symbol: CRCP
  Gene Name: CGRP receptor component
  Uniprot ID: O75575
  ENST ID: ENST00000398684
  CDS Start-End: 123-338
gatcccggcgagcaccttggcgcgcggagctggcaccttggcgctgttggtggcggcggagacagctgtgaagtgtgaggttctttgtctgctggcagctaggggcgacgaggcgggacgtcatggaagtagctgagaagctccagctgctgaaccaccggcctgtgactgctgtggagatccagctgatggtggaagagagtgaagagcggctcacggaggagcagattgaagctcttctccacaccgtcaccagcattctgcctgcagagccagaggctgagcagaagaagaatacaaacagcaatgtggcaatggacgaagaggacccagcatagaagagcacagctggccccggcgtttcatgaagtcagaaggcctggcagccatttcctggacgttgagaggattgtttatttgatttttatcctcatcccagcaggcctggctttgtggttagttgggtacatcacaaaaataagttaaaaagaa

SEQ ID NO: 116842 - DNA, 942 bp, Homo sapiens
  Payload ID: 2783
  Gene Symbol: CRCP
  Gene Name: CGRP receptor component
  Uniprot ID: O75575
  ENST ID: ENST00000431089
  CDS Start-End: 4-429
ggcatgcagcgcggcgatcccggcgagcaccttggcgcgcggagctggcaccttggcgctgttggtggcggcggagacagctgtgaagtgaaggatgccaattctgcgcttctcagtaactacgagacgttaaaatacatatcaaaaacaccatgcaggcaccagagtcctgaaattgtcagagaatttctcacagcattgaaaagccacaagttgaccaaagctgagaagctccagctgctgaaccaccggcctgtgactgctgtggagatccagctgatggtggaagagagtgaagagcggctcacggaggagcagattgaagctcttctccacaccgtcaccagcattctgcctgcagagccagaggctgagcagaagaagaatacaaacagcaatgtggcaatggacgaagaggacccagcatagaagagcacagctggccccggcgtttcatgaagtcagaaggcctggcagccatttcctggacgttgagaggattgtttatttgatttttatcctcatcccagcaggcctggctttgtggttagttgggtacatcacaaaaataagttaaaaagaaatatttgtgccttggggagaagaaacatggtgaaaacaggctgaggttgtcagggcagagagctgaaggtggggacagtgaccgcggacccctctgtgcttgaaagatttcctccacggcctttgccccagttgtggggaggtctctgtgcacagcggggaaaatgcttgtgtcgcctttggtgggccatgtcctaattagtttcatctgcttccctgggaacttactaaggggcccagagcactgttggaagtctggttagagtccccagagagttactctaagttaaaatgagccactgaccttggctcaccttagaggaatttcctcgagaacaacagagataagaaaagaaccgg

SEQ ID NO: 116843 - DNA, 566 bp, Homo sapiens
  Payload ID: 2784
  Gene Symbol:
  Gene Name: CH17-140K24.5
  ENST ID: ENST00000623407
  CDS Start-End: 152-292
aagaatagctgagccagagcgaacgtgagtgtgaaacctctttaagacaccgttgggctgcttggttctgacattctggactgcaaaacagttctactaggatcctggggatacatgaagcttctgtgaaccaacttttcaagaaaaagcaatggagattggatggatgcacaatcggagacaaagcaatgaagaatttttaaataaacacaaaaattgggcacagccatttgactgtgttggaagccacaaggtggcgctgcagactgaagagacggaggaacaaaattgaccagaatgctacggaagtccttgacaaaaaggaaacactgagacagatgggctgagaagaagagctgtcgagtccctgattgggaaaggaaaaattaaaaaccctagatctctggtacacataagtctgggtttgcgattgctatttgtgctggggcagtgtgattgagactgacattgaggaaagaagcagctatgaagaccagggggttcagctttccaagacaaaggtgcactggacagagagagcaaagctgagtacaacatcaccatca

SEQ ID NO: 116844 - DNA, 566 bp, Homo sapiens
  Payload ID: 2784
  Gene Symbol:
  Gene Name: CH17-140K24.5
  ENST ID: ENST00000623884
  CDS Start-End: 132-272
gaacgtgagtgtgaaacctctttaagacaccgttgggctgcttggttctgacattctggactgcaaaacagttctactaggatcctggggatacatgaagcttctgtgaaccaacttttcaagaaaaagcaatggagattggatggatgcacaatcggagacaaagcaatgaagaatttttaaataaacacaaaaattgggcacagccatttgactgtgttggaagccacaaggtggcgctgcagactgaagagacggaggaacaaaattgaccagaatgctacggaagtccttgacaaaaaggaaacactgagacagatgggctgagaagaagagctgtcgagtccctgattgggaaaggaaaaattaaaaaccctagatctctggtacacataagtctgggtttgcgattgctatttgtgctggggcagtgtgattgagactgacattgaggaaagaagcagctatgaagaccagggggttcagctttccaagacaaaggcaagtcctgtttctttttcttttctggggagtgtccttggcaggttctgggtttggacgttatt

SEQ ID NO: 116845 - DNA, 548 bp, Homo sapiens
  Payload ID: 2785
  Gene Symbol:
  Gene Name: CH17-140K24.8
  ENST ID: ENST00000624396
  CDS Start-End: 135-242
gcattaaaggagcttcgcctacagagctgctggaggatacactctccagggggttcctgttaaaaaccagagcttcagcttccaaaattacggctgagcttcagtttttccacaagagattgcctaaaggaaccatggagatcagaggggcactcgatctgcgaaaaaggttatcaacgcacagatcgatcactgcctctgtcccatcgctccctgaagtagctctgactccggttccttgaaaggggcgtgtacagaagtaaagatggagcctgcaggggagcgctttcccgaacaaaggcaagtcctgattctccttcttttactggaagtgactctggcaggctgggaaccccgtcgctattctgtgatggaggaaacagagagaggttcttttgtagccaacctggccaatgacctagggctgggagtgggggagctagccgagcggggagcccgggtagtttctgaggataacgaacaaggcttgcagcttgatctgcagaccgggcagttgatattaaatgagaagctggaccgggagaagc

SEQ ID NO: 116846 - DNA, 353 bp, Homo sapiens
  Payload ID: 2786
  Gene Symbol:
  Gene Name: CH17-212P11.5
  ENST ID: ENST00000615784
  CDS Start-End: 1-353
atggactgcacctggaggatcctcctcttggtggcagcagctacaggcacccacgccgaggtccagctggtacagtctggggctgaggtgaagaagcctggggctacagtgaaaatctcctgcaaggtttctggatacaccttcaccgactactacatgcactgggtgcaacaggcccctggaaaagggcttgagtggatgggacttgttgatcctgaagatggtgaaacaatatacgcagagaagttccagggcagagtcaccataaccgcggacacgtctacagacacagcctacatggagctgagcagcctgagatctgaggacacggccgtgtattactgtgcaacaga

SEQ ID NO: 116847 - DNA, 353 bp, Homo sapiens; identical to SEQ ID NO: 116846
  Payload ID: 2786
  Gene Symbol:
  Gene Name: CH17-212P11.5
  ENST ID: ENST00000632209
  CDS Start-End: 1-353

SEQ ID NO: 116848 - DNA, 356 bp, Homo sapiens
  Payload ID: 2787
  Gene Symbol:
  Gene Name: CH17-212P11.6
  ENST ID: ENST00000632052
  CDS Start-End: 1-356
atggctcctcaccatggacaggacctagagctaatcttcctggtggcagcagctacaggtaaggtgcagctggggcagtctgaggctgaggtgaagaagcctggggcctcagtgaaggtctcctgcaaggcttccggatacaccttcacctactgctccttgcactggttgcaacaggcccctggacaagggcttgaaaggatgagatggatcacactttacaatggtaacaccaactatgcaaagaagttccagggcagagtcaccattaccagggacatgtccctgaggacagcctacatagagctgagcagcctgagatctgaggactcggctgtgtattactgggcaagata

SEQ ID NO: 116849 - DNA, 356 bp, Homo sapiens
  Payload ID: 2787
  Gene Symbol:
  Gene Name: CH17-212P11.6
  ENST ID: ENST00000632507
  CDS Start-End: 1-356
atggctcctcaccatggacaggacctagagctaatcttcctggtggcagcagctacaggtaaggtgcagctggggcagtctgaggctgaggtaaagaagcctggggcctcagtgaaggtctcctgcaaggcttccggatacaccttcacttgctgctccttgcactggttgcaacaggcccctggacaagggcttgaaaggatgagatggatcacactttacaatggtaacaccaactatgcaaagaagttccagggcagagtcaccattaccagggacatgtccctgaggacagcctacatagagctgagcagcctgagatctgaggactcggctgtgtattactgggcaagata

SEQ ID NO: 116850 - DNA, 353 bp, Homo sapiens
  Payload ID: 2788
  Gene Symbol:
  Gene Name: CH17-224D4.1
  ENST ID: ENST00000632099
  CDS Start-End: 1-353
atggagttctggctgagctgggttctccttgttgccattttaaaagatgtccagtgtgaggtgcagctggtggagtctgggggaggcttggtccagcctggggggtccctgagactctcctgttcagcctctggattcaccttcagtagctatgctatgcactgggtccgccaggctccagggaagggactggaatatgtttcagctattagtagtaatgggggtagcacatactacgcagactccgtgaagggcagattcaccatctccagagacaattccaagaacacgctgtatcttcaaatgagcagtctgagagctgaggacacggctgtgtattactgtgtgaaaga

SEQ ID NO: 116851 - DNA, 353 bp, Homo sapiens; identical to SEQ ID NO: 116850
  Payload ID: 2788
  Gene Symbol:
  Gene Name: CH17-224D4.1
  ENST ID: ENST00000632333
  CDS Start-End: 1-353

SEQ ID NO: 116852 - DNA, 353 bp, Homo sapiens
  Payload ID: 2789
  Gene Symbol:
  Gene Name: CH17-224D4.2
  ENST ID: ENST00000632950
  CDS Start-End: 1-353
atggggtcaaccgccatcctcgccctcctcctggctgttctccaaggagtctgtgccgaagtgcagctggtgcagtccggagcagaggtgaaaaagcccggggagtctctgaggatctcctgtaagggttctggatacagctttaccagctactggatcagctgggtgcgccagatgcccgggaaaggcctggagtggatggggaggattgatcctagtgactcttataccaactacagcccgtccttccaaggccacgtcaccatctcagctgacaagtccatcagcactgcctacctgcagtggagcagcctgaaggcctcggacaccgccatgtattactgtgcgagaca

SEQ ID NO: 116853 - DNA, 353 bp, Homo sapiens; identical to SEQ ID NO: 116852
  Payload ID: 2789
  Gene Symbol:
  Gene Name: CH17-224D4.2
  ENST ID: ENST00000633752
  CDS Start-End: 1-353

SEQ ID NO: 116854 - DNA, 402 bp, Homo sapiens
  Payload ID: 2790
  Gene Symbol:
  Gene Name: CH17-262H11.1
  ENST ID: ENST00000631943
  CDS Start-End: 50-402
acaaccacacccctcctaagaagaagcccctagaccacagctccacaccatggactggacctggaggatcctcttcttggtggcagcagcaacaggtgcccactcccaggtgcagctggtgcaatctgggtctgagttgaagaagcctggggcctcagtgaaggtttcctgcaaggcttctggatacaccttcactagctatgctatgaattgggtgcgacaggcccctggacaagggcttgagtggatgggatggatcaacaccaacactgggaacccaacgtatgcccagggcttcacaggacggtttgtcttctccttggacacctctgtcagcacggcatatctgcagatctgcagcctaaaggctgaggacactgccgtgtattactgtgcgagaga

SEQ ID NO: 116855 - DNA, 402 bp, Homo sapiens; identical to SEQ ID NO: 116854
  Payload ID: 2790
  Gene Symbol:
  Gene Name: CH17-262H11.1
  ENST ID: ENST00000633833
  CDS Start-End: 50-402

SEQ ID NO: 116856 - DNA, 192 bp, Homo sapiens
  Payload ID: 2791
  Gene Symbol:
  Gene Name: CH17-270A2.2
  ENST ID: ENST00000625258
  CDS Start-End: 62-192
cgattcccatccttacgaccgaggaaaaaagaatgtggagcgttattcagacaaatatcagatgtcaggtccgattgacaatgccatcgattggaaccctgattggcggcgtctaccccgggagctaaagatccgagtgcggaagctacagaaggaacggattacaattctgctccccaagaggccccctaa

SEQ ID NO: 116857 - DNA, 699 bp, Homo sapiens; identical to SEQ ID NO: 103627
  Payload ID: 2792
  Gene Symbol:
  Gene Name: CH17-5A7.1
  ENST ID: ENST00000617392
  CDS Start-End: 1-699

SEQ ID NO: 116858 - DNA, 462 bp, Homo sapiens; identical to SEQ ID NO: 103623
  Payload ID: 2792
  Gene Symbol:
  Gene Name: CH17-5A7.1
  ENST ID: ENST00000620107
  CDS Start-End: 1-462

SEQ ID NO: 116859 - DNA, 984 bp, Homo sapiens
  Payload ID: 2792
  Gene Symbol:
  Gene Name: CH17-5A7.1
  ENST ID: ENST00000632371
  CDS Start-End: 1-655
cacggatgtacagcagagagccaggaggtccaactgccgtagacaggaaggaattaaaattgtcctggaagacatctttactttatggagacaggtggaaaccaaagttcgagctaaaatccgtaagatgaaggtgacaacaaaagtcaaccgtcatgacaaaatcaatggaaagaggaagaccgccaaagaacatctgaggaaactaagcatgaaagaacgtgagcacggagaaaaggagaggcaggtgtcagaggcagaggaaaatgggaaattggatatgaaagaaatacacacctacatggaaatgtttcaacgtgcgcaagcgttgcggcggcgggcagaggactactacagatgcaaaatcaccccttctgcaagaaagcctctttgcaaccgggtaagtttgcttgttttccttgcttttggacatagtctgccaggtcaggacatggatacatttttctccctacggctctgtgctcaagccctgcagagggagatggcagagaggaaggctgcctacaagcatcacagtcccatccctgttggtaactgtgttgcgcaaaaacaccttcatccccacccagtggggcccccatctaatattctaagtatcagaggttccgtatttgtaatagcaaatgggccctgactgtaaattagtgaagagtgaatgtaacttattacccacagggacaattccaaatgagggccttaaatgatgctcagctaagctggttcttgtgtggcctctgtaccttcaaaagctgccgagtcctatgattacacgtgatgggacttgtacacttgaagtgaaacacagttttaaaacttgctttgtttagaattcccacctcatttttccatggacaaaagtattctttatgtcctagtgcacttacaatttggtattacctgggagtgaaaagaaatattacagccatgcctaactgacttcttgaggtaagattgttctgtcag

SEQ ID NO: 116860 - DNA, 1547 bp, Homo sapiens
  Payload ID: 2792
  Gene Symbol:
  Gene Name: CH17-5A7.1
  ENST ID: ENST00000634011
  CDS Start-End: 412-1521
acccgctgagcgtcgacacagtcgctgttggcctggtgtccagcgtggttgtctatcccgtctacctggccatcctctttctcttccggatgtcccggagcaaggtggctgggagcccgagccccacacctgccgggcagcaggtgctggacgtcgacagctgcctggactcatccgtgctggacagctccttcctcacgttctcaggcctccacgctgaggtgagggctctactgggggtcctgccgccttggcgcagcttggactcaagaccctgtgcacctctcagcaggcctttgctggacagatgaagagtgacttgtttctggatgattctaagaggttgatggacggatggctacatggatgtgatggagatggtttactatcgggaccttccgcatcctgctgatgttttgttgcttaggatatgaatggctgagcggaggctgtaaaacctggcactctgcttgggttatcaatactctggctgaccatcgtcatcgtgggactgactttggtggaagtccttggttacttatcattactgtgtttctgagaagttataaatttgccatctccctctgcacaagttacctttgtgtgtctttcctgaagactatcttcccgtctcaaaatggacatgatggatccacggatgtacagcagagagccaggaggtccaactgccgtagacaggaaggaattaaaattgtcctggaagacatctttactttatggagacaggtggaaaccaaagttcgagctaaaatccgtaagatgaaggtgacaacaaaagtcaaccgtcatgacaaaatcaatggaaagaggaagaccgccaaagaacatctgaggaaactaagcatgaaagaacgtgagcacggagaaaaggagaggcaggtgtcagaggcagaggaaaatgggaaattggatatgaaagaaatacacacctacatggaaatgtttcaacgtgcgcaagcgttgcggcggcgggcagaggactactacagatgcaaaatcaccccttctgcaagaaagcctctttgcaaccgggtcagaatggcggcagtggagcatcgtcattcttcaggattgccctactggccctacctcacagctgaaactttaaaaaacaggatgggccaccagccacctcctccaactcaacaacattctataattgataactccctgagcctcaagacaccttccgagtgtgtgctctatccccttccaccctcagcggatgataatctcaagacacctcccgagtgtctgctcactccccttccaccctcagctctaccctcagcggatgataatctcaagacacctgccgagtgcctgctctatccccttccaccctcagcggatgataatctcaagacacctcccgagtgtctgctcactccccttccaccctcagctccaccctcagcggatgataatctcaagacacctcctgagtgtgtctgctcactccccttccaccctcagcggatgataatctcaagaaactaaggaagaataaataaataatataaaaa

SEQ ID NO: 116861 - DNA, 1522 bp, Homo sapiens
  Payload ID: 2792
  Gene Symbol:
  Gene Name: CH17-5A7.1
  ENST ID: ENST00000631590
  CDS Start-End: 308-1006
gtggctgggagcccgagccccacacctgccgggcagcaggtgctggacgtcgacagctgcctggactcatccgtgctggacagctccttcctcacgttctcaggcctccacgctgaggtgagggctctactgggggtcctgccgccttggcgcagcttggactcaagaccctgtgcacctctcagcaggcctttgctggacagatgaagagtgacttgtttctggatgattctaagaggttgatggacggatggctacatggatgtgatggagatggtttactatcgggaccttccgcatcctgctgatgttttgttgcttaggatatgaatggctgagcggaggctgtaaaacctggcactctgcttgggttatcaatactctggctgaccatcgtcatcgtgggactgactttggtggaagtccttggttacttatcattactgtgtttctgagaagttataaatttgccatctccctctgcacaagttacctttgtgtgtctttcctgaagactatcttcccgtctcaaaatggacatgatggatccacggatgtacagcagagagccaggaggtccaactgccgtagacaggaaggaattaaaattgtcctggaagacatctttactttatggagacaggtggaaaccaaagttcgagctaaaatccgtaagatgaaggtgacaacaaaagtcaaccgtcatgacaaaatcaatggaaagaggaagaccgccaaagaacatctgaggaaactaagcatgaaagaacgtgagcacggagaaaaggagaggcaggtgtcagaggcagaggaaaatgggaaattggatatgaaagaaatacacacctacatggaaatgtttcaacgtgcgcaagcgttgcggcggcgggcagaggactactacagatgcaaaatcaccccttctgcaagaaagcctctttgcaaccggtgcacttacaatttggtattacctgggagtgaaaagaaatattacagccatgcctaactgacttcttgaggtcagaatggcggcagtggagcatcgtcattcttcaggattgccctactggccctacctcacagctgaaactttaaaaaacaggatgggccaccagccacctcctccaactcaacaacattctataattgataactccctgagcctcaagacaccttccgagtgtgtgctctatccccttccaccctcagcggatgataatctcaagacacctcccgagtgtctgctcactccccttccaccctcagctctaccctcagcggatgataatctcaagacacctgccgagtgcctgctctatccccttccaccctcagcggatgataatctcaagacacctcccgagtgtctgctcactccccttccaccctcagctccaccctcagcggatgataatctcaagacacctcctgagtgtgtctgctcactccccttccaccctcagcggatgataatctcaagaaactaaggaagaataaataaataatataaaaataaaatgaa

SEQ ID NO: 116862 - DNA, 354 bp, Homo sapiens
  Payload ID: 2793
  Gene Symbol:
  Gene Name: CH17-60O17.5
  ENST ID: ENST00000616593
  CDS Start-End: 1-354
atgaaacacctgtggttcttcctcctcctggtggcagctcccagatgggtcctgtcccagctgcagctgcaggagtcgggcccaggactggtgaagccttcacagaccctgtccctcacctgcactgtctctggtggctccatcagcagtggtgattactactggagctggatccgccagcccccagggaagggcctggagtggattgggtacatctattacagtgggagcacctactacaacccgtccctcaagagtcgagttaccatatcagtagacacgtccaagaaccagttctccctgaagctgagctctgtgactgccgcagacacggccgtgtattactgtgccaga

SEQ ID NO: 116863 - DNA, 349 bp, Homo sapiens
  Payload ID: 2793
  Gene Symbol:
  Gene Name: CH17-60O17.5
  ENST ID: ENST00000633570
  CDS Start-End: 1-349
atgaaacacctgtggttcttcctcctgctggtggcagctcccagatgggtcctgtcccagctgcagctgcaggagtcgggcccaggactggtgaagccttcacagaccctgtccctcacctgcactgtctctggtggctccatcagcagtggtgattactactggagctggatccgccagcccccagggaagggcctggagtggattgggtacatctattacagtgggagcacctactacaacccgtccctcaagagtcgagttaccatatcagtagacacgtccaagaaccagttctccctgaagctgagctctgtgactgccgcagacacggccgtgtattactgtg

SEQ ID NO: 116864 - DNA, 353 bp, Homo sapiens
  Payload ID: 2794
  Gene Symbol:
  Gene Name: CH17-60O17.7
  ENST ID: ENST00000631869
  CDS Start-End: 1-353
atggagtttgggctgagctgggttttcctcgttgctcttttaagaggtgtccagtgtcaggtgcagctggtggagtctgggggaggcgtggtccagcctggggggtccctgagactctcctgtgcagcgtctggattcaccttcagtagctatggcatgcactgggtccgccaggctccaggcaaggggctggagtgggtggcatttatacggtatgatggaagtaataaatactatgcagactccgtgaagggccgattcaccatctccagagacaattccaagaacacgctgtatctgcaaatgaacagcctgagagctgaggacacggctgtgtattactgtgcgaaaga

SEQ ID NO: 116865 - DNA, 4705 bp, Homo sapiens
  Payload ID: 2795
  Gene Symbol:
  Gene Name: CH507-42P11.8
  ENST ID: ENST00000613488
  CDS Start-End: 134-2485
atgcggcgcggccccggaggcagcagcagcggcggcggcagccggagcagtaggcacccgagcagcgccagcggccgagcgggcggcttcctggcctgggcgctccggtggcggcggaggtgcgcgcggagccatggttatcatgtcggagttcagcgcggaccccgcgggccagggtcagggccagcagaagcccctccgggtgggtttttacgacatcgagcggaccctgggcaaaggcaacttcgcggtggtgaagctggcgcggcatcgagtcaccaaaacgcaggttgcaataaaaataattgataaaacacgattagattcaagcaatttggagaaaatctatcgtgaggttcagctgatgaagcttctgaaccatccacacatcataaagctttaccaggttatggaaacaaaggacatgctttacatcgtcactgaatttgctaaaaatggagaaatgtttgattatttgacttccaacgggcacctgagtgagaacgaggcgcggaagaagttctggcaaatcctgtcggccgtggagtactgtcacgaccatcacatcgtccaccgggacctcaagaccgagaacctcctgctggatggcaacatggacatcaagctggcagattttggatttgggaatttctacaagtcaggagagcctctgtccacgtggtgtgggagccccccgtatgccgccccggaagtctttgaggggaaggagtatgaaggcccccagctggacatctggagcctgggcgtggtgctgtacgtcctggtctgcggttctctccccttcgatgggcctaacctgccgacgctgagacagcgggtgctggagggccgcttccgcatccccttcttcatgtctcaagactgtgagagcctgatccgccgcatgctggtggtggaccccgccaggcgcatcaccatcgcccagatccggcagcaccggtggatgcgggctgagccctgcttgccgggacccgcctgccccgccttctccgcacacagctacacctccaacctgggcgactacgatgagcaggcgctgggtatcatgcagaccctgggcgtggaccggcagaggacggtggagtcactgcaaaacagcagctataaccactttgctgccatttattacctcctccttgagcggctcaaggagtatcggaatgcccagtgcgcccgccccgggcctgccaggcagccgcggcctcggagctcggacctcagtggtttggaggtgcctcaggaaggtctttccaccgaccctttccgacctgccttgctgtgcccgcagccgcagaccttggtgcagtccgtcctccaggccgagatggactgtgagctccagagctcgctgcagtggcccttgttcttcccggtggatgccagctgcagcggagtgttccggccccggcccgtgtccccaagcagcctgctggacacagccatcagtgaggaggccaggcaggggccgggcctagaggaggagcaggacacgcaggagtccctgcccagcagcacgggccggaggcacaccctggccgaggtctccacccgcctctccccactcaccgcgccatgtatagtcgtctccccctccaccacggcaagtcctgcagagggaaccagctctgacagttgtctgaccttctctgcgagcaaaagccccgcggggctcagtggcaccccggccactcaggggctgctgggcgcctgctccccggtcaggctggcctcgcccttcctggggtcgcagtccgccaccccagtgctgcaggctcaggggggcttgggaggagctgttctgctccctgtcagcttccaggagggacggcgggcgtcggacacctcactgactcaagggctgaaggcctttcggcagcagctgaggaagaccacgcggaccaaagggtttctgggactgaacaaaatcaaggggctggctcgccaggtgtgccaggtccctgccagccgggccagcaggggcggcctgagccccttccacgcccctgcacagagcccaggcctgcacggcggcgcagccggcagccgggagggctggagcctgctggaggaggtgctagagcagcagaggctgctccagttacagcaccacccggccgctgcacccggctgctcccaggccccccagccggcccctgccccgtttgtgatcgccccctgtgatggccctggggctgccccgctccccagcaccctcctcacgtcggggctcccgctgctgccgcccccactcctgcagaccggcgcgtccccggtggcctcagcggcgcagctcctggacacacacctgcacattggcaccggccccaccgccctccccgctgtgcccccaccacgcctggccaggctggccccaggttgtgagcccctggggctgctgcagggggactgtgagatggaggacctgatgccctgctccctaggcacgtttgtcctggtgcagtgagggcagccctgcatcctggcacggacactgactcttacagcaataacttcagaggaggtgaagacatctggcctcaaagccaagaactttctagaagcgaaataagcaatacgttaggtgttttggctttttagtttatttttgttttatttttttcttgcactgagtgacctcaactttgagtagggactggaaactttaggaagaaagataattgaggggcgtgtctgggggcgggggcaggaggggagcggggtggagggaacacgtgcagtgccgtggtgtggggatctcggcccctctctctgggttcgtcgtggttgagatgattacctcggacgtctacggaaacgagcgggcgcattgttgtccgcttgtgtgtgtgtgtgtgtgtgtgtgtgtgcgcgtacattgattactatccatttctttagtcaacgctctccacttcctgatttctgctttaaggaaaactgtgaactttctgcttcatgtatcagttttaaagcagcccaggcaaagatcatctacagattctaggaattctctcccctgaaatcaaaacctggaagacttttttttcttattttagttgagaagtttcataaactgctcaaggattagttttccaggactctgcggaggaacggcaggaagaacctcagagagggcagaggtgacttcaaagtgctggggactccgtcctgagggtcacttggccctgagcccctgcgtgcccttgcggaagcccagaagcttcttcctgctgcacctcccgtttccgctgctgctgacgtttatgcatttcatgatggggtccaacaagaacacctgacttgggtgaagttgtgcaatattggaggctgactgtagggctgggcagctgggagacaggctcatggctcatggctcatggctcagggcggtgcctgccctgggccgggacccccctccccaccccccacctaggctttttgggttttgttcaaggaaggtaaagtgagaggtttaggtcagtgtttttaagtttttgttttttttttaaagcaaatcctgtatatgtatctacatgggagacaggtagacactacttatttgttacattttgtactacacgtttgtgttccaggtttcagcttccctcgctcctgttgttaagaagcgtccctgtcagcacaggtgtgcattgaggaaggggccccagggccttcgctccctcagcactggggtggaggcggcaggaaggggcggcccttacctggcaggtctgggcgcacctttagcaggtggactccgtggggctccaccagccagaagcctttggaaggcaacgaaggcaatgctgctccctgagtccagtccccgcccccaaacccagcccaggtgccttcagctacttcggcttcttaaaccctgcagtgttaaacagaggcattgagaaaggggaaaggcgggtatttttaaaagccaaagattgacccagttacttgagggtagggaggcgggcccagtgcaggaggctgcatccctggcctgctggtgcccaccgggggctgtgcctgtgccgggccgcagggaagctggctgcccccattcctgctgctgctgctgctgctgctctgtggctgtttcaaagactgggcgaaaggctgtccggagggcagaccaggtgccttgccgcagagaaaacaccaaagtctcctgttcgctcataaagaagtttttgggatgggagagaatccagaccatcttggggcagccaggcccttgccttcatttttacagaggtagcacaattgattccaacacaaaactccttcccctttttaaaatgatttctgttctaatgccatagatcaaaggcctcagaaaccattgtgtgtttcctctttgaagcaatgacaagcactttactttcacggtggtttttgttttttcttattgctgtggaacctcttttggaggacgttaaaggcgtgttttacttgtttttttaagagtgtgtgatgtgtgttttgtagatttcttgacagtgctgtaatacagacggcaatgcaatagcctatttaaagacactacgtgatctgattgagatgtacatagtttttttttttaccataactgaattattttatctcttatgttaacatgagaaatgtatgccaaatgattagttgatgtatgttttttaatttaatatttaaataaaatatttggaag

SEQ ID NO: 116866 - DNA, 1162 bp, Homo sapiens
  Payload ID: 2796
  Gene Symbol:
  Gene Name: CH507-9B2.1
  ENST ID: ENST00000612610
  CDS Start-End: 188-1117
gacacggctgcctccagcacaccgcgcgctgggcgctcagagcctcgggcgcggcgggagcgcagttagagccgatctcccgcgccccgaggttgctcctctccgaggtctcccgcggcccaagttctccgcgccccgaggtctccgcgccccgaggtctccgcggcccgaggtctccgcccgcaccatgcggctgggcagtcctggactgctcttcctgctcttcagcagccttcgagctgatactcaggagaaggaagtcagagcgatggtaggcagcgacgtggagctcagctgcgcttgccctgaaggaagccgttttgatttaaatgatgtttacgtatattggcaaaccagtgagtcgaaaaccgtggtgacctaccacatcccacagaacagctccttggaaaacgtggacagccgctaccggaaccgagccctgatgtcaccggccggcatgctgcggggcgacttctccctgcgcttgttcaacgtcaccccccaggacgagcagaagtttcactgcctggtgttgagccaatccctgggattccaggaggttttgagcgttgaggttacactgcatgtggcagcaaacttcagcgtgcccgtcgtcagcgccccccacagcccctcccaggatgagctcaccttcacgtgtacatccataaacggctaccccaggcccaacgtgtactggatcaataagacggacaacagcctgctggaccaggctctgcagaatgacaccgtcttcttgaacatgcggggcttgtatgacgtggtcagcgtgctgaggatcgcacggacccccagcgtgaacattggctgctgcatagagaacgtgcttctgcagcagaacctgactgtcggcagccagacaggaaatgacatcggagagagagacaagatcacagagaatccagtcagtaccggcgagaaaaacgcggccacgtggagcatcctggctgtcctgtgcctgcttgtggtcgtggcggtggccataggctgggtgtgcagggaccgatgcctccaacacagctatgcaggtgcctgggctgtgagtccggagacagagctcactgaatcctggaacctgctccttctgctctcgtgactgactgtgttctctatgcaacttccaataaaacctcttcatttg

SEQ ID NO: 116867 - DNA, 816 bp, Homo sapiens
  Payload ID: 2796
  Gene Symbol:
  Gene Name: CH507-9B2.1
  ENST ID: ENST00000620481
  CDS Start-End: 188-766
gacacggctgcctccagcacaccgcgcgctgggcgctcagagcctcgggcgcggcgggagcgcagttagagccgatctcccgcgccccgaggttgctcctctccgaggtctcccgcggcccaagttctccgcgccccgaggtctccgcgccccgaggtctccgcggcccgaggtctccgcccgcaccatgcggctgggcagtcctggactgctcttcctgctcttcagcagccttcgagctgcaaacttcagcgtgcccgtcgtcagcgccccccacagcccctcccaggatgagctcaccttcacgtgtacatccataaacggctaccccaggcccaacgtgtactggatcaataagacggacaacagcctgctggaccaggctctgcagaatgacaccgtcttcttgaacatgcggggcttgtatgacgtggtcagcgtgctgaggatcgcacggacccccagcgtgaacattggctgctgcatagagaacgtgcttctgcagcagaacctgactgtcggcagccagacaggaaatgacatcggagagagagacaagatcacagagaatccagtcagtaccggcgagaaaaacgcggccacgtggagcatcctggctgtcctgtgcctgcttgtggtcgtggcggtggccataggctgggtgtgcagggaccgatgcctccaacacagctatgcaggtgcctgggctgtgagtccggagacagagctcactgaatcctggaacctgctccttctgctctcgtgactgactgtgttctctatgcaacttccaataaaacctcttcatttgaaagg

SEQ ID NO: 116868 - DNA, 3274 bp, Homo sapiens
  Payload ID: 2796
  Gene Symbol:
  Gene Name: CH507-9B2.1
  ENST ID: ENST00000623960
  CDS Start-End: 187-1095
acacggctgcctccagcacaccgcgcgctgggcgctcagagcctcgggcgcggcgggagcgcagttagagccgatctcccgcgccccgaggttgctcctctccgaggtctcccgcggcccaagttctccgcgccccgaggtctccgcgccccgaggtctccgcggcccgaggtctccgcccgcaccatgcggctgggcagtcctggactgctcttcctgctcttcagcagccttcgagctgatactcaggagaaggaagtcagagcgatggtaggcagcgacgtggagctcagctgcgcttgccctgaaggaagccgttttgatttaaatgatgtttacgtatattggcaaaccagtgagtcgaaaaccgtggtgacctaccacatcccacagaacagctccttggaaaacgtggacagccgctaccggaaccgagccctgatgtcaccggccggcatgctgcggggcgacttctccctgcgcttgttcaacgtcaccccccaggacgagcagaagtttcactgcctggtgttgagccaatccctgggattccaggaggttttgagcgttgaggttacactgcatgtggcagcaaacttcagcgtgcccgtcgtcagcgccccccacagcccctcccaggatgagctcaccttcacgtgtacatccataaacggctaccccaggcccaacgtgtactggatcaataagacggacaacagcctgctggaccaggctctgcagaatgacaccgtcttcttgaacatgcggggcttgtatgacgtggtcagcgtgctgaggatcgcacggacccccagcgtgaacattggctgctgcatagagaacgtgcttctgcagcagaacctgactgtcggcagccagacaggaaatgacatcggagagagagacaagatcacagagaatccagtcagtaccggcgagaaaaacgcggccacgtggagcatcctggctgtcctgtgcctgcttgtggtcgtggcggtggccataggctgggtgtgcagggaccgatgcctccaacacagctatgcaggtgcctgggctgtgagtccggagacagagctcactggccacgtttgaccggagctcaccgcccagagcgtggacagggcttccgtgagacgccaccgtgagaggccaggtggcagcttgagcatggactcccagactgcaggggagcacttggggcagcccccagaaggaccactgctggatcccagggagaacctgctggcgttggctgtgatcctggaatgaggccctttcaaaagcgtcatccacaccaaaggcaaatgtccccaagtgagtgggctccccgctgtcactgccagtcacccacaggaagggactggtgatgggctgtctctacccggagcgtgcgggattcagcaccaggctcttcccagtaccccagacccactgtgggtcttcccgtgggatgcgggatcctgagaccgaagggtgtttggtttaaaaagaagactgggcgtccgctcttccaggacggcctctgtgctgctggggtcacgcgaggctgtttgcaggggacacggtcacaggagctcttctgccctgaacgctcccaacctgcctcccgcccggaagccacaggacccactcatgtgtgtgcccacaagtgtagttagccgtccacaccgaggagcccccggaagtccccactgggcttcagtgtcctctgccacattccctgggaggaacaatgtccctcggctgttccggtgaaaagttgagccacctttggaagacgcacgggtggagtttgccagaagaaaggctgtgccagggccgtgtttggctacaggggctgccggggctcttggctctgcagcgagaaagacacagcccagcagggctggagacgcccatgtccagcaggcgcaggcctggcaacacggtccccagagtcctgagcagcagttaggtgcatggagagggtatcacctggtggccacagtcccccttctcacctcagcaatgatccccaaagtgagaggtggctcccccggcccccaccaccctcagcagccccaccccactcaaccctgagggtccccagggtcctgatgaagacctccgaccccagcgccaggctcctcggagcccaacagtcccaagggggcagtgctgaggggtacagccctgggccctgaccagccccggcacctgccatgctggttcccggaatgaatcagctgctgactgtctccagaagggctggaaaggatgctgccaggtgacccgaggtgcactcgccccagggagatggagtagacagcctggcctggccctcgggacacattgtctgccccggggctatgggcaaatgcccctccttcttacttcccagaatcccctgacattcccagggtcagccaggacctgttacagccctggtcacttggaactgacagctgtgtgaggcctgcacttctcagacccagacttagaacaaaaggaggagtgaggactcaaggctacaatgaggttccagtacttgttacaagaaattggttttctgcaaaaaaagtccctacctgggcctttaggtgaatgtgggatccactcccgcttttaacatgaaagcattagaagatgtgtggtgtttataaaagaacagttgtcatcaccgggcattgattggcagggacaaggagctgcttgggtgtggaaagttggggcgttggaaagtgggctgtggtgcccatttgcagtgactgtgaagtgactccaggacggacctgcgggggcacccagagatcctaagccccaggactgagggtcgtgcatcaccactcgggtgtcccgggaggtgccctgggcccggggacctcacaggcaggacggcgacactaatgcagggagagggagtctggccccagcttttcctatcagaggcgattttccttcaccaggggatgggcaggaaagaggcaggggccccagaagcttctgtccctcatgcctgagggcacgggggacacttggaggctgctgtcaccactgtgcgtccaaggccatgctctctgcgggtcagtgcctgagtctcgcctccctgctggtccctgaagccccctcagaagccctgcctgtcacgtcggcatttgtgagacctaccctgtaacgcctgcccctctcagcccaacatcagcttcctctttctcccttgctgtagacaggctggattccagtgttgggacagccatctccagaaacctgacttaagagagtaagatgcaaa

SEQ ID NO: 116869 - DNA, 998 bp, Homo sapiens
  Payload ID: 2796
  Gene Symbol:
  Gene Name: CH507-9B2.1
  ENST ID: ENST00000623903
  CDS Start-End: 150-383
agagcctcgggcgcggcgggagcgcagttagagccgatctcccgcgccccgaggttgctcctctccgaggtctcccgcggcccaagttctccgcgccccgaggtctccgcgccccgaggtctccgcggcccgaggtctccgcccgcaccatgcggctgggcagtcctggactgctcttcctgctcttcagcagccttcgagctgaacagctccttggaaaacgtggacagccgctaccggaaccgagccctgatgtcaccggccggcatgctgcggggcgacttctccctgcgcttgttcaacgtcaccccccaggacgagcagaagtttcactgcctggtgttgagccaatccctgggattccaggaggttttgagcgttgaggttacactgcatgtggcagcaaacttcagcgtgcccgtcgtcagcgccccccacagcccctcccaggatgagctcaccttcacgtgtacatccataaacggctaccccaggcccaacgtgtactggatcaataagacggacaacagcctgctggaccaggctctgcagaatgacaccgtcttcttgaacatgcggggcttgtatgacgtggtcagcgtgctgaggatcgcacggacccccagcgtgaacattggctgctgcatagagaacgtgcttctgcagcagaacctgactgtcggcagccagacaggaaatgacatcggagagagagacaagatcacagagaatccagtcagtaccggcgagaaaaacgcggccacgtggagcatcctggctgtcctgtgcctgcttgtggtcgtggcggtggccataggctgggtgtgcagggaccgatgcctccaacacagctatgcaggtgcctgggctgtgagtccggagacagagctcactggccacgtttgaccggagctcaccgcccagagcgtggacagggcttccgtgagacgccaccgtgagaggccaggtggcagcttgagcatggactcccagactgc

SEQ ID NO: 116870 - DNA, 2238 bp, Homo sapiens
  Payload ID: 2796
  Gene Symbol:
  Gene Name: CH507-9B2.1
  ENST ID: ENST00000623795
  CDS Start-End: 148-705
agcctcgggcgcggcgggagcgcagttagagccgatctcccgcgccccgaggttgctcctctccgaggtctcccgcggcccaagttctccgcgccccgaggtctccgcgccccgaggtctccgcggcccgaggtctccgcccgcaccatgcggctgggcagtcctggactgctcttcctgctcttcagcagccttcgagctgcaaacttcagcgtgcccgtcgtcagcgccccccacagcccctcccaggatgagctcaccttcacgtgtacatccataaacggctaccccaggcccaacgtgtactggatcaataagacggacaacagcctgctggaccaggctctgcagaatgacaccgtcttcttgaacatgcggggcttgtatgacgtggtcagcgtgctgaggatcgcacggacccccagcgtgaacattggctgctgcatagagaacgtgcttctgcagcagaacctgactgtcggcagccagacaggaaatgacatcggagagagagacaagatcacagagaatccagtcagtaccggcgagaaaaacgcggccacgtggagcatcctggctgtcctgtgcctgcttgtggtcgtggcggtggccataggctgggtgtgcagggaccgatgcctccaacacagctatgcaggtgcctgggctgtgagtccggagacagagctcactggccacgtttgaccggagctcaccgcccagagcgtggacagggcttccgtgagacgccaccgtgagaggccaggtggcagcttgagcatggactcccagactgcaggggagcacttggggcagcccccagaaggaccactgctggatcccagggagaacctgctggcgttggctgtgatcctggaatgaggccctttcaaaagcgtcatccacaccaaaggcaaatgtccccaagtgagtgggctccccgctgtcactgccagtcacccacaggaagggactggtgatgggctgtctctacccggagcgtgcgggattcagcaccaggctcttcccagtaccccagacccactgtgggtcttcccgtgggatgcgggatcctgagaccgaagggtgtttggtttaaaaagaagactgggcgtccgctcttccaggacggcctctgtgctgctggggtcacgcgaggctgtttgcaggggacacggtcacaggagctcttctgccctgaacgctcccaacctgcctcccgcccggaagccacaggacccactcatgtgtgtgcccacaagtgtagttagccgtccacaccgaggagcccccggaagtccccactgggcttcagtgtcctctgccacattccctgggaggaacaatgtccctcggctgttccggtgaaaagttgagccacctttggaagacgcacgggtggagtttgccagaagaaaggctgtgccagggccgtgtttggctacaggggctgccggggctcttggctctgcagcgagaaagacacagcccagcagggctggagacgcccatgtccagcaggcgcaggcctggcaacacggtccccagagtcctgagcagcagttaggtgcatggagagggtatcacctggtggccacagtcccccttctcacctcagcaatgatccccaaagtgagaggtggctcccccggcccccaccaccctcagcagccccaccccactcaaccctgagggtccccagggtcctgatgaagacctccgaccccagcgccaggctcctcggagcccaacagtcccaagggggcagtgctgaggggtacagccctgggccctgaccagccccggcacctgccatgctggttcccggaatgaatcagctgctgactgtctccagaagggctggaaaggatgctgccaggtgacccgaggtgcactcgccccagggagatggagtagacagcctggcctggccctcgggacacattgtctgccccggggctatgggcaaatgcccctccttcttacttcccagaatcccctgacattcccagggtcagccaggacctgttacagccctggtcacttggaactgacagctgtgtgaggcctgcacttctcagacccagacttagaacaaaaggaggagtgaggactcaaggctacaatgaggttccagtacttgttacaagaaattggttttctgcaaaaaaagtccctacctgggcctttaggtgaatgtgggatccactcccgcttttaacatgaaagcattagaag

SEQ ID NO: 116871 - DNA, 513 bp, Homo sapiens
  Payload ID: 2797
  Gene Symbol:
  Gene Name: CH507-9B2.2
  ENST ID: ENST00000624081
  CDS Start-End: 1-468
gtggaggagtggggacccttcgatcttgtgtacggcgccacacctcccctgggccacacctgtgaccgtcctcccagctggtacctgttccagttccaccggctcctgcagtacgcacggcccaagccaggcagccccaggcccttcttctggatgttcgtggacaatctggtgctgaacaaggaagacctggacgtcgcatctcgcttcctggagatggagccagtcaccatcccagatgtccacggcggatccttgcagaatgctgtccgcgtgtggagcaacatcccagccataaggagcaggcactgggctctggtttcggaagaagaattgtccctgctggcccagaacaagcagagctcgaagctcgcggccaagtggcccaccaagctggtgaagaactgctttctccccctaagagaatatttcaagtatttttcaacagaactcacttcctctttataaatgagtcactatactgtgaagaaaaagacttttcctagaacaaag

SEQ ID NO: 116872 - DNA, 45 bp, Homo sapiens
  Payload ID: 2798
  Gene Symbol:
  Gene Name: CH507-9B2.3
  ENST ID: ENST00000627754
  CDS Start-End: 1-45
atgtatcatttcctcaagcaaagttgcctcctgagtagctgggat

SEQ ID NO: 116873 - DNA, 1599 bp, Homo sapiens
  Payload ID: 2799
  Gene Symbol:
  Gene Name: CH507-9B2.4
  ENST ID: ENST00000623476
  CDS Start-End: 1-839
ttgaagtggtcacctcctcccttcctgaactgtatgtggagaaagtgctggagtttttagcttcctcctttgaagtgtctcgccacctggaattctacctcctctggactcacaaactgctcatgttgcacggacagaagctgaagtccagagccgggacgctgctgcctgtcattcagttcctccagaagagcatccagcggcacctggacgacctgtcgaaactgatcctggtgcacctgagccgtggaggggctgaagtccagatctttgctcctgacgtccctcagatgcacgtgattgaccacaccaaggggcagccgtccgaaggcgagagcaggaatgttttgaccgagtctgcgaggatcgcccgtggcaaaatcacagacctggccaacctcagtgcagccaaccatgatgctgccatctttccaggaggctttggagcggctaaaaacctgagcacgtttgccgtggacgggaaagattgcaaggtgaataaagaagtggagcgtgtcctgaaggagttccaccaggccgggaagcccatcggcttgtgctgcattgcacctgtcctcgcggccaaggtgctcagaggcgtcgaggtgactgtgggccacgagcaggaggaaggtggcaagtggccttatgccgggaccgcagaggccatcaaggccctgggtgccaagcactgcgtgaaggaagtggtcgaagctcacgtggaccagaaaaacaaggtggtcacgaccccagccttcatgtgcgagacggcactccactacatccatgatgggatcggagccatggtgaggaaggtgctggaactcactggaaagtgacgcgcatggacggggcccagctaggcgccaggacttggcctcaccctctggctgaggagctgtcggctgctttccatccagctgggagtctggcaggcccttttttttttttctttgccgaaacctgcaggcgttctctctctaaggaggatgtgctgcagtgcatgggggatgtttcttcctgggtgtggctgggctgctctcacatacagaggccgaggggccaattcgttctctgccacagggacttgcctcactgtgtcccaaaaacaaatcgcagccagcttttccagaaatagaaaattctgccgtctgaggttttatacttcaggttagttagtttttggaaggaagaacatttttaggtttgcaagcctcctgatcaggaaaccagaaataccacatttatggaccatgaaaggttggttcttgactctgaagggacttttgagttaatcagcgtaaggggatttctaaagcaggcaatccctgtagccgcagagaataaacgccttcccaaaatggcaacttcccacagccacatttcagacctgctgagactgctgagtgaggaatggcagtgaggtttcttcaattagtctcagttctcttaattttcaggaagaaagggaaattgcagctcctcagcccccaggattgacctctggggagtgatggtagcgttggtgccaggccgtgggttcaggtgtggcagaagcttgcagatgcgtccgaagggaaataaagtgtgttggcgtta

SEQ ID NO: 116874 - DNA, 3264 bp, Homo sapiens
  Payload ID: 2800
  Gene Symbol:
  Gene Name: CH507-9B2.5
  ENST ID: ENST00000617716
  CDS Start-End: 95-2854
aagtgcgtgctgtgggcggtgccgcgcggacccccgggaagtgtctctgtgggcggccgccgggttgagctgcggcacacgtgcgacagccgtgatgaagttcgcttaccggttttcaaatttgctgggtacggtgtaccggcgtgggaacctaaattttacctgcaatggaaattcagttatcagtcccgtgggcaatagagtcactgtatttgaccttaaaaacaacaaatctgacacgctgcccctggccactcggtacaacgtcaagtgcgtggggctgtccccggatggccgcctcgctatcatcgtcgatgaagggggcgatgcgctgctggtcagcctggtctgcaggtctgtgctgcaccacttccacttcaagggctctgtgcacagtgtgtccttctcccctgatggcaggaagtttgttgtcacaaagggtaacattgcccagatgtatcatgcccctgggaagaagcgggagttcaacgccttcgttctggacaagacctattttgggccctacgatgagaccacctgcatcgactggacggatgactccaggtgctttgtggttgggagcaaagacatgtccacctgggtgttcggagccgagcgctgggacaacctcatctactatgcactggggggacataaggatgccatcgtggcctgcttctttgaatccaacagcctggacctgtactcactcagccaggacggagtgctgtgcatgtggcagtgtgacacgccccccgagggcttgcggctgaagccccctgcgggctggaaagcagacctgttgcagcgggaggaggaagaggaggaggaggaggaccaggagggcgacagagagaccaccatccggggaaaagccactccggccgaggaggagaagacaggaaaagtgaagtactcacggctggccaagtacttcttcaataaagaaggggattttaacaacctgacagctgcagcatttcataagaagtctcacctcttggtcactggctttgcttctggaatcttccatcttcatgagctgccagagtttaacctcatccactccctgagcatctcagatcagagcatcgcctcagtggccatcaatagctcgggggactggattgcttttggctgttcaggcctgggccagctgctggtgtgggagtggcagagtgagtcctacgtgctcaagcagcagggccacttcaacagcatggtggccctggcctactcgcccgacggacagtacatcgtgactggcggggacgacggcaaggtcaaggtgtggaacaccctcagcggcttctgcttcgtcacttttacggagcactccagcggggtgaccggtgtgacctttactgccaccggctacgttgtggtgacctcatccatggacgggaccgtgcgagcctttgaccttcacaggtaccgaaacttccgcaccttcacctctccacgccccacccagttctcctgtgtggcggtggatgcgagcggtgagatcgtctctgcaggggcgcaggactcctttgagattttcgtgtggtccatgcagacaggcaggctccttgatgttttgtctggacacgaagggcccatcagtggtctgtgttttaacccaatgaagtccgtcctggccagtgcctcctgggacaagacggtgcgcctatgggacatgtttgacagctggaggaccaaggagacgctggccctgacctctgatgctctggctgtgacttttcgccctgatggtgcggagctggctgtggccacactgaactcacagatcaccttctgggaccctgagaacgcggtgcagacgggctccattgagggcaggcatgacctcaagactggcaggaaggagctggacaagattacagccaagcacgcggccaaggggaaggccttcaccgccctgtgctactctgcagacggccacagcatcctggcgggaggcatgtccaagttcgtgtgcatctaccacgtccgtgagcagattctcatgaagaggttcgagatctcttgcaacctgtctctggacgccatggaggaatttttgaaccgaagaaaaatgacagagtttggcaacctggcactaattgatcaggatgctgggcaggaggatggagtcgcgataccactgccaggcgtcaggaaaggtgacatgagttctcggcacttcaaacctgagatcagggtgacctcactccgcttctctcccactgggcgctgctgggcggccaccaccacggagggactcctcatctactccctggacacccgcgtgctctttgacccgtttgagctggacaccagcgtcacccccgggagggtgcgcgaggcactgcgccagcaggacttcaccagggccatcctcatggccctccggctcaacgagagcaaactggtgcaggaggccctggaggcggtgcccaggggcgagattgaagtggtcacctcctcccttcctgaactgtatgtggagaaagtgctggagtttttagcttcctcctttgaagtgtctcgccacctggaattctacctcctctggactcacaaactgctcatgttgcacggacagaagctgaagtccagagccgggacgctgctgcctgtcattcagttcctccagaagagcatccagcggcacctggacgacctgtcgaaactctgtagctggaaccactataacatgcagtacgcactagcagtttccaagcagcggggcacaaaacgctccctagacccgctgggaagtgaggaggaggcagaagcatctgaagatgacagcctgcatctgcttggaggaggaggcagagactcagaagaagagatgctggcctagagccagccggttgcagcgttggattgtgccggctaagacctgccagggagatgggacccttgtgccacctgggccagcaaagaggaggggtccagagaacagctgaaatactgtcactagtggtagtgacttgcttttcctgtgcacacatgtagcccatcaggacagcgagccgacgggtcacgccaggggccggcacgcactggcacctggccccaggagcggggccgtgtgaacggtgatgaatgttgaaaatgcgtctcagagaggtattcacatgaactttgtatgagacttatttatatttttaacataaaggtttgataaagaacttagggattaaaaaaaagatggagttttctaacgtgaggatgaagtctacacttcagattaaaaagggttatgttgta

SEQ ID NO: 116875 - DNA, 712 bp, Homo sapiens
  Payload ID: 2800
  Gene Symbol:
  Gene Name: CH507-9B2.5
  ENST ID: ENST00000632537
  CDS Start-End: 1-240
gaatttttgaaccgaagaaaaatgacagagtttggcaacctggcactaattgatcaggatgctgggcaggaggatggagtcgcgataccactgccaggcgtcaggaaaggtgacatgagttctcggcacttcaaacctgagatcagggtgacctcactccgcttctctcccactgtgatccgtgcagcactgagtaggtgcagcagagaccacagggcctgcggagctgaagacgcctgagctagacagaagacttggctggctcccggcgtcaagagaggacgacgcatgcgtggcgctgctgggcggccaccaccacggagggactcctcatctactccctggacacccgcgtgctctttgacccgtttgagctggacaccagcgtcacccccgggagggtgcgcgaggcactgcgccagcaggacttcaccagggccatcctcatggccctccggctcaacgagagcaaactggtgcaggaggccctggaggcggtgcccaggggcgagattgaagtggtcacctcctcccttcctgaactgtatgtggagaaagtgctggagtttttagcttcctcctttgaagtgtctcgccacctggaattctacctcctctggactcacaaactgctcatgttgcacggacagaagctgaagtccagagccgggacgctgctgcctgtcattcagttcctccagaagagcatcca

SEQ ID NO: 116876 - DNA, 3634 bp, Homo sapiens
  Payload ID: 2801
  Gene Symbol:
  Gene Name: CH507-9B2.9
  ENST ID: ENST00000623998
  CDS Start-End: 1-612
acattatacaacgtgaaggctgagatctttcccccttcgggaatggagtattgcagaacaggctccctctgctccctggaggttttgatcacgaggctctcagacctcttggaggtggataaagatgaagcactgactgaatctgatgagcatttttcgacaaagcttatgtatgaagttgtcgacaacagtagcaactgggcagtgtgtgggaaaagctgcggtgtcatctccatgccagtggctgctcgggccactcacagggtccacatggaagtgatgccgctcttcgccgggtatctccccctgcccgacgtcaggctgttcaagtacctcccccatcattctgcacactcctcccaactggacgctgacagctggatagaaaacgacagcctgtcagtagacaagcacggggacgaccagccggacagcagcagcctcaagagcaggggcagcgtgcattcggcctgcagcagcgagcacaaaggcctacccatgccccggctgcaggcactgccggccggccaggtcttcaactccagctcgggcacacaagtcctggtcatccccagccaagatgaccacgtcctggaagtcagtgtaacatgacaacgccagggtgaacacacgccacttcccagctaggagtgcactttatgggactgtgactggactcttccgttctggctccagccagaccttcagtggtcctgcctggccgtggggacatcagagagtgtcatcacgcagctggccagctgagttctgttgttgttttcatgccgcctgtgatctcagattcctgcttttctcaccccgtccccatgctggtgtccgacgccgcttactcagagccctggcctccctccccctacctcacacgctgctcatgaaagtttccacccacgctgtctccacggaacagcctccgtctgctggctcttcgtggaaggccatttgtctttcaggtagacactcagcagccctcacggtcttagtgacgtgtgtgcctttctggtcacacagctgcccagtttcctgatcggggtggatttgtgtcccctaaggggtaaaacagccgtttaccgcagatcctctcattgtgcttttctagaataacacccttctaggggaggcgggtgggggagggagggatcataaccccttctgtgccttgggatgccggagctgggggacctggaggcccatcagccggagccacgtgaaaggtactgaagaaagctgagacccggctgtgaggagcgcctcagcggtgaggtggtttagggataaatgtttctggaaccctgtggtcccccataatgttgatagaatatcatatgcactgggagttaaatatatttaatttaatgatcattatatatgtgggggttaatatgttgtttttctgtccctttaaagtctttacatgtaattgtagctgtataatcgttatttttcttttgcatcttaagtcttagaaattaagatattccatcgtgaggatgagagaggtcctcagtgtgtttttggtctggttgtagggaaggactcaagtcctggaatgtcctccactggtctactgagttgcagtcacactgttccaatggattatttgctttcggttgtaaatttaattgtacatatggttgatttattatttttaaaaatacagactaactgatgtaatgtttatgtataagttgcaccaaaaatcaaggacaaaaataagtgtgtttgtttttacaggtgtgaaagtcacagcttgtaaataagtgttgtatgtattaaaccttttccagttctccaaagcgatgtatttttgtacacttgaaatagagtactcttaatttactgggcaaatgtgcttggaattgaacttgacaagattagctcaagcagatagagtcgggtccagcagtgggtggccctcgtgtgaatccccgtggatgtgcaagttgtggagagaaggagcaccgggttcctgcccagcactgtgcttgcgggaggcggtggggcatgggaggaaggaggcacagaccggggaaatatgacagccgtcatttccagtattctctgtgttgtcttttagctcattcaataaataaaggtggtgtgatttttttttcctcctgtctttttcatttgtagaaactggagacgtgtaaagaagataaataattgtgtaattaaactttccagaaatttatcttcctcatgtgcagtttaacaaacttggtcaaactagttagcaaattagaacttcagaatctaatgatagtttagggtttctaaaataaggttttttattgtaaaaattgacgattgccctgcatttctaccaagtcctgtgaataaagagatgggagatttgattccgtcagaagagactgtaatccgtgtcgtcagcctgggagccttccccagtgtaatgtagctttctctcttaccttctggaagagggaatgtttcatttattactgtttgattttcttgtatctggttctactcccaggatgaaattatccaactacatatatatttagaggaagaaagtgaaggggaaatttaaaatgtttacggcgcttaattgcctggaaatgaaatgaaatcaaatttatcagtttttttccccctaattacccaaaagatcttttgcaaactatgttacatgaatgcttctgcctctttaagacaaagaagaatgtcacccaaaattgtcatttttttcttaatgttcatcataaaagtcctaaaagagtaactgtaattggatgtttattgtttttatctaaagtaaggtgtatgtgtttgagacaagctggttttgttgataaagagatgttaaataattgtgaagccagatatgcaatgtgtatctaaaaagcaaggaatttgcagccgttttacaaatatctgtggaacatgtaaatactgtcaaatggaaaataaaataagttataatttttgtgaatttcatgggatgtcctatgattggaaaaattataactcttctgattctaatgtggaaattgttgtatttaatctgaaaatgactttacctacaacagttccattgtcagcacagcctaggagggtcagattcctgtattaattactcttagtggagatgccagatatcccatacagaattagcagagaaaatacacacaggcttctattcaaattttctttagtgcttaaaattaagttttaaaatgaaatcagacactgcaggtttgtatataaaatgaaaagctatactactttttataaaagggcaaactgggctgatgtaaatgttttactttcaactgtgttctttaaaataaatcctacctggtttttaaattttatttttcatgaaaatgctcctttctctacatttattcatcctatatacatcaggctgtaagaccccccccagtcatcattaatacaatgtgttgggattctgtgactggaaaaggtgacaagttggtgactttgacactgcaggtattccattttcatggtttactatgaaaagtcatttttcatattatgtaatatattgttagattaaaaccattgtattaagactttaaaatgtaagcattgtaattctgaaaatacacattttaagaagaaa

SEQ ID NO: 116877 - DNA, 1204 bp, Homo sapiens
  Payload ID: 2802
  Gene Symbol: CHAC1
  Gene Name: ChaC glutathione-specific gamma-glutamylcyclotransferase 1
  Uniprot ID: Q9BUX1
  ENST ID: ENST00000444189
  CDS Start-End: 497-1156
gagacggaagtttacgacgcccagagcgctccttctggacgtgccctggactcgacttgggactgagtctgtgccgcctaggctggcagggactcggccagatgcactagcggcaaggctgggctgacaccgcctgggactcgctcgccgtacctccaaggggcccaggtcatgagggggcggctggggagacgcccgcccggtgcccgccctgggcccggcgggtgccccctgcccgccgcctgacgcaatccgaggcgcccttgctgcatgccggcgctggagaaacctcccctgccgttgcatcactcctgccaggtttgccacagaggtggagctgaaccaatcagcgggcgcgctgggcccgcggcgcggttaagtgagaagcagaatccgaagttgattggccaaaaggggatttgccccaccccaatcaccgcggcagctggccgcggtgggcgtggtctcccggcaagaaggtttaaagggcgcctccatggggggcgctcagctggagctaccgagcggtgccaggccaggtgtgtgcgtccgtcggtctttccgtgcccacgccggagaccagccccggaggccgcctgggcctatccctgtgccaggcaccatgaagcaggagtctgcagccccgaacaccccgcccacctcgcagtcccctacgccgtccgctcagttcccccgaaacgacggcgaccctcaagcgctgtggattttcgggtacggctccctggtgtggaggcccgacttcgcctacagcgacagccgtgtgggcttcgtgcgcggctacagccgccgtttctggcagggagacaccttccatcggggcagcgacaagatgcctggccgtgtggtgacgctccttgaagatcatgagggctgcacttggggcgtggcataccaagtgcaaggggagcagaaccctggttacctgggccctgcgcctgaagaggccattgccacgcagatcctggcctgccggggcttctccggccacaaccttgaatacttgctgcgtctggcagacttcatgcagctctgtgggcctcaggcgcaggacgagcacctggcagccatcgtggacgctgtgggcaccatgttgccctgcttctgccccaccgagcaggctctggcgctggtgtgaggggctgagcccctgcggggagtgctcatgtggacatcagggccagac

SEQ ID NO: 116878 - DNA, 1849 bp, Homo sapiens
  Payload ID: 2802
  Gene Symbol: CHAC1
  Gene Name: ChaC glutathione-specific gamma-glutamylcyclotransferase 1
  Uniprot ID: Q9BUX1
  ENST ID: ENST00000446533
  CDS Start-End: 310-1104
ggagacgcccgcccggtgcccgccctgggcccggcgggtgccccctgcccgccgcctgacgcaatccgaggcgcccttgctgcatgccggcgctggagaaacctcccctgccgttgcatcactcctgccaggtttgccacagaggtggagctgaaccaatcagcgggcgcgctgggcccgcggcgcggttaagtgagaagcagaatccgaagttgattggccaaaaggggatttgccccaccccaatcaccgcggcagctggccgcggtgggcgtggtctcccggcaagaaggtttaaagggcgcctccatggggggcgctcagctggagctaccgagcggtgccaggccaggtgtgtgcgtccgtcggtctttccgtgcccacgccggagaccagccccggaggccgcctgggcctatccctgtgccaggcaccatgaagcaggagtctgcagccccgaacaccccgcccacctcgcagtcccctacgccgtccgctcagttcccccgaaacgacggcgaccctcaagcgctgtggattttcgggtacggctccctggtgtggaggcccgacttcgcctacagcgacagccgtgtgggcttcgtgcgcggctacagccgccgtttctggcagggagacaccttccatcggggcagcgacaagatgcctggccgtgtggtgacgctccttgaagatcatgagggctgcacttggggcgtggcataccaagtgcaaggggagcaggtaagcaaggccctgaagtacctgaatgtgcgagaggcagtgcttggtggctacgataccaaggaggtcaccttctatccccaagatgctcctgaccaaccactgaaggcattggcctatgtggccaccccacagaaccctggttacctgggccctgcgcctgaagaggccattgccacgcagatcctggcctgccggggcttctccggccacaaccttgaatacttgctgcgtctggcagacttcatgcagctctgtgggcctcaggcgcaggacgagcacctggcagccatcgtggacgctgtgggcaccatgttgccctgcttctgccccaccgagcaggctctggcgctggtgtgaggggctgagcccctgcggggagtgctcatgtggacatcagggccagacacccactccagtgcacaagacagacttgcgaccgcttgagcccactgagcagatatggtgggtggctggaggcttctctttctcagtccctgcctgtctgccagcctgcagctctcctgcttgacactgacttactacttgaaactttatttattgcaccatgttggtgtggtgggcaggtggagggcctgccctggacacaggggccctgctgagcagtggccccatcctggaacttgaccagattccccccagtgctgctgctaaccccacaccacccaggcctccacctccccagggagtctccaagagcctcgatcctctgctcactcagcccagccatccatagccctgggaattccacctgccaaggatcccagcaggctggatgagggatagtagggcatgaggagaaggagccctgtaaggactgaggccccggccagcccttctcctccaccagttccccagagcagagctggagctgatgcctggacacagctgctgagcctggcctgggcctcttacccacttggttgttttcttgtccctctgtctgtctgtctatctacttgtctgtctgggccactcctgcctgtgtgttggtctattcctgggaagctcatcactacaggccctggcaaccttcccagtctgtcccatactgttacccataaaactatctctttatctgtgc

SEQ ID NO: 116879 - DNA, 853 bp, Homo sapiens
  Payload ID: 2802
  Gene Symbol: CHAC1
  Gene Name: ChaC glutathione-specific gamma-glutamylcyclotransferase 1
  ENST ID: ENST00000487220
  CDS Start-End: 347-460
aaaatatttcttccctccctagcctggccgtgtggtgacgctccttgaagatcatgagggctgcacttggggcgtggcataccaagtgcaaggggagcaggtaagcaaggccctgaagtacctgaatgtgcgagaggcagtgcttggtggctacgataccaaggaggtcaccttctatccccaagatgctcctgaccaaccactgaaggcattggcctatgtggccaccccacagaaccctggttacctgggccctgcgcctgaagaggccattgccacgcagatcctggcctgccggggcttctccggccacaaccttgaatacttgctgcgtctggcagacttcatgcagctctgtgggcctcaggcgcaggacgagcacctggcagccatcgtggacgctgtgggcaccatgttgccctgcttctgccccaccgagcaggctctggcgctggtgtgaggggctgagcccctgcggggagtgctcatgtggacatcagggccagacacccactccagtgcacaagacagacttgcgaccgcttgagcccactgagcagatatggtgggtggctggaggcttctctttctcagtccctgcctgtctgccagcctgcagctctcctgcttgacactgacttactacttgaaactttatttattgcaccatgttggtgtggtgggcaggtggagggcctgccctggacacaggggccctgctgagcagtggccccatcctggaacttgaccagattccccccagtgctgctgctaaccccacaccacccaggcctccacctccccagggagtctccaagagcctcgatcctctgctcactcagcccagccatcc

SEQ ID NO: 116880 - DNA, 1498 bp, Homo sapiens
  Payload ID: 2802
  Gene Symbol: CHAC1
  Gene Name: ChaC glutathione-specific gamma-glutamylcyclotransferase 1
  ENST ID: ENST00000617961
  CDS Start-End: 92-760
caggccaggtgtgtgcgtccgtcggtctttccgtgcccacgccggagaccagccccggaggccgcctgggcctatccctgtgccaggcaccatgaagcaggagtctgcagccccgaacaccccgcccacctcgcagtcccctacgccgtccgctcagttcccccgaaacgacggcgaccctcaagcgctgtggattttcgggtacggctccctggtgtggaggcccgacttcgcctacagcgacagccgtgtgggcttcgtgcgcggctacagccgccgtttctggcagggagacaccttccatcggggcagcgacaagatgcctggccgtgtggtgacgctccttgaagatcatgagggctgcacttggggcgtggcataccaagtgcaaggggagcaggtaagcaaggccctgaagtacctgaatgtgcgagaggcagtgcttggtggctacgataccaaggaggtcaccttctatccccaagatgctcctgaccaaccactgaaggcattggcctatgtggccaccccacagaaccctggttacctgggccctgcgcctgaagaggccattgccacgcagatcctggcctgccggggcttctccggccacaaccttgaatacttgctgcgtctggcagacttcatgcagctctgtgggcctcaggcgcaggacgagcacctggcagccatcgtggacgctgtgggcaccatgttgccctgcttctgccccaccgagcaggctctggcgctggtgtgaggggctgagcccctgcggggagtgctcatgtggacatcagggccagacacccactccagtgcacaagacagacttgcgaccgcttgagcccactgagcagatatggtgggtggctggaggcttctctttctcagtccctgcctgtctgccagcctgcagctctcctgcttgacactgacttactacttgaaactttatttattgcaccatgttggtgtggtgggcaggtggagggcctgccctggacacaggggccctgctgagcagtggccccatcctggaacttgaccagattccccccagtgctgctgctaaccccacaccacccaggcctccacctccccagggagtctccaagagcctcgatcctctgctcactcagcccagccatccatagccctgggaattccacctgccaaggatcccagcaggctggatgagggatagtagggcatgaggagaaggagccctgtaaggactgaggccccggccagcccttctcctccaccagttccccagagcagagctggagctgatgcctggacacagctgctgagcctggcctgggcctcttacccacttggttgttttcttgtccctctgtctgtctgtctatctacttgtctgtctgggccactcctgcctgtgtgttggtctattcctgggaagctcatcactacaggccctggcaaccttcccagtctgtcccatactgttacccataaaactatctcttta

SEQ ID NO: 116881 - DNA, 1560 bp, Homo sapiens
  Payload ID: 2802
  Gene Symbol: CHAC1
  Gene Name: ChaC glutathione-specific gamma-glutamylcyclotransferase 1
  Uniprot ID: Q9BUX1
  ENST ID: ENST00000617768
  CDS Start-End: 21-815
aaggtttaaagggcgcctccatggggggcgctcagctggagctaccgagcggtgccaggccaggtgtgtgcgtccgtcggtctttccgtgcccacgccggagaccagccccggaggccgcctgggcctatccctgtgccaggcaccatgaagcaggagtctgcagccccgaacaccccgcccacctcgcagtcccctacgccgtccgctcagttcccccgaaacgacggcgaccctcaagcgctgtggattttcgggtacggctccctggtgtggaggcccgacttcgcctacagcgacagccgtgtgggcttcgtgcgcggctacagccgccgtttctggcagggagacaccttccatcggggcagcgacaagatgcctggccgtgtggtgacgctccttgaagatcatgagggctgcacttggggcgtggcataccaagtgcaaggggagcaggtaagcaaggccctgaagtacctgaatgtgcgagaggcagtgcttggtggctacgataccaaggaggtcaccttctatccccaagatgctcctgaccaaccactgaaggcattggcctatgtggccaccccacagaaccctggttacctgggccctgcgcctgaagaggccattgccacgcagatcctggcctgccggggcttctccggccacaaccttgaatacttgctgcgtctggcagacttcatgcagctctgtgggcctcaggcgcaggacgagcacctggcagccatcgtggacgctgtgggcaccatgttgccctgcttctgccccaccgagcaggctctggcgctggtgtgaggggctgagcccctgcggggagtgctcatgtggacatcagggccagacacccactccagtgcacaagacagacttgcgaccgcttgagcccactgagcagatatggtgggtggctggaggcttctctttctcagtccctgcctgtctgccagcctgcagctctcctgcttgacactgacttactacttgaaactttatttattgcaccatgttggtgtggtgggcaggtggagggcctgccctggacacaggggccctgctgagcagtggccccatcctggaacttgaccagattccccccagtgctgctgctaaccccacaccacccaggcctccacctccccagggagtctccaagagcctcgatcctctgctcactcagcccagccatccatagccctgggaattccacctgccaaggatcccagcaggctggatgagggatagtagggcatgaggagaaggagccctgtaaggactgaggccccggccagcccttctcctccaccagttccccagagcagagctggagctgatgcctggacacagctgctgagcctggcctgggcctcttacccacttggttgttttcttgtccctctgtctgtctgtctatctacttgtctgtctgggccactcctgcctgtgtgttggtctattcctgggaagctcatcactacaggccctggcaaccttcccagtctgtcccatactgttacccataaaactatctctttatctgtgc

SEQ ID NO: 116882 - DNA, 1321 bp, Homo sapiens
  Payload ID: 2803
  Gene Symbol: CHAC2
  Gene Name: ChaC, cation transport regulator homolog 2 (E. coli)
  Uniprot ID: Q8WUX2
  ENST ID: ENST00000295304
  CDS Start-End: 96-650
gcgcggccggttactcgcttaccggaggcttcagtccccggcggcgcggcgacagctagggttcacggccactggggcagaggagccgcgagaagatgtgggtttttggttacgggtccctgatctggaaggtggatttcccctatcaggacaagctggtcggatacatcaccaactacagcaggcgcttctggcagggcagcacggaccaccgcggggtccccggcaagcctggaagagttgtgactcttgttgaagatcctgcgggatgtgtatggggtgttgcttacagattgccagtaggaaaggaagaagaagtaaaagcataccttgacttcagagaaaaaggaggctacagaaccacaacagtcattttttatccaaaagatcccacaacaaaaccattcagtgtattgctatatattggaacatgtgataatcctgattatcttggtcctgcacctctggaagacattgctgaacaaatttttaatgcagctggtccaagtggaagaaatacagaatatctttttgaacttgcaaattctattaggaaccttgtgccagaagaagcagatgagcatcttttcgctttggaaaaattagtaaaggaacgtttagaagggaaacagaacctcaattgcatataatttagtcttcagagaattaacttcagtgcacaatgacaatatgatttggaaatacgtttacttaaagatcttatttttaatgtagtgaggatattatttaaacttttattttaactggaaatgtcctgaaacacatatttaaaatattgggatacagtgaaagaaaaattcaaattttaataacataaagatttcctaactttatgttattgaacacttactcactagaagtgagttctttagaaaaatacagtgaaggactcagttcagtcttgtttttatcagagtgataatcatcctgtttcacatcccaatactattttgaaattctaaacaattaaaccaaaattccaataaatataaggttatgccttcaatatattcctatacaattctgtaaccatggtttaaaatacacaagcttaaaataacatgcttagaaatacacaataatatgaacagtatttcagccttaattgtgaatttccttgttattcaagtattaaatgaaatcttttgagtttttagccaaaaattggcatttttaaaatacgaaaatttccttggaattataatgtactgtacctcttcttttttaaataaaggcattttactatatggaaaataactcactaaagcataaattacattatacaaatcatgatcactaa

SEQ ID NO: 116883 - DNA, 2041 bp, Homo sapiens
  Payload ID: 2804
  Gene Symbol: CCT2
  Gene Name: chaperonin containing TCP1, subunit 2 (beta)
  Uniprot ID: P78371
  ENST ID: ENST00000299300
  CDS Start-End: 189-1796
agtgtgaaaggctgcgtttccggcccgtggggctccaatcaaaatgggacgcctgctggcggtaacgacaggccggggccccgccccccgaagtagggcgtgtggcgtcacttccggcttccttcagtccgctggtcccgagcacgagctgtgaggggattcacttgtgtgcggaactcctcggaaccatggcgtccctttcccttgcacctgttaacatctttaaggcaggagctgatgaagagagagcagagacagctcgtctgacttcttttattggtgccatcgccattggagacttggtaaagagcaccttgggacccaaaggcatggacaaaattcttctaagcagtggacgagatgcctctcttatggtaaccaatgatggtgccactattctaaaaaacattggtgttgacaatccagcagctaaagttttagttgatatgtcaagggttcaagatgatgaagttggtgatggcactacctctgttaccgttttagcagcagaattattaagggaagcagaatctttaattgcaaaaaagattcatccacagaccatcatagcgggttggagagaagccacgaaggctgcaagagaggcgctgttgagttctgcagttgatcatggttccgatgaagttaaattccgtcaagatttaatgaatattgcgggcacaacattatcctcaaaacttcttactcatcacaaagaccactttacaaagttagctgtagaagcagttctcagactgaaaggctctggcaacctggaggcaattcatattatcaagaagctaggaggaagtttggcagattcctatttagatgaaggcttcctgttggataaaaaaattggagtaaatcaaccaaaacgaattgaaaatgctaaaattcttattgcaaatactggtatggatacagacaaaataaagatatttggttcccgggtaagagttgactctacagcaaaggttgcagaaatagaacatgcggaaaaggaaaaaatgaaggagaaagttgaacgtattcttaagcatggaataaattgctttattaacaggcaattaatttataattatcctgaacagctctttggtgctgctggtgtcatggctattgagcatgcagattttgcaggtgtggaacgcctagctcttgtcacaggtggtgaaattgcctctacctttgatcacccagaactggtgaagcttggaagttgcaaacttatcgaggaagtcatgattggagaagacaaactcattcacttttctggggttgcccttggtgaggcttgtaccattgttttgcgtggtgccactcaacaaattttagatgaagcagaaagatcattgcatgatgctctttgtgttcttgcgcaaactgtaaaggactctagaacagtttatggaggaggctgttctgagatgttgatggctcatgctgtgacacagcttgccaatagaacaccaggcaaagaagctgttgcaatggagtcttatgctaaagcactgagaatgttgccaaccatcatagctgacaatgcaggctatgacagtgcagacctggtggcacagctcagggctgctcacagtgaaggcaataccactgctggattggatatgagggaaggcaccattggagatatggctatcctgggtataacagaaagttttcaagtgaagcgacaggttcttctgagtgcagctgaagcagcagaggtgattctgcgtgtggacaacatcatcaaagcggcacccaggaaacgtgtccctgatcaccacccctgttaagcattcccacgtgctgtcgatctttggaccagtttctagcaaagttgtgtttgaaagatactctattaaagaagactgtggaatctgtttatcggtgcccattatatccttaagtttggatatttagctgaccttcgctttaacataggtctaatttatttgccgtgtcattttccatacaaatcagttgatttaaaaaagttcatttctcatactgtgcattaaaataaaaatttgaacaatta

SEQ ID NO: 116884 - DNA, 1728 bp, Homo sapiens
  Payload ID: 2804
  Gene Symbol: CCT2
  Gene Name: chaperonin containing TCP1, subunit 2 (beta)
  ENST ID: ENST00000544368
  CDS Start-End: 63-1655
gtccgctggtcccgagcacgagctgtgaggggattcacttgtgtgcggaactcctcggaaccatggcgtccctttcccttgcacctgttaacatctttaaggcaggagctgatgaagagagagcagagacagctcgtctgacttcttttattggtgccatcgccattggagacttggtaaagagcaccttgggacccaaaggcatggacaaaattcttctaagcagtggacgagatgcctctcttatggtaaccaatgatggtgccactattctaaaaaacattggtgttgacaatccagcagctaaagttttagttgatatgtcaagggttcaagatgatgaagttggtgatggcactacctctgttaccgttttagcagcagaattattaagggaagcagaatctttaattgcaaaaaagattcatccacagaccatcatagcgggttggagagaagccacgaaggctgcaagagaggcgctgttgagttctgcagttgatcatggttccgatgaagttaaattccgtcaagatttaatgaatattgcgggcacaacattatcctcaaaacttcttactcatcacaaagaccactttacaaagttagctgtagaagcagttctcagactgaaaggctctggcaacctggaggcaattcatattatcaagaagctaggaggaagtttggcagattcctatttagatgaaggcttcctgttggataaaaaaattggagtaaatcaaccaaaacgaattgaaaatgctaaaattcttattgcaaatactggtatggatacagacaaaataaagatatttggttcccgggtaagagttgactctacagcaaaggttgcagaaatagaacatgcggaaaaggaaaaaatgaaggagaaagttgaacgtattcttaagcatggaataaattgctttattaacaggcaattaatttataattatcctgaacagctctttggtgctgctggtgtcatggctattgagcatgcagattttgcaggtgtggaacgcctagctcttgtcacaggtggtgaaattgcctctacctttgatcacccagaactggtgaagcttggaagttgcaaacttatcgaggaagtcatgattggagaagacaaactcattcacttttctggggttgcccttggtgaggcttgtaccattgttttgcgtggtgccactcaacaaattttagatgaagcagaaagatcattgcatgatgctctttgtgttcttgcgcaaactgtaaaggactctagaacagtttatggaggaggctgttctgagatgttgatggctcatgctgtgacacagcttgccaatagaacaccaggcaaagaagctgttgcaatggagtcttatgctaaagcactgagaatgttgccaaccatcatagctgacaatgcaggctatgacagtgcagacctggtggcacagctcagggctgctcacagtgaaggcaataccactgctggattgggaaacgtgtccctgatcaccacccctgttaagcattcccacgtgctgtcgatctttggaccagtttctagcaaagttgtgtttgaaagatactctattaaagaagactgtggaatctgtttatcggtgcccattatatccttaagtttggatatttagctgaccttcgctttaacataggtctaatttatttgccgtgtcattttccatacaaatcagttgatttaaaaaa

SEQ ID NO: 116885 - DNA, 2189 bp, Homo sapiens
  Payload ID: 2804
  Gene Symbol: CCT2
  Gene Name: chaperonin containing TCP1, subunit 2 (beta)
  Uniprot ID: P78371
  ENST ID: ENST00000543146
  CDS Start-End: 483-1949
gcgtgcggcctgcgccaggccagccggtggagctcaccacgagggggaggggtggaccgcaaagccagcgtctccttgtgcctaggtctttgcatagtcccggcagcccaggtccgcgcctcacccggagcgaagaaatttctagtgtgggacccgctccgccctccttctaggggcggagcctggagcgacggggtctgagccatcagagggtggaggggccgcagccttccgagggtggaagatggaggccgcgttccctcgcccgcccggcaggcgtcaccttgatggcctgcaacccctccctgcctcattcttagttcaagatcgtctttagtctcgctgcgtccctttcccttgcacctgttaacatctttaaggcaggagctgatgaagagagagcagagacagctcgtctgacttcttttattggtgccatcgccattggagacttggtaaagagcaccttgggacccaaaggcatggacaaaattcttctaagcagtggacgagatgcctctcttatggtaaccaatgatggtgccactattctaaaaaacattggtgttgacaatccagcagctaaagttttagttgatatgtcaagggttcaagatgatgaagttggtgatggcactacctctgttaccgttttagcagcagaattattaagggaagcagaatctttaattgcaaaaaagattcatccacagaccatcatagcgggttggagagaagccacgaaggctgcaagagaggcgctgttgagttctgcagttgatcatggttccgatgaagttaaattccgtcaagatttaatgaatattgcgggcacaacattatcctcaaaacttcttactcatcacaaagaccactttacaaagttagctgtagaagcagttctcagactgaaaggctctggcaacctggaggcaattcatattatcaagaagctaggaggaagtttggcagattcctatttagatgaaggcttcctgttggataaaaaaattggagtaaatcaaccaaaacgaattgaaaatgctaaaattcttattgcaaatactggtatggatacagacaaaataaagatatttggttcccgggtaagagttgactctacagcaaaggttgcagaaatagaacatgcggaaaaggaaaaaatgaaggagaaagttgaacgtattcttaagcatggaataaattgctttattaacaggcaattaatttataattatcctgaacagctctttggtgctgctggtgtcatggctattgagcatgcagattttgcaggtgtggaacgcctagctcttgtcacaggtggtgaaattgcctctacctttgatcacccagaactggtgaagcttggaagttgcaaacttatcgaggaagtcatgattggagaagacaaactcattcacttttctggggttgcccttggtgaggcttgtaccattgttttgcgtggtgccactcaacaaattttagatgaagcagaaagatcattgcatgatgctctttgtgttcttgcgcaaactgtaaaggactctagaacagtttatggaggaggctgttctgagatgttgatggctcatgctgtgacacagcttgccaatagaacaccaggcaaagaagctgttgcaatggagtcttatgctaaagcactgagaatgttgccaaccatcatagctgacaatgcaggctatgacagtgcagacctggtggcacagctcagggctgctcacagtgaaggcaataccactgctggattggatatgagggaaggcaccattggagatatggctatcctgggtataacagaaagttttcaagtgaagcgacaggttcttctgagtgcagctgaagcagcagaggtgattctgcgtgtggacaacatcatcaaagcggcacccaggaaacgtgtccctgatcaccacccctgttaagcattcccacgtgctgtcgatctttggaccagtttctagcaaagttgtgtttgaaagatactctattaaagaagactgtggaatctgtttatcggtgcccattatatccttaagtttggatatttagctgaccttcgctttaacataggtctaatttatttgccgtgtcattttccatacaaatcagttgatttaaaaaagttcatttctcatactgtgcattaaaataaaaatttgaac

SEQ ID NO: 116886 - DNA, 1754 bp, Homo sapiens
  Payload ID: 2804
  Gene Symbol: CCT2
  Gene Name: chaperonin containing TCP1, subunit 2 (beta)
  ENST ID: ENST00000550010
  CDS Start-End: 51-1301
cgagcacgagctgtgaggggattcacttgtgtgcggaactcctcggaaccatggcgtccctttcccttgcacctgttaacatctttaaggcaggagctgatgaagagagagcagagacagctcgtctgacttcttttattggtgccatcgccattggagacttggtaaagagcaccttgggacccaaaggcatggacaaaattcttctaagcagtggacgagatgcctctcttatggtaaccaatgatggtgccactattctaaaaaacattggtgttgacaatccagcagctaaagttttagttgatatgtcaagggttcaagatgatgaagttggtgatggcactacctctgttaccgttttagcagcagaattattaagggaagcagaatctttaattgcaaaaaagattcatccacagaccatcatagcgggttggagagaagccacgaaggctgcaagagaggcgctgttgagttctgcagttgatcatggttccgatgaagttaaattccgtcaagatttaatgaatattgcgggcacaacattatcctcaaaacttcttactcatcacaaagaccactttacaaagttagctgtagaagcagttctcagactgaaaggctctggcaacctggaggcaattcatattatcaagaagctaggaggaagtttggcagattcctatttagatgaaggcttcctgttggataaaaaaattggagtaaatcaaccaaaacgaattgaaaatgctaaaattcttattgcaaatactggtatggatacagacaaaataaagatatttggttcccgggtaagagttgactctacagcaaaggttgcagaaatagaacatgcggaaaaggaaaaaatgaaggagaaagttgaacgtattcttaagcatggaataaattgctttattaacaggcaattaatttataattatcctgaacagctctttggtgctgctggtgtcatggctattgagcatgcagattttgcaggtgtggaacgcctagctcttgtcacaggtggtgaaattgcctctacctttgatcacccagaactggtgaagcttggaagttgcaaacttatcgaggaagtcatgattggagaagacaaactcattcacttttctggggttgcccttggtgaggcttgtaccattgttttgcgtggtgccactcaacaaattttagatgaagcagaaagatcattgcatgatgctctttgtgttcttgcgcaaactgtaaaggactctagaacagtttatggaggagttgccaaccatcatagctgacaatgcaggctatgacagtgcagacctggtggcacagctcagggctgctcacagtgaaggcaataccactgctggattggatatgagggaaggcaccattggagatatggctatcctgggtataacagaaagttttcaagtgaagcgacaggttcttctgagtgcagctgaagcagcagaggtgattctgcgtgtggacaacatcatcaaagcggcacccaggaaacgtgtccctgatcaccacccctgttaagcattcccacgtgctgtcgatctttggaccagtttctagcaaagttgtgtttgaaagatactctattaaagaagactgtggaatctgtttatcggtgcccattatatccttaagtttggatatttagctgaccttcgctttaacataggtctaatttatttgccgtgtcattttccatacaaatcagttgatttaaaaaa

SEQ ID NO: 116887 - DNA, 2150 bp, Homo sapiens
  Payload ID: 2805
  Gene Symbol: CCT3
  Gene Name: chaperonin containing TCP1, subunit 3 (gamma)
  Uniprot ID: P49368
  ENST ID: ENST00000295688
  CDS Start-End: 282-1919
actgcgcaagcgcctgtgccctcccagtgccttcgtcgtgcgctctctgtctaacttgtctggccgttcttgcgtagggggcgggactaaggctgtcaattggtctgtttttgtgccgatcaatgagatgggtgcggtgattggcgactaccttgagagtagcgggttgaggtgtaagccctgaggaggcagcgttttctgggcttctgtctggttctctctctccagaaggttctgccggttcccccagctctgggtacccggctctgcatcgcgtcgccatgatgggccatcgtccagtgctcgtgctcagccagaacacaaagcgtgaatccggaagaaaagttcaatctggaaacatcaatgctgccaagactattgcagatatcatccgaacatgtttgggacccaagtccatgatgaagatgcttttggacccaatgggaggcattgtgatgaccaatgatggcaatgccattcttcgagagattcaagtccagcatccagcggccaagtccatgatcgaaattagccggacccaggatgaagaggttggagatgggaccacatcagtaattattcttgcaggggaaatgctgtctgtagctgagcacttcctggagcagcagatgcacccaacagtggtgatcagtgcttaccgcaaggcattggatgatatgatcagcaccctaaagaaaataagtatcccagtcgacatcagtgacagtgatatgatgctgaacatcatcaacagctctattactaccaaagccatcagtcggtggtcatctttggcttgcaacattgccctggatgctgtcaagatggtacagtttgaggagaatggtcggaaagagattgacataaaaaaatatgcaagagtggaaaagatacctggaggcatcattgaagactcctgtgtcttgcgtggagtcatgattaacaaggatgtgacccatccacgtatgcggcgctatatcaagaaccctcgcattgtgctgctggattcttctctggaatacaagaaaggagaaagccagactgacattgagattacacgagaggaggacttcacccgaattctccagatggaggaagagtacatccagcagctctgtgaggacattatccaactgaagcccgatgtggtcatcactgaaaagggcatctcagatttagctcagcactaccttatgcgggccaatatcacagccatccgcagagtccggaagacagacaataatcgcattgctagagcctgtggggcccggatagtcagccgaccagaggaactgagagaagatgatgttggaacaggagcaggcctgttggaaatcaagaaaattggagatgaatactttactttcatcactgactgcaaagaccccaaggcctgcaccattctcctccggggggctagcaaagagattctctcggaagtagaacgcaacctccaggatgccatgcaagtgtgtcgcaatgttctcctggaccctcagctggtgccagggggtggggcctccgagatggctgtggcccatgccttgacagaaaaatccaaggccatgactggtgtggaacaatggccatacagggctgttgcccaggccctagaggtcattcctcgtaccctgatccagaactgtggggccagcaccatccgtctacttacctcccttcgggccaagcacacccaggagaactgtgagacctggggtgtaaatggtgagacgggtactttggtggacatgaaggaactgggcatatgggagccattggctgtgaagctgcagacttataagacagcagtggagacggcagttctgctactgcgaattgatgacatcgtttcaggccacaaaaagaaaggcgatgaccagagccggcaaggcggggctcctgatgctggccaggagtgagtgctaggcaaggctacttcaatgcacagaaccagcagagtctccccttttcctgagccagagtgccaggaacactgtggacgtctttgttcagaagggatcaggttggggggcagcccccagtccctttctgtcccagctcagttttccaaaagacactgacatgtaattcttctctattgtaaggtttccatttagtttgcttccgatgattaaatctaagtcatttga

SEQ ID NO: 116888 - DNA, 1885 bp, Homo sapiens
  Payload ID: 2805
  Gene Symbol: CCT3
  Gene Name: chaperonin containing TCP1, subunit 3 (gamma)
  ENST ID: ENST00000368258
  CDS Start-End: 80-202
gcttctgtctggttctctctctccagaaggttctgccggttcccccagctctgggtacccggctctgcatcgcgtcgccatgatgggccatcgtccagtgctcgtgctcaactattgcagatatcatccgaacatgtttgggacccaagtccatgatgaagatgcttttggacccaatgggaggcattgtgatgaccaatgatggcaatgccattcttcgagagattcaagtccagcatccagcggccaagtccatgatcgaaattagccggacccaggatgaagaggttggagatgggaccacatcagtaattattcttgcaggggaaatgctgtctgtagctgagcacttcctggagcagcagatgcacccaacagtggtgatcagtgcttaccgcaaggcattggatgatatgatcagcaccctaaagaaaataagtatcccagtcgacatcagtgacagtgatatgatgctgaacatcatcaacagctctattactaccaaagccatcagtcggtggtcatctttggcttgcaacattgccctggatgctgtcaagatggtacagtttgaggagaatggtcggaaagagattgacataaaaaaatatgcaagagtggaaaagatacctggaggcatcattgaagactcctgtgtcttgcgtggagtcatgattaacaaggatgtgacccatccacgtatgcggcgctatatcaagaaccctcgcattgtgctgctggattcttctctggaatacaagaaaggagaaagccagactgacattgagattacacgagaggaggacttcacccgaattctccagatggaggaagagtacatccagcagctctgtgaggacattatccaactgaagcccgatgtggtcatcactgaaaagggcatctcagatttagctcagcactaccttatgcgggccaatatcacagccatccgcagagtccggaagacagacaataatcgcattgctagagcctgtggggcccggatagtcagccgaccagaggaactgagagaagatgatgttggaacaggagcaggcctgttggaaatcaagaaaattggagatgaatactttactttcatcactgactgcaaagaccccaaggcctgcaccattctcctccggggggctagcaaagagattctctcggaagtagaacgcaacctccaggatgccatgcaagtgtgtcgcaatgttctcctggaccctcagctggtgccagggggtggggcctccgagatggctgtggcccatgccttgacagaaaaatccaaggccatgactggtgtggaacaatggccatacagggctgttgcccaggccctagaggtcattcctcgtaccctgatccagaactgtggggccagcaccatccgtctacttacctcccttcgggccaagcacacccaggagaactgtgagacctggggtgtaaatggtgagacgggtactttggtggacatgaaggaactgggcatatgggagccattggctgtgaagctgcagacttataagacagcagtggagacggcagttctgctactgcgaattgatgacatcgtttcaggccacaaaaagaaaggcgatgaccagagccggcaaggcggggctcctgatgctggccaggagtgagtgctaggcaaggctacttcaatgcacagaaccagcagagtctccccttttcctgagccagagtgccaggaacactgtggacgtctttgttcagaagggatcaggttggggggcagcccccagtccctttctgtcccagctcagttttccaaaagacactgacatgtaattcttctctattgtaaggtttccatttagtttgcttccgatgattaaatctaagtcatttg

SEQ ID NO: 116889 - DNA, 1815 bp, Homo sapiens
  Payload ID: 2805
  Gene Symbol: CCT3
  Gene Name: chaperonin containing TCP1, subunit 3 (gamma)
  Uniprot ID: P49368
  ENST ID: ENST00000368259
  CDS Start-End: 62-1585
ctctccagaaggttctgccggttcccccagctctgggtacccggctctgcatcgcgtcgccatgatgggccatcgtccagtgctcgtgctcagccagaacacaaagcgtgaatccggaagaaaagttcaatctggaaacatcaatgctgccaagattcaagtccagcatccagcggccaagtccatgatcgaaattagccggacccaggatgaagaggttggagatgggaccacatcagtaattattcttgcaggggaaatgctgtctgtagctgagcacttcctggagcagcagatgcacccaacagtggtgatcagtgcttaccgcaaggcattggatgatatgatcagcaccctaaagaaaataagtatcccagtcgacatcagtgacagtgatatgatgctgaacatcatcaacagctctattactaccaaagccatcagtcggtggtcatctttggcttgcaacattgccctggatgctgtcaagatggtacagtttgaggagaatggtcggaaagagattgacataaaaaaatatgcaagagtggaaaagatacctggaggcatcattgaagactcctgtgtcttgcgtggagtcatgattaacaaggatgtgacccatccacgtatgcggcgctatatcaagaaccctcgcattgtgctgctggattcttctctggaatacaagaaaggagaaagccagactgacattgagattacacgagaggaggacttcacccgaattctccagatggaggaagagtacatccagcagctctgtgaggacattatccaactgaagcccgatgtggtcatcactgaaaagggcatctcagatttagctcagcactaccttatgcgggccaatatcacagccatccgcagagtccggaagacagacaataatcgcattgctagagcctgtggggcccggatagtcagccgaccagaggaactgagagaagatgatgttggaacaggagcaggcctgttggaaatcaagaaaattggagatgaatactttactttcatcactgactgcaaagaccccaaggcctgcaccattctcctccggggggctagcaaagagattctctcggaagtagaacgcaacctccaggatgccatgcaagtgtgtcgcaatgttctcctggaccctcagctggtgccagggggtggggcctccgagatggctgtggcccatgccttgacagaaaaatccaaggccatgactggtgtggaacaatggccatacagggctgttgcccaggccctagaggtcattcctcgtaccctgatccagaactgtggggccagcaccatccgtctacttacctcccttcgggccaagcacacccaggagaactgtgagacctggggtgtaaatggtgagacgggtactttggtggacatgaaggaactgggcatatgggagccattggctgtgaagctgcagacttataagacagcagtggagacggcagttctgctactgcgaattgatgacatcgtttcaggccacaaaaagaaaggcgatgaccagagccggcaaggcggggctcctgatgctggccaggagtgagtgctaggcaaggctacttcaatgcacagaaccagcagagtctccccttttcctgagccagagtgccaggaacactgtggacgtctttgttcagaagggatcaggttggggggcagcccccagtccctttctgtcccagctcagttttccaaaagacactgacatgtaattcttctctattgtaaggtttccatttagtttgcttccgatgattaaatctaagtcatttg

SEQ ID NO: 116890 - DNA, 2048 bp, Homo sapiens
  Payload ID: 2805
  Gene Symbol: CCT3
  Gene Name: chaperonin containing TCP1, subunit 3 (gamma)
  ENST ID: ENST00000368262
  CDS Start-End: 64-228
ctctctccagaaggttctgccggttcccccagctctgggtacccggctctgcatcgcgtcgccatgatgggccatcgtccagtgctcgtgctcaagacggagtttcaccatgttgaccaggctggtctccaactgctgatgagctcaggtgatccgcccacctcggcctcccaaagtgctgagattacaggcgtgagccaccgcgcccggtcccttatttttttctgatgagcaccacctccattgtcttcctttggccagaacacaaagcgtgaatccggaagaaaagttcaatctggaaacatcaatgctgccaagactattgcagatatcatccgaacatgtttgggacccaagtccatgatgaagatgcttttggacccaatgggaggcattgtgatgaccaatgatggcaatgccattcttcgagagattcaagtccagcatccagcggccaagtccatgatcgaaattagccggacccaggatgaagaggttggagatgggaccacatcagtaattattcttgcaggggaaatgctgtctgtagctgagcacttcctggagcagcagatgcacccaacagtggtgatcagtgcttaccgcaaggcattggatgatatgatcagcaccctaaagaaaataagtatcccagtcgacatcagtgacagtgatatgatgctgaacatcatcaacagctctattactaccaaagccatcagtcggtggtcatctttggcttgcaacattgccctggatgctgtcaagatggtacagtttgaggagaatggtcggaaagagattgacataaaaaaatatgcaagagtggaaaagatacctggaggcatcattgaagactcctgtgtcttgcgtggagtcatgattaacaaggatgtgacccatccacgtatgcggcgctatatcaagaaccctcgcattgtgctgctggattcttctctggaatacaagaaaggagaaagccagactgacattgagattacacgagaggaggacttcacccgaattctccagatggaggaagagtacatccagcagctctgtgaggacattatccaactgaagcccgatgtggtcatcactgaaaagggcatctcagatttagctcagcactaccttatgcgggccaatatcacagccatccgcagagtccggaagacagacaataatcgcattgctagagcctgtggggcccggatagtcagccgaccagaggaactgagagaagatgatgttggaacaggagcaggcctgttggaaatcaagaaaattggagatgaatactttactttcatcactgactgcaaagaccccaaggcctgcaccattctcctccggggggctagcaaagagattctctcggaagtagaacgcaacctccaggatgccatgcaagtgtgtcgcaatgttctcctggaccctcagctggtgccagggggtggggcctccgagatggctgtggcccatgccttgacagaaaaatccaaggccatgactggtgtggaacaatggccatacagggctgttgcccaggccctagaggtcattcctcgtaccctgatccagaactgtggggccagcaccatccgtctacttacctcccttcgggccaagcacacccaggagaactgtgagacctggggtgtaaatggtgagacgggtactttggtggacatgaaggaactgggcatatgggagccattggctgtgaagctgcagacttataagacagcagtggagacggcagttctgctactgcgaattgatgacatcgtttcaggccacaaaaagaaaggcgatgaccagagccggcaaggcggggctcctgatgctggccaggagtgagtgctaggcaaggctacttcaatgcacagaaccagcagagtctccccttttcctgagccagagtgccaggaacactgtggacgtctttgttcagaagggatcaggttggggggcagcccccagtccctttctgtcccagctcagttttccaaaagacactgacatgtaattcttctctattgtaa

SEQ ID NO: 116891 - DNA, 593 bp, Homo sapiens
  Payload ID: 2805
  Gene Symbol: CCT3
  Gene Name: chaperonin containing TCP1, subunit 3 (gamma)
  ENST ID: ENST00000446905
  CDS Start-End: 28-593
gagaattgcttcctgagaaggtaatgaatgtatgaaggtgatctggaaggacaatctatgaattggacaagtgaagaaggaagaggagacattataagaagtgggaccaacatagaccgagcctggcagtgccagaacacaaagcgtgaatccggaagaaaagttcaatctggaaacatcaatgctgccaagattcaagtccagcatccagcggccaagtccatgatcgaaattagccggacccaggatgaagaggttggagatgggaccacatcagtaattattcttgcaggggaaatgctgtctgtagctgagcacttcctggagcagcagatgcacccaacagtggtgatcagtgcttaccgcaaggcattggatgatatgatcagcaccctaaagaaaataagtatcccagtcgacatcagtgacagtgatatgatgctgaacatcatcaacagctctattactaccaaagccatcagtcggtggtcatctttggcttgcaacattgccctggatgctgtcaagatggtacagtttgaggagaatggtcggaaagagattgacataaaaaaatatgcaagagtggaaaa

SEQ ID NO: 116892 - DNA, 842 bp, Homo sapiens
  Payload ID: 2805
  Gene Symbol: CCT3
  Gene Name: chaperonin containing TCP1, subunit 3 (gamma)
  ENST ID: ENST00000413555
  CDS Start-End: 14-842
gagaaggtaatgaatgtatgaaggtgatctggaaggacaatctatgaattggacaagtgaagaaggaagaggagacattataagaagtgggaccaacatagaccgagcctggcagtgccagaacacaaagcgtgaatccggaagaaaagttcaatctggaaacatcaatgctgccaagactattgcagatatcatccgaacatgtttgggacccaagtccatgatgaagatgcttttggacccaatgggaggcattgtgatgaccaatgatggcaatgccattcttcgagagattcaagtccagcatccagcggccaagtccatgatcgaaattagccggacccaggatgaagaggttggagatgggaccacatcagtaattattcttgcaggggaaatgctgtctgtagctgagcacttcctggagcagcagatgcacccaacagtggtgatcagtgcttaccgcaaggcattggatgatatgatcagcaccctaaagaaaataagtatcccagtcgacatcagtgacagtgatatgatgctgaacatcatcaacagctctattactaccaaagccatcagtcggtggtcatctttggcttgcaacattgccctggatgctgtcaagatggtacagtttgaggagaatggtcggaaagagattgacataaaaaaatatgcaagagtggaaaagatacctggaggcatcattgaagactcctgtgtcttgcgtggagtcatgattaacaaggatgtgacccatccacgtatgcggcgctatatcaagaaccctcgcattgtgctgctggattcttctctggaatacaagaaaggagaaagcc

SEQ ID NO: 116893 - DNA, 513 bp, Homo sapiens
  Payload ID: 2805
  Gene Symbol: CCT3
  Gene Name: chaperonin containing TCP1, subunit 3 (gamma)
  ENST ID: ENST00000415548
  CDS Start-End: 31-513
tctgggtacccggctctgcatcgcgtcgccatgatgggccatcgtccagtgctcgtgctcagccagaacacaaagcgtgaatccggaagaaaagttcaatctggaaacatcaatgctgccaagactattgcagatatcatccgaacatgtttgggacccaagtccatgatgaagatgcttttggacccaatgggaggcattgtgatgaccaatgatggcaatgccattcttcgagagattcaagtccagcatccagcggccaagtccatgatcgaaattagccggacccaggatgaagaggttggagatgggaccacatcagtaattattcttgagtctcactctgtcaccatgctggagtgtggtggtgcgatcttggctcactgcaacctctgcctcccagcaggggaaatgctgtctgtagctgagcacttcctggagcagcagatgcacccaacagtggtgatcagtgcttaccgcaaggcattggatgatatgatcagcaccctaaag

SEQ ID NO: 116894 - DNA, 1858 bp, Homo sapiens
  Payload ID: 2805
  Gene Symbol: CCT3
  Gene Name: chaperonin containing TCP1, subunit 3 (gamma)
  ENST ID: ENST00000472765
  CDS Start-End: 322-1824
gtctggttctctctctccagaaggttctgccggttcccccagctctgggtacccggctctgcatcgcgtcgccatgatgggccatcgtccagtgctcgtgctcattaggtctagctttatattcttggcccatcccttagtagcggtaatttaaatgtttcaatctgtattacggagttaacagtatttcctagtagaattgtgagaattaaatgaggccagaacacaaagcgtgaatccggaagaaaagttcaatctggaaacatcaatgctgccaagactattgcagatatcatccgaacatgtttgggacccaagtccatgatgaagatgcttttggacccaatgggaggcattgtgatgaccaatgatggcaatgccattcttcgagagattcaagtccagcatccagcggccaagtccatgatcgaaattagccggacccaggatgaagaggttggagatgggaccacatcagtaattattcttgcaggggaaatgctgtctgtagctgagcacttcctggagcagcagatgcacccaacagtggtgatcagtgcttaccgcaaggcattggatgatatgatcagcaccctaaagaaaataagtatcccagtcgacatcagtgacagtgatatgatgctgaacatcatcaacagctctattactaccaaagccatcagtcggtggtcatctttggcttgcaacattgccctggatgctgtcaagatggtacagtttgaggagaatggtcggaaagagattgacataaaaaaatatgcaagagtggaaaagatacctggaggcatcattgaagactcctgtgtcttgcgtggagtcatgattaacaaggatgtgacccatccacgtatgcggcgctatatcaagaaccctcgcattgtgctgctggattcttctctggaatacaagaaaggagaaagccagactgacattgagattacacgagaggaggacttcacccgaattctccagatggaggaagagtacatccagcagctctgtgaggacattatccaactgaagcccgatgtggtcatcactgaaaagggcatctcagatttagctcagcactaccttatgcgggccaatatcacagccatccgcagagtccggaagacagacaataatcgcattgctagagcctgtggggcccggatagtcagccgaccagaggaactgagagaagatgatgttggaacaggagcaggcctgttggaaatcaagaaaattggagatgaatactttactttcatcactgactgcaaagaccccaaggcctgcaccattctcctccggggggctagcaaagagattctctcggaagtagaacgcaacctccaggatgccatgcaagtgtgtcgcaatgttctcctggaccctcagctggtgccagggggtggggcctccgagatggctgtggcccatgccttgacagaaaaatccaaggccatgactggtgtggaacaatggccatacagggctgttgcccaggccctagaggtcattcctcgtaccctgatccagaactgtggggccagcaccatccgtctacttacctcccttcgggccaagcacacccaggagaactgtgagacctggggtgtaaatggtgagacgggtactttggtggacatgaaggaactgggcatatgggagccattggctgtgaagctgcagacttataagacagcagtggagacggcagttctgctactgcgaattgatgacatcgtttcaggccacaaaaagaaaggcgatgaccagagccggcaaggcggggctcctgatgctggccaggagtgagtgctaggcaaggctacttcaatgcacagaacca

SEQ ID NO: 116895 - DNA, 748 bp, Homo sapiens
  Payload ID: 2805
  Gene Symbol: CCT3
  Gene Name: chaperonin containing TCP1, subunit 3 (gamma)
  ENST ID: ENST00000496684
  CDS Start-End: 46-748
gccggttcccccagctctgggtacccggctctgcatcgcgtcgccatgatgggccatcgtccagtgctcgtgctcagccagaacacaaagcgtgaatccggaagaaaagttcaatctggaaacatcaatgctgccaagactattgcagatatcatccgaacatgtttgggacccaagtccatgatgaagatgcttttggacccaatgggaggcattgtgatgaccaatgatggcaatgccattcttcgagagattcaagtccagcatccagcggccaagtccatgatcgaaattagccggacccaggatgaagaggttggagatgggaccacatcagtaattattcttggggaaatgctgtctgtagctgagcacttcctggagcagcagatgcacccaacagtggtgatcagtgcttaccgcaaggcattggatgatatgatcagcaccctaaagaaaataagtatcccagtcgacatcagtgacagtgatatgatgctgaacatcatcaacagctctattactaccaaagccatcagtcggtggtcatctttggcttgcaacattgccctggatgctgtcaagatggtacagtttgaggagaatggtcggaaagagattgacataaaaaaatatgcaagagtggaaaagatacctggaggcatcattgaagactcctgtgtcttgcgtggagtcatgattaacaaggatgtgacccatccacgtatgcggcgctatatcaagaacc

SEQ ID NO: 116896 - DNA, 581 bp, Homo sapiens
  Payload ID: 2805
  Gene Symbol: CCT3
  Gene Name: chaperonin containing TCP1, subunit 3 (gamma)
  ENST ID: ENST00000533194
  CDS Start-End: 149-581
gtaagccctgaggaggcagcgttttctgggcttctgtctggttctctctctccagaaggttctgccggttcccccagctctgggtacccggctctgcatcgcgtcgccatgatgggccatcgtccagtgctcgtgctcagccaagtccatgatcgaaattagccggacccaggatgaagaggttggagatgggaccacatcagtaattattcttgcaggggaaatgctgtctgtagctgagcacttcctggagcagcagatgcacccaacagtggtgatcagtgcttaccgcaaggcattggatgatatgatcagcaccctaaagaaaataagtatcccagtcgacatcagtgacagtgatatgatgctgaacatcatcaacagctctattactaccaaagccatcagtcggtggtcatctttggcttgcaacattgccctggatgctgtcaagatggtacagtttgaggagaatggtcggaaagagattgacataaaaaaatatgcaagagtggaaaagatacctggaggcatcattgaagactcctgtgtcttgcgtggagtcatgattaacaaggatg

SEQ ID NO: 116897 - DNA, 583 bp, Homo sapiens
  Payload ID: 2805
  Gene Symbol: CCT3
  Gene Name: chaperonin containing TCP1, subunit 3 (gamma)
  ENST ID: ENST00000478640
  CDS Start-End: 122-583
agcgggttgaggtgtaagccctgaggaggcagcgttttctgggcttctgtctggttctctctctccagaaggttctgccggttcccccagctctgggtacccggctctgcatcgcgtcgccatgatgggccatcgtccagtgctcgtgctcagccagaacacaaagcgtgaatccggaagaaaagttcaatctggaaacatcaatgctgccaagactattgcagatatcatccgaacatgtttgggacccaagtccatgatgaagattcaagtccagcatccagcggccaagtccatgatcgaaattagccggacccaggatgaagaggttggagatgggaccacatcagtaattattcttgcaggggaaatgctgtctgtagctgagcacttcctggagcagcagatgcacccaacagtggtgatcagtgcttaccgcaaggcattggatgatatgatcagcaccctaaagaaaataagtatcccagtcgacatcagtgacagtgatatgatgctgaacatcatcaacagctctattactaccaaagccatcagtcggtggtcatctttggcttgcaacatt

SEQ ID NO: 116898 - DNA, 2520 bp, Homo sapiens
  Payload ID: 2806
  Gene Symbol: CCT4
  Gene Name: chaperonin containing TCP1, subunit 4 (delta)
  Uniprot ID: P50991
  ENST ID: ENST00000394440
  CDS Start-End: 298-1917
gcgtaaaggttcccccggcgctcttcacccacagcgccccgggcgtacaatctcgccagcccggagcccaccgcacgcatcctcctcgcccggcgcgcagcggacagcctcctacgtcacgccagcgccgcgcggcaaggaaggcccccttctccgcctccgcctcctcccgacgccggcgccgctttctggaaggttcgtgaaggcagtgagggcttaccgttattacactgcggccggccagaatccgggtccatccgtccttcccgagccaacccagacacagcggagtttgccatgcccgagaatgtggcaccccggagcggggcgactgccggggctgccggcggccgcgggaaaggcgcctatcaggaccgcgacaagccagcccagatccgcttcagcaacatttccgccgccaaagcggttgctgatgctattagaacaagccttggaccaaaaggaatggataaaatgattcaagatggaaaaggtgatgtaaccattacaaatgatggtgctaccattctgaaacaaatgcaagtattacatccagcagccagaatgctggtggagctgtctaaggctcaagatatagaagcaggagatggcaccacatcagtagtcatcattgctggctccctcttagattcttgtaccaagcttcttcagaaagggattcatccaaccatcatttctgagtcattccagaaggccctggaaaagggcattgaaatcttgactgacatgtctcgacctgtggaactgagtgacagagaaactttgttaaatagtgcaaccacttcactgaactcaaaggtggtttctcagtattcaagtctgctttctccaatgagtgtaaatgcagtgatgaaagtgattgacccagccacagccaccagtgtagatcttagagatattaaaatagttaagaagcttggtgggacaattgatgactgtgagttggtggaagggctggttctcacccaaaaagtgtcaaattctggcataaccagagttgaaaaggccaagattgggcttattcagttttgcttatctgctcccaaaacagacatggataatcaaatagtggtttctgactatgcccagatggaccgagtgctgcgagaagagagagcctatattttaaatttagtgaagcaaattaaaaaaacaggatgtaatgtccttctcatacagaaatctattctaagagatgctcttagtgatcttgcattacactttctgaataaaatgaagatcatggtgattaaggatattgaaagagaagacattgaattcatttgtaagacaattggaaccaagccagttgctcatattgaccaatttactgctgacatgctgggttctgctgagttagctgaggaggtcaatttaaatggttctggcaaactgctcaagattacaggctgtgccagccctggaaaaacagttacaattgttgttcgtggttctaacaaactggtgattgaagaagctgagcgctccattcatgatgccctatgtgttattcgttgtttagtgaagaagagggctcttattgcaggaggtggtgctccagaaatagagttggccctacgattaactgaatattcacgaacactgagtggtatggaatcctactgcgttcgtgcttttgcagatgctatggaggtcattccatctacactagctgaaaatgccggcctgaatcccatttctacagtaacagaactaagaaaccggcatgcccagggagaaaaaactgcaggcattaatgtccgaaagggtggtatttccaacattttggaggaactggttgtccagcctctgttggtatcagtcagtgctctgactcttgcaactgaaactgttcggagcattctgaaaatagatgatgtggtaaacactcgataatctggataactgactagcaccattatgatcaccagtattgtggctggaatggaagaagatcaccttggtgttccttgtttggaagattatttcctctgaatttctgggcttggtcttccagttggcatttgcctgaagttgtattgaaacaatttaatgaaaatattaaatatttggtttcaaaaggcagatttatcttctcccaacattctgttatttctgatacttttgaaaaactaataaaaactaataaaagaagcgtaaaaagtgagtttacatgttgaggaaaaaaatggcccaatatgctcatcactgataaatgctccctggccttaaaaactaccaacatataatatatatgctgtcttaaaagttaatgatccaagtggcacctctctgaacctactttggcttgggaggctgcccagttaaaacaaaaataagttaatggtacagaaagagaatgaaaaatgaaagcctccttttatcctatcatcctaattccttttcccagtaataatgactgctgtgttggattccttctgcaaataaaagtgtatacatatatgtagcaaatcttacttaaacaaaagggtttcttaa

SEQ ID NO: 116899 - DNA, 2261 bp, Homo sapiens
  Payload ID: 2806
  Gene Symbol: CCT4
  Gene Name: chaperonin containing TCP1, subunit 4 (delta)
  Uniprot ID: P50991
  ENST ID: ENST00000544079
  CDS Start-End: 165-1694
ggcaaggaaggcccccttctccgcctccgcctcctcccgacgccggcgccgctttctggaaggttcgtgaaggcagtgagggcttaccgttattacactgcggccggccagaatccgggtccatccgtccttcccgagccaacccagacacagcggagtttgccatgcccgagaatgtggcaccccggagcggggcgactgccggggctgccggcggccgcgggaaaggcgcctatcaggaccgcgacaagccagcccagatccgcttcagcaacatttccgccgccaaagcggttgctgatgctattagaacaagccttggaccaaaaggaatggataaaatgctggtggagctgtctaaggctcaagatatagaagcaggagatggcaccacatcagtagtcatcattgctggctccctcttagattcttgtaccaagcttcttcagaaagggattcatccaaccatcatttctgagtcattccagaaggccctggaaaagggcattgaaatcttgactgacatgtctcgacctgtggaactgagtgacagagaaactttgttaaatagtgcaaccacttcactgaactcaaaggtggtttctcagtattcaagtctgctttctccaatgagtgtaaatgcagtgatgaaagtgattgacccagccacagccaccagtgtagatcttagagatattaaaatagttaagaagcttggtgggacaattgatgactgtgagttggtggaagggctggttctcacccaaaaagtgtcaaattctggcataaccagagttgaaaaggccaagattgggcttattcagttttgcttatctgctcccaaaacagacatggataatcaaatagtggtttctgactatgcccagatggaccgagtgctgcgagaagagagagcctatattttaaatttagtgaagcaaattaaaaaaacaggatgtaatgtccttctcatacagaaatctattctaagagatgctcttagtgatcttgcattacactttctgaataaaatgaagatcatggtgattaaggatattgaaagagaagacattgaattcatttgtaagacaattggaaccaagccagttgctcatattgaccaatttactgctgacatgctgggttctgctgagttagctgaggaggtcaatttaaatggttctggcaaactgctcaagattacaggctgtgccagccctggaaaaacagttacaattgttgttcgtggttctaacaaactggtgattgaagaagctgagcgctccattcatgatgccctatgtgttattcgttgtttagtgaagaagagggctcttattgcaggaggtggtgctccagaaatagagttggccctacgattaactgaatattcacgaacactgagtggtatggaatcctactgcgttcgtgcttttgcagatgctatggaggtcattccatctacactagctgaaaatgccggcctgaatcccatttctacagtaacagaactaagaaaccggcatgcccagggagaaaaaactgcaggcattaatgtccgaaagggtggtatttccaacattttggaggaactggttgtccagcctctgttggtatcagtcagtgctctgactcttgcaactgaaactgttcggagcattctgaaaatagatgatgtggtaaacactcgataatctggataactgactagcaccattatgatcaccagtattgtggctggaatggaagaagatcaccttggtgttccttgtttggaagattatttcctctgaatttctgggcttggtcttccagttggcatttgcctgaagttgtattgaaacaatttaatgaaaatattaaatatttggtttcaaaaggcagatttatcttctcccaacattctgttatttctgatacttttgaaaaactaataaaaactaataaaagaagcgtaaaaagtgagtttacatgttgaggaaaaaaatggcccaatatgctcatcactgataaatgctccctggccttaaaaactaccaacatataatatatatgctgtcttaaaagttaatgatccaagtggcacctctctgaacctactttggcttgggaggctgcccagttaaaacaaaaataagttaatggtacagaaagagaatgaaaaatgaaagcctccttttatcctatcatcctaattccttttcccagtaataatgactgctgtgttggattccttctgcaaataaaagtgtatacatata

SEQ ID NO: 116900 - DNA, 3675 bp, Homo sapiens
  Payload ID: 2807
  Gene Symbol: CCT5
  Gene Name: chaperonin containing TCP1, subunit 5 (epsilon)
  Uniprot ID: P48643
  ENST ID: ENST00000280326
  CDS Start-End: 421-2046
aaaaaaaaaaaaaaccggaaatgggtcctaccatcttctcggagccggagtgcgaagaaataaagaaatagtgctttaagtcaatgaattcctccttgggacccactatcgagaaactatcagtggtaacgttttaaaaaatgacaaattcaatctgctcttgacttgtgtgtcctaagatttccactaagtgtcttcaaacctccccctccccggcttcctggataatagaagttcccgaaggccgccgattccagaagatactgtctggcgtgaaattagtctcagtagaaacataagtcccgcgcgtcttgtgctgcgcgtgcgcaagcttttgggccctcccgagaaagggaagtgcattctcgcttccgtagcggtctccgccggttggggggaagtaattccggttgttgcaccatggcgtccatggggaccctcgccttcgatgaatatgggcgccctttcctcatcatcaaggatcaggaccgcaagtcccgtcttatgggacttgaggccctcaagtctcatataatggcagcaaaggctgtagcaaatacaatgagaacatcacttggaccaaatgggcttgataagatgatggtggataaggatggagatgtgactgtaactaatgatggggccaccatcttaagcatgatggatgttgatcatcagattgccaagctgatggtggaactgtccaagtctcaggatgatgaaattggagatggaaccacaggagtggttgtcctggctggtgccttgttagaagaagcggagcaattgctagaccgaggcattcacccaatcagaatagccgatggctatgagcaggctgctcgtgttgctattgaacacctggacaagatcagcgatagcgtccttgttgacataaaggacaccgaacccctgattcagacagcaaaaaccacgctgggctccaaagtggtcaacagttgtcaccgacagatggctgagattgctgtgaatgccgtcctcactgtagcagatatggagcggagagacgttgactttgagcttatcaaagtagaaggcaaagtgggcggcaggctggaggacactaaactgattaagggcgtgattgtggacaaggatttcagtcacccacagatgccaaaaaaagtggaagatgcgaagattgcaattctcacatgtccatttgaaccacccaaaccaaaaacaaagcataagctggatgtgacctctgtcgaagattataaagcccttcagaaatacgaaaaggagaaatttgaagagatgattcaacaaattaaagagactggtgctaacctagcaatttgtcagtggggctttgatgatgaagcaaatcacttacttcttcagaacaacttgcctgcggttcgctgggtaggaggacctgaaattgagctgattgccatcgcaacaggagggcggatcgtccccaggttctcagagctcacagccgagaagctgggctttgctggtcttgtacaggagatctcatttgggacaactaaggataaaatgctggtcatcgagcagtgtaagaactccagagctgtaaccatttttattagaggaggaaataagatgatcattgaggaggcgaaacgatcccttcacgatgctttgtgtgtcatccggaacctcatccgcgataatcgtgtggtgtatggaggaggggctgctgagatatcctgtgccctggcagttagccaagaggcggataagtgccccaccttagaacagtatgccatgagagcgtttgccgacgcactggaggtcatccccatggccctctctgaaaacagtggcatgaatcccatccagactatgaccgaagtccgagccagacaggtgaaggagatgaaccctgctcttggcatcgactgtttgcacaaggggacaaatgatatgaagcaacagcatgtcatagaaaccttgattggcaaaaagcaacagatatctcttgcaacacaaatggttagaatgattttgaagattgatgacattcgtaagcctggagaatctgaagaatgaagacattgagaaaactatgtagcaagatccacttctgtgattaagtaaatggatgtctcgtgatgcatctacagttatttattgttacatccttttccagacactgtagatgctataataaaaatagctgtttggtaaccatagtttcacttgttcaaagctgtgtaatcgtgggggtaccatctcaactgcttttgtattcattgtattaaaagaatctgtttaaacaacctttatcttctcttcgggtttaagaaacgtttattgtaacagtaattaaatgctgccttaattgaaggggtttgggtggatttttttttctcaaaataagctgtagggactattttaacagcttaaacaggagctctcaagatgcactttcatattgagaggaatatgggcttgatcctcttcctatctaaatgggtgggccatttgattgtagagggtccaccacagaattatgggatgccttaagtgctgttactaggttgctcacagcctaacctggcgtgttgtttagggctgatggagacccatgtgagcctttgctttcctctggccccggccccaccctgaacacagctcatacacagaatcaggaccagcatgtgcagagctggccaccagcacaggcttagggcagttcagaacccacttgtttccctatcagagggacacagtgaagtggaggttaaagtaaattacaggaaataagggagaaatcttgcagttaccatgttcagatagagtgactgaaattaattgtacttactaaagtattaactagctaacagtgatgggccaagacgctccgagaactctaccgggattgtctgttctgacaacccagtgaggcagatacactttcttactgctcacatcttacaggtgagtactcataattggccagcatctcaccaccagcaagtagtagggccaggtcaatcccaggcagtctgaccccagagtggcccagctcatcccctactctgttatttgcttgttaatgattctctagattttctaaaataatgtttcttagcattgtgatgataaagctcatgatgaactttatcactagttatgccaccttaactagtcagatttcctagaattaggaaatggtgactcttgtctaaatttggttaagtgatgaatttgggttaccgtctcatgtgaacctggagattcaccagtcttaacttttgggtcattgtgttttctctacattcatgcattggatgttttgctaaataactcctgtggatttaggaatgtgtgctaatagcaatcttcctaattttcatgtttatatggaactatgcagttgagtattgaaagctttaaactgagtttatttacaaggactgagtctagcctacagagaacatacagcagccttctttggaccacagtcttatccgaggggtctgtggttgtatcagaagagccactaaaccaatccccctttccaaaattgaacctcacagacgttcctgttttttgtgattgagaaactggtcaatgaacaggaagacttagagatgtttcacaagcctttgatttttgtttcatttatttgtaataaacctcttccacgtgatgtcttttatttttcacgttcca

SEQ ID NO: 116901 - DNA, 762 bp, Homo sapiens
  Payload ID: 2807
  Gene Symbol: CCT5
  Gene Name: chaperonin containing TCP1, subunit 5 (epsilon)
  ENST ID: ENST00000503454
  CDS Start-End: 1-188
tcgccttcgatgaatatgggcgccctttcctcatcatcaaggatcaggaccgcaagtcccgtcttatgggacttgaggccctcaagtctcatataatggcagcaaaggctgtagcaaatacaatgagaacatcacttggaccaaatgattgccaagctgatggtggaactgtccaagtctcaggatgatgaaattggagatggaaccacaggagtggttgtcctggctggtgccttgttagaagaagcggagcaattgctagaccgaggcattcacccaatcagaatagccgatggctatgagcaggctgctcgtgttgctattgaacacctggacaagatcagcgatagcgtccttgttgacataaaggacaccgaacccctgattcagacagcaaaaaccacgctgggctccaaagtggtcaacagttgtcaccgacagatggctgagattgctgtgaatgccgtcctcactgtagcagatatggagcggagagacgttgactttgagcttatcaaagtagaaggcaaagtgggcggcaggctggaggacactaaactgattaagggcgtgattgtggacaaggatttcagtcacccacagatgccaaaaaaagtggaagatgcgaagattgcaattctcacatgtccatttgaaccacccaaaccaaaaacaaagcataagctggatgtgacctctgtcgaagattataaagcccttcagaaatacgaaaaggagaaatttgaagagatgattcaacaa

SEQ ID NO: 116902 - DNA, 1939 bp, Homo sapiens
  Payload ID: 2807
  Gene Symbol: CCT5
  Gene Name: chaperonin containing TCP1, subunit 5 (epsilon)
  Uniprot ID: P48643
  ENST ID: ENST00000506600
  CDS Start-End: 365-1711
gtgctccccggaaaggtcgagaatctccgtctccctgcggtctccggccgctcagcccgcttactgagctcgggagacgccggcgcctaatcctgggctcggaatgtgggggccagccaggctgggccgccagcgcccttcggagctgggtggggccgctcagtccggtcgcccgcgggagcaaagcgggaccgcctccccgcccggctcctccagcctgacggccgcgtgggactgcgctccagtgggagggcgccggggagatgctctgtcacctgtcggttaaggcgctgctgcttaacctttcgctggtccacccgcaacggcccttccgttttctttgtcactcgtaaagtctcatataatggcagcaaaggctgtagcaaatacaatgagaacatcacttggaccaaatgtcctggctggtgccttgttagaagaagcggagcaattgctagaccgaggcattcacccaatcagaatagccgatggctatgagcaggctgctcgtgttgctattgaacacctggacaagatcagcgatagcgtccttgttgacataaaggacaccgaacccctgattcagacagcaaaaaccacgctgggctccaaagtggtcaacagttgtcaccgacagatggctgagattgctgtgaatgccgtcctcactgtagcagatatggagcggagagacgttgactttgagcttatcaaagtagaaggcaaagtgggcggcaggctggaggacactaaactgattaagggcgtgattgtggacaaggatttcagtcacccacagatgccaaaaaaagtggaagatgcgaagattgcaattctcacatgtccatttgaaccacccaaaccaaaaacaaagcataagctggatgtgacctctgtcgaagattataaagcccttcagaaatacgaaaaggagaaatttgaagagatgattcaacaaattaaagagactggtgctaacctagcaatttgtcagtggggctttgatgatgaagcaaatcacttacttcttcagaacaacttgcctgcggttcgctgggtaggaggacctgaaattgagctgattgccatcgcaacaggagggcggatcgtccccaggttctcagagctcacagccgagaagctgggctttgctggtcttgtacaggagatctcatttgggacaactaaggataaaatgctggtcatcgagcagtgtaagaactccagagctgtaaccatttttattagaggaggaaataagatgatcattgaggaggcgaaacgatcccttcacgatgctttgtgtgtcatccggaacctcatccgcgataatcgtgtggtgtatggaggaggggctgctgagatatcctgtgccctggcagttagccaagaggcggataagtgccccaccttagaacagtatgccatgagagcgtttgccgacgcactggaggtcatccccatggccctctctgaaaacagtggcatgaatcccatccagactatgaccgaagtccgagccagacaggtgaaggagatgaaccctgctcttggcatcgactgtttgcacaaggggacaaatgatatgaagcaacagcatgtcatagaaaccttgattggcaaaaagcaacagatatctcttgcaacacaaatggttagaatgattttgaagattgatgacattcgtaagcctggagaatctgaagaatgaagacattgagaaaactatgtagcaagatccacttctgtgattaagtaaatggatgtctcgtgatgcatctacagttatttattgttacatccttttccagacactgtagatgctataataaaaatagctgtttggtaaccatagtttcacttgttcaaagctgtgtaatcgtgggggtaccatctcaactgcttttgtattcattgtattaaaagaatctgtttaaac

SEQ ID NO: 116903 - DNA, 582 bp, Homo sapiens
  Payload ID: 2807
  Gene Symbol: CCT5
  Gene Name: chaperonin containing TCP1, subunit 5 (epsilon)
  ENST ID: ENST00000511700
  CDS Start-End: 1-267
gtgcgcaagcttttgggccctcccgagaaagggaagtgcattctcgcttccgtagcggtctccgccggttggggggaagtaattccggttgttgcaccatggcgtccatggggaccctcgccttcgatgaatatgggcgccctttcctcatcatcaaggatcaggaccgcaagtcccgtcttatgggacttgaggccctcaagtctcaggatgatgaaattggagatggaaccacaggagtggttgtcctggctggtgccttgttagaagaagcggagcaattgctagaccgaggcattcacccaatcagaatagccgatggctatgagcaggctgctcgtgttgctattgaacacctggacaagatcagcgatagcgtccttgttgacataaaggacaccgaacccctgattcagacagcaaaaaccacgctgggctccaaagtggtcaacagttgtcaccgacagatggctgagattgctgtgaatgccgtcctcactgtagcagatatggagcggagagacgttgactttgagcttatcaaagtagaaggcaaagtgggcggcaggctggaggacacta

SEQ ID NO: 116904 - DNA, 1933 bp, Homo sapiens
  Payload ID: 2807
  Gene Symbol: CCT5
  Gene Name: chaperonin containing TCP1, subunit 5 (epsilon)
  ENST ID: ENST00000503026
  CDS Start-End: 76-1638
aaaaaaccggaaatgggtcctaccatcttctcggagccggagtgcgaagaaataaagaaatagtgctttaagtcaatgaattcctccttgggacccactatcgagaaactatcagtgtctcatataatggcagcaaaggctgtagcaaatacaatgagaacatcacttggaccaaatgggcttgataagatgatggtggataaggatggagatgtgactgtaactaatgatggggccaccatcttaagcatgatggatgttgatcatcagattgccaagctgatggtggaactgtccaagtctcaggatgatgaaattggagatggaaccacaggagtggttgtcctggctggtgccttgttagaagaagcggagcaattgctagaccgaggcattcacccaatcagaatagccgatggctatgagcaggctgctcgtgttgctattgaacacctggacaagatcagcgatagcgtccttgttgacataaaggacaccgaacccctgattcagacagcaaaaaccacgctgggctccaaagtggtcaacagttgtcaccgacagatggctgagattgctgtgaatgccgtcctcactgtagcagatatggagcggagagacgttgactttgagcttatcaaagtagaaggcaaagtgggcggcaggctggaggacactaaactgattaagggcgtgattgtggacaaggatttcagtcacccacagatgccaaaaaaagtggaagatgcgaagattgcaattctcacatgtccatttgaaccacccaaaccaaaaacaaagcataagctggatgtgacctctgtcgaagattataaagcccttcagaaatacgaaaaggagaaatttgaagagatgattcaacaaattaaagagactggtgctaacctagcaatttgtcagtggggctttgatgatgaagcaaatcacttacttcttcagaacaacttgcctgcggttcgctgggtaggaggacctgaaattgagctgattgccatcgcaacaggagggcggatcgtccccaggttctcagagctcacagccgagaagctgggctttgctggtcttgtacaggagatctcatttgggacaactaaggataaaatgctggtcatcgagcagtgtaagaactccagagctgtaaccatttttattagaggaggaaataagatgatcattgaggaggcgaaacgatcccttcacgatgctttgtgtgtcatccggaacctcatccgcgataatcgtgtggtgtatggaggaggggctgctgagatatcctgtgccctggcagttagccaagaggcggataagtgccccaccttagaacagtatgccatgagagcgtttgccgacgcactggaggtcatccccatggccctctctgaaaacagtggcatgaatcccatccagactatgaccgaagtccgagccagacaggtgaaggagatgaaccctgctcttggcatcgactgtttgcacaaggggacaaatgatatgaagcaacagcatgtcatagaaaccttgattggcaaaaagcaacagatatctcttgcaacacaaatggttagaatgattttgaagattgatgacattcgtaagcctggagaatctgaagaatgaagacattgagaaaactatgtagcaagatccacttctgtgattaagtaaatggatgtctcgtgatgcatctacagttatttattgttacatccttttccagacactgtagatgctataataaaaatagctgtttggtaaccatagtttcacttgttcaaagctgtgtaatcgtgggggtaccatctcaactgcttttgtattcattgtattaaaagaatctgtttaaacaacctttatcttctcttcgggtttaagaaacgtttattgtaacagtaattaaatgctgccttaattg

SEQ ID NO: 116905 - DNA, 578 bp, Homo sapiens
  Payload ID: 2807
  Gene Symbol: CCT5
  Gene Name: chaperonin containing TCP1, subunit 5 (epsilon)
  ENST ID: ENST00000512975
  CDS Start-End: 23-157
aagtaattccggttgttgcaccatggcgtccatggggaccctcgccttcgatgaatatgggcgccctttcctcatcatcaaggatcaggaccgcaagtcccgtcttatgggacttgaggccctcaagggtcaacagttgtcaccgacagatggctgagattgctgtgaatgccgtcctcactgtagcagatatggagcggagagacgttgactttgagcttatcaaagtagaaggcaaagtgggcggcaggctggaggacactaaactgattaagggcgtgattgtggacaaggatttcagtcacccacagatgccaaaaaaagtggaagatgcgaagattgcaattctcacatgtccatttgaaccacccaaaccaaaaacaaagcataagctggatgtgacctctgtcgaagattataaagcccttcagaaatacgaaaaggagaaatttgaagagatgattcaacaaattaaagagactggtgctaacctagcaatttgtcagtggggctttgatgatgaagcaaatcacttacttcttcagaacaacttgcctgcggttcgctgggtaggagga

SEQ ID NO: 116906 - DNA, 1728 bp, Homo sapiens
  Payload ID: 2807
  Gene Symbol: CCT5
  Gene Name: chaperonin containing TCP1, subunit 5 (epsilon)
  ENST ID: ENST00000515390
  CDS Start-End: 126-1586
ataagtcccgcgcgtcttgtgctgcgcgtgcgcaagcttttgggccctcccgagaaagggaagtgcattctcgcttccgtagcggtctccgccggttggggggaagtaattccggttgttgcaccatggcgtccatggggaccctcgccttcgatgaatatgggcgccctttcctcatcatcaaggatcaggaccgcaagtcccgtcttatgggacttgaggccctcaagtctcatataatggcagcaaaggctgtagcaaatacaatgagaacatcacttggaccaaatgtcctggctggtgccttgttagaagaagcggagcaattgctagaccgaggcattcacccaatcagaatagccgatggctatgagcaggctgctcgtgttgctattgaacacctggacaagatcagcgatagcgtccttgttgacataaaggacaccgaacccctgattcagacagcaaaaaccacgctgggctccaaagtggtcaacagttgtcaccgacagatggctgagattgctgtgaatgccgtcctcactgtagcagatatggagcggagagacgttgactttgagcttatcaaagtagaaggcaaagtgggcggcaggctggaggacactaaactgattaagggcgtgattgtggacaaggatttcagtcacccacagatgccaaaaaaagtggaagatgcgaagattgcaattctcacatgtccatttgaaccacccaaaccaaaaacaaagcataagctggatgtgacctctgtcgaagattataaagcccttcagaaatacgaaaaggagaaatttgaagagatgattcaacaaattaaagagactggtgctaacctagcaatttgtcagtggggctttgatgatgaagcaaatcacttacttcttcagaacaacttgcctgcggttcgctgggtaggaggacctgaaattgagctgattgccatcgcaacaggagggcggatcgtccccaggttctcagagctcacagccgagaagctgggctttgctggtcttgtacaggagatctcatttgggacaactaaggataaaatgctggtcatcgagcagtgtaagaactccagagctgtaaccatttttattagaggaggaaataagatgatcattgaggaggcgaaacgatcccttcacgatgctttgtgtgtcatccggaacctcatccgcgataatcgtgtggtgtatggaggaggggctgctgagatatcctgtgccctggcagttagccaagaggcggataagtgccccaccttagaacagtatgccatgagagcgtttgccgacgcactggaggtcatccccatggccctctctgaaaacagtggcatgaatcccatccagactatgaccgaagtccgagccagacaggtgaaggagatgaaccctgctcttggcatcgactgtttgcacaaggggacaaatgatatgaagcaacagcatgtcatagaaaccttgattggcaaaaagcaacagatatctcttgcaacacaaatggttagaatgattttgaagattgatgacattcgtaagcctggagaatctgaagaatgaagacattgagaaaactatgtagcaagatccacttctgtgattaagtaaatggatgtctcgtgatgcatctacagttatttattgttacatccttttccagacactgtagatgctataataaaaatagctgtttggtaaccat

SEQ ID NO: 116907 - DNA, 1997 bp, Homo sapiens
  Payload ID: 2807
  Gene Symbol: CCT5
  Gene Name: chaperonin containing TCP1, subunit 5 (epsilon)
  ENST ID: ENST00000515676
  CDS Start-End: 367-1878
atgtgctccccggaaaggtcgagaatctccgtctccctgcggtctccggccgctcagcccgcttactgagctcgggagacgccggcgcctaatcctgggctcggaatgtgggggccagccaggctgggccgccagcgcccttcggagctgggtggggccgctcagtccggtcgcccgcgggagcaaagcgggaccgcctccccgcccggctcctccagcctgacggccgcgtgggactgcgctccagtgggagggcgccggggagatgctctgtcacctgtcggttaaggcgctgctgcttaacctttcgctggtccacccgcaacggcccttccgttttctttgtcactcgtaaagtctcatataatggcagcaaaggctgtagcaaatacaatgagaacatcacttggaccaaatgggcttgataagatgatggtggataaggatggagatgtgactgtaactaatgatggggccaccatcttaagcatgatggatgttgatcatcagattgccaagctgatggtggaactgtccaagtctcaggatgatgaaattggagatggaaccacaggagtggttgtcctggctggtgccttgttagaagaagcggagcaattgctagaccgaggcattcacccaatcagaatagccgatggctatgagcaggctgctcgtgttgctattgaacacctggacaagatcagcgatagcgtccttgttgacataaaggacaccgaacccctgattcagacagcaaaaaccacgctgggctccaaagtggtcaacagttgtcaccgacagatggctgagattgctgtgaatgccgtcctcactgtagcagatatggagcggagagacgttgactttgagcttatcaaagtagaaggcaaagtgggcggcaggctggaggacactaaactgattaagggcgtgattgtggacaaggatttcagtcacccacagatgccaaaaaaagtggaagatgcgaagattgcaattctcacatgtccatttgaaccacccaaaccaaaaacaaagcataagctggatgtgacctctgtcgaagattataaagcccttcagaaatacgaaaaggagaaatttgaagagatgattcaacaaattaaagagactggtgctaacctagcaatttgtcagtggggctttgatgatgaagcaaatcacttacttcttcagaacaacttgcctgcggttcgctgggtaggaggacctgaaattgagctgattgccatcgcaacaggagggcggatcgtccccaggttctcagagctcacagccgagaagctgggctttgctggtcttgtacaggagatctcatttgggacaactaaggataaaatgctggtcatcgagcagtgtaagaactccagagctgtaaccatttttattagaggaggaaataagatgatcattgaggaggcgaaacgatcccttcacgatgctttgtgtgtcatccggaacctcatccgcgataatcgtgtggtgtatggaggaggggctgctgagatatcctgtgccctggcagttagccaagaggcggataagtgccccaccttagaacagtatgccatgagagcgtttgccgacgcactggaggtcatccccatggccctctctgaaaacagtggcatgaatcccatccagactatgaccgaagtccgagccagacaggtgaaggagatgaaccctgctcttggcatcgactgtttgcacaaggggacaaatgatatgaagcaacagcatgtcatagaaaccttgattggcaaaaagcaacagatatctcttgcaacacaaatggttagaatgattttgaagattgatgacattcgtaagcctggagaatctgaagaatgaagacattgagaaaactatgtagcaagatccacttctgtgattaagtaaatggatgtctcgtgatgcatctacagttatttattgttacatccttttccagacactgtagatgctataat

SEQ ID NO: 116908 - DNA, 135 bp, Homo sapiens
  Payload ID: 2807
  Gene Symbol: CCT5
  Gene Name: chaperonin containing TCP1, subunit 5 (epsilon)
  ENST ID: ENST00000625723
  CDS Start-End: 1-135
atggcgtccatggggaccctcgccttcgatgaatatgggcgccctttcctcatcatcaaggatcaggaccgcaagtcccgtcttatgggacttgaggccctcaagggtcaacagttgtcaccgacagatggctga

SEQ ID NO: 116909 - DNA, 2719 bp, Homo sapiens
  Payload ID: 2808
  Gene Symbol: CCT6A
  Gene Name: chaperonin containing TCP1, subunit 6A (zeta 1)
  Uniprot ID: P40227
  ENST ID: ENST00000275603
  CDS Start-End: 220-1815
caaggccgaggcgcgaagggtgggaccgcaggagccgtgcagccgcggaccaatgagcgggcgccggacgacctgtggcccaatggcggcggcgcgcgggcacgctgggggccggccagacgggccgacttttccagaagacccggatagttcctcccggccacgccgcgccggctctgggcactcagcatcgtttccttttcctccgctggagcagctatggcggcggtgaagaccctgaaccccaaggccgaggtggcccgagcgcaggcggcgctggcggtcaacatcagcgcagcgcggggtctgcaggacgtgctaaggaccaacctggggcccaagggcaccatgaagatgctcgtttctggcgctggagacatcaaacttactaaagacggcaatgtgctgcttcacgaaatgcaaattcaacacccaacagcttccttaatagcaaaggtagcaacagcccaggatgatataactggtgatggtacgacttctaatgtcctaatcattggagagctgctgaaacaggcggatctctacatttctgaaggccttcatcctagaataatcactgaaggatttgaagctgcaaaggaaaaggcccttcagtttttggaagaagtcaaagtaagcagagagatggacagggaaacacttatagatgtggccagaacatctcttcgtactaaagttcatgctgaacttgcagatgtcttaacagaggctgtagtggactccattttggccattaaaaagcaagatgaacctattgatctcttcatgattgagatcatggagatgaaacataaatctgaaactgatacaagcttaatcagagggcttgttttggaccacggagcacggcatcctgatatgaagaaaagggtggaggatgcatacatcctcacttgtaacgtgtcattagagtatgagaaaacagaagtgaattctggctttttttacaagagtgcagaagagagagaaaaactcgtgaaagctgaaagaaaattcattgaagatagggttaaaaaaataatagaactgaaaaggaaagtctgtggcgattcagataaaggatttgttgttattaatcaaaagggaattgaccccttttccttagatgctctttcaaaagaaggcatagttgctctgcgcagagctaaaaggagaaatatggagaggctgactcttgcttgtggtggggtagccctgaattcttttgacgacctaagtcctgactgcttgggacatgcaggacttgtatatgagtatacattgggagaagagaagtttacctttattgagaaatgtaacaaccctcgttctgtcacattattgatcaaaggaccaaataagcacacactcactcagatcaaagatgcagtgagggacggcttgagggctgtcaaaaatgctattgatgatggctgtgtggttccaggtgctggtgccgtggaagtggcaatggcagaagccctgattaaacataagcccagtgtaaagggcagggcacagcttggagtccaagcatttgctgatgcattgctcattattcccaaggttcttgctcagaactctggttttgaccttcaggaaacattagttaaaattcaagcagaacattcagaatcaggtcagcttgtgggtgtggacctgaacacaggtgagccaatggtggcagcagaagtaggcgtatgggataactattgtgtaaagaaacagcttcttcactcctgcactgtgattgccaccaacattctcttggttgatgagatcatgcgagctggaatgtcttctctgaaaggttgaattgaagcttcctctgtatctgaatcttgaagactgcaaagtgatcctgaggattacagctgtggaatttttgtccaagcttcaaataattttgaaagaaattttcccatatgaaaaaaggagagaacactggcatctgttgaaatttggaagttctgaaattatagtatttttaaaaattgcactgaagtgtatacacataaagcaggtcttttatccagtgaacaggatgttttgctttagcagcagtgacataaaattccatgttagataagcatatgttacttaccttgttattaaatatttcttgaaaagcaaattttaatggtttaattttatgtggacgtatgttaaattatccaactaccctattgttaagcatttggttttaaaatttttatgctaatataaatgctcaagtaatttaaaatattgaaagcatccctgttggtataaatttctgagtaaatgcattggatcagttggactttgaacgcctttgaaatggctttgctaaaatgctcccgccacaaagttgtaggaaatgggaagaggagtcaactagaggcaagggagttgagagagctgcaactgtaaagggcaagaacaggcagaggtaaaaagatgatggaaggtgtggtgactaagggccacggttattgggtgaaatttgagattgtaggccaactgtattttcaagcttctgaacttaggcaaaatattcatcgcaaagtctctagcgtcatatttttctcacccaaattacgtttccacgagattatttatatatagttggtctatctctgcagtccttgaaggtgaagttgtgtgttactaggctgtgttttgggatgtcagcagtggcctgaagtgagttgtgcaataaatgttaagttgaaacctc

SEQ ID NO: 116910 - DNA, 2529 bp, Homo sapiens
  Payload ID: 2808
  Gene Symbol: CCT6A
  Gene Name: chaperonin containing TCP1, subunit 6A (zeta 1)
  Uniprot ID: P40227
  ENST ID: ENST00000335503
  CDS Start-End: 165-1625
agcgggcgccggacgacctgtggcccaatggcggcggcgcgcgggcacgctgggggccggccagacgggccgacttttccagaagacccggatagttcctcccggccacgccgcgccggctctgggcactcagcatcgtttccttttcctccgctggagcagctatggcggcggtgaagaccctgaaccccaaggccgaggtggcccgagcgcaggcggcgctggcggtcaacatcagcgcagcgcggggtctgcaggacgtgctaaggaccaacctggggcccaagggcaccatgaagatgctcgtttctggcgctggagacatcaaacttactaaagacggcaatgtgctgcttcacgaaatgggccttcatcctagaataatcactgaaggatttgaagctgcaaaggaaaaggcccttcagtttttggaagaagtcaaagtaagcagagagatggacagggaaacacttatagatgtggccagaacatctcttcgtactaaagttcatgctgaacttgcagatgtcttaacagaggctgtagtggactccattttggccattaaaaagcaagatgaacctattgatctcttcatgattgagatcatggagatgaaacataaatctgaaactgatacaagcttaatcagagggcttgttttggaccacggagcacggcatcctgatatgaagaaaagggtggaggatgcatacatcctcacttgtaacgtgtcattagagtatgagaaaacagaagtgaattctggctttttttacaagagtgcagaagagagagaaaaactcgtgaaagctgaaagaaaattcattgaagatagggttaaaaaaataatagaactgaaaaggaaagtctgtggcgattcagataaaggatttgttgttattaatcaaaagggaattgaccccttttccttagatgctctttcaaaagaaggcatagttgctctgcgcagagctaaaaggagaaatatggagaggctgactcttgcttgtggtggggtagccctgaattcttttgacgacctaagtcctgactgcttgggacatgcaggacttgtatatgagtatacattgggagaagagaagtttacctttattgagaaatgtaacaaccctcgttctgtcacattattgatcaaaggaccaaataagcacacactcactcagatcaaagatgcagtgagggacggcttgagggctgtcaaaaatgctattgatgatggctgtgtggttccaggtgctggtgccgtggaagtggcaatggcagaagccctgattaaacataagcccagtgtaaagggcagggcacagcttggagtccaagcatttgctgatgcattgctcattattcccaaggttcttgctcagaactctggttttgaccttcaggaaacattagttaaaattcaagcagaacattcagaatcaggtcagcttgtgggtgtggacctgaacacaggtgagccaatggtggcagcagaagtaggcgtatgggataactattgtgtaaagaaacagcttcttcactcctgcactgtgattgccaccaacattctcttggttgatgagatcatgcgagctggaatgtcttctctgaaaggttgaattgaagcttcctctgtatctgaatcttgaagactgcaaagtgatcctgaggattacagctgtggaatttttgtccaagcttcaaataattttgaaagaaattttcccatatgaaaaaaggagagaacactggcatctgttgaaatttggaagttctgaaattatagtatttttaaaaattgcactgaagtgtatacacataaagcaggtcttttatccagtgaacaggatgttttgctttagcagcagtgacataaaattccatgttagataagcatatgttacttaccttgttattaaatatttcttgaaaagcaaattttaatggtttaattttatgtggacgtatgttaaattatccaactaccctattgttaagcatttggttttaaaatttttatgctaatataaatgctcaagtaatttaaaatattgaaagcatccctgttggtataaatttctgagtaaatgcattggatcagttggactttgaacgcctttgaaatggctttgctaaaatgctcccgccacaaagttgtaggaaatgggaagaggagtcaactagaggcaagggagttgagagagctgcaactgtaaagggcaagaacaggcagaggtaaaaagatgatggaaggtgtggtgactaagggccacggttattgggtgaaatttgagattgtaggccaactgtattttcaagcttctgaacttaggcaaaatattcatcgcaaagtctctagcgtcatatttttctcacccaaattacgtttccacgagattatttatatatagttggtctatctctgcagtccttgaaggtgaagttgtgtgttactaggctgtgttttgggatgtcagcagtggcctgaagtgagttgtgcaataaatgttaagttgaaacctc

SEQ ID NO: 116911 - DNA, 1838 bp, Homo sapiens
  Payload ID: 2809
  Gene Symbol: CCT6B
  Gene Name: chaperonin containing TCP1, subunit 6B (zeta 2)
  Uniprot ID: Q92526
  ENST ID: ENST00000314144
  CDS Start-End: 117-1709
acttcctgtaagggcgatgattggccgaggctcaagagagcgtggcgtcgcattgccgtttttgctcagaatcgcgactaaggctttttttttttctccctctgaacggttaggctatggctgcgataaaggccgtcaactccaaggctgaggtggcgcgggcccgggcagctttggctgtcaatatatgcgccgcccgagggctgcaggatgtgctgcggaccaacttgggtcctaaaggcaccatgaaaatgcttgtttctggtgcaggtgacatcaaactcaccaaagatggcaatgtgctgctcgatgagatgcaaattcaacatccaacagcttccttgatagcaaaagtagcaacagctcaggatgacgtcacaggagatggtactacttcaaatgttctaattattggagagttattaaaacaagctgacctgtacatttctgagggcctgcaccctagaataatagctgaaggatttgaagctgcaaagataaaagcacttgaagttttggaggaagttaaagtgacaaaggagatgaaaagaaaaatcctcttagatgtagctagaacatcattacaaactaaagttcatgctgaactggctgatgtcttaacagaggttgtggtggattctgttttggctgttagaagaccaggttaccctattgatctcttcatggtagaaataatggagatgaagcataaattaggaacagatacaaagttgatccaaggattagttttggatcatggtgcccgtcatccagatatgaagaagcgagtagaagatgcatttatccttatttgcaacgtttcactggaatatgaaaaaacagaggtgaactctggtttcttttataagactgcagaagagaaagagaaattggtaaaagctgaaagaaaatttattgaagatagagtacaaaaaataatagacctgaaggacaaagtctgtgctcagtcaaataaaggatttgtcgtcattaatcaaaagggaattgatccattttccttagattctcttgcaaaacatggaatagtagctcttcgcagagcaaaaagaagaaatatggaaagactctctcttgcttgtggtggaatggccgtgaattcttttgaagatctcactgtagattgcttgggacatgctggtcttgtgtatgagtatacattaggtgaagaaaagttcacttttattgaggagtgtgttaacccttgctctgttaccttgttggttaaaggaccaaataagcatactctcacacaagtcaaggatgccataagagatggacttcgtgctatcaaaaatgccattgaagatggttgtatggttcctggagctggtgcaattgaagtggcaatggctgaagctcttgttacatataagaacagtataaaaggaagagctcgtcttggagtccaagcttttgctgatgccttactcattattcccaaggttcttgctcagaatgctggttatgacccacaggaaacattagtaaaagttcaggctgagcatgtcgagtcaaaacaacttgtgggcgtagatttgaatacaggtgagccaatggtagcagcagatgcaggagtttgggataattattgtgtaaaaaaacaacttcttcactcttgcacagtgattgccaccaacattctcctggttgatgaaattatgcgagctgggatgtcttctctcaaatgatgattgaattcaaaatcaacccttctagaagatgaaatttagtacactttacatctgactactattgtgtagcctgagccattctgaatttctacacaataaatgcagtttatgtcttttgggtcttaa

SEQ ID NO: 116912 - DNA, 1680 bp, Homo sapiens
  Payload ID: 2809
  Gene Symbol: CCT6B
  Gene Name: chaperonin containing TCP1, subunit 6B (zeta 2)
  Uniprot ID: Q92526
  ENST ID: ENST00000421975
  CDS Start-End: 10-1491
ggttaggctatggctgcgataaaggccgtcaactccaaggctgaggtggcgcgggcccgggcagctttggctgtcaatatatgcgccgcccgagggctgcaggatgtgctgcggaccaacttgggtcctaaaggcaccatgaaaatgcttgtttctggtgcaggtgacatcaaactcaccaaagatggcaatgtgctgctcgatgagatgcaaattcaacatccaacagcttccttgatagcaaaagtagcaacagctcaggatgacgtcacaggagatggtactacttcaaatgttctaattattggagagttattaaaacaagctgacctgtacatttctgagggcctgcaccctagaataatagctgaaggatttgaagctgcaaagataaaagcacttgaagttttggaggaagttaaagtgacaaaggagatgaaaagaaaaatcctcttagatgtagctagaacatcattacaaactaaagttcatgctgaactggctgatgtcttaacagaggttgtggtggattctgttttggctgttagaagaccaggttaccctattgatctcttcatggtagaaataatggagatgaagcataaattaggaacagatacaaaagaggtgaactctggtttcttttataagactgcagaagagaaagagaaattggtaaaagctgaaagaaaatttattgaagatagagtacaaaaaataatagacctgaaggacaaagtctgtgctcagtcaaataaaggatttgtcgtcattaatcaaaagggaattgatccattttccttagattctcttgcaaaacatggaatagtagctcttcgcagagcaaaaagaagaaatatggaaagactctctcttgcttgtggtggaatggccgtgaattcttttgaagatctcactgtagattgcttgggacatgctggtcttgtgtatgagtatacattaggtgaagaaaagttcacttttattgaggagtgtgttaacccttgctctgttaccttgttggttaaaggaccaaataagcatactctcacacaagtcaaggatgccataagagatggacttcgtgctatcaaaaatgccattgaagatggttgtatggttcctggagctggtgcaattgaagtggcaatggctgaagctcttgttacatataagaacagtataaaaggaagagctcgtcttggagtccaagcttttgctgatgccttactcattattcccaaggttcttgctcagaatgctggttatgacccacaggaaacattagtaaaagttcaggctgagcatgtcgagtcaaaacaacttgtgggcgtagatttgaatacaggtgagccaatggtagcagcagatgcaggagtttgggataattattgtgtaaaaaaacaacttcttcactcttgcacagtgattgccaccaacattctcctggttgatgaaattatgcgagctgggatgtcttctctcaaatgatgattgaattcaaaatcaacccttctagaagatgaaatttagtacactttacatctgactactattgtgtagcctgagccattctgaatttctacacaataaatgcagtttatgtcttttgggtcttaatagtctcaaaaatatttcatcaaggtataaagaacacaataaatacttttacagtaaagg

SEQ ID NO: 116913 - DNA, 1639 bp, Homo sapiens
  Payload ID: 2809
  Gene Symbol: CCT6B
  Gene Name: chaperonin containing TCP1, subunit 6B (zeta 2)
  Uniprot ID: Q92526
  ENST ID: ENST00000436961
  CDS Start-End: 66-1523
attgccgtttttgctcagaatcgcgactaaggctttttttttttctccctctgaacggttaggctatggctgcgataaaggccgtcaactccaaggctgaggtggcgcgggcccgggcagctttggctgtcaatatatgcgccgcccgagggctgcaggatgtgctgcggaccaacttgggtcctaaaggcaccatgaaaatgcttgtttctggtgcaggtgacatcaaactcaccaaagatggcaatgtgctgctcgatgagatgggcctgcaccctagaataatagctgaaggatttgaagctgcaaagataaaagcacttgaagttttggaggaagttaaagtgacaaaggagatgaaaagaaaaatcctcttagatgtagctagaacatcattacaaactaaagttcatgctgaactggctgatgtcttaacagaggttgtggtggattctgttttggctgttagaagaccaggttaccctattgatctcttcatggtagaaataatggagatgaagcataaattaggaacagatacaaagttgatccaaggattagttttggatcatggtgcccgtcatccagatatgaagaagcgagtagaagatgcatttatccttatttgcaacgtttcactggaatatgaaaaaacagaggtgaactctggtttcttttataagactgcagaagagaaagagaaattggtaaaagctgaaagaaaatttattgaagatagagtacaaaaaataatagacctgaaggacaaagtctgtgctcagtcaaataaaggatttgtcgtcattaatcaaaagggaattgatccattttccttagattctcttgcaaaacatggaatagtagctcttcgcagagcaaaaagaagaaatatggaaagactctctcttgcttgtggtggaatggccgtgaattcttttgaagatctcactgtagattgcttgggacatgctggtcttgtgtatgagtatacattaggtgaagaaaagttcacttttattgaggagtgtgttaacccttgctctgttaccttgttggttaaaggaccaaataagcatactctcacacaagtcaaggatgccataagagatggacttcgtgctatcaaaaatgccattgaagatggttgtatggttcctggagctggtgcaattgaagtggcaatggctgaagctcttgttacatataagaacagtataaaaggaagagctcgtcttggagtccaagcttttgctgatgccttactcattattcccaaggttcttgctcagaatgctggttatgacccacaggaaacattagtaaaagttcaggctgagcatgtcgagtcaaaacaacttgtgggcgtagatttgaatacaggtgagccaatggtagcagcagatgcaggagtttgggataattattgtgtaaaaaaacaacttcttcactcttgcacagtgattgccaccaacattctcctggttgatgaaattatgcgagctgggatgtcttctctcaaatgatgattgaattcaaaatcaacccttctagaagatgaaatttagtacactttacatctgactactattgtgtagcctgagccattctgaatttctacacaataaatgcagtttatgtc

SEQ ID NO: 116914 - DNA, 654 bp, Homo sapiens
  Payload ID: 2809
  Gene Symbol: CCT6B
  Gene Name: chaperonin containing TCP1, subunit 6B (zeta 2)
  ENST ID: ENST00000585073
  CDS Start-End: 271-654
cgcgccgctgtcggagagtggcggggacagtggggtcggcggcgtaggccgcgacccccggcgaggcagaaaggagcgctcctccaccgggtccgggacgcaggcgggaagtgatcaaggctccctgagtcccacccgagcgctcccggttcagcgcaggaggacgcacgccgggccaggggcctgcaccctagaataatagctgaaggatttgaagctgcaaagataaaagcacttgaagttttggaggaagttaaagtgacaaaggagatgaaaagaaaaatcctcttagatgtagctagaacatcattacaaactaaagttcatgctgaactggctgatgtcttaacagaggttgtggtggattctgttttggctgttagaagaccaggttaccctattgatctcttcatggtagaaataatggagatgaagcataaattaggaacagatacaaagttgatccaaggattagttttggatcatggtgcccgtcatccagatatgaagaagcgagtagaagatgcatttatccttatttgcaacgtttcactggaatatgaaaaaacagaggtgaactctggtttcttttataagactgcagaagagaaagagaaattggtaaaagctgaaagaaaatttattgaagataga

SEQ ID NO: 116915 - DNA, 1916 bp, Homo sapiens
  Payload ID: 2810
  Gene Symbol: CCT7
  Gene Name: chaperonin containing TCP1, subunit 7 (eta)
  Uniprot ID: Q99832
  ENST ID: ENST00000258091
  CDS Start-End: 142-1773
agagtagcggaagtggtccgttctcttcctctcccggcccaagcttctgggtatttctattgcgcgaggcattgtgggttgctgggcggcccggtctcggagaagaggggagagtggcgggccgctgaataagcttccaaaatgatgcccacaccagttatcctattgaaagaggggactgatagctcccaaggcatcccccagcttgtgagtaacatcagtgcctgccaggtgattgctgaggctgtaagaactaccctgggtccccgtggcatggacaagcttattgtagatggcagaggcaaagcaacaatttctaatgatggggccacaattctgaaacttcttgatgttgtccatcctgcagcaaagactttggtagacattgccaaatcccaagatgctgaggtgggtgatggcaccacctcagtgaccttgctggctgcagagtttctgaagcaggtgaaaccctatgtggaggaaggtttacacccccagatcatcattcgagctttccgcacagccacccagctggcagttaacaagatcaaagagattgctgtgaccgtgaagaaggcagataaagtggagcagaggaagctgctggaaaagtgtgccatgaccgctctgagctccaagctgatctcccagcagaaagctttctttgctaagatggtggtggatgcagtgatgatgctcgatgatttgctgcagcttaaaatgattggaatcaagaaggtacagggtggagccctcgaggattctcagctggtagctggtgttgcattcaagaagactttctcttacgctgggtttgaaatgcaacccaaaaagtaccacaatcccaagattgcccttttgaatgtcgagctcgagttgaaagctgagaaagacaatgctgagataagagtccacacagttgaggattatcaggcaattgttgatgctgagtggaacattctctatgacaagttagagaagatccatcattctggagccaaagttgtcttgtccaaactccccattggggatgtggccacccagtactttgctgacagggacatgttctgtgctggccgagtacctgaggaggatctgaagaggacaatgatggcctgtggaggctcaatccagaccagtgtgaatgctctgtcagcagatgtgctgggtcgatgccaggtgtttgaagagacccagattggaggcgagaggtacaatttttttactggctgccccaaggccaagacatgcaccttcattctccgtggcggcgccgagcagtttatggaggagacagagcggtccctgcatgatgccatcatgatcgtcaggagggccatcaagaatgattcagtggtggctggtggcggggccattgagatggaactctccaagtacctgcgggattactcaaggactattccaggaaaacagcagctgttgattggggcatatgccaaggccttggagattatcccacgccagctgtgtgacaatgctggctttgatgccacaaacattctcaacaagctgcgggctcggcatgcccaggggggtacatggtatggagtagacatcaacaacgaggacattgctgacaactttgaagctttcgtgtgggagccagctatggtgcggatcaatgcgctgacagcagcctctgaggctgcgtgcctgatcgtgtctgtagatgaaaccatcaagaacccccgctcgactgtggatgctcccacagcagcaggccggggccgtggtcgtggccgcccccactgagaggcaccccacccatcacatggctggctggctgctgggtgcacttaccctccttggcttggttacttcattttacaaggaaggggtagtaattggcccactctcttcttactggaggctatttaaataaaatgtaagacttc

SEQ ID NO: 116916 - DNA, 1234 bp, Homo sapiens
  Payload ID: 2810
  Gene Symbol: CCT7
  Gene Name: chaperonin containing TCP1, subunit 7 (eta)
  Uniprot ID: Q99832
  ENST ID: ENST00000398422
  CDS Start-End: 72-1091
attgtgggttgctgggcggcccggtctcggagaagaggggagagtggcgggccgctgaataagcttccaaaatgatggattctcagctggtagctggtgttgcattcaagaagactttctcttacgctgggtttgaaatgcaacccaaaaagtaccacaatcccaagattgcccttttgaatgtcgagctcgagttgaaagctgagaaagacaatgctgagataagagtccacacagttgaggattatcaggcaattgttgatgctgagtggaacattctctatgacaagttagagaagatccatcattctggagccaaagttgtcttgtccaaactccccattggggatgtggccacccagtactttgctgacagggacatgttctgtgctggccgagtacctgaggaggatctgaagaggacaatgatggcctgtggaggctcaatccagaccagtgtgaatgctctgtcagcagatgtgctgggtcgatgccaggtgtttgaagagacccagattggaggcgagaggtacaatttttttactggctgccccaaggccaagacatgcaccttcattctccgtggcggcgccgagcagtttatggaggagacagagcggtccctgcatgatgccatcatgatcgtcaggagggccatcaagaatgattcagtggtggctggtggcggggccattgagatggaactctccaagtacctgcgggattactcaaggactattccaggaaaacagcagctgttgattggggcatatgccaaggccttggagattatcccacgccagctgtgtgacaatgctggctttgatgccacaaacattctcaacaagctgcgggctcggcatgcccaggggggtacatggtatggagtagacatcaacaacgaggacattgctgacaactttgaagctttcgtgtgggagccagctatggtgcggatcaatgcgctgacagcagcctctgaggctgcgtgcctgatcgtgtctgtagatgaaaccatcaagaacccccgctcgactgtggatgctcccacagcagcaggccggggccgtggtcgtggccgcccccactgagaggcaccccacccatcacatggctggctggctgctgggtgcacttaccctccttggcttggttacttcattttacaaggaaggggtagtaattggcccactctcttcttactggaggctatttaaataaaatgtaagacttc

SEQ ID NO: 116917 - DNA, 567 bp, Homo sapiens
  Payload ID: 2810
  Gene Symbol: CCT7
  Gene Name: chaperonin containing TCP1, subunit 7 (eta)
  ENST ID: ENST00000409924
  CDS Start-End: 71-322
ttgtgggttgctgggcggcccggtctcggagaagaggggagagtggcgggccgctgaataagcttccaaaatgatgcccacaccagttatcctattgaaagaggggactgatagctcccaaggcatcccccagcttgtgagtaacatcagtgcctgccaggtgattgctgaggctgtaagaactaccctgggtccccgtggcatggacaagcttattgtagatggcagagtttctgaagcaggtgaaaccctatgtggaggaaggtttacacccccagatcatcattcgagctttccgcacagccacccagctggcagttaacaagatcaaagagattgctgtgaccgtgaagaaggcagataaagtggagcagaggaagctgctggaaaagtgtgccatgaccgctctgagctccaagctgatctcccagcagaaagctttctttgctaagatggtggtggatgcagtgatgatgctcgatgatttgctgcagcttaaaatgattggaatcaagaaggtacagggtggagccctcgaggattctcagctggtagctggtgttgcat

SEQ ID NO: 116918 - DNA, 593 bp, Homo sapiens
  Payload ID: 2810
  Gene Symbol: CCT7
  Gene Name: chaperonin containing TCP1, subunit 7 (eta)
  ENST ID: ENST00000399032
  CDS Start-End: 300-593
attgtgggttgctgggcggcccggtctcggagaagaggggagagtggcgggccgctgaataagcttccaaaatgatgcattgctcattcttgaagtcgtcttcatcttctgtgcagaggcagcatagtacagcagttgagagtaaggcctctggagctacactgaatgcctagcccacaccagttatcctattgaaagaggggactgatagctcccaaggcatcccccagcttgtgagtaacatcagtgcctgccaggtgattgctgaggctgtaagaactaccctgggtccccgtggcatggacaagcttattgtagatggcagaggcaaagcaacaatttctaatgatggggccacaattctgaaacttcttgatgttgtccatcctgcagcaaagactttggtagacattgccaaatcccaagatgctgaggtgggtgatggcaccacctcagtgaccttgctggctgcagagtttctgaagcaggtgaaaccctatgtggaggaaggtttacacccccagatcatcattcgagctttccgcacagccacccagctggcagttaacaagatcaaagagattgctgtgacc

SEQ ID NO: 116919 - DNA, 2031 bp, Homo sapiens
  Payload ID: 2810
  Gene Symbol: CCT7
  Gene Name: chaperonin containing TCP1, subunit 7 (eta)
  Uniprot ID: Q99832
  ENST ID: ENST00000539919
  CDS Start-End: 372-1871
atagagtagcggaagtggtccgttctcttcctctcccggcccaagcttctgggtatttctattgcgcgaggcattgtgggttgctgggcggcccggtctcggagaagaggggagagtggcgggccgctgaataagcttccaaaatgatgcattgctcattcttgaagtcgtcttcatcttctgtgcagaggcagcatagtacagcagttgagagtaaggcctctggagctacactgaatgcctagcccacaccagttatcctattgaaagaggggactgatagctcccaaggcatcccccagcttgtgagtaacatcagtgcctgccaggtgattgctgaggctgtaagaactaccctgggtccccgtggcatggacaagcttattgtagatggcagaggcaaagcaacaatttctaatgatggggccacaattctgaaacttcttgatgttgtccatcctgcagcaaagactttggtagacattgccaaatcccaagatgctgaggtgggtgatggcaccacctcagtgaccttgctggctgcagagtttctgaagcaggtgaaaccctatgtggaggaaggtttacacccccagatcatcattcgagctttccgcacagccacccagctggcagttaacaagatcaaagagattgctgtgaccgtgaagaaggcagataaagtggagcagaggaagctgctggaaaagtgtgccatgaccgctctgagctccaagctgatctcccagcagaaagctttctttgctaagatggtggtggatgcagtgatgatgctcgatgatttgctgcagcttaaaatgattggaatcaagaaggtacagggtggagccctcgaggattctcagctggtagctggtgttgcattcaagaagactttctcttacgctgggtttgaaatgcaacccaaaaagtaccacaatcccaagattgcccttttgaatgtcgagctcgagttgaaagctgagaaagacaatgctgagataagagtccacacagttgaggattatcaggcaattgttgatgctgagtggaacattctctatgacaagttagagaagatccatcattctggagccaaagttgtcttgtccaaactccccattggggatgtggccacccagtactttgctgacagggacatgttctgtgctggccgagtacctgaggaggatctgaagaggacaatgatggcctgtggaggctcaatccagaccagtgtgaatgctctgtcagcagatgtgctgggtcgatgccaggtgtttgaagagacccagattggaggcgagaggtacaatttttttactggctgccccaaggccaagacatgcaccttcattctccgtggcggcgccgagcagtttatggaggagacagagcggtccctgcatgatgccatcatgatcgtcaggagggccatcaagaatgattcagtggtggctggtggcggggccattgagatggaactctccaagtacctgcgggattactcaaggactattccaggaaaacagcagctgttgattggggcatatgccaaggccttggagattatcccacgccagctgtgtgacaatgctggctttgatgccacaaacattctcaacaagctgcgggctcggcatgcccaggggggtacatggtatggagtagacatcaacaacgaggacattgctgacaactttgaagctttcgtgtgggagccagctatggtgcggatcaatgcgctgacagcagcctctgaggctgcgtgcctgatcgtgtctgtagatgaaaccatcaagaacccccgctcgactgtggatgctcccacagcagcaggccggggccgtggtcgtggccgcccccactgagaggcaccccacccatcacatggctggctggctgctgggtgcacttaccctccttggcttggttacttcattttacaaggaaggggtagtaattggcccactctcttcttactggaggctatttaaataaaatgtaagacttcagataactttgtaaatt

SEQ ID NO: 116920 - DNA, 1674 bp, Homo sapiens
  Payload ID: 2810
  Gene Symbol: CCT7
  Gene Name: chaperonin containing TCP1, subunit 7 (eta)
  Uniprot ID: Q99832
  ENST ID: ENST00000540468
  CDS Start-End: 144-1514
atagagtagcggaagtggtccgttctcttcctctcccggcccaagcttctgggtatttctattgcgcgaggcattgtgggttgctgggcggcccggtctcggagaagaggggagagtggcgggccgctgaataagcttccaaaatgatggtgggtgatggcaccacctcagtgaccttgctggctgcagagtttctgaagcaggtgaaaccctatgtggaggaaggtttacacccccagatcatcattcgagctttccgcacagccacccagctggcagttaacaagatcaaagagattgctgtgaccgtgaagaaggcagataaagtggagcagaggaagctgctggaaaagtgtgccatgaccgctctgagctccaagctgatctcccagcagaaagctttctttgctaagatggtggtggatgcagtgatgatgctcgatgatttgctgcagcttaaaatgattggaatcaagaaggtacagggtggagccctcgaggattctcagctggtagctggtgttgcattcaagaagactttctcttacgctgggtttgaaatgcaacccaaaaagtaccacaatcccaagattgcccttttgaatgtcgagctcgagttgaaagctgagaaagacaatgctgagataagagtccacacagttgaggattatcaggcaattgttgatgctgagtggaacattctctatgacaagttagagaagatccatcattctggagccaaagttgtcttgtccaaactccccattggggatgtggccacccagtactttgctgacagggacatgttctgtgctggccgagtacctgaggaggatctgaagaggacaatgatggcctgtggaggctcaatccagaccagtgtgaatgctctgtcagcagatgtgctgggtcgatgccaggtgtttgaagagacccagattggaggcgagaggtacaatttttttactggctgccccaaggccaagacatgcaccttcattctccgtggcggcgccgagcagtttatggaggagacagagcggtccctgcatgatgccatcatgatcgtcaggagggccatcaagaatgattcagtggtggctggtggcggggccattgagatggaactctccaagtacctgcgggattactcaaggactattccaggaaaacagcagctgttgattggggcatatgccaaggccttggagattatcccacgccagctgtgtgacaatgctggctttgatgccacaaacattctcaacaagctgcgggctcggcatgcccaggggggtacatggtatggagtagacatcaacaacgaggacattgctgacaactttgaagctttcgtgtgggagccagctatggtgcggatcaatgcgctgacagcagcctctgaggctgcgtgcctgatcgtgtctgtagatgaaaccatcaagaacccccgctcgactgtggatgctcccacagcagcaggccggggccgtggtcgtggccgcccccactgagaggcaccccacccatcacatggctggctggctgctgggtgcacttaccctccttggcttggttacttcattttacaaggaaggggtagtaattggcccactctcttcttactggaggctatttaaataaaatgtaagacttcagataactttgtaaatt

SEQ ID NO: 116921 - DNA, 249 bp, Homo sapiens
  Payload ID: 2810
  Gene Symbol: CCT7
  Gene Name: chaperonin containing TCP1, subunit 7 (eta)
  ENST ID: ENST00000626868
  CDS Start-End: 1-249
attctgcccacaccagttatcctattgaaagaggggactgatagctcccaaggcatcccccagcttgtgagtaacatcagtgcctgccaggtgattgctgaggctgtaagaactaccctgggtccccgtggcatggacaagcttattgtagatggcagagtttctgaagcaggtgaaaccctatgtggaggaaggtttacacccccagatcatcattcgagctttccgcacagccacccagctggtatg

SEQ ID NO: 116922 - DNA, 2005 bp, Homo sapiens
  Payload ID: 2811
  Gene Symbol: CCT8
  Gene Name: chaperonin containing TCP1, subunit 8 (theta)
  Uniprot ID: P50990
  ENST ID: ENST00000286788
  CDS Start-End: 208-1854
gatcggggatcgtcagcttggttctggccacagaggttgctcttctcgcgatgcttcagacctggcggcagggaaagggtgggctaattggagagccaggaagagcgtgaggcggccccacgctgctttcccagaaggctgtgcgtgctcctcgcttcctccgcggtcttccgagcggtcgcgtgaactgcttcctgcaggctggccatggcgcttcacgttcccaaggctccgggctttgcccagatgctcaaggagggagcgaaacacttttcaggattagaagaggctgtgtatagaaacatacaagcttgcaaggagcttgcccaaaccactcgtacagcatatggaccaaatggaatgaacaaaatggttatcaaccacttggagaagttgtttgtgacaaacgatgcagcaactattttaagagaactagaagtacagcatcctgctgcaaaaatgattgtaatggcttctcatatgcaagagcaagaagttggagatggcacaaactttgttctggtatttgctggagctctcctggaattagctgaagaacttctgaggattggcctgtcagtttcagaggtcatagaaggttatgaaatagcctgcagaaaagctcatgagattcttcctaatttggtatgttgttctgcaaaaaaccttcgagatattgatgaagtctcatctctacttcgtacctccataatgagtaaacaatatggtaatgaagtatttctggccaagcttattgctcaggcatgcgtatctatttttcctgattccggccatttcaatgttgataacatcagagtttgtaaaattctgggctctggtatcagttcctcttcagtattgcatggcatggtttttaagaaggaaaccgaaggtgatgtaacatctgtcaaagatgcaaaaatagcagtgtactcttgtccttttgatggcatgataacagaaactaagggaacagtgttgataaagactgctgaagaattgatgaattttagtaagggagaagaaaacctcatggatgcacaagtcaaagctattgctgatactggtgcaaatgtcgtagtaacaggtggcaaagtggcagacatggctcttcattatgcaaataaatataatatcatgttagtgaggctaaactcaaaatgggatctccgaagactttgtaaaactgttggtgctacagctcttcctagattgacacctcctgtccttgaagaaatgggacactgtgacagtgtttacctctcagaagttggagatactcaggtggtggtttttaagcatgaaaaggaagatggcgccatttctaccatagtacttcgaggctctacagacaatctgatggatgacatagaaagggcagtagacgatggtgttaatactttcaaagttcttacaagggataaacgtcttgtacccggaggtggagcaacagaaattgaattagccaaacagatcacatcatatggagagacatgtcctggacttgaacagtatgctattaagaagtttgctgaggcatttgaagctattccccgcgcactggcagaaaactctggagttaaggccaatgaagtaatctctaaactttatgcagtacatcaagaaggaaataaaaacgttggattagatattgaggctgaagtccctgctgtaaaggacatgctggaagctggtattctagatacttacctgggaaaatattgggctatcaaactcgctactaatgctgcagtcactgtacttagagtggatcagatcatcatggcaaaaccagctggtgggcccaagcctccaagtgggaagaaagactgggatgatgaccaaaatgattgaaattggcttaatttttactgtaggtgaaggctgtatttgtagtagtactcaagaatcacctgatgttttcttattctccttaaattaagagttattttgtgtttgtattcttggctggatgttataataaacatattgttactgtcaaagc

SEQ ID NO: 116923 - DNA, 556 bp, Homo sapiens
  Payload ID: 2811
  Gene Symbol: CCT8
  Gene Name: chaperonin containing TCP1, subunit 8 (theta)
  ENST ID: ENST00000432178
  CDS Start-End: 1-322
tgaggcatttgaagctattccccgcgcactggcagaaaactctggagttaaggccaatgaagtaatctctaaactttatgcagtacatcaagaaggaaataaaaacgttggattagatattgaggctgaagtccctgctgtaaaggacatgctggaagctggtattctagatacttacctgggaaaatattgggctatcaaactcgctactaatgctgcagtcactgtacttagagtggatcagatcatcatggcaaaaccagctggtgggcccaagcctccaagtgggaagaaagactgggatgatgaccaaaatgattgaaattggcttaatttttactgaaagtgctgccaacacctggactagatttccagtgtttttgtcacagctctggaattcctgactcaaggtgacttgtttcaatagcaattaataatttgttgaagacactcgacttagcaaagtacaaaaaaaatgcttagaaaatagataaactgacatacaaaattaagtcagttttcataaagcagattctattttgttaaaatcagtaag

SEQ ID NO: 116924 - DNA, 968 bp, Homo sapiens
  Payload ID: 2811
  Gene Symbol: CCT8
  Gene Name: chaperonin containing TCP1, subunit 8 (theta)
  ENST ID: ENST00000431234
  CDS Start-End: 1-968
cgggctttgcccagatgctcaaggagggagcgaaacacttttcaggattagaagaggctgtgtatagaaacatacaagcttgcaaggagcttgcccaaaccactcgtacagcatatggaccaaatggaatgaacaaaatggttatcaaccacttggagaagttgtttgtgacaaacgatgcagcaactattttaagagaactagaagtacagcatcctgctgcaaaaatgattgtaatggcttctcatatgcaagagcaagaagttggagatggcacaaactttgttctggtatttgctggagctctcctggaattagctgaagaacttctgaggattggcctgtcagtttcagaggtcatagaaggttatgaaatagcctgcagaaaagctcatgagattcttcctaatttggtatgttgttctgcaaaaaaccttcgagatattgatgaagtctcatctctacttcgtacctccataatgagtaaacaatatggtaatgaagtatttctggccaagcttattgctcaggcatgcgtatctatttttcctgattccggccatttcaatgttgataacatcagagtttgtaaaattctgggaacagtgttgataaagactgctgaagaattgatgaattttagtaagggagaagaaaacctcatggatgcacaagtcaaagctattgctgatactggtgcaaatgtcgtagtaacaggtggcaaagtggcagacatggctcttcattatgcaaataaatataatatcatgttagtgaggctaaactcaaaatgggatctccgaagactttgtaaaactgttggtgctacagctcttcctagattgacacctcctgtccttgaagaaatgggacactgtgacagtgtttacctctcagaagttggagatactcaggtggtggtttttaagcatgaaaaggaagatggcgccatttctaccatagtactt

SEQ ID NO: 116925 - DNA, 1927 bp, Homo sapiens
  Payload ID: 2811
  Gene Symbol: CCT8
  Gene Name: chaperonin containing TCP1, subunit 8 (theta)
  Uniprot ID: P50990
  ENST ID: ENST00000540844
  CDS Start-End: 347-1774
gatcggggatcgtcagcttggttctggccacagaggttgctcttctcgcgatgcttcagacctggcggcagggaaagggtgggctaattggagagccaggaagagcgtgaggcggccccacgctgctttcccagaaggctgtgcgtgctcctcgcttcctccgcggtcttccgagcggtcgcgtgaactgcttcctgcaggctggccatggcgcttcacgttcccaaggctccgggctttgcccagatgctcaaggagggagcgaaacacttttcaggattagaagaggctgtgtatagaaacatacaagcttgcaaggagcttgcccaaaccactcgtacagcatatggaccaaatggtacagcatcctgctgcaaaaatgattgtaatggcttctcatatgcaagagcaagaagttggagatggcacaaactttgttctggtatttgctggagctctcctggaattagctgaagaacttctgaggattggcctgtcagtttcagaggtcatagaaggttatgaaatagcctgcagaaaagctcatgagattcttcctaatttggtatgttgttctgcaaaaaaccttcgagatattgatgaagtctcatctctacttcgtacctccataatgagtaaacaatatggtaatgaagtatttctggccaagcttattgctcaggcatgcgtatctatttttcctgattccggccatttcaatgttgataacatcagagtttgtaaaattctgggctctggtatcagttcctcttcagtattgcatggcatggtttttaagaaggaaaccgaaggtgatgtaacatctgtcaaagatgcaaaaatagcagtgtactcttgtccttttgatggcatgataacagaaactaagggaacagtgttgataaagactgctgaagaattgatgaattttagtaagggagaagaaaacctcatggatgcacaagtcaaagctattgctgatactggtgcaaatgtcgtagtaacaggtggcaaagtggcagacatggctcttcattatgcaaataaatataatatcatgttagtgaggctaaactcaaaatgggatctccgaagactttgtaaaactgttggtgctacagctcttcctagattgacacctcctgtccttgaagaaatgggacactgtgacagtgtttacctctcagaagttggagatactcaggtggtggtttttaagcatgaaaaggaagatggcgccatttctaccatagtacttcgaggctctacagacaatctgatggatgacatagaaagggcagtagacgatggtgttaatactttcaaagttcttacaagggataaacgtcttgtacccggaggtggagcaacagaaattgaattagccaaacagatcacatcatatggagagacatgtcctggacttgaacagtatgctattaagaagtttgctgaggcatttgaagctattccccgcgcactggcagaaaactctggagttaaggccaatgaagtaatctctaaactttatgcagtacatcaagaaggaaataaaaacgttggattagatattgaggctgaagtccctgctgtaaaggacatgctggaagctggtattctagatacttacctgggaaaatattgggctatcaaactcgctactaatgctgcagtcactgtacttagagtggatcagatcatcatggcaaaaccagctggtgggcccaagcctccaagtgggaagaaagactgggatgatgaccaaaatgattgaaattggcttaatttttactgtaggtgaaggctgtatttgtagtagtactcaagaatcacctgatgttttcttattctccttaaattaagagttattttgtgtttgtattcttggctggatgttataataaacatattgttactgtcaaagcct

SEQ ID NO: 116926 - DNA, 1862 bp, Homo sapiens
  Payload ID: 2811
  Gene Symbol: CCT8
  Gene Name: chaperonin containing TCP1, subunit 8 (theta)
  Uniprot ID: P50990
  ENST ID: ENST00000626972
  CDS Start-End: 127-1716
acttctcttcttccgcgaccgggagaaggccgagggatcggcggcacgatcgacattgtacaccttgaaggtggacggatgtgaagccgcgcgttgtagggctgaagcttaccaaagaaaggaagaatgcacttttcaggattagaagaggctgtgtatagaaacatacaagcttgcaaggagcttgcccaaaccactcgtacagcatatggaccaaatggaatgaacaaaatggttatcaaccacttggagaagttgtttgtgacaaacgatgcagcaactattttaagagaactagaagtacagcatcctgctgcaaaaatgattgtaatggcttctcatatgcaagagcaagaagttggagatggcacaaactttgttctggtatttgctggagctctcctggaattagctgaagaacttctgaggattggcctgtcagtttcagaggtcatagaaggttatgaaatagcctgcagaaaagctcatgagattcttcctaatttggtatgttgttctgcaaaaaaccttcgagatattgatgaagtctcatctctacttcgtacctccataatgagtaaacaatatggtaatgaagtatttctggccaagcttattgctcaggcatgcgtatctatttttcctgattccggccatttcaatgttgataacatcagagtttgtaaaattctgggctctggtatcagttcctcttcagtattgcatggcatggtttttaagaaggaaaccgaaggtgatgtaacatctgtcaaagatgcaaaaatagcagtgtactcttgtccttttgatggcatgataacagaaactaagggaacagtgttgataaagactgctgaagaattgatgaattttagtaagggagaagaaaacctcatggatgcacaagtcaaagctattgctgatactggtgcaaatgtcgtagtaacaggtggcaaagtggcagacatggctcttcattatgcaaataaatataatatcatgttagtgaggctaaactcaaaatgggatctccgaagactttgtaaaactgttggtgctacagctcttcctagattgacacctcctgtccttgaagaaatgggacactgtgacagtgtttacctctcagaagttggagatactcaggtggtggtttttaagcatgaaaaggaagatggcgccatttctaccatagtacttcgaggctctacagacaatctgatggatgacatagaaagggcagtagacgatggtgttaatactttcaaagttcttacaagggataaacgtcttgtacccggaggtggagcaacagaaattgaattagccaaacagatcacatcatatggagagacatgtcctggacttgaacagtatgctattaagaagtttgctgaggcatttgaagctattccccgcgcactggcagaaaactctggagttaaggccaatgaagtaatctctaaactttatgcagtacatcaagaaggaaataaaaacgttggattagatattgaggctgaagtccctgctgtaaaggacatgctggaagctggtattctagatacttacctgggaaaatattgggctatcaaactcgctactaatgctgcagtcactgtacttagagtggatcagatcatcatggcaaaaccagctggtgggcccaagcctccaagtgggaagaaagactgggatgatgaccaaaatgattgaaattggcttaatttttactgtaggtgaaggctgtatttgtagtagtactcaagaatcacctgatgttttcttattctccttaaattaagagttattttgtgtttgtattcttggctggatgttataataaacatattgttactgtc

SEQ ID NO: 116927 - DNA, 2060 bp, Homo sapiens
  Payload ID: 2812
  Gene Symbol: CCT8L2
  Gene Name: chaperonin containing TCP1, subunit 8 (theta)-like 2
  Uniprot ID: Q96SF2
  ENST ID: ENST00000359963
  CDS Start-End: 261-1934
gttgagaggccccaagacccagttcctttacagaatcaaccctggggtggctttaggactgggctctttggagctcatccttggacccacagtggagtgctggtccgtgctgatgtcttcagataccaatcaatgggcatttggctccttgcttccactgacctcttgagtactttcaacgatcggtgtcaggagtgccccagctgctgtttctagagcatctctgcaacccacggtggcctctcctctctctgcgggccatggacagcacagtcccttcagccctggagctgccccagcggctggcactgaacccaagggagagcccgaggagtccagaagaggaggagccccacctgctgagcagcttggctgcagtccagaccctggccagtgtcatccggccttgctatggcccccacggccggcagaagttcctggtgaccatgaaaggagaaacagtgtgcacggggtgtgccactgccatcctcagggccctggagctggagcacccagcagcatggctcctccgggaagcaggacaaacccaggcagagaatagtggggacggcacagccttcgtggttctgctgacggaagccttgctggaacaggcagagcagctgctgaaggctggcctgcctcgcccgcagctccgggaggcctacgccacggccactgcagaggtcctggccacactgccctccctggccatccaatctctggggcctttggaagatccatcctgggccctccattctgtgatgaatacccacaccctgtcccccatggaccacttgaccaagctggtggcccacgcctgctgggctatcaaggaactagacggcagcttcaagcctgagcgtgttggggtgtgcgcgctgcccggggggacactggaggattcctgcctcctcccggggttagcaatatctgggaagctctgtgggcaaatggccacagtgttaagtggtgccagggtggctctctttgcttgcccctttggtcctgcccatccaaatgcaccagcaacggcccgtctttctagtcctgctgatctagctcaatttagtaaaggaagcgatcaattactagaaaagcaagtaggccagctagcagctgcaggaattaatgtggcagtggtgttgggggaggtcgacgaggagaccctcacactggcggacaagtatggcatcgtggtgattcaagctaggtcttggatggagatcatttacctgagtgaggtgttggacacacctctgctgcctcgtctgctccctccccagaggccaggcaagtgccagagggtttacaggcaggagctgggagatggtttggctgtggtatttgaatgggaatgtacaggcacacctgccctcactgtggttctcaggggagccaccacccaggggctgcggagtgcagagcaggccgtctaccacggcattgatgcctatttccagctatgtcaagatcccagactgattccaggagctggggccacagaaatggctttggcaaaaatgctttctgataaaggaagcagattggaagggcccagtgggcctgcattcctagcatttgcctgggccctgaagtatcttcctaaaactttggcagagaatgcaggcttagctgtctcagacgtgatggcagaaatgagtggagtgcaccaaggtgggaacctcctaatgggtgtgggaactgaagggataataaatgtggcccaggaaggggtgtgggacaccctaatagtcaaagcccaaggatttcgagcagtggctgaggtggtgctacagctcgtgactgtagatgaaatcgtagtggccaagaaaagtcccacacatcaggagatctggaatcctgactctaagaagacaaagaaacacccacctcctgtggaaacaaaaaaaatccttggattgaataactagtgataccctcaataaaacagggattgccaagaagggaacaatcaccccaaaaatgaatgtttgcctttattccgtgtttggtacttgattcactttctttaaataaaaacatgaaggaacataaaa

SEQ ID NO: 116928 - DNA, 635 bp, Homo sapiens
  Payload ID: 2813
  Gene Symbol: CLC
  Gene Name: Charcot-Leyden crystal galectin
  Uniprot ID: Q05315
  ENST ID: ENST00000221804
  CDS Start-End: 77-505
atttaaattctgcagctcagagattcacacagaagtctggacacaattcagaagagccacccagaaggagacaacaatgtccctgctacccgtgccatacacagaggctgcctctttgtctactggttctactgtgacaatcaaagggcgaccacttgcctgtttcttgaatgaaccatatctgcaggtggatttccacactgagatgaaggaggaatcagacattgtcttccatttccaagtgtgctttggtcgtcgtgtggtcatgaacagccgtgagtatggggcctggaagcagcaggtggaatccaagaatatgccctttcaggatggccaagaatttgaactgagcatctcagtgctgccagataagtaccaggtaatggtcaatggccaatcctcttacacctttgaccatagaatcaagcctgaggctgtgaagatggtgcaagtgtggagagatatctccctgaccaaatttaatgtcagctatttaaagagataaccagacttcatgttgccaaggaatccctgtctctacgtgaacttgggattccaaagccagctaacagcatgatcttttctcacttcaatccttactcctgctcattaaaacttaatcaaacttcacagaa

SEQ ID NO: 116929 - DNA, 2483 bp, Homo sapiens
  Payload ID: 2814
  Gene Symbol: CHMP1A
  Gene Name: charged multivesicular body protein 1A
  Uniprot ID: Q9HD42
  ENST ID: ENST00000397901
  CDS Start-End: 258-848
agcgactcacaaaaggtcctcgcgccagcggcgtgcgtcaccatggcgaccgcgcgccgcgcagccgcgccccgcccctctggcgggaccggccaccatcctctcgcgagagcatcccgtgcgaccggaagtggggcggcgaccccggaagtccccgccgggtgcagcttggtcggttcgatcgccgccgggacctgacaccgcccggagttggcgtcccttctccctctccgagtgctgctcctgtcattgtggccatggacgataccctgttccagttgaagttcacggcgaagcagctggagaagctggccaagaaggcggagaaggactccaaggcggagcaggccaaagtgaagaaggcccttctgcagaaaaatgtagagtgtgcccgtgtgtatgccgagaacgccatccgcaagaagaacgaaggtgtgaactggcttcggatggcgtcccgcgtagacgcagtggcctccaaggtgcagacagctgtgactatgaagggggtgaccaagaatatggcccaggtgaccaaagccctggacaaggccctgagcaccatggacctgcagaaggtctcctcagtgatggacaggttcgagcagcaggtgcagaacctggacgtccatacatcggtgatggaggactccatgagctcggccaccaccctgaccacgccgcaggagcaggtggacagcctcatcatgcagatcgccgaggagaatggcctggaggtgctggaccagctcagccagctgcccgagggcgcctctgccgtgggcgagagctctgtgcgcagccaggaggaccagctgtcacggaggttggccgccttgaggaactagccgtgccccgccggtgtgcaccgcctctgccccgtgatgtgctggaaggctcctgtcctctccccaccgcgtcttgcctttgtgctgaccccgcggggctgcggccggcagccactctgcgtctctcacctgccaggcctgcgtggccttagggttgttcctgttcttttaggttgggcggtgggtctgtgtcctggtgttgagtttctgcaaatttctgggggtgatttctgtgactctgggcccacagcggggaggccaagaggggccctgtggactttcacccagcactgtgggggccttcagactctggggcagcagacatgctgcttcccatcagccagagggggtcagggctgccctgttgccaaacaactccctgaggcctctccgcaccacctcagcgggcaggaggtcccaccatgtggacagacatagcccaaggaggcaccacaggtctatgtgtgctgggggatgtcaggtgccacccaacgctgtcctggtggtatttacaatgacatcctcctcctccatcactccaggggtggtgtctcggccgcccctaccagctggctgagccccctggcctcctgcgctccctcacttccctcagttcccaaagctgcccagtccatggggacagaaccgtcactcagatccacattcaagtgtgcccaccctgcagtcttcatcctcactcagctgctgcctctggaggtgcctttggccacatgtgctgtgctgtttgtctcctcgacagggagcctgtccaccagcaggctgcggtcccagcgggtgcgtctgcagctcctccccttgggcagcctggttctcccggaggacctttccttggggccctgcttcatgacgatgctgcctgtgtcaccctctaccatctgtaaacaactgggtgccttccccgaccacaccccaatgccttcccagcttggaagccaaggcagctgatgaagggagctcaggagagccgtcttcagctgggctggggttggggctgctgtgaggaaaacctgccattgtggccctggagagtcaccagcagctcttgggaaggacttgctgggaggctgagagaggctttgggcacagcctgctgtcttttccatttcctaaagtttacttcattgtcttgaggcttccaggttttgtttttgtttttgccaaagtagaaaaggcaggtggtgggcggctggcagggagtgcgggtccccgcccctcttcagtcctgccctcccctcctcagtcctgcccaccccgtgcagcccatgctgaggctgcagtggtgtcgtgggtgttacgtgcaggaacgtggagaccctgacgtgggctcactgcgtttggttttcttttcagaacttgggagcccccagggaggggctagtgttggtaggtcctagacgtggttccctccagcctccccaaaatcaaccctggtgttgagagaacgtccttctgtccatcgtgggtaacagccttggggagggtgcagagctctgcagagccatgggccaggtggggctgcctcagtcctgtccccttgggcactgaggagaggggcccattcacctttctcctagaatgctgttgtaaataaacaaatggatccctggaaacttt

SEQ ID NO: 116930 - DNA, 2295 bp, Homo sapiens
  Payload ID: 2814
  Gene Symbol: CHMP1A
  Gene Name: charged multivesicular body protein 1A
  ENST ID: ENST00000535997
  CDS Start-End: 294-692
cggcgaccccggaagtccccgccgggtgcagcttggtcggttcgatcgccgccgggacctgacaccgcccggagttggcgtcccttctccctctccgagtgctgctcctgtcattgtggccatggacgttcacggcgaagcagctggagaagctggccaagaaggcggagaaggactccaaggcggagcaggccaaagtgaagaaggcccttctgcagaaaaatgtagagtgtgcccgtgtgtatgccgagaacgccatccgcaagaagaacgaaggtgtgaactggcttcggatggcgtcccgcgtagacgcagtggcctccaaggtgcagacagctgtgactatgaagggggtgaccaagaatatggcccaggtgaccaaagccctggacaaggccctgagcaccatggacctgcagaaggtctcctcagtgatggacaggttcgagcagcaggtgcagaacctggacgtccatacatcggtgatggaggactccatgagctcggccaccaccctgaccacgccgcaggagcaggtggacagcctcatcatgcagatcgccgaggagaatggcctggaggtgctggaccagctcagccagctgcccgagggcgcctctgccgtgggcgagagctctgtgcgcagccaggaggaccagctgtcacggaggttggccgccttgaggaactagccgtgccccgccggtgtgcaccgcctctgccccgtgatgtgctggaaggctcctgtcctctccccaccgcgtcttgcctttgtgctgaccccgcggggctgcggccggcagccactctgcgtctctcacctgccaggcctgcgtggccttagggttgttcctgttcttttaggttgggcggtgggtctgtgtcctggtgttgagtttctgcaaatttctgggggtgatttctgtgactctgggcccacagcggggaggccaagaggggccctgtggactttcacccagcactgtgggggccttcagactctggggcagcagacatgctgcttcccatcagccagagggggtcagggctgccctgttgccaaacaactccctgaggcctctccgcaccacctcagcgggcaggaggtcccaccatgtggacagacatagcccaaggaggcaccacaggtctatgtgtgctgggggatgtcaggtgccacccaacgctgtcctggtggtatttacaatgacatcctcctcctccatcactccaggggtggtgtctcggccgcccctaccagctggctgagccccctggcctcctgcgctccctcacttccctcagttcccaaagctgcccagtccatggggacagaaccgtcactcagatccacattcaagtgtgcccaccctgcagtcttcatcctcactcagctgctgcctctggaggtgcctttggccacatgtgctgtgctgtttgtctcctcgacagggagcctgtccaccagcaggctgcggtcccagcgggtgcgtctgcagctcctccccttgggcagcctggttctcccggaggacctttccttggggccctgcttcatgacgatgctgcctgtgtcaccctctaccatctgtaaacaactgggtgccttccccgaccacaccccaatgccttcccagcttggaagccaaggcagctgatgaagggagctcaggagagccgtcttcagctgggctggggttggggctgctgtgaggaaaacctgccattgtggccctggagagtcaccagcagctcttgggaaggacttgctgggaggctgagagaggctttgggcacagcctgctgtcttttccatttcctaaagtttacttcattgtcttgaggcttccaggttttgtttttgtttttgccaaagtagaaaaggcaggtggtgggcggctggcagggagtgcgggtccccgcccctcttcagtcctgccctcccctcctcagtcctgcccaccccgtgcagcccatgctgaggctgcagtggtgtcgtgggtgttacgtgcaggaacgtggagaccctgacgtgggctcactgcgtttggttttcttttcagaacttgggagcccccagggaggggctagtgttggtaggtcctagacgtggttccctccagcctccccaaaatcaaccctggtgttgagagaacgtccttctgtccatcgtgggtaacagccttggggagggtgcagagctctgcagagccatgggccaggtggggctgcctcagtcctgtccccttgggcactgaggagaggggcccattcacctttctcctagaatgctgt

SEQ ID NO: 116931 - DNA, 1003 bp, Homo sapiens
  Payload ID: 2814
  Gene Symbol: CHMP1A
  Gene Name: charged multivesicular body protein 1A
  ENST ID: ENST00000549328
  CDS Start-End: 134-679
ccggaagtggggcggcgaccccggaagtccccgccgggtgcagcttggtcggttcgatcgccgccgggacctgacaccgcccggagttggcgtcccttctccctctccgagtgctgctcctgtcattgtggccatggacgataccctgttccagttgaagttcacggcgaagcagctggagaagctggccaagaaggcggagaaggactccaaggcggagcaggccaaagtgaagaaggcccttctgcagaaaaatgtagagtgtgcccgtgtgtatgccgagaacgccatccgcaagaagaacgaaggtgtgaactggcttcggatggcgtcccgcgtagacgcagtggcctccaaggtgcagacagctgtgactatgaagggggtgaccaagaatatggcccaggtgaccaaagccctggacaaggccctgagcaccatggacctgcagaaggtctcctcagtgatggacaggttcgagcagcaggtgcagaacctggacgtccatacatcggtatgtggcccctacccttggggctgtggcctggggacaaggagcgtgtgtgggcagctcatcgggaggggtggctcacaggctgacgtgctgtctctgcatacctgtggttgctccctgacgtcaccaagcatcctctgtgctgggtccctgccaggaccctgacaggtgatggaggactccatgagctcggccaccaccctgaccacgccgcaggagcaggtggacagcctcatcatgcagatcgccgaggagaatggcctggaggtgctggaccagctcagccagctgcccgagggcgcctctgccgtgggcgagagctctgtgcgcagccaggaggaccagctgtcacggaggttggccgccttgaggaactagccgtgccccgccggtgtgcaccgcctctgccccgtgatgtgctggaaggctcctgtcctctccccaccgcgtcttgcctttgtgctgaccccgcggggctgcggccggcag

SEQ ID NO: 116932 - DNA, 803 bp, Homo sapiens
  Payload ID: 2814
  Gene Symbol: CHMP1A
  Gene Name: charged multivesicular body protein 1A
  ENST ID: ENST00000550102
  CDS Start-End: 63-626
tgacaccgcccggagttggcgtcccttctccctctccgagtgctgctcctgtcattgtggccatggacgataccctgttccagttgaagttcacggcgaagcagctggagaagctggccaagaaggcggagaaggactccaaggcggagcaggccaaagtgaagaaggcccttctgcagaaaaatgtagagtgtgcccgtgtgtatgccgagaacgccatccgcaagaagaacgaaggtgtgaactggcttcggatggcgtcccgcgtagacgcagtggcctccaaggtgaccaagaatatggcccaggtgaccaaagccctggacaaggccctgagcaccatggacctgcagaaggtctcctcagtgatggacaggttcgagcagcaggtgcagaacctggacgtccatacatcggtgatggaggactccatgagctcggccaccaccctgaccacgccgcaggagcaggtggacagcctcatcatgcagatcgccgaggagaatggcctggaggtgctggaccagctcagccagctgcccgagggcgcctctgccgtgggcgagagctctgtgcgcagccaggaggaccagctgtcacggaggttggccgccttgaggaactagccgtgccccgccggtgtgcaccgcctctgccccgtgatgtgctggaaggctcctgtcctctccccaccgcgtcttgcctttgtgctgaccccgcggggctgcggccggcagccactctgcgtctctcacctgccaggcctgcgtggccttagggttgttcctgttcttttaggttgg

SEQ ID NO: 116933 - DNA, 3054 bp, Homo sapiens
  Payload ID: 2815
  Gene Symbol: CHMP1B
  Gene Name: charged multivesicular body protein 1B
  Uniprot ID: Q7LBR1
  ENST ID: ENST00000526991
  CDS Start-End: 117-716
gaaacaggaagtgggaccaaaacaaaggagcggcggccgggagcggacttaccttaccttctctgccttcggcgcgcttctcagccgggccgccgacccaaaggagccgtccgactatgtctaacatggagaaacacctgttcaacctgaagttcgcggccaaagaactgagtaggagtgccaaaaaatgcgataaggaggaaaaggccgaaaaggccaaaattaaaaaggccattcagaagggcaacatggaagttgcgaggatacacgccgaaaatgccatccgccagaagaaccaggcggtgaatttcttgagaatgagtgcgcgagtcgatgcagtggctgccagggtccagacggcggtgacgatgggcaaggtgaccaagtcgatggctggtgtggttaagtcgatggatgcgacattgaagaccatgaatctggagaagatttctgctttgatggacaaattcgagcaccagtttgagactctggacgtccagacgcagcaaatggaagacacgatgagcagcacgacgacgctcaccactccccagaaccaagtggatatgctgctccaggaaatggcagatgaggcgggcctcgacctcaacatggagctgccgcagggccagaccggctccgtgggcacgagcgtggcttcggcggagcaggatgaactgtctcagagactggcccgccttcgggatcaagtgtgacggcagaacccgctctgaggtttcctggccatagccaccctttgaaatgctctctgtgtgttagagagatactataccctagaaactctgaacacgccagaatgctgaaatgcccttctacctttgggtttacagccccctccacataaattaagaaattcagtatttctgcactcttagctggattctaaagttctgtatagctcgtaatgatggtatttttatagcagccttttaacagaactagttaatttcgtgtatatgaatctttctcgaagatctggtcaaaactgtattcagtttcctgcccagaatgatcagattgaaggtggttggtttttattattatttagtgtgattgatagtatctagaatggcaggtggtgcataaaagttaaagagaggggaaagattacttagtttggttatacagttataaacaccatgcagtgtattcggtggactgtgctatttctgtttatcctttgggttttggtttttgttttttttttttttgccttcacagtgagactgcaaatgattgttctcataacgtatattattaataaatgtggtcctataatttatactgaaattaccttaggatatttttgcataatactctcttactgcttacattctataaatttttcacgtgataattgtctttgcgtaactgggaaaaatgccgaataacttcctttattatctggaaaaattaaatttgttcatttatattttctacttactaaattgagtttttaaaaagacttagtgtgacatttgacagtgtctttcaaacgaacttctctaacaagtttatagttattttcctgtttcaacactattagaagtcttataaattatgctaattagcatggcagtcatgttacacactcttaacattgccaaagaactgttgatttcgtttgagaaaaccctaggactgtgtgtgtgtaggttttgttttgattttaacaaccaaaaatagaaataaaattagaactgcgttttaagttctaatttgcatttattaatttgtccaaaagcaagaactcttggaaatccttgaaaatataagctggaatgttttacttagccatgcaagtcatttatgtatacatccagccagctggaaatctgagaagtaaagaggtaggactggaaggaaggagaaagcttgagtctttaaggctagagcccagctgtgctgcctgccatcttctcaggaatggcagtgcgtattttctggctgaaaagtaaagcatgtatccaccgctttctcatagcctcgaaacatggagaaaagcaacttgcttttgccttggcaagcatgctaacctaagttaattcaagttttttttaacttaccctttccttcactggaagatttttccataagagaattccattgtttcagaaaataattataggggcccttccaagttctttgaaagattcataaccaactattcactattataacatgtttcccagtgtaaatgagtaaggaaaaaaaaagtgtaacaggtgcgtgcagatgaggagtgaccctcatatttaagttattttatatttgactggacattgttcagaagtgtgctttaagggacacttgttagttgtctgcccagcatctctcaagaatatccctcctgtcctccacatggttgtgcagggccatgtgtgaagacagcatgagtcttaacccctcttttattttatttttgagacagagtctcgctctgttgcccaggctggagtgctgtggcgcgatctctgctcactgcaacctccacctcccgggttcaagtgattctcctgcctcagcctgccgagtagctggaattacaggtgtgcaccaccatgcccagctagtttttttgtatttttagtagagacagggtttcactatgttggccaggctggtcttgaactcctgacctcaggtgatccgcccacctcagcctcccaaagtgctgggattacaggcatgagccactgcacctggccttaacccctctttagattggaaaaaataattacaactttaaaaatagcttagtgttgaaccctttggtaaactaaagacccttttataatgcacatattcccaacaaaattaatatattttgtgagattaaacaatgcttgtatatgcttgaactttcttaaaatatgtccatgtcatactattatgaatgtacatttttatgagtcataaatattattttcaaaagcactacaggcccatgaattacttcctcacttttgcagttgattactgaaatgtaaatcacaagaatttgtcaattaaatcattttaaactgcatgtta

SEQ ID NO: 116934 - DNA, 913 bp, Homo sapiens
  Payload ID: 2816
  Gene Symbol: CHMP2A
  Gene Name: charged multivesicular body protein 2A
  Uniprot ID: O43633
  ENST ID: ENST00000312547
  CDS Start-End: 162-830
atgttacgtcacgtcgtttaatccggaaacggcggcggcggcgacaggaccgaggggccttagttggtgggcaagtcggggatcccagaaagagaagcgtgacccggaagcggaaacgggtgtccgtcccagctccggcctgccagtgagcttctaccatcatggacctattgttcgggcgccggaagacgccagaggagctactgcggcagaaccagagggccctgaaccgtgccatgcgggagctggaccgcgagcgacagaaactagagacccaggagaagaaaatcattgcagacattaagaagatggccaagcaaggccagatggatgctgttcgcatcatggcaaaagacttggtgcgcacccggcgctatgtgcgcaagtttgtattgatgcgggccaacatccaggctgtgtccctcaagatccagacactcaagtccaacaactcgatggcacaagccatgaagggtgtcaccaaggccatgggcaccatgaacagacagctgaagttgccccagatccagaagatcatgatggagtttgagcggcaggcagagatcatggatatgaaggaggagatgatgaatgatgccattgatgatgccatgggtgatgaggaagatgaagaggagagtgatgctgtggtgtcccaggttctggatgagctgggacttagcctaacagatgagctgtcgaacctcccctcaactgggggctcgcttagtgtggctgctggtgggaaaaaagcagaggccgcagcctcagccctagctgatgctgatgcagacctggaggaacggcttaagaacctgcggagggactgagtgcccctgccactccgagataaccagtggatgcccaggatcttttaccacaacccctctgtaataaaagagatttgacacta

SEQ ID NO: 116935 - DNA, 1178 bp, Homo sapiens
  Payload ID: 2816
  Gene Symbol: CHMP2A
  Gene Name: charged multivesicular body protein 2A
  Uniprot ID: O43633
  ENST ID: ENST00000600118
  CDS Start-End: 427-1095
atcagaacccccacaattgctctgtcctcggtgcccacagtctccaaaacaccagtgcaccggcccgcgtcatcccccgctctcagtcgtatcaaggactccagggcctcacccatagttctggagagggaagctgaacttgcaagccataacttcttttggggcatggcgatgaaggaggggctcgggccagcacttggataattttcaggtctacctgtccccctttatgtgtccccgggacaatcccagtgttctcagctgctcccttttggctcctcattcctgcctccagtctccgttagccccttcccatttggcaaggctcccgtgaccctgttctgcttcttgccctcctgggccccatgccctacaactgggcctcactcacatctgtctcaggcctgccagtgagcttctaccatcatggacctattgttcgggcgccggaagacgccagaggagctactgcggcagaaccagagggccctgaaccgtgccatgcgggagctggaccgcgagcgacagaaactagagacccaggagaagaaaatcattgcagacattaagaagatggccaagcaaggccagatggatgctgttcgcatcatggcaaaagacttggtgcgcacccggcgctatgtgcgcaagtttgtattgatgcgggccaacatccaggctgtgtccctcaagatccagacactcaagtccaacaactcgatggcacaagccatgaagggtgtcaccaaggccatgggcaccatgaacagacagctgaagttgccccagatccagaagatcatgatggagtttgagcggcaggcagagatcatggatatgaaggaggagatgatgaatgatgccattgatgatgccatgggtgatgaggaagatgaagaggagagtgatgctgtggtgtcccaggttctggatgagctgggacttagcctaacagatgagctgtcgaacctcccctcaactgggggctcgcttagtgtggctgctggtgggaaaaaagcagaggccgcagcctcagccctagctgatgctgatgcagacctggaggaacggcttaagaacctgcggagggactgagtgcccctgccactccgagataaccagtggatgcccaggatcttttaccacaacccctctgtaataaaagagatttgacacta

SEQ ID NO: 116936 - DNA, 509 bp, Homo sapiens
  Payload ID: 2816
  Gene Symbol: CHMP2A
  Gene Name: charged multivesicular body protein 2A
  ENST ID: ENST00000597848
  CDS Start-End: 343-509
ccggtgagtggcccctgctggaccgtggatcccgggcgggcgtgcgggcggcagcgtacgaggccttctactcgcccgggtgtccggtgcctcgcttctccctgggaccctgtcgtcaacatcgaggtctccaacaccaccttgctttggtgccgggcccactgactgtcctcggtgtatagtgcgaccgaatctccatcatcccgtcctcagtgtacaggatgccccagcgcccccaaccgtctccctcagcattcagggtccccaaatcctaatgccttgtcctgagcttcacagccccacattcacctgttcttggcctgccagtgagcttctaccatcatggacctattgttcgggcgccggaagacgccagaggagctactgcggcagaaccagagggccctgaaccgtgccatgcgggagctggaccgcgagcgacagaaactagagacccaggagaagaaaatcattgcagacattaagaagatggccaagcaaggccagat

SEQ ID NO: 116937 - DNA, 687 bp, Homo sapiens
  Payload ID: 2816
  Gene Symbol: CHMP2A
  Gene Name: charged multivesicular body protein 2A
  ENST ID: ENST00000596708
  CDS Start-End: 209-687
cccgggcgggcgtgcgggcggcagcgtacgaggccttctactcgcccgggtgtccggtgcctcgcttctccctgggaccctgtcgtcaacatcgaggtctccaacaccaccttgctttggtgccgggcccactgactgtcctcggtgtatagtgcgaccgaatctccatcatcccgtcctcagtgcctgccagtgagcttctaccatcatggacctattgttcgggcgccggaagacgccagaggagctactgcggcagaaccagagggccctgaaccgtgccatgcgggagctggaccgcgagcgacagaaactagagacccaggagaagaaaatcattgcagacattaagaagatggccaagcaaggccagatggatgctgttcgcatcatggcaaaagacttggtgcgcacccggcgctatgtgcgcaagtttgtattgatgcgggccaacatccaggctgtgtccctcaagatccagacactcaagtccaacaactcgatggcacaagccatgaagggtgtcaccaaggccatgggcaccatgaacagacagctgaagttgccccagatccagaagatcatgatggagtttgagcggcaggcagagatcatggatatgaaggaggagatgatgaatgatgccattgatgatgccatgggtgatgaggaagatgaagaggagag

SEQ ID NO: 116938 - DNA, 766 bp, Homo sapiens
  Payload ID: 2816
  Gene Symbol: CHMP2A
  Gene Name: charged multivesicular body protein 2A
  ENST ID: ENST00000600006
  CDS Start-End: 1-683
aggagaagaaaatcattgcagacattaagaagatggccaagcaaggccagatggatgctgttcgcatcatggcaaaagacttggtgcgcacccggcgctatgtgcgcaagtttgtattgatgcgggccaacatccaggctgtgtccctcaagatccagacactcaagtccaacaactcgatggcacaagccatgaagggtgtcaccaaggccatgggcaccatgaacagacagctgaagttgccccagatccagaagatcatgatggagtttgagcggcaggcagagatcatggatatgaaggaggagatgatgaatgatgccattgatgatgccatgggtgatgaggaagatgaagaggagagtgatgctgtggtgtcccaggttctggatgagctgggacttagcctaacagatgagctgtcgagtgagtgctccaaatcctggaccccatttcccacccaaggcccagccacagctccaagccctccctttccctgcattactcccctccgctgcctgaccccacctgctcaaacccccactttctctgcagacctcccctcaactgggggctcgcttagtgtggctgctggtgggaaaaaagcagaggccgcagcctcagccctagctgatgctgatgcagacctggaggaacggcttaagaacctgcggagggactgagtgcccctgccactccgagataaccagtggatgcccaggatcttttaccacaacccctctgtaataaaagagatttgacacta

SEQ ID NO: 116939 - DNA, 885 bp, Homo sapiens
  Payload ID: 2816
  Gene Symbol: CHMP2A
  Gene Name: charged multivesicular body protein 2A
  Uniprot ID: O43633
  ENST ID: ENST00000601220
  CDS Start-End: 134-802
ctggaccgtggatcccgggcgggcgtgcgggcggcagcgtacgaggccttctactcgcccgggtgtccggtgcctcgcttctccctgggaccctgtcgtcaacatcgaggcctgccagtgagcttctaccatcatggacctattgttcgggcgccggaagacgccagaggagctactgcggcagaaccagagggccctgaaccgtgccatgcgggagctggaccgcgagcgacagaaactagagacccaggagaagaaaatcattgcagacattaagaagatggccaagcaaggccagatggatgctgttcgcatcatggcaaaagacttggtgcgcacccggcgctatgtgcgcaagtttgtattgatgcgggccaacatccaggctgtgtccctcaagatccagacactcaagtccaacaactcgatggcacaagccatgaagggtgtcaccaaggccatgggcaccatgaacagacagctgaagttgccccagatccagaagatcatgatggagtttgagcggcaggcagagatcatggatatgaaggaggagatgatgaatgatgccattgatgatgccatgggtgatgaggaagatgaagaggagagtgatgctgtggtgtcccaggttctggatgagctgggacttagcctaacagatgagctgtcgaacctcccctcaactgggggctcgcttagtgtggctgctggtgggaaaaaagcagaggccgcagcctcagccctagctgatgctgatgcagacctggaggaacggcttaagaacctgcggagggactgagtgcccctgccactccgagataaccagtggatgcccaggatcttttaccacaacccctctgtaataaaagagatttgacacta

SEQ ID NO: 116940 - DNA, 2557 bp, Homo sapiens
  Payload ID: 2817
  Gene Symbol: CHMP2B
  Gene Name: charged multivesicular body protein 2B
  Uniprot ID: Q9UQN3
  ENST ID: ENST00000263780
  CDS Start-End: 239-880
agaagtgacttctccaaaaagtgtgttagttcccggtcacctgagctccgggtgacgcggctgcggtagctgcggatacaagccttccgcgggtcctgcctggcgaccccgacctcctcctgctgtctctccgctccgccaccccgaacccgccaaggtcctgtccttttcctcctgtcctttgccagcgttgggccggaccgggccgagccgggccgcccgggcgcagtctttaaccatggcgtccctcttcaagaagaaaaccgtggatgatgtaataaaggaacagaatcgagagttacgaggtacacagagggctataatcagagatcgagcagctttagagaaacaagaaaaacagctggaattagaaattaagaaaatggccaagattggtaataaggaagcttgcaaagttttagccaaacaacttgtgcatctacggaaacagaagacgagaacttttgctgtaagttcaaaagttacttctatgtctacacaaacaaaagtgatgaattcccaaatgaagatggctggagcaatgtctactacagcaaaaacaatgcaggcagttaacaagaagatggatccacaaaagacattacaaacaatgcagaatttccagaaggaaaacatgaaaatggaaatgactgaagaaatgatcaatgatacacttgatgacatctttgacggttctgatgacgaagaagaaagccaggatattgtgaatcaagttcttgatgaaattggaattgaaatttctggaaagatggccaaagctccatcagctgctcgaagcttaccatctgcctctacttcaaaggctacaatctcagatgaagagattgaacggcaactcaaggctttaggagtagattagtcaaaagaagtcatactattttgcttacttataattatgtagtataaaccaagcacagtgcagatttcttttacaaaacacatgtattttgcaaaaaaaaaaaaaatgaagaccatgagtgaacagttgtttcctaacccatggctatttagaatcttttgccaaagaatgacaatgatgcaaaaatgggaacagtttggattttaattagaactgtttaggagtgatgatgtgtaaaaagttgacttctcttttgcatggcacagagaaattatattccttacttcatgtcagtttatgttctaaatctttttcactgaatataaaaatcttgttaaatgccattaggcaccaacttaaagagggttgtaaaaatattaaaagtatatcgttaattctgtatctgttgcttgtcttttgtaagtgattatgtgttatgaccataggtggttacagctgccaaattatttttaaatggtcaaaaagaagagtgctatttaaacatctgtcttaaacaaaaactgtcataacttttcttttttctttttccattaggagaacattctagttggtaaatttcaaaatgtgcttgacacctgccttaaatagcacagacctattgtgcacatctttaaattatttcagctggcagaaaagaattacatttaaaactgaaatcaaggcctcaatacaaagattatcctggctcttttctatctctgtgggcctaattgaaatatgtactcttattttagacacgcctctgttaaaacagaccaggttttcctggtctcagacctatgatgacttgtccctttgatgtcactactgtgaattgaatataattagtaaaaatagacgatgaataaataacactttatagtaagaaaacaatatattttggccatctaaaaatgagaattataattatatgaattataatttaaactgtttaattttgtttaatgtgtatattgaatcttccaaattgaagccattattctcaattaagtactacaactatgacaatgcttgacctacatttctaaaataaaaattcacattttttgataaataaactacagttttaccagaaattactatctaaatgtgtattagcagtattttttaaggtgaaattgccttggtatctaatgaatgtgtagacagggagataaaatgaaggattgccagactagttagaatagaatttaggattaggttagttttgaaaaatgatgttgtaatatatgggttctaacacatcctaccataaaaactggaggagatatgtgtaacctggttaatttgggatggtggacattttgggctaatactgacaaaatacatcttaggactagtatacatgtgacacggattgctaggaggaatgaaaaactaaactgtatagtttatattccgtaaaccattttataatgttcaaagattaggttttgttattgatagtattaaatacacagtttctcttaacagtgatgggtgaaaacattttaccggattatggaatgtttaccagaacatgttttgattcttgaatgtacataataatgccatctaacttatttacgttcttgtttacatgtgggagcttttgttttcaaaaattattttgttaaaaaatctcaataaagatttattattgttgttcttttctta

SEQ ID NO: 116941 - DNA, 1175 bp, Homo sapiens
  Payload ID: 2817
  Gene Symbol: CHMP2B
  Gene Name: charged multivesicular body protein 2B
  ENST ID: ENST00000494980
  CDS Start-End: 222-773
aaagtgtgttagttcccggtcacctgagctccgggtgacgcggctgcggtagctgcggatacaagccttccgcgggtcctgcctggcgaccccgacctcctcctgctgtctctccgctccgccaccccgaacccgccaaggtcctgtccttttcctcctgtcctttgccagcgttgggccggaccgggccgagccgggccgcccgggcgcagtctttaaccatggcgtccctcttcaagaagaaaaccgtggatgatgtaataaaggaacagaatcgagagttacgaggtacacagagggctataatcagagatcgagcagctttagagaaacaagaaaaacagctggaattagaaattaagaaaatggccaagattggtaataaggaagcttgcaaagttttagccaaacaacttgtgcatctacggaaacagaagacgagaacttttgctacaatgcaggcagttaacaagaagatggatccacaaaagacattacaaacaatgcagaatttccagaaggaaaacatgaaaatggaaatgactgaagaaatgatcaatgatacacttgatgacatctttgacggttctgatgacgaagaagaaagccaggatattgtgaatcaagttcttgatgaaattggaattgaaatttctggaaagatggccaaagctccatcagctgctcgaagcttaccatctgcctctacttcaaaggctacaatctcagatgaagagattgaacggcaactcaaggctttaggagtagattagtcaaaagaagtcatactattttgcttacttataattatgtagtataaaccaagcacagtgcagatttcttttacaaaacacatgtattttgcaaaaaaaaaaaaaatgaagaccatgagtgaacagttgtttcctaacccatggctatttagaatcttttgccaaagaatgacaatgatgcaaaaatgggaacagtttggattttaattagaactgtttaggagtgatgatgtgtaaaaagttgacttctcttttgcatggcacagagaaattatattccttacttcatgtcagtttatgttctaaatctttttcactgaatataaaaatcttgttaaatgccattaggcaccaacttaaagagggttgtaaaaatattaaaagtatatcgttaattctgta

SEQ ID NO: 116942 - DNA, 2528 bp, Homo sapiens
  Payload ID: 2817
  Gene Symbol: CHMP2B
  Gene Name: charged multivesicular body protein 2B
  Uniprot ID: Q9UQN3
  ENST ID: ENST00000471660
  CDS Start-End: 284-802
cgcaggcgccgcctagaagtgacttctccaaaaagtgtgttagttcccggtcacctgagctccgggtgacgcggctgcggtagctgcggatacaagccttccgcgggtcctgcctggcgaccccgacctcctcctgctgtctctccgctccgccaccccgaacccgccaaggtcctgtccttttcctcctgtcctttgccagcgttgggccggaccgggccgagccgggccgcccgggcgcagtctttaaccatggcgtccctcttcaagaagaaaaccgtggatggaattagaaattaagaaaatggccaagattggtaataaggaagcttgcaaagttttagccaaacaacttgtgcatctacggaaacagaagacgagaacttttgctgtaagttcaaaagttacttctatgtctacacaaacaaaagtgatgaattcccaaatgaagatggctggagcaatgtctactacagcaaaaacaatgcaggcagttaacaagaagatggatccacaaaagacattacaaacaatgcagaatttccagaaggaaaacatgaaaatggaaatgactgaagaaatgatcaatgatacacttgatgacatctttgacggttctgatgacgaagaagaaagccaggatattgtgaatcaagttcttgatgaaattggaattgaaatttctggaaagatggccaaagctccatcagctgctcgaagcttaccatctgcctctacttcaaaggctacaatctcagatgaagagattgaacggcaactcaaggctttaggagtagattagtcaaaagaagtcatactattttgcttacttataattatgtagtataaaccaagcacagtgcagatttcttttacaaaacacatgtattttgcaaaaaaaaaaaaaatgaagaccatgagtgaacagttgtttcctaacccatggctatttagaatcttttgccaaagaatgacaatgatgcaaaaatgggaacagtttggattttaattagaactgtttaggagtgatgatgtgtaaaaagttgacttctcttttgcatggcacagagaaattatattccttacttcatgtcagtttatgttctaaatctttttcactgaatataaaaatcttgttaaatgccattaggcaccaacttaaagagggttgtaaaaatattaaaagtatatcgttaattctgtatctgttgcttgtcttttgtaagtgattatgtgttatgaccataggtggttacagctgccaaattatttttaaatggtcaaaaagaagagtgctatttaaacatctgtcttaaacaaaaactgtcataacttttcttttttctttttccattaggagaacattctagttggtaaatttcaaaatgtgcttgacacctgccttaaatagcacagacctattgtgcacatctttaaattatttcagctggcagaaaagaattacatttaaaactgaaatcaaggcctcaatacaaagattatcctggctcttttctatctctgtgggcctaattgaaatatgtactcttattttagacacgcctctgttaaaacagaccaggttttcctggtctcagacctatgatgacttgtccctttgatgtcactactgtgaattgaatataattagtaaaaatagacgatgaataaataacactttatagtaagaaaacaatatattttggccatctaaaaatgagaattataattatatgaattataatttaaactgtttaattttgtttaatgtgtatattgaatcttccaaattgaagccattattctcaattaagtactacaactatgacaatgcttgacctacatttctaaaataaaaattcacattttttgataaataaactacagttttaccagaaattactatctaaatgtgtattagcagtattttttaaggtgaaattgccttggtatctaatgaatgtgtagacagggagataaaatgaaggattgccagactagttagaatagaatttaggattaggttagttttgaaaaatgatgttgtaatatatgggttctaacacatcctaccataaaaactggaggagatatgtgtaacctggttaatttgggatggtggacattttgggctaatactgacaaaatacatcttaggactagtatacatgtgacacggattgctaggaggaatgaaaaactaaactgtatagtttatattccgtaaaccattttataatgttcaaagattaggttttgttattgatagtattaaatacacagtttctcttaacagtgatgggtgaaaacattttaccggattatggaatgtttaccagaacatgttttgattcttgaatgtacataataatgccatctaacttatttacgttcttgtttacatgtgggagcttttgttttcaaaaattattttgttaaaaaatctcaataaagatttattattgttgttcttttcttaccttttttgctctttttggttcctgctaaaattaaaaattttatgcata

SEQ ID NO: 116943 - DNA, 836 bp, Homo sapiens
  Payload ID: 2817
  Gene Symbol: CHMP2B
  Gene Name: charged multivesicular body protein 2B
  ENST ID: ENST00000472024
  CDS Start-End: 298-836
gttagttcccggtcacctgagctccgggtgacgcggctgcggtagctgcggatacaagccttccgcgggtcctgcctggcgaccccgacctcctcctgctgtctctccgctccgccaccccgaacccgccaaggtcctgtccttttcctcctgtcctttgccagcgttgggccggaccgggccgagccgggccgcccgggcgcagtctttaaccatggcgtccctcttcaagaagaaaaccgtggatgacagagtttcgctgttgttgcccaggctggagtgctggagtgcaatggcatgatctcggctcaacgcaaccatcacctcccagattcaagcgattcttctacctcagcctaccgagtagctcggattacagatgtaataaaggaacagaatcgagagttacgaggtacacagagggctataatcagagatcgagcagctttagagaaacaagaaaaacagctggaattagaaattaagaaaatggccaagattggtaataaggaagcttgcaaagttttagccaaacaacttgtgcatctacggaaacagaagacgagaacttttgctgtaagttcaaaagttacttctatgtctacacaaacaaaagtgatgaattcccaaatgaagatggctggagcaatgtctactacagcaaaaacaatgcaggcagttaacaagaagatggatccacaaaagacattacaaacaatgcagaatttccagaaggaaaacatgaaaatggaaatgactgaagaaatgatcaatgatacacttgatgacatctttgacggttctgatgacgaagaagaaagccaggatattgtgaa

SEQ ID NO: 116944 - DNA, 3171 bp, Homo sapiens
  Payload ID: 2818
  Gene Symbol: CHMP3
  Gene Name: charged multivesicular body protein 3
  Uniprot ID: Q9Y3E7
  ENST ID: ENST00000263856
  CDS Start-End: 130-798
tgccgccgctccctactctgggggttgggactacctccttttccgcgggccccgcccaggcggctgcccgtgacctgcctgggcgcggggaactgaaagccggaaggggcaagacgggttcagttcgtcatggggctgtttggaaagacccaggagaagccgcccaaagaactggtcaatgagtggtcattgaagataagaaaggaaatgagagttgttgacaggcaaataagggatatccaaagagaagaagaaaaagtgaaacgatctgtgaaagatgctgccaagaagggccagaaggatgtctgcatagttctggccaaggagatgatcaggtcaaggaaggctgtgagcaagctgtatgcatccaaagcacacatgaactcagtgctcatggggatgaagaaccagctcgcggtcttgcgagtggctggttccctgcagaagagcacagaagtgatgaaggccatgcaaagtcttgtgaagattccagagattcaggccaccatgagggagttgtccaaagaaatgatgaaggctgggatcatagaggagatgttagaggacacttttgaaagcatggacgatcaggaagaaatggaggaagaagcagaaatggaaattgacagaattctctttgaaattacagcaggggccttgggcaaagcacccagtaaagtgactgatgcccttccagagccagaacctccaggagcgatggctgcctcagaggatgaggaggaggaggaagaggctctggaggccatgcagtcccggctggccacactccgcagctaggggctgcctaccccgctgggtgtgcacacactcctctcaagagctgccattttatgtgtctcttgcactacacctctgttgtgaggactaccattttggagaaggttctgtttgtctcttttcattctctgcccaggttttgggatcgcaaagggattgttcttataaaagtggcataaataaatgcatcatttttaggagtatagacagatatatcttattgtggggaggggaaagaaatccatctgctcatgaagcacttctgaaaatataggtgattgcctgaatgtcgaagactctacttttgtctataaaacactatataaatgaattttaataaatttttgctttagcacttggccccattgtagattgccctgtgcagtaaactttcaaggtgtcggctgccccagattgcttcatttgctgggtgtggaaagagttgctatggccaggcatatgggatttggaagctcagcagaagtgacttctgctctgtggttgctgctccccggctttcacagacatggtatggcagccattcttttatctatttaaccaagaggatgctggggaattgtgctgcttgtcctgttggctggtggctgcattatgtcctggggtgtgcatgtgggtctatttagagcttctgtcccttccttcccattgcaagttgcacccagatgagacagctgtagtactaggtctctttcacctctcattgcctgtccctgcttcgagctggttgtcttgtgcgtgggacatgggccttcctatctgtgttttctcaaagtcaggagctgaccaggagcacactaaggtgtggtcatgcatcataaccaacattcactcatctgggacattcttaagatacatttataaatcatttcagcagtagtactttgtatgtgttgagagtttacagagctctttgacatacgcgatcttagtctttacaaataaggaaaacagctcagtttgggaagtatcagagatgggattcaaacccagatcctctggtccaagttgtatgtgcactgaactaatcaggcaggaaaaaagcccagccactgtctcacagattgttttttgtatattgtagcaaaatcctgaaacaatggggtccttccagtctcatcatacaaaatggcaatcttggctgggtgcggtggttcatgcctataatcccagtgctttacaaggctgaggcaggaggctctcttgagaataggagttcaagaccagcctgggcaacatagcaagatcctgtctctccaaaaaaaaaaaaaaaaaaaaaaaaaaatttcatttttgagtccagaggaccctcctattactcttgatttcatcttcagagtgtagttaaaaaattattttaaataattatttttttaaatcagttgtaggttcacagcaaaagtggacaaaaagaaatttctcatatatcccctgccctcacacatgcatagcctcccaccactatcagtatcccacaccagagtggtacatttgttacaatcaataaacctccattgacacatcattatcacccaaagtccatagtttacatgaagattcactctggtgttgtacattgtatgggcttagacaaatgtatgatgatatctacaattatagaatcatacagaatagtttcactgccctaaaacttctctatgcttcacctgttcatccctttcttccctaatcccctggcaaccactttaaaaaaaaaattaggttcagggggtacatgtgcaggtaaactcgtgacaagggggtttgttatacagattatttagtgacccaggtactaagcctagtacccaatagttacttttctggtcctgtcccttttcccaccctccaccctcaggtaggccccagtatgttattcctttgtgtccatgttatttcactcccacttgtgagaacatggaatatttggtttcctgttcctatgttagtttgttaaggataatggcctccagccccatccatgttcctgcaaaggacatgatctttctttggcaaccactttttactgtcgccatagttcttccttttctagaatgtcatattggaatcatatagtatgtagccttttcagactggcttctttcacttaataatatgcaattaaggttcctccatgtcatttcatggcttaatagtgcatttatttttagcactgaataatactccattgtctagatgaatagtttatccattcacctattgaaagacttcttggtggtttccaagttttggcaattatgaataaagctgttgtaaacatctttgtgcaggtttttctatgggcatgtttttaattcatttgaataaataccaagagcttcagtgctggatcat

SEQ ID NO: 116945 - DNA, 1099 bp, Homo sapiens
  Payload ID: 2818
  Gene Symbol: CHMP3
  Gene Name: charged multivesicular body protein 3
  Uniprot ID: Q9Y3E7
  ENST ID: ENST00000409225
  CDS Start-End: 269-739
agtgccgccgctccctactctgggggttgggactacctccttttccgcgggccccgcccaggcggctgcccgtgacctgcctgggcgcggggaactgaaagccggaaggggcaagacgggttcagttcgtcatggggctgtttggaaagacccaggagaagccgcccaaagaactgatatccaaagagaagaagaaaaagtgaaacgatctgtgaaagatgctgccaagaagggccagaaggatgtctgcatagttctggccaaggagatgatcaggtcaaggaaggctgtgagcaagctgtatgcatccaaagcacacatgaactcagtgctcatggggatgaagaaccagctcgcggtcttgcgagtggctggttccctgcagaagagcacagaagtgatgaaggccatgcaaagtcttgtgaagattccagagattcaggccaccatgagggagttgtccaaagaaatgatgaaggctgggatcatagaggagatgttagaggacacttttgaaagcatggacgatcaggaagaaatggaggaagaagcagaaatggaaattgacagaattctctttgaaattacagcaggggccttgggcaaagcacccagtaaagtgactgatgcccttccagagccagaacctccaggagcgatggctgcctcagaggatgaggaggaggaggaagaggctctggaggccatgcagtcccggctggccacactccgcagctaggggctgcctaccccgctgggtgtgcacacactcctctcaagagctgccattttatgtgtctcttgcactacacctctgttgtgaggactaccattttggagaaggttctgtttgtctcttttcattctctgcccaggttttgggatcgcaaagggattgttcttataaaagtggcataaataaatgcatcatttttaggagtatagacagatatatcttattgtggggaggggaaagaaatccatctgctcatgaagcacttctgaaaatataggtgattgcctgaatgtcgaagactctacttttgtctataaaacactatataaatgaattttaataaatttttgctttagcacttgg

SEQ ID NO: 116946 - DNA, 1851 bp, Homo sapiens
  Payload ID: 2818
  Gene Symbol: CHMP3
  Gene Name: charged multivesicular body protein 3
  Uniprot ID: Q9Y3E7
  ENST ID: ENST00000409727
  CDS Start-End: 27-575
aaggggcaagacgggttcagttcgtcatggggctgtttggaaagacccaggagaagccgcccaaagaactggtcaatgagtggtcattgaagataagaaaggaaatgagagttgttgacaggcaaataagggatatccaaagagaagaagaaaaagtgaaacgatctgtgaaagatgctgccaagaagggccagaaggatgtctgcatagttctggccaaggagatgatcaggtcaaggaaggccatgcaaagtcttgtgaagattccagagattcaggccaccatgagggagttgtccaaagaaatgatgaaggctgggatcatagaggagatgttagaggacacttttgaaagcatggacgatcaggaagaaatggaggaagaagcagaaatggaaattgacagaattctctttgaaattacagcaggggccttgggcaaagcacccagtaaagtgactgatgcccttccagagccagaacctccaggagcgatggctgcctcagaggatgaggaggaggaggaagaggctctggaggccatgcagtcccggctggccacactccgcagctaggggctgcctaccccgctgggtgtgcacacactcctctcaagagctgccattttatgtgtctcttgcactacacctctgttgtgaggactaccattttggagaaggttctgtttgtctcttttcattctctgcccaggttttgggatcgcaaagggattgttcttataaaagtggcataaataaatgcatcatttttaggagtatagacagatatatcttattgtggggaggggaaagaaatccatctgctcatgaagcacttctgaaaatataggtgattgcctgaatgtcgaagactctacttttgtctataaaacactatataaatgaattttaataaatttttgctttagcacttggccccattgtagattgccctgtgcagtaaactttcaaggtgtcggctgccccagattgcttcatttgctgggtgtggaaagagttgctatggccaggcatatgggatttggaagctcagcagaagtgacttctgctctgtggttgctgctccccggctttcacagacatggtatggcagccattcttttatctatttaaccaagaggatgctggggaattgtgctgcttgtcctgttggctggtggctgcattatgtcctggggtgtgcatgtgggtctatttagagcttctgtcccttccttcccattgcaagttgcacccagatgagacagctgtagtactaggtctctttcacctctcattgcctgtccctgcttcgagctggttgtcttgtgcgtgggacatgggccttcctatctgtgttttctcaaagtcaggagctgaccaggagcacactaaggtgtggtcatgcatcataaccaacattcactcatctgggacattcttaagatacatttataaatcatttcagcagtagtactttgtatgtgttgagagtttacagagctctttgacatacgcgatcttagtctttacaaataaggaaaacagctcagtttgggaagtatcagagatgggattcaaacccagatcctctggtccaagttgtatgtgcactgaactaatcaggcaggaaaaaagcccagccactgtctcacagattgttttttgtatattgtagcaaaatcctgaaacaatggggtccttccagtctcatcatacaaaatggcaatcttggctgggtgcggtggttcatgcctataatcccagtgctttacaaggctgaggcaggaggctctcttgagaataggagttcaagaccagcctgggcaacatagcaagatcctgtctctcc

SEQ ID NO: 116947 - DNA, 1393 bp, Homo sapiens
  Payload ID: 2819
  Gene Symbol: CHMP4A
  Gene Name: charged multivesicular body protein 4A
  Uniprot ID: Q9BY43
  ENST ID: ENST00000347519
  CDS Start-End: 302-1099
atgtgagacattagactgcatcaggtttgccatctaaacttagggcaaccccaagtgcttgaacctataccaccccactttcctgagctctgtaaagagcatgaagttttcccactgaccccatacactgaggtgccatcacactgcacatttccttccggagaacaagcacgtactcaggtggagatagaactgtctttttacttaatagaaaatgatgtggcagctttaagaggagcgcgtcggtctggggctggtggcttgggtcacgtgacaccggtggtctcgtttgcgcctcttgatgtcgcggcggcgccctgaggacggattgggcaaggctggtccctgtgtgatgagacatcaccctcccaggagcaaggcggaagtctggaggacgctgaggggcggaggcgggagaggcgagctcgcgatgagtggtctcggcaggctcttcgggaaggggaagaaggagaaagggccaacccctgaagaagcaatacagaaactgaaggagacagagaagatactgatcaagaaacaggaatttttggagcagaagattcaacaggagctacaaacagccaagaagtatgggaccaagaataagagagctgccctacaggctttgcggaggaagaaaagattcgaacagcagctggcacaaactgacgggacattatccaccctggagtttcagcgtgaggccattgagaatgccactaccaatgcagaagtccttcgtaccatggagcttgctgcccaaagcatgaagaaggcctaccaggacatggacattgacaaggtagatgaactgatgactgacatcacggaacaacaggaggtggcccagcagatctcagatgccatttctcggcctatgggctttggagatgatgtggatgaggatgaactgctggaggagctagaggagctggagcaggaggaattggcccaggagttgttaaatgtgggcgacaaggaagaagaaccctcagtcaaattgcctagtgtaccttctactcatctgccggcagggccagctcccaaagtggatgaagatgaagaagcactaaagcagttggctgagtgggtatcctgataaatctgggcttgtcttcctaatgctacctttgttggtcctttcttccttaagtgccaagtgctgagctaaaggaggataactttttggggaagtcatgctgagggtggtagtgtgaccctgcctgaaaaaagggtctcttaccctcccagccctggctcaactctgaagaaggatcttgctacagaaggagcccttgggctcccttctctttgatagcagttataatgcccttgttcccaataaaactgggcagatggaatcctagtgtctatactgccttgtctacccctg

SEQ ID NO: 116948 - DNA, 733 bp, Homo sapiens
  Payload ID: 2819
  Gene Symbol: CHMP4A
  Gene Name: charged multivesicular body protein 4A
  ENST ID: ENST00000533011
  CDS Start-End: 94-733
acgcgcctgtagtcccagctactgggggaggctgagacaggtgaatcgcttgaacccaggaggcggaggttgtagtgagccaagattgcaccaatgcactccagccttggtgacagagggagactccattctcaaaaaaaaaaaaaaaaattagggaagaaggagaaagggccaacccctgaagaagcaatacagaaactgaaggagacagagaagatactgatcaagaaacaggaatttttggagcagaagattcaacaggagctacaaacagccaagaagtatgggaccaagaataagagagctgccctacaggctttgcggaggaagaaaagattcgaacagcagctggcacaaactgacgggacattatccaccctggagtttcagcgtgaggccattgagaatgccactaccaatgcagaagtccttcgtaccatggagcttgctgcccaaagcatgaagaaggcctaccaggacatggacattgacaaggtagatgaactgatgactgacatcacggaacaacaggaggtggcccagcagatctcagatgccatttctcggcctatgggctttggagatgatgtggatgaggatgaactgctggaggagctagaggagctggagcaggaggaattggcccaggagttgttaaatgtgggcgacaaggaagaagaaccctcagtcaaattgcctagtgtaccttctactcatctgccggcagggccag

SEQ ID NO: 116949 - DNA, 1266 bp, Homo sapiens
  Payload ID: 2819
  Gene Symbol: CHMP4A
  Gene Name: charged multivesicular body protein 4A
  ENST ID: ENST00000533523
  CDS Start-End: 263-763
ttagggcaaccccaagtgcttgaacctataccaccccactttcctgagctctgtaaagagcatgaagttttcccactgaccccatacactgaggtgccatcacactgcacatttccttccggagaacaagcacgtactcaggtggagatagaactgtctttttacttaatagaaaatgatgtggcagctttaagaggagcgcgtcggtctggggctggtggcttgggtcacgtgacaccggtggtctcgtttgcgcctcttgatgtcgcggcggcgccctgaggacggattgggcaaggctggtccctgtgtgatgagacatcaccctcccaggagcaaggcggaagtctggaggacgctgaggggcggaggcgggagaggcgagctcgcgatgagtggtctcggcaggctcttcgggaaggggaagaaggagaaagggccaacccctgaagaagcaatacagaaactgaaggagacagagaagatactgatcaagaaacaggaatttttggagcagaagattcaacaggagctacaaacagccaagaagtatgggaccaagaataagagagctgccctacaggctttgcggaggaagaaaagattcgaacagcagctggcacaaactgacgggacattatccaccctggagtttcagcgtgaggccattgagaatgccactaccaatgcagaagtccttcgtaccatggagcttgctgcccaaagcatgaagaaggcctaccaggacatgtggggacattgacaaggtagatgaactgatgactgacatcacggaacaacaggaggtggcccagcagatctcagatgccatttctcggcctatgggctttggagatgatgtggatgaggatgaactgctggaggagctagaggagctggagcaggaggaattggcccaggagttgttaaatgtgggcgacaaggaagaagaaccctcagtcaaattgcctagtgtaccttctactcatctgccggcagggccagctcccaaagtggatgaagatgaagaagcactaaagcagttggctgagtgggtatcctgataaatctgggcttgtcttcctaatgctacctttgttggtcctttcttccttaagtgccaagtgctgagctaaaggaggataactttttggggaagtcatgctgagggtggtagtgtgaccctgcctgaaaaaagggtctcttaccctcccagccctggctcaactctgaagaaggatcttgctacagaaggagcccttgggc

SEQ ID NO: 116950 - DNA, 370 bp, Homo sapiens
  Payload ID: 2819
  Gene Symbol: CHMP4A
  Gene Name: charged multivesicular body protein 4A
  ENST ID: ENST00000534106
  CDS Start-End: 1-185
gtctcggcaggctcttcgggaaggggaagaaggagaaagggccaacccctgaagaagcaatacagaaactgaaggagacagagaagatactgatcaagaaacaggaatttttggagcagaagattcaacaggagctacaaacagccaagaagtatgggaccaagaataagagagtttcagcgtgaggccattgagaatgccactaccaatgcagaagtccttcgtaccatggagcttgctgcccaaagcatgaagaaggcctaccaggacatgtggggacattgacaaggtagatgaactgatgactgacatcacggaacaacaggaggtggcccagcagatctcagatgccatttctcggcctatgggc

SEQ ID NO: 116951 - DNA, 967 bp, Homo sapiens
  Payload ID: 2819
  Gene Symbol: CHMP4A
  Gene Name: charged multivesicular body protein 4A
  ENST ID: ENST00000530996
  CDS Start-End: 361-714
cggaagtctggaggacgctgaggggcggaggcgggagaggcgagctcgcgatgagtggtctcggcaggctcttcgggaaggaaggagaaagggccaacccctgaagaagcaatacagaaactgaaggagacagagaagatactgatcaagaaacaggaatttttggagcagaagattcaacaggagctacaaacagccaagaagtatgggaccaagaataagagagctgccctacaggctttgcggaggaagaaaagattcgaacagcagctggcacaaactgacgggacattatccaccctggagtttcagcgtgaggccattgagaatgccactaccaatgcagaagtccttcgtaccatggagcttgctgcccaaagcatgaagaaggcctaccaggacatggacattgacaaggtagatgaactgatgactgacatcacggaacaacaggaggtggcccagcagatctcagatgccatttctcggcctatgggctttggagatgatgtggatgaggatgaactgctggaggagctagaggagctggagcaggaggaattggcccaggagttgttaaatgtgggcgacaaggaagaagaaccctcagtcaaattgcctagtgtaccttctactcatctgccggcagggccagctcccaaagtggatgaagatgaagaagcactaaagcagttggctgagtgggtatcctgataaatctgggcttgtcttcctaatgctacctttgttggtcctttcttccttaagtgccaagtgctgagctaaaggaggataactttttggggaagtcatgctgagggtggtagtgtgaccctgcctgaaaaaagggtctcttaccctcccagccctggctcaactctgaagaaggatcttgctacagaaggagcccttgggctcccttctctttgatagcagttataatgcccttgttcccaataaaactggg

SEQ ID NO: 116952 - DNA, 735 bp, Homo sapiens
  Payload ID: 2819
  Gene Symbol: CHMP4A
  Gene Name: charged multivesicular body protein 4A
  Uniprot ID: Q9BY43
  ENST ID: ENST00000609024
  CDS Start-End: 50-718
ggaagtctggaggacgctgaggggcggaggcgggagaggcgagctcgcgatgagtggtctcggcaggctcttcgggaaggggaagaaggagaaagggccaacccctgaagaagcaatacagaaactgaaggagacagagaagatactgatcaagaaacaggaatttttggagcagaagattcaacaggagctacaaacagccaagaagtatgggaccaagaataagagagctgccctacaggctttgcggaggaagaaaagattcgaacagcagctggcacaaactgacgggacattatccaccctggagtttcagcgtgaggccattgagaatgccactaccaatgcagaagtccttcgtaccatggagcttgctgcccaaagcatgaagaaggcctaccaggacatggacattgacaaggtagatgaactgatgactgacatcacggaacaacaggaggtggcccagcagatctcagatgccatttctcggcctatgggctttggagatgatgtggatgaggatgaactgctggaggagctagaggagctggagcaggaggaattggcccaggagttgttaaatgtgggcgacaaggaagaagaaccctcagtcaaattgcctagtgtaccttctactcatctgccggcagggccagctcccaaagtggatgaagatgaagaagcactaaagcagttggctgagtgggtatcctgataaatctgggcttgtct

SEQ ID NO: 116953 - DNA, 1646 bp, Homo sapiens
  Payload ID: 2820
  Gene Symbol: CHMP4B
  Gene Name: charged multivesicular body protein 4B
  Uniprot ID: Q9H444
  ENST ID: ENST00000217402
  CDS Start-End: 166-840
ggtggcgcggccgggcccagctgcggggcggaggcggaggcggaggagaggcctgcggcggcagggagcggcgggactgggagcgggcgccggagccgacccgagccgagccgagccgagccgagccggagcgggcggcgaaggccggcgcggcgagcagcaaccatgtcggtgttcgggaagctgttcggggctggagggggtaaggccggcaagggcggcccgaccccccaggaggccatccagcggctgcgggacacggaagagatgttaagcaagaaacaggagttcctggagaagaaaatcgagcaggagctgacggccgccaagaagcacggcaccaaaaacaagcgcgcggccctccaggcactgaagcgtaagaagaggtatgagaagcagctggcgcagatcgacggcacattatcaaccatcgagttccagcgggaggccctggagaatgccaacaccaacaccgaggtgctcaagaacatgggctatgccgccaaggccatgaaggcggcccatgacaacatggacatcgataaagttgatgagttaatgcaggacattgctgaccagcaagaacttgcagaggagatttcaacagcaatttcgaaacctgtagggtttggagaagagtttgacgaggatgagctcatggcggaattagaagaactagaacaggaggaactagacaagaatttgctggaaatcagtggacccgaaacagtccctctaccaaatgttccctctatagccctaccatcaaaacccgccaagaagaaagaagaggaggacgacgacatgaaggaattggagaactgggctggatccatgtaatggggtccagcgctggctgggcccagacagactgtggtggcctgcgcagcgagcaggcgtgtgcgtgtgtggggcaggcaggatgtggtgcaggcaggttccatcgctttcgactctcactccaaagcagtagggccgcgttgctgctcactctctgcatagcatggtctgcacctgggagatgggcggggggaggggggcgggcggggtgggaagtgcctgctgtttataatgttgaatttctgtaaaataaactgtatttgcaaatccaacattgagcttctggactacgctgactccactgctgaatcctcaatggaaagggtcgactggttgcagttgaaatgacctgaaatgtagcctctgtccttgtaagtcagttgacttgccgcacatctctttgtgtacttgtacggtactggcagaaaagtcatttttcaaaagccataggcttttccttgcccttagctgtaataatgcatctgattttgatttcctccagagctgtgtttctgtccatcacctgtgtattggccctgtgtttaccactctggcccactcctcacccccttgctcccctggtcttctggagtttgtgacattgatttgaaatggatggtgttctcttgagagcaagtgagattgttagaattaagttccaactatacagttttctaacatagctataaggtccttgttgctgtttgtgataactgatagataactcattggaaacgtgcatacatttatattcagatgaaattatggtttgcactgtctattaaatatctcgattaattttcata

SEQ ID NO: 116954 - DNA, 1866 bp, Homo sapiens
  Payload ID: 2821
  Gene Symbol: CHMP4C
  Gene Name: charged multivesicular body protein 4C
  Uniprot ID: Q96CF2
  ENST ID: ENST00000297265
  CDS Start-End: 194-895
ggggccgaactggcagccaggaaatgccctggagtgtgtgtcacctgtccaggacgacttgttgattcccaggagggccgcctttccggtctgggtccccgagaggactgccttgctcacctgtcccctcggcgcggccccggggagctcccgagaggcccccgggatcgctggccctccgaactccacagcaatgagcaagttgggcaagttctttaaagggggcggctcttctaagagccgagccgctcccagtccccaggaggccctggtccgacttcgggagactgaggagatgctgggcaagaaacaagagtacctggaaaatcgaatccagagagaaatcgccctggccaagaagcacggcacgcagaataagcgagctgcattacaggcactaaagagaaagaagaggttcgagaaacagctcactcagattgatggcacactttctaccattgagttccagagagaagccctggagaactcacacaccaacactgaggtgttgaggaacatgggctttgcagcaaaagcgatgaaatctgttcatgaaaacatggatctgaacaaaatagatgatttgatgcaagagatcacagagcaacaggatatcgcccaagaaatctcagaagcattttctcaacgggttggctttggtgatgactttgatgaggatgagttgatggcagaacttgaagaattggaacaggaggaattaaataagaagatgacaaatatccgccttccaaatgtgccttcctcttctctcccagcacagccaaatagaaaaccaggcatgtcgtccactgcacgtcgatcccgagcagcatcttcccagagggcagaagaagaggatgatgatatcaaacaattggcagcttgggctacctaaactaaaacacatttttgatacctaaattaatgagctatagataaaatataaaaaatgtttttaccaagttcagaagttaacaaagactctgctttataattatattgaatgaataattgtgttttaagcctcctaagtaaaagtaaaaaaggagtcatgtgcatacatagaatcagtgatggaggccaggcacggtatctcatgcctataatcccagcactttgggaggctgaggcagttgagaccaggagttcgagtccagcctgaccaacatgaagaaaccctgtctgtactaaaaatacaaaaattagccggacatggtggcaggcacctgtaatcccagctacttgggaggctgagtcaggagaatcgcttgagcccaggagatggaggttgcagtgagccaagatcatgccactgcactccagactgggcaacagagggagactccgtctcaaaaactaaaaaaaaaaaatacatttagtatagcggggggtgggggggagaaataatgttatttcctatgcgaatgacgtgtatccctgtacccatggtaaatgtaaatatactgtgtctcttttgggagagccttttagtagaggagtcttatatgagtctctacataagtagtttcacttgagttttgcagtttgaaatcttaaaggagctttaattgacatttattataccaattaagcttggaatggggcaatggatgcatttcccaaaacgtgtgaaagcactaacagcttatattgctgaatgagaatctcctgggtgtaatttagccacttagggaactgcgtgaacactcccaggccattatgatgctgttacagcttcagtgtataaatgcatgagtattctttctgttctgttttgtgctctcttgtacatttatttaccctttacagaatatttcttgtaaatacataaaaatattggcaattaaaagtacatcttgaataaaa

SEQ ID NO: 116955 - DNA, 1477 bp, Homo sapiens
  Payload ID: 2822
  Gene Symbol: CHMP5
  Gene Name: charged multivesicular body protein 5
  Uniprot ID: Q9NZZ3
  ENST ID: ENST00000223500
  CDS Start-End: 138-797
aatccggaaaaagaatcgggaaacgccaggaggcatattgcgcttgcgcacggaggggccggaagtcgaggcgggagtgactctgcttccgtttctggttttgctctagtgtttgggtttcttcgcggctgctcaagatgaaccgactcttcgggaaagcgaaacccaaggctccgccgcccagcctgactgactgcattggcacggtggacagtagagcagaatccattgacaagaagatttctcgattggatgctgagctagtgaagtataaggatcagatcaagaagatgagagagggtcctgcaaagaatatggtcaagcagaaagccttgcgagttttaaagcaaaagaggatgtatgagcagcagcgggacaatcttgcccaacagtcattcaacatggaacaagccaattataccatccagtctttgaaggacaccaagaccacggttgatgctatgaaactgggagtaaaggaaatgaagaaggcatacaagcaagtgaagatcgaccagattgaggatttacaagaccagctagaggatatgatggaagatgcaaatgaaatccaagaagcactgagtcgcagttatggcaccccagaactggatgaagatgatttagaagcagagttggatgcactaggtgatgagcttctggctgatgaagacagttcttatttggatgaggcagcatctgcacctgcaattccagaaggtgttcccactgatacaaaaaacaaggatggagttctggtggatgaatttggattgccacagatccctgcttcatagatttgcatcattcaagcatatcttgtaaaacaaacacatattatgggactaggaaatatttatctttccaaatttgccataacagatttaggtttctttcctttctttgaaggaaagtttaattacattgctcttttattttttccattaagagactcattgcttgggaaatgctttcttcgtactaaaatttgattcctttttttcttatgaaaaacgaactcagtttaaaagtatttttagctcgtatgacttgttttcattcattaataataatttgaaataaaactaaggaaatggaatcttaaaagtctatgacagtgtaactctacagtctcaaaatgacctgataaattgataagacaaagatgagattattggggctgttcatattatgattcagaatcattttctattgtggtattataggttggttaaagtgatggcctttttgatgggttttgttgtgtcttgtgaacaagtcgttactgtgtccattattggaatggaattatcactactgtatcatgagtgggtattttgattctatggttccctcagtattacatcttgacttgtaatcaattatgaatatttcttgatatttaatgtataggacatttatttatactcaataaatatttttcaaaaggatataattttaataatatcacttcagc

SEQ ID NO: 116956 - DNA, 1957 bp, Homo sapiens
  Payload ID: 2822
  Gene Symbol: CHMP5
  Gene Name: charged multivesicular body protein 5
  Uniprot ID: Q9NZZ3
  ENST ID: ENST00000419016
  CDS Start-End: 201-716
ctgcaggctctctccgagagcaccaagtccttttgctctccatccccggaagacccggctgaaaatccggaaaaagaatcgggaaacgccaggaggcatattgcgcttgcgcacggaggggccggaagtcgaggcgggagtgactctgcttccgtttctggttttgctctagtgtttgggtttcttcgcggctgctcaagatgaaccgactcttcgggaaagcgaaacccaaggctccgccgcccagcctgactgactgcattggcacggtggacagtagagcagaatccattgacaagaagatttctcgattggatgctgagctagtgaagtataaggatcagatcaagaagatgagagagggtcctgcaaagaatatggtcaagcagaaagccttgcgagttttaaagcaaaagaggatgtatgagcagcagcgggacaatcttgcccaacagtcattcaacatggaacaagccaattataccatccagtctttgaaggacaccaagaccacggttgatgctatgaaactgggagtaaaggaaatgaagaaggcatacaagcaagtgaagatcgaccagattgaggatttacaagaccagctagaggatatgatggaagatgcaaatgaaatccaagaagcactgagtcgcagttatggcaccccagaactggatgaagatgatttagaagcaggatggagttctggtggatgaatttggattgccacagatccctgcttcatagatttgcatcattcaagcatatcttgtaaaacaaacacatattatgggactaggaaatatttatctttccaaatttgccataacagatttaggtttctttcctttctttgaaggaaagtttaattacattgctcttttattttttccattaagagactcattgcttgggaaatgctttcttcgtactaaaatttgattcctttttttcttatgaaaaacgaactcagtttaaaagtatttttagctcgtatgacttgttttcattcattaataataatttgaaataaaactaaggaaatggaatcttaaaagtctatgacagtgtaactctacagtctcaaaatgacctgataaattgataagacaaagatgagattattggggctgttcatattatgattcagaatcattttctattgtggtattataggttggttaaagtgatggcctttttgatgggttttgttgtgtcttgtgaacaagtcgttactgtgtccattattggaatggaattatcactactgtatcatgagtgggtattttgattctatggttccctcagtattacatcttgacttgtaatcaattatgaatatttcttgatatttaatgtataggacatttatttatactcaataaatatttttcaaaaggatataattttaataatatcacttcagcttaaaacctctactgcggaaaccaaatttaatagaattttaatgtcatttcagcctataactccactacagaaaccaaattaaccagtagcattgtgaggaaagagcaaggaacaatctgggcttgggccctgggtctaccatttactaactactgagtagtctattcaacctctctaaccttctgtttccttattagtaaaatcatgcttaactcacagagcttttgtgaggaataattgaggtaatggtcataagtaccttgttaactgcaaggggctattcttatatgagggattgttaacaataaaaaagaaactgcttcattcttttcttggaaggtgcctggagtactacagcaagttcaaactcctgcccaatttcagggtctttaatgatcctgtcctcccttcctcattcaacttgttgccaacagcatggcccctccagcctagctgggtgcctcacagtgctatgtgcacctgactctcatgtgtctgcagatcaaaccaataaacatttaggaacacc

SEQ ID NO: 116957 - DNA, 1664 bp, Homo sapiens
  Payload ID: 2823
  Gene Symbol: CHMP6
  Gene Name: charged multivesicular body protein 6
  Uniprot ID: Q96FZ7
  ENST ID: ENST00000325167
  CDS Start-End: 79-684
aggacccgagctacggtggccgcggggcggcggtggcgattggacttggtgggtcccgggccaggggcgggcgccgccatgggtaacctgttcggccgcaagaagcagagccgcgtcacggagcaggacaaggccatcctgcaactgaagcagcagcgggacaagctgaggcagtaccagaagaggatcgcccagcagctggagcgcgagcgcgccctggcccggcagctgctgcgggacggcaggaaggaacgggccaagctgctgctcaagaagaagcgataccaggagcagctcctggacaggacggagaaccagatcagcagcctggaggccatggttcagagtattgagttcacccagatcgaaatgaaagtgatggaggggctgcagtttggaaatgagtgtctgaacaagatgcaccaggtgatgtccattgaagaggtggagaggatcctggacgagacgcaggaggccgtggagtaccagcggcaaatagacgagctcctggcaggaagcttcactcaggaggatgaagacgccatcctggaggagctgagcgcaatcactcaggaacaaatagagctgccagaggttccctccgagccccttcctgagaagatcccagaaaacgtccctgtcaaggccaggcccaggcaggcggagctggtggcagcttcgtaacgtggcctcgtcttgtgggactcacggggatgccccagggactgtggcccacagagagtttgggtcacggccagcccctgaccgggttccctggagcccagtgcgcacggtgctgagcagagctgcagccacgcaggcgcattgcaggaggactccagagcgtctcctggagaccttgagcctgaacgcactcaggcgccactggcctgctctcagtccggattaactctcgaccgagcccagcttctgccggttgtgggctcccccggtggccgaggcccaggcccaacgcctctggtgctgttcccctgcagtcccagccccgcgtggctcgcgctcgtctgtgaggaagacacctccagaccttggggtccccgcgcttcctcttgctcctcgctgctcccattagctggtgcaggcttccgttaaggggtccctcccttggcctggcttcccggcgcacctcagcttccctgctggtggggggatccccaggagaccagcatgtgctgaacctctctgtgcctctgcctccgcaccctagacacccacctccagtttgaaggtggcgggccaggggctttcttgctgaattgacgactccgagagccctgactcccgccttgccactcacggctctgtccactagggctcagccctgctgagaaaggacctccgatgcttgggagacgctgctccggcaggtgcagccccggaagtttgtccatgggggtccccgcggctggggctcatggaactgcgagacccgggaccctcctgccctgcgggtccccgagccaccagcagccaggactggaggctgtggggcatggcgtgacttctcgtgcacagggctggtttggttatgagacgatctcgctgggaccgcccctgcccgtggaaagccacaaggacaaagggagcggccacctcgacccccagacaggccggcccgtattaaagttggccctgcacgccca

SEQ ID NO: 116958 - DNA, 611 bp, Homo sapiens
  Payload ID: 2823
  Gene Symbol: CHMP6
  Gene Name: charged multivesicular body protein 6
  ENST ID: ENST00000572525
  CDS Start-End: 272-611
cctgcacaggaagggtgcacggaaacacgtcatttagaacatcccgggcccgaacatcgcgggccctaacatccagcaactgaagcagcagcgggacaagctgaggcagtaccagaagaggatcgcccagcagctggagcgcgagcgcgccctggcccggcagctgctgcgggacggcaggaaggaacgggccaagctgctgctcaagaagaagcgataccaggagcagctcctggacaggacggagaaccagatcagcagcctggaggccatggttcagagtattgagttcacccagatcgaaatgaaagtgatggaggggctgcagtttggaaatgagtgtctgaacaagatgcaccaggtgatgtccattgaagaggtggagaggatcctggacgagacgcaggaggccgtggagtaccagcggcaaatagacgagctcctggcaggaagcttcactcaggaggatgaagacgccatcctggaggagctgagcgcaatcactcaggaacaaatagagctgccagaggttccctccgagccccttcctgagaagatcccagaaaacgtccctgtcaaggccaggcccaggcaggcggagctggtggcag

SEQ ID NO: 116959 - DNA, 737 bp, Homo sapiens
  Payload ID: 2823
  Gene Symbol: CHMP6
  Gene Name: charged multivesicular body protein 6
  ENST ID: ENST00000572778
  CDS Start-End: 1-675
caactgaagcagcagcgggacaagctgaggcagtaccagaagaggatcgcccagcagctggagcgcgagcgcgccctggcccggcagctgctgcgggacggcaggaaggaacgggccaagctgctgctcaagaagaagcgataccaggagcagctcctggacaggacggagaaccagatcagcagcctggaggccatggttcagagtattgagttcacccagatcgaaatgaaagtgatggaggggctgcagtttggaaatgagtgtctgaacaagatgcaccaggtgatgtccattgaagaggtggagaggatcctggacgagacgcaggaggccgtggagtaccagcggcaaatagacgagctcctggcaggaagcttcactcaggaggatgaagacgccatcctggaggagctgagcgcaatcactcaggaacaaatagagctgccagaggttccctccgagccccttcctgagaagatcccaggtatttccatgtttgattcttttgaatggttggaattcgcaggagaaaagtggattctagaagggaacaagacagaatgctcccaggccttcctgggccgtgggcaagccctgctgcctggctgtttggcttgggggcgtgcgtgcctggccttggggttgggcttgggtttcccaggggttcggtaactgggcaacctcataagagagccataccccattcaaagagacacattcagaaatcagaactg

SEQ ID NO: 116960 - DNA, 552 bp, Homo sapiens
  Payload ID: 2823
  Gene Symbol: CHMP6
  Gene Name: charged multivesicular body protein 6
  ENST ID: ENST00000571457
  CDS Start-End: 1-522
cgcgagcgcgccctggcccggcagctgctgcgggacggcaggaaggaacgggccaagctgctgctcaagaagaagcgataccaggagcagctcctggacaggacggagaaccagatcagcagcctggaggccatggttcagagtattgagttcacccagatcgaaatgaaagtgatggaggggctgcagtttggaaatgagtgtctgaacaagatgcaccaggtgatgtccattgaagaggtggagaggatcctggacgagacgcaggaggccgtggagtaccagcggcaaatagacgagctcctggcaggaagcttcactcaggaggatgaagacgccatcctggaggagctgagcgcaatcactcaggaacaaatagagctgccagaggttccctccgagccccttcctgagaagatcccagctttgccccaggatgggcctcagttacggaactgcacagaaacacggaaagctaaaactcccatagaaaccttgtccttttggcaagagaaattgtgaacaggggccactgaggtccagaaagcgtgt

SEQ ID NO: 116961 - DNA, 3367 bp, Homo sapiens
  Payload ID: 2824
  Gene Symbol: CHMP7
  Gene Name: charged multivesicular body protein 7
  Uniprot ID: Q8WUX9
  ENST ID: ENST00000313219
  CDS Start-End: 606-1967
tcaatttcattgatttctgctctttttattattttttctcttctgtttaatttgatcttaatttgttcttcttttatagattcccaaggtggaatcttaggttattttagatctttcttcttttctggtttgtgcattcattgatataaatttccctctatacagagattcacggatccatccgggtggtccgggcaccactggcgcccctctgcggctattccccagttccattttctgaagccacaggtcagaagccgctgtacaacgctttgccgaactccagaatcttgaaggagacgtaaggtgcagccacctgccgcgcaggcgcaagcctttctttcggcacaaagaccgtgggaggaggggtcggcgcaagcgctcggtgtctctctgaaaagaacttcatcatactgcctcctggctgacggagcgcagcgcaacgcatgcgccttgaagacttatggaacttatttcacgctcagggcggcggtgacgtgtgaacgagaaggaggtggtcaaggaacggaagccgggagggaacgagggcggaagcggaccagggccaggcttgtgttcgcagccttgccggggctggggttccgatgtggtccccggagcgggaggccgaggccccagccgggggagacccggcgggccttctgccccccgagtgggaggaggacgaggagcgcatgtccttcctgttctccgctttcaagaggagtcgcgaggtgaacagcaccgactgggacagcaagatgggcttctgggcgccgttggtgctgagccacagccgccgccagggggtggtgcgcctgcgtctgcgggacttgcaggaggcctttcagcgcaaggggagcgtcccgctggggctggccacggtgctgcaggacctgctgcgtcgaggggagctgcagcgggagtcagacttcatggccagtgtagacagcagctggatctcctggggggttggggtcttcctgctgaagcctctcaagtggactctttctaacatgctgggagataataaggttccagctgaggaggtccttgtcgctgtggagctgttgaaggaaaaggctgaggaggtgtatcgtctgtatcagaactcgcccctctcctcccaccccgtggtggccctgtcagagctcagcaccctctgtgctaactcctgcccagatgagaggaccttctacttggtgttgctgcagctgcagaaggagaagagggtcacagtcctcgagcagaacggggagaagattgtgaagtttgcccgagggccacgtgccaaggtctctccagtcaatgacgtagatgttggggtgtaccagctgatgcagagtgaacagcttctctcacgcaaagtggagtccttatcccaggaagcagagaggtgtaaagaagaagcccgccgggcatgccgagcaggaaagaagcagctggcactgaggtctctcaaggccaagcaacggacagagaagcgcatcgaggccttgcatgccaagctggacactgttcaaggcatcctggaccggatctatgcctcccagacagatcagatggtttttaacgcctaccaggctggggtaggagcactcaaactctccatgaaggatgtcacagtggagaaggcagagagcctcgtggatcagatccaagagctctgtgacacccaggatgaagtttctcagactctggctggtggggtaacaaatggcttagattttgacagtgaagaactggagaaggaattggacatcctccttcaggataccaccaaagaacctttggatctgcctgacaacccccgcaataggcattttaccaacagcgtgcctaaccctaggatctcagatgctgaacttgaagctgaacttgagaaactgtccttatcagagggaggtttggtcccaagcagtaaatctccaaaaaggcaattggaaccgactctaaagccattgtaggaccctcaagtgaaggaccctcatgtaaaagagagaccaggcttgctgggtgtgtacatagttatttaaacaagaaactctcagaatgtgtttggaagaggagaaaggagaaccactgattttatctggatgctactacttactacaggacagatagaatttctggaagcgatgctccaaaggcttgctcccagctgtatcatggacctgccttctcatctttatagtgccacgatttatacagtcctgtgtctgacctgtcatttcatagcctgcagttcttgccattggcacacttagatttgtcttcacccaccagcttcgttccagcccatgaaggggaaagatttgcagctttgccaaatctgaatcagttcccactcccccctgcggttttttagaggggtttatcctgtcgctaatgtcagttaaatagcttattcctgtcccacttgatttcactggtaagaatgagaatgaaatacttaaaggttttatttgaggggacttagctgccattttatggaaaaacatgtagtataaaaggtttttctccagggtcatttgacagaattctccaggtgttcagagaaagaggtcgccccaagtggcccagagtcgtgacagtccggaggggctggtgtggccggtgggcgctgcctcttcatctgatggagccaggaggtccgccggtgggggaaaggcttcttccgaggcttctgcactcgcctgggaagaggcccagtcactacaggaccctgagatgtccagaccccttatgcaaagaggcaaaattgttgccttggccccatcatggagtaacttaaaaatacatatctatcttccagaacaagccacacaacaacacacctcccctccttgagcctggcacacagcaccgggctctctgaatttggaaagtgtttcattttgtggcctactgctcggggcaggggggctgagccaggatgtgcaatagaagcaggggttgtcccctctgccagatctgtggggagctgcccaggccacccgtgcacctgtcctgcttcctgcagtccccactccctgcctcctttgagggactgggggacttggggtagggggacagacgggaaagggtctgaatgctctggcaatggcgagaagaagcgatcgccacactgccactctgctgcccagccaccaggatttctgcctggagccctttgccctgtccctgctgcctgaggtggcgtagagcagaggagaagaatttgctccaggccaggagcacaaatcgttgttcaatgaatttctctccaactcgaccttggtaaacggaaatgttgggggtgaagagaaacaatcactatttttttcttttttatctggtaaataattaaaagaaaaaccgaacactt

SEQ ID NO: 116962 - DNA, 3403 bp, Homo sapiens
  Payload ID: 2824
  Gene Symbol: CHMP7
  Gene Name: charged multivesicular body protein 7
  Uniprot ID: Q8WUX9
  ENST ID: ENST00000397677
  CDS Start-End: 649-2010
gctgcctcctctgactgttatgcagcaggccggcaggtcaataaacttgcttgcctgactttgagtatactcgtcttttctcttggccaaccttacggtagctgtaccagtttgcatttccaccagcaatgaatgagagttcctgttgctctgcatcctcaccagcatttggtgtggtcagtattttggattttcaccattctaatagagattcacggatccatccgggtggtccgggcaccactggcgcccctctgcggctattccccagttccattttctgaagccacaggtcagaagccgctgtacaacgctttgccgaactccagaatcttgaaggagacgtaaggtgcagccacctgccgcgcaggcgcaagcctttctttcggcacaaagaccgtgggaggaggggtcggcgcaagcgctcggtgtctctctgaaaagaacttcatcatactgcctcctggctgacggagcgcagcgcaacgcatgcgccttgaagacttatggaacttatttcacgctcagggcggcggtgacgtgtgaacgagaaggaggtggtcaaggaacggaagccgggagggaacgagggcggaagcggaccagggccaggcttgtgttcgcagccttgccggggctggggttccgatgtggtccccggagcgggaggccgaggccccagccgggggagacccggcgggccttctgccccccgagtgggaggaggacgaggagcgcatgtccttcctgttctccgctttcaagaggagtcgcgaggtgaacagcaccgactgggacagcaagatgggcttctgggcgccgttggtgctgagccacagccgccgccagggggtggtgcgcctgcgtctgcgggacttgcaggaggcctttcagcgcaaggggagcgtcccgctggggctggccacggtgctgcaggacctgctgcgtcgaggggagctgcagcgggagtcagacttcatggccagtgtagacagcagctggatctcctggggggttggggtcttcctgctgaagcctctcaagtggactctttctaacatgctgggagataataaggttccagctgaggaggtccttgtcgctgtggagctgttgaaggaaaaggctgaggaggtgtatcgtctgtatcagaactcgcccctctcctcccaccccgtggtggccctgtcagagctcagcaccctctgtgctaactcctgcccagatgagaggaccttctacttggtgttgctgcagctgcagaaggagaagagggtcacagtcctcgagcagaacggggagaagattgtgaagtttgcccgagggccacgtgccaaggtctctccagtcaatgacgtagatgttggggtgtaccagctgatgcagagtgaacagcttctctcacgcaaagtggagtccttatcccaggaagcagagaggtgtaaagaagaagcccgccgggcatgccgagcaggaaagaagcagctggcactgaggtctctcaaggccaagcaacggacagagaagcgcatcgaggccttgcatgccaagctggacactgttcaaggcatcctggaccggatctatgcctcccagacagatcagatggtttttaacgcctaccaggctggggtaggagcactcaaactctccatgaaggatgtcacagtggagaaggcagagagcctcgtggatcagatccaagagctctgtgacacccaggatgaagtttctcagactctggctggtggggtaacaaatggcttagattttgacagtgaagaactggagaaggaattggacatcctccttcaggataccaccaaagaacctttggatctgcctgacaacccccgcaataggcattttaccaacagcgtgcctaaccctaggatctcagatgctgaacttgaagctgaacttgagaaactgtccttatcagagggaggtttggtcccaagcagtaaatctccaaaaaggcaattggaaccgactctaaagccattgtaggaccctcaagtgaaggaccctcatgtaaaagagagaccaggcttgctgggtgtgtacatagttatttaaacaagaaactctcagaatgtgtttggaagaggagaaaggagaaccactgattttatctggatgctactacttactacaggacagatagaatttctggaagcgatgctccaaaggcttgctcccagctgtatcatggacctgccttctcatctttatagtgccacgatttatacagtcctgtgtctgacctgtcatttcatagcctgcagttcttgccattggcacacttagatttgtcttcacccaccagcttcgttccagcccatgaaggggaaagatttgcagctttgccaaatctgaatcagttcccactcccccctgcggttttttagaggggtttatcctgtcgctaatgtcagttaaatagcttattcctgtcccacttgatttcactggtaagaatgagaatgaaatacttaaaggttttatttgaggggacttagctgccattttatggaaaaacatgtagtataaaaggtttttctccagggtcatttgacagaattctccaggtgttcagagaaagaggtcgccccaagtggcccagagtcgtgacagtccggaggggctggtgtggccggtgggcgctgcctcttcatctgatggagccaggaggtccgccggtgggggaaaggcttcttccgaggcttctgcactcgcctgggaagaggcccagtcactacaggaccctgagatgtccagaccccttatgcaaagaggcaaaattgttgccttggccccatcatggagtaacttaaaaatacatatctatcttccagaacaagccacacaacaacacacctcccctccttgagcctggcacacagcaccgggctctctgaatttggaaagtgtttcattttgtggcctactgctcggggcaggggggctgagccaggatgtgcaatagaagcaggggttgtcccctctgccagatctgtggggagctgcccaggccacccgtgcacctgtcctgcttcctgcagtccccactccctgcctcctttgagggactgggggacttggggtagggggacagacgggaaagggtctgaatgctctggcaatggcgagaagaagcgatcgccacactgccactctgctgcccagccaccaggatttctgcctggagccctttgccctgtccctgctgcctgaggtggcgtagagcagaggagaagaatttgctccaggccaggagcacaaatcgttgttcaatgaatttctctccaactcgaccttggtaaacggaaatgttgggggtgaagagaaacaatcactatttttttcttttttatctggtaaataattaaaagaaaaaccg

SEQ ID NO: 116963 - DNA, 917 bp, Homo sapiens
  Payload ID: 2824
  Gene Symbol: CHMP7
  Gene Name: charged multivesicular body protein 7
  Uniprot ID: Q8WUX9
  ENST ID: ENST00000519503
  CDS Start-End: 31-522
gttcgcagccttgccggggctggggttccgatgtggtccccggagcgggaggccgaggccccagccgggggagacccggcgggccttctgccccccgagtgggaggaggacgaggagcgcatgtccttcctgttctccgctttcaagaggagtcgcgaggtgaacagcaccgactgggacagcaagatgggcttctgggcgccgttggtgctgagccacagccgccgccagggggtggtgcgcctgcgtctgcgggacttgcaggaggcctttcagcgcaaggggagcgtcccgctggggctggccacggtgctgcaggacctgctgcggaaaaggctgaggaggtgtatcgtctgtatcagaactcgcccctctcctcccaccccgtggtggccctgtcagagctcagcaccctctgtgctaactcctgcccagatgagaggaccttctacttggtgttgctgcagctgcagaaggagaagagggtcacagtcctcgagcagaacggggagaagattgtgaagtttgcccgagggccacgtgccaaggtctctccagtcaatgacgtagatgttggggtgtaccagctgatgcagagtgaacagcttctctcacgcaaagtggagtccttatcccaggaagcagagaggtgtaaagaagaagcccgccgggcatgccgagcaggaaagaagcagctggcactgaggtctctcaaggccaagcaacggacagagaagcgcatcgaggccttgcatgccaagctggacactgttcaaggcatcctggaccggatctatgcctcccagacagatcagatggtttttaacgcctaccaggctggggtaggagcactcaaactctccatgaaggatgtcacagtggagaaggcagagagcctcgtggatcagatccaagag

SEQ ID NO: 116964 - DNA, 914 bp, Homo sapiens
  Payload ID: 2824
  Gene Symbol: CHMP7
  Gene Name: charged multivesicular body protein 7
  ENST ID: ENST00000519414
  CDS Start-End: 60-533
gggcggaagcggaccagggccaggcttgtgttcgcagccttgccggggctggggttccgatgtggtccccggagcgggaggccgaggccccagccgggggagacccggcgggccttctgccccccgagtgggaggaggacgaggagcgcatgtccttcctgttctccgctttcaagaggagtcgcgaggtgaacagcaccgactgggacagcaagatgggcttctgggcgccgttggtgctgagccacagccgccgccagggggtggtgcgcctgcgtctgcgggacttgcaggaggcctttcagcgcaaggggagcgtcccgctggggctggccacggtgctgcaggacctgctgcgtcgaggggagctgcagcgggagtcagacttcatggccagtgtagacagcagctggatctcctggggggttggggtcttcctgctgaagcctctcaagtggactctttctaacatgctgggagataataaggttccagctgaggaggtccttgtcgctgtggagctgttgaagtagagattgggtttcaccatgttagccaggatggtctcgatctcctgacctcgtgatccacccgccttggcctcccaaagtgctgggattacaggaaaaggctgaggaggtgtatcgtctgtatcagaactcgcccctctcctcccaccccgtggtggccctgtcagagctcagcaccctctgtgctaactcctgcccagatgagaggaccttctacttggtgttgctgcagctgcagaaggagaagagggtcacagtcctcgagcagaacggggagaagattgtgaagtttgcccgagggccacgtgccaaggtctctccagtcaatgacgtagatgttggggtgtaccagctgatgcagagtgaacagcttctctcacgcaa

SEQ ID NO: 116965 - DNA, 2639 bp, Homo sapiens
  Payload ID: 2824
  Gene Symbol: CHMP7
  Gene Name: charged multivesicular body protein 7
  ENST ID: ENST00000517325
  CDS Start-End: 55-294
gaagcggaccagggccaggcttgtgttcgcagccttgccggggctggggttccgatgtggtccccggagcgggaggccgaggccccagccgggggagacccggcgggccttctgccccccgagtgggaggaggacgaggagcgcatgtccttcctgttctccgctttcaagaggagtcgcgagtcgaggggagctgcagcgggagtcagacttcatggccagtgtagacagcagctggatctcctggggggttggggtcttcctgctgaagcctctcaagtggactctttctaacatgctgggagataataaggttccagctgaggaggtccttgtcgctgtggagctgttgaaggaaaaggctgaggaggtgtatcgtctgtatcagaactcgcccctctcctcccaccccgtggtggccctgtcagagctcagcaccctctgtgctaactcctgcccagatgagaggaccttctacttggtgttgctgcagctgcagaaggagaagagggtcacagtcctcgagcagaacggggagaagattgtgaagtttgcccgagggccacgtgccaaggtctctccagtcaatgacgtagatgttggggtgtaccagctgatgcagagtgaacagcttctctcacgcaaagtggagtccttatcccaggaagcagagaggtgtaaagaagaagcccgccgggcatgccgagcaggaaagaagcagctggcactgaggtctctcaaggccaagcaacggacagagaagcgcatcgaggccttgcatgccaagctggacactgttcaaggcatcctggaccggatctatgcctcccagacagatcagatggtttttaacgcctaccaggctggggtaggagcactcaaactctccatgaaggatgtcacagtggagaaggcagagagcctcgtggatcagatccaagagctctgtgacacccaggatgaagtttctcagactctggctggtggggtaacaaatggcttagattttgacagtgaagaactggagaaggaattggacatcctccttcaggataccaccaaagaacctttggatctgcctgacaacccccgcaataggcattttaccaacagcgtgcctaaccctaggatctcagatgctgaacttgaagctgaacttgagaaactgtccttatcagagggaggtttggtcccaagcagtaaatctccaaaaaggcaattggaaccgactctaaagccattgtaggaccctcaagtgaaggaccctcatgtaaaagagagaccaggcttgctgggtgtgtacatagttatttaaacaagaaactctcagaatgtgtttggaagaggagaaaggagaaccactgattttatctggatgctactacttactacaggacagatagaatttctggaagcgatgctccaaaggcttgctcccagctgtatcatggacctgccttctcatctttatagtgccacgatttatacagtcctgtgtctgacctgtcatttcatagcctgcagttcttgccattggcacacttagatttgtcttcacccaccagcttcgttccagcccatgaaggggaaagatttgcagctttgccaaatctgaatcagttcccactcccccctgcggttttttagaggggtttatcctgtcgctaatgtcagttaaatagcttattcctgtcccacttgatttcactggtaagaatgagaatgaaatacttaaaggttttatttgaggggacttagctgccattttatggaaaaacatgtagtataaaaggtttttctccagggtcatttgacagaattctccaggtgttcagagaaagaggtcgccccaagtggcccagagtcgtgacagtccggaggggctggtgtggccggtgggcgctgcctcttcatctgatggagccaggaggtccgccggtgggggaaaggcttcttccgaggcttctgcactcgcctgggaagaggcccagtcactacaggaccctgagatgtccagaccccttatgcaaagaggcaaaattgttgccttggccccatcatggagtaacttaaaaatacatatctatcttccagaacaagccacacaacaacacacctcccctccttgagcctggcacacagcaccgggctctctgaatttggaaagtgtttcattttgtggcctactgctcggggcaggggggctgagccaggatgtgcaatagaagcaggggttgtcccctctgccagatctgtggggagctgcccaggccacccgtgcacctgtcctgcttcctgcagtccccactccctgcctcctttgagggactgggggacttggggtagggggacagacgggaaagggtctgaatgctctggcaatggcgagaagaagcgatcgccacactgccactctgctgcccagccaccaggatttctgcctggagccctttgccctgtccctgctgcctgaggtggcgtagagcagaggagaagaatttgctccaggccaggagcacaaatcgttgttcaatgaatttctctccaactcgaccttggtaaacggaaatgttgggggtgaagagaaacaatcactatttttttcttttttatctggtaaataattaaaagaaaaaccg

SEQ ID NO: 116966 - DNA, 666 bp, Homo sapiens
  Payload ID: 2824
  Gene Symbol: CHMP7
  Gene Name: charged multivesicular body protein 7
  ENST ID: ENST00000519984
  CDS Start-End: 38-666
ggcttgtgttcgcagccttgccggggctggggttccgatgtggtccccggagcgggaggccgaggccccagccgggggagacccggcgggccttctgccccccgagtgggaggaggacgaggagcgcatgtccttcctgttctccgctttcaagaggagtcgcgaggtgaacagcaccgactgggacagcaagatgggcttctgggcgccgttggtgctgagccacagccgccgccagggggtggtgcgcctgcgtctgcgggacttgcaggaggcctttcagcgcaaggggagcgtcccgctggggctggccacggtgctgcaggacctgctgcgtaccttcccattggactggacattgatattgcccaggatggtctcgaactcctgcactcaagcgatcctcccacctcagcctcccaaagtgttaagattacaggcgttgagccactgcacctggccaacgaggctttctgagatggcatacagtggaaaccgttttcgttcatgcctgaagcagggaacaggagaaacagtagttgaagaagaaaaggctgaggaggtgtatcgtctgtatcagaactcgcccctctcctcccaccccgtggtggccctgtcagagctcagcaccctctgtgctaactcctgcccagatgagaggacctt

SEQ ID NO: 116967 - DNA, 1712 bp, Homo sapiens
  Payload ID: 2825
  Gene Symbol: CHEK1
  Gene Name: checkpoint kinase 1
  ENST ID: ENST00000278916
  CDS Start-End: 21-1319
ccgaggtgctcggtggagtcatggcagtgccctttgtggaagactgggacttggtgcaaaccctgggagaaggtgcctatggagaagttcaacttgctgtgaatagagtaactgaagaagcagtcgcagtgaagattgtagatatgaagcgtgccgtagactgtccagaaaatattaagaaagagatctgtatcaataaaatgctaaatcatgaaaatgtagtaaaattctatggtcacaggagagaaggcaatatccaatatttatttctggagtactgtagtggaggagagctttttgacagaatagagccagacataggcatgcctgaaccagatgctcagagattcttccatcaactcatggcaggggtggtttatctgcatggtattggaataactcacagggatattaaaccagaaaatcttctgttggatgaaagggataacctcaaaatctcagactttggcttggcaacagtatttcggtataataatcgtgagcgtttgttgaacaagatgtgtggtactttaccatatgttgctccagaacttctgaagagaagagaatttcatgcagaaccagttgatgtttggtcctgtggaatagtacttactgcaatgctcgctggagaattgccatgggaccaacccagtgacagctgtcaggagtattctgactggaaagaaaaaaaaacatacctcaacccttggaaaaaaatcgattctgctcctctagctctgctgcataaaatcttagttgagaatccatcagcaagaattaccattccagacatcaaaaaagatagatggtacaacaaacccctcaagaaaggggcaaaaaggccccgagtcacttcaggtggtgtgtcagagtctcccagtggattttctaagcacattcaatccaatttggacttctctccagtaaacagtgcttctagtgaagaaaatgtgaagtactccagttctcagccagaaccccgcacaggtctttccttatgggataccagcccctcatacattgataaattggtacaagggatcagcttttcccagcccacatgtcctgatcatatgcttttgaatagtcagttacttggcaccccaggatcctcacaggttactatatcaacaactgataggagaaacaataaactcattttcaaagtgaatttgttagaaatggatgataaaatattggttgacttccggctttctaagggtgatggattggagttcaagagacacttcctgaagattaaagggaagctgattgatattgtgagcagccagaagatttggcttcctgccacatgatcggaccatcggctctggggaatcctggtgaatatagtgctgctatgttgacattattcttcctagagaagattatcctgtcctgcaaactgcaaatagtagttcctgaagtgttcacttccctgtttatccaaacatcttccaatttattttgtttgttcggcatacaaataatacctatatcttaattgtaagcaaaactttggggaaaggatgaatagaattcatttgattatttcttcatgtgtgtttagtatctgaatttgaaactcatctggtggaaaccaagtttcaggggacatgagttttccagcttttatacacacgtatctcatttttatcaaaacattttgtttaattcaaaaagtacatattccatgttgatttaattct

SEQ ID NO: 116968 - DNA, 4153 bp, Homo sapiens
  Payload ID: 2825
  Gene Symbol: CHEK1
  Gene Name: checkpoint kinase 1
  Uniprot ID: O14757
  ENST ID: ENST00000438015
  CDS Start-End: 898-2328
cttttaaatttgcgttgtaagatttattttggctctccccgcctgttctttgcacattaaaaatgaaaaagtttgtagaactaagctaagcagatggtcttcctgcaaaaagaccgggctgaagtaaagcattgttttggagctggttcacagaaaaaaggcaaaactggttatcctgacttcaagctccaacataaactgctcgctttctccgggaaacttgccccgccacacacacttgactgcgtggccagttctttcgaagcctctcgctcccaacacggagttcctcccatttcttcacagtcggctctcagcagctgctgctggtttctcggctccagcaccacgagtaccgcactctgaggtttacaaagcactctgcttcaccgactgtgatcctcacagtcctgtccggtggcctcacgcaggtggcggtgcagcctttcaggcccagagcggccaggagcgaagcccgcagccccgcctggaagcgcagcgcggtcggtcgcgcgcccctgaggcttggaggcctgggcttcccccagcagcgctcgagcaccgcccagtcgagcctcacaccggatgccacttcatatttgggcccagagctcaattcgcgccgatgcggtccgccgtccttaaatctcttcagccaggatctctccccgactgcaaagcagccctgggcgggagcggcaacatctccacgtcacccttttggagccgccgacattcagaggggcaggacacgggaacgcgcgctgtcttgctttacggcgcgggtgcgcgagtttgcggcagcgtgacgccctcaagttttggcgggaaaagcgctgcatttggattcctgcagtggtgggcaaaggacagtccgccgaggtgctcggtggagtcatggcagtgccctttgtggaagactgggacttggtgcaaaccctgggagaaggtgcctatggagaagttcaacttgctgtgaatagagtaactgaagaagcagtcgcagtgaagattgtagatatgaagcgtgccgtagactgtccagaaaatattaagaaagagatctgtatcaataaaatgctaaatcatgaaaatgtagtaaaattctatggtcacaggagagaaggcaatatccaatatttatttctggagtactgtagtggaggagagctttttgacagaatagagccagacataggcatgcctgaaccagatgctcagagattcttccatcaactcatggcaggggtggtttatctgcatggtattggaataactcacagggatattaaaccagaaaatcttctgttggatgaaagggataacctcaaaatctcagactttggcttggcaacagtatttcggtataataatcgtgagcgtttgttgaacaagatgtgtggtactttaccatatgttgctccagaacttctgaagagaagagaatttcatgcagaaccagttgatgtttggtcctgtggaatagtacttactgcaatgctcgctggagaattgccatgggaccaacccagtgacagctgtcaggagtattctgactggaaagaaaaaaaaacatacctcaacccttggaaaaaaatcgattctgctcctctagctctgctgcataaaatcttagttgagaatccatcagcaagaattaccattccagacatcaaaaaagatagatggtacaacaaacccctcaagaaaggggcaaaaaggccccgagtcacttcaggtggtgtgtcagagtctcccagtggattttctaagcacattcaatccaatttggacttctctccagtaaacagtgcttctagtgaagaaaatgtgaagtactccagttctcagccagaaccccgcacaggtctttccttatgggataccagcccctcatacattgataaattggtacaagggatcagcttttcccagcccacatgtcctgatcatatgcttttgaatagtcagttacttggcaccccaggatcctcacagaacccctggcagcggttggtcaaaagaatgacacgattctttaccaaattggatgcagacaaatcttatcaatgcctgaaagagacttgtgagaagttgggctatcaatggaagaaaagttgtatgaatcaggttactatatcaacaactgataggagaaacaataaactcattttcaaagtgaatttgttagaaatggatgataaaatattggttgacttccggctttctaagggtgatggattggagttcaagagacacttcctgaagattaaagggaagctgattgatattgtgagcagccagaagatttggcttcctgccacatgatcggaccatcggctctggggaatcctggtgaatatagtgctgctatgttgacattattcttcctagagaagattatcctgtcctgcaaactgcaaatagtagttcctgaagtgttcacttccctgtttatccaaacatcttccaatttattttgtttgttcggcatacaaataatacctatatcttaattgtaagcaaaactttggggaaaggatgaatagaattcatttgattatttcttcatgtgtgtttagtatctgaatttgaaactcatctggtggaaaccaagtttcaggggacatgagttttccagcttttatacacacgtatctcatttttatcaaaacattttgtttaattcaaaaagtacatattccatgttgatttaattctaagatgaaccaataaagacataattcttgtgacttttggacagtagatttatcagtctgtgaagcgaagccagcttcaaaacatatccccaagatttgtacttatattttcaaaagggcctggccagttatataaacctgtttttgaattataatgattaattaaaattgcaagtaggtgttttttccagtgtagttagtaaaatacttgtattttacagtgttgcataaactctagtgcttaactaactttactctaaaaattactgttgaacatcttaaatatttttctatattttctactttcatagccatattttaaccttttcaacttactggtgaccaagcttttaggtgataaagaataaaagagggaagggaagagtaaggaagctataagaaaaatagatctgattctttgttcctttacctgttagacttacaaaaagtttgtttttctaataaaatttgtatcaactttggggcatattaggttgaggccttggctcctgcctgtagtcccagctacttaggaggctgagagaggaggatcgcgtgaacctggaagtttgaggctgtagtgagctatgattgcaccagtgcactccagcttggatgacagagtaagaccctacctctaataaaaatttttaaaattgtaaaacattataaaattaatcagttattttaatctgaagccaagaacatgtagaatgttatgattagagtttatcacatattaatgtatactggcaaattgtgttactggagtatacccataggaggaataaattcaaacctgttttatttatttgaacctatttacggtatgcttaagaattgaatcagtataaattctcaaatatgggagaaattttgttcttgagaattatctgagtcattaatatttttcaaaaacagctctcactgacttgaacctcttctgtaagctctaaccttttacctgctttacatttccacttgaatgtctagtaggcatctcttgaccaaaaacagcttttgattcctgttctccaacctgttcctctcctagttttctccatctcagaaatgttacttcctctgcaaagtctttccctgacttatctaaaataataacctcctctgtttgctgtgggaatttgtatagaatggtgggaaaatttcaagtttcatatttggattagctctgacatttatttatctgaacactggtaattgcctcagtaaagacactgataataagtaccttttagagttattttaatctttaatgctttaatgtgtaggaagagtatagtgtcctgttttgcacagaaaggcattctgtaaataataagttgccttaattttcctgtaatgttcattatattgttgtgggaaggtatttactcctattattaaaaataaaaatgtgtaaaatttactacctg

SEQ ID NO: 116969 - DNA, 1670 bp, Homo sapiens
  Payload ID: 2825
  Gene Symbol: CHEK1
  Gene Name: checkpoint kinase 1
  ENST ID: ENST00000427383
  CDS Start-End: 36-1514
acttcatatttgggcccagagctcaattcgcgccgatgcggtccgccgtccttaaatctcttcagccaggatctctccccgactgcaaagcagccctgggcgggagcggcaacatctccacgtcacccttttggagccgccgacattcagaggggcaggacacgggaacgcgcgctgtcttgctttacggcgcgggtgcgcgagtttgcggcagcgtgacgccctcaagttttggcgggaaaagcgctgcatttggattcctgcagtggtgggcaaaggacagtccgccgaggtgctcggtggagtcatggcagtgccctttgtggaagactgggacttggtgcaaaccctgggagaaggtgcctatggagaagccagacataggcatgcctgaaccagatgctcagagattcttccatcaactcatggcaggggtggtttatctgcatggtattggaataactcacagggatattaaaccagaaaatcttctgttggatgaaagggataacctcaaaatctcagactttggcttggcaacagtatttcggtataataatcgtgagcgtttgttgaacaagatgtgtggtactttaccatatgttgctccagaacttctgaagagaagagaatttcatgcagaaccagttgatgtttggtcctgtggaatagtacttactgcaatgctcgctggagaattgccatgggaccaacccagtgacagctgtcaggagtattctgactggaaagaaaaaaaaacatacctcaacccttggaaaaaaatcgattctgctcctctagctctgctgcataaaatcttagttgagaatccatcagcaagaattaccattccagacatcaaaaaagatagatggtacaacaaacccctcaagaaaggggcaaaaaggccccgagtcacttcaggtggtgtgtcagagtctcccagtggattttctaagcacattcaatccaatttggacttctctccagtaaacagtgcttctagtgaagaaaatgtgaagtactccagttctcagccagaaccccgcacaggtctttccttatgggataccagcccctcatacattgataaattggtacaagggatcagcttttcccagcccacatgtcctgatcatatgcttttgaatagtcagttacttggcaccccaggatcctcacagaacccctggcagcggttggtcaaaagaatgacacgattctttaccaaattggatgcagacaaatcttatcaatgcctgaaagagacttgtgagaagttgggctatcaatggaagaaaagttgtatgaatcaggttactatatcaacaactgataggagaaacaataaactcattttcaaagtgaatttgttagaaatggatgataaaatattggttgacttccggctttctaagggtgatggattggagttcaagagacacttcctgaagattaaagggaagctgattgatattgtgagcagccagaagatttggcttcctgccacatgatcggaccatcggctctggggaatcctggtgaatatagtgctgctatgttgacattattcttcctagagaagattatcctgtcctgcaaactgcaaatagtagttcctgaagtgttcacttccctgtttatccaaacatcttccaatttattttgtt

SEQ ID NO: 116970 - DNA, 1845 bp, Homo sapiens
  Payload ID: 2825
  Gene Symbol: CHEK1
  Gene Name: checkpoint kinase 1
  Uniprot ID: O14757
  ENST ID: ENST00000428830
  CDS Start-End: 60-1490
gcatttggattcctgcagtggtgggcaaaggacagtccgccgaggtgctcggtggagtcatggcagtgccctttgtggaagactgggacttggtgcaaaccctgggagaaggtgcctatggagaagttcaacttgctgtgaatagagtaactgaagaagcagtcgcagtgaagattgtagatatgaagcgtgccgtagactgtccagaaaatattaagaaagagatctgtatcaataaaatgctaaatcatgaaaatgtagtaaaattctatggtcacaggagagaaggcaatatccaatatttatttctggagtactgtagtggaggagagctttttgacagaatagagccagacataggcatgcctgaaccagatgctcagagattcttccatcaactcatggcaggggtggtttatctgcatggtattggaataactcacagggatattaaaccagaaaatcttctgttggatgaaagggataacctcaaaatctcagactttggcttggcaacagtatttcggtataataatcgtgagcgtttgttgaacaagatgtgtggtactttaccatatgttgctccagaacttctgaagagaagagaatttcatgcagaaccagttgatgtttggtcctgtggaatagtacttactgcaatgctcgctggagaattgccatgggaccaacccagtgacagctgtcaggagtattctgactggaaagaaaaaaaaacatacctcaacccttggaaaaaaatcgattctgctcctctagctctgctgcataaaatcttagttgagaatccatcagcaagaattaccattccagacatcaaaaaagatagatggtacaacaaacccctcaagaaaggggcaaaaaggccccgagtcacttcaggtggtgtgtcagagtctcccagtggattttctaagcacattcaatccaatttggacttctctccagtaaacagtgcttctagtgaagaaaatgtgaagtactccagttctcagccagaaccccgcacaggtctttccttatgggataccagcccctcatacattgataaattggtacaagggatcagcttttcccagcccacatgtcctgatcatatgcttttgaatagtcagttacttggcaccccaggatcctcacagaacccctggcagcggttggtcaaaagaatgacacgattctttaccaaattggatgcagacaaatcttatcaatgcctgaaagagacttgtgagaagttgggctatcaatggaagaaaagttgtatgaatcaggttactatatcaacaactgataggagaaacaataaactcattttcaaagtgaatttgttagaaatggatgataaaatattggttgacttccggctttctaagggtgatggattggagttcaagagacacttcctgaagattaaagggaagctgattgatattgtgagcagccagaagatttggcttcctgccacatgatcggaccatcggctctggggaatcctgatggagtttcactcttgtctcccaggctggagtacaatggcatgatctcagcttactgcaacctccgtctcctgggttcaagcgattctcctgcctcagccttccaagtagctgggattacaggtgcccaccaccacacctggctaggttttgtatttttagtagagatggggttttttcatgttggccaggctgatctggaactcctgacctcaagtgatccacctgccttggcctcccaaagtgctgggattttaggtgtgagccacctcgcctggcaagggattctgttcttagtccttgaaaaaataaagttctgaatcttcaa

SEQ ID NO: 116971 - DNA, 661 bp, Homo sapiens
  Payload ID: 2825
  Gene Symbol: CHEK1
  Gene Name: checkpoint kinase 1
  ENST ID: ENST00000527013
  CDS Start-End: 49-661
aggacagtccggtgaggaagggcggccgccgaggtgctcggtggagtcatggcagtgccctttgtggaagactgggacttggtgcaaaccctgggagaaggtgcctatggagaagttcaacttgctgtgaatagagtaactgaagaagcagtcgcagtgaagattgtagatatgaagcgtgccgtagactgtccagaaaatattaagaaagagatctgtatcaataaaatgctaaatcatgaaaatgtagtaaaattctatggtcacaggagagaaggcaatatccaatatttatttctggagtactgtagtggaggagagctttttgacagaatagagccagacataggcatgcctgaaccagatgctcagagattcttccatcaactcatggcaggggtggtttatctgcatggtattggaataactcacagggatattaaaccagaaaatcttctgttggatgaaagggataacctcaaaatctcagactttggcttggcaacagtatttcggtataataatcgtgagcgtttgttgaacaagatgtgtggtactttaccatatgttgctccagaacttctgaagagaagagaatttcatgcagaaccagttgatgtttggtcctgtggaatagtacttactgcaatgctcgctggag

SEQ ID NO: 116972 - DNA, 562 bp, Homo sapiens
  Payload ID: 2825
  Gene Symbol: CHEK1
  Gene Name: checkpoint kinase 1
  ENST ID: ENST00000526937
  CDS Start-End: 51-562
acagtccggtgaggaagggcggccggtagaccgaggtgctcggtggagtcatggcagtgccctttgtggaagactgggacttggtgcaaaccctgggagaaggtgcctatggagaagttcaacttgctgtgaatagagtaactgaagaagcagtcgcagtgaagattgtagatatgaagcgtgccgtagactgtccagaaaatattaagaaagagatctgtatcaataaaatgctaaatcatgaaaatgtagtaaaattctatggtcacaggagagaaggcaatatccaatatttatttctggagtactgtagtggaggagagctttttgacagaatagagccagacataggcatgcctgaaccagatgctcagagattcttccatcaactcatggcaggggtggtttatctgcatggtattggaataactcacagggatattaaaccagaaaatcttctgttggatgaaagggataacctcaaaatctcagactttggcttggcaacagtatttcggtataataatcgtgagcgtttgttgaacaagatgtgtggtacttt

SEQ ID NO: 116973 - DNA, 583 bp, Homo sapiens
  Payload ID: 2825
  Gene Symbol: CHEK1
  Gene Name: checkpoint kinase 1
  ENST ID: ENST00000534685
  CDS Start-End: 203-583
agtccggtgaggaagggcggccgacccccacctctccctcctccttccccagtcgttcgccggaaagcatttgtctcccacctcttcataacaacaattaatttcctctggggcctgaggagggcagaatttcaaccttcggtgtgcttgggagtggcgattgtgatttacacgacaaaatgccgaggtgctcggtggagtcatggcagtgccctttgtggaagactgggacttggtgcaaaccctgggagaaggtgcctatggagaagttcaacttgctgtgaatagagtaactgaagaagcagtcgcagtgaagattgtagatatgaagcgtgccgtagactgtccagaaaatattaagaaagagatctgtatcaataaaatgctaaatcatgaaaatgtagtaaaattctatggtcacaggagagaaggcaatatccaatatttatttctggagtactgtagtggaggagagctttttgacagaatagagccagacataggcatgcctgaaccagatgctcagagattcttccatcaactcatggcaggggtggtttatctgcatggtattggaataact

SEQ ID NO: 116974 - DNA, 1799 bp, Homo sapiens
  Payload ID: 2825
  Gene Symbol: CHEK1
  Gene Name: checkpoint kinase 1
  Uniprot ID: O14757
  ENST ID: ENST00000524737
  CDS Start-End: 212-1642
gatttacacgacaaaatggtcaggtttagaatagttgttcgtggttgaaagacttggataaatgtggatgagatagaaggggaaggcaagagctgttaattttcgtgggcaatcctggggagaggcggggctcagtggcttcactggtgatcttacactctacatcttttctggattcctgccttttacagccgaggtgctcggtggagtcatggcagtgccctttgtggaagactgggacttggtgcaaaccctgggagaaggtgcctatggagaagttcaacttgctgtgaatagagtaactgaagaagcagtcgcagtgaagattgtagatatgaagcgtgccgtagactgtccagaaaatattaagaaagagatctgtatcaataaaatgctaaatcatgaaaatgtagtaaaattctatggtcacaggagagaaggcaatatccaatatttatttctggagtactgtagtggaggagagctttttgacagaatagagccagacataggcatgcctgaaccagatgctcagagattcttccatcaactcatggcaggggtggtttatctgcatggtattggaataactcacagggatattaaaccagaaaatcttctgttggatgaaagggataacctcaaaatctcagactttggcttggcaacagtatttcggtataataatcgtgagcgtttgttgaacaagatgtgtggtactttaccatatgttgctccagaacttctgaagagaagagaatttcatgcagaaccagttgatgtttggtcctgtggaatagtacttactgcaatgctcgctggagaattgccatgggaccaacccagtgacagctgtcaggagtattctgactggaaagaaaaaaaaacatacctcaacccttggaaaaaaatcgattctgctcctctagctctgctgcataaaatcttagttgagaatccatcagcaagaattaccattccagacatcaaaaaagatagatggtacaacaaacccctcaagaaaggggcaaaaaggccccgagtcacttcaggtggtgtgtcagagtctcccagtggattttctaagcacattcaatccaatttggacttctctccagtaaacagtgcttctagtgaagaaaatgtgaagtactccagttctcagccagaaccccgcacaggtctttccttatgggataccagcccctcatacattgataaattggtacaagggatcagcttttcccagcccacatgtcctgatcatatgcttttgaatagtcagttacttggcaccccaggatcctcacagaacccctggcagcggttggtcaaaagaatgacacgattctttaccaaattggatgcagacaaatcttatcaatgcctgaaagagacttgtgagaagttgggctatcaatggaagaaaagttgtatgaatcaggttactatatcaacaactgataggagaaacaataaactcattttcaaagtgaatttgttagaaatggatgataaaatattggttgacttccggctttctaagggtgatggattggagttcaagagacacttcctgaagattaaagggaagctgattgatattgtgagcagccagaagatttggcttcctgccacatgatcggaccatcggctctggggaatcctggttgaggccttggctcctgcctgtagtcccagctacttaggaggctgagagaggaggatcgcgtgaacctggaagtttgaggctgtagtgagctatgattgcaccagtgcactccagcttggatgacaga

SEQ ID NO: 116975 - DNA, 561 bp, Homo sapiens
  Payload ID: 2825
  Gene Symbol: CHEK1
  Gene Name: checkpoint kinase 1
  ENST ID: ENST00000533778
  CDS Start-End: 435-561
aagaaccccaaggaagagtcccagcccttcctttcgcctctgggggcagtttggccccgccccggcctttgggacgggtggggctgtggatggggatgggaattggaattgagcaattgggaggaggcgctgccgcaggcgttttctgccccataccgctccctatatcctcttcctctcttccccagacccccacctctccctcctccttccccagtcgttcgccggaaagcatttgtctcccacctcttcataacaacaattaatttcctctggggcctgaggagggcagaatttcaaccttcggtgtgcttgggagtggcgattgtgatttacacgacaaaatggtcaggtttagaatagttgttcgtggttgaaagacttggataaatgtggatgagatagaaggggaagccgaggtgctcggtggagtcatggcagtgccctttgtggaagactgggacttggtgcaaaccctgggagaaggtgcctatggagaagttcaacttgctgtgaatagagtaactgaagaagcagtcgcagtgaagattgtagatatga

SEQ ID NO: 116976 - DNA, 769 bp, Homo sapiens
  Payload ID: 2825
  Gene Symbol: CHEK1
  Gene Name: checkpoint kinase 1
  ENST ID: ENST00000525396
  CDS Start-End: 97-450
aggcctgggcttcccccagcagcgctcgagcaccgcccagtcgagcctcacaccggatgccacttcatatttgggcccagagctcaattcgcgccgatgcggtccgccgtccttaaatctcttcagccaggatctctccccgactgcaaagcagccctgggcgggagcggcaacatctccacgtcacccttttggagccgccgacattcagaggggcaggacacgggaacgcgcgctgtcttgctttacggcgcgggtgcgcgagtttgcggcagcgtgacgccctcaagttttggcgggaaaagcgctgcatttggattcctgcagtggtgggcaaaggacagtccgccgaggtgctcggtggagtcatggcagtgccctttgtggaagactgggacttggtgcaaaccctgggagaaggtgcctatggagaagttcaacttgctgtgaatagagtaactgaagaagcagtcgcagtgaagattgtagatatgaagcgtgccgtagactgtccagaaaatattaagaaagagatctgtatcaataaaatgctaaatcatgaaaatgtagtaaaattctatggtcacaggagagaaggcaatatccaatatttatttctggagtactgtagtggaggagagctttttgacagaatagagccagacataggcatgcctgaaccagatgctcagagattcttccatcaactcatggcaggggtggtttatctgcatggtattggaataactcacagggatattaaaccaga

SEQ ID NO: 116977 - DNA, 617 bp, Homo sapiens
  Payload ID: 2825
  Gene Symbol: CHEK1
  Gene Name: checkpoint kinase 1
  ENST ID: ENST00000532669
  CDS Start-End: 41-617
ggtgggcaaaggacagtccgccgaggtgctcggtggagtcatggcagtgccctttgtggaagactgggacttggtgcaaaccctgggagaagagccagacataggcatgcctgaaccagatgctcagagattcttccatcaactcatggcaggggtggtttatctgcatggtattggaataactcacagggatattaaaccagaaaatcttctgttggatgaaagggataacctcaaaatctcagactttggcttggcaacagtatttcggtataataatcgtgagcgtttgttgaacaagatgtgtggtactttaccatatgttgctccagaacttctgaagagaagagaatttcatgcagaaccagttgatgtttggtcctgtggaatagtacttactgcaatgctcgctggagaattgccatgggaccaacccagtgacagctgtcaggagtattctgactggaaagaaaaaaaaacatacctcaacccttggaaaaaaatcgattctgctcctctagctctgctgcataaaatcttagttgagaatccatcagcaagaattaccattccagacatcaaaaaagatagatggtacaacaaacccctcaagaaag

SEQ ID NO: 116978 - DNA, 3513 bp, Homo sapiens
  Payload ID: 2825
  Gene Symbol: CHEK1
  Gene Name: checkpoint kinase 1
  Uniprot ID: O14757
  ENST ID: ENST00000534070
  CDS Start-End: 256-1686
gcaattgggaggaggcgctgccgcaggcgttttctgccccataccgctccctatatcctcttcctctcttccccagacccccacctctccctcctccttccccagtcgttcgccggaaagcatttgtctcccacctcttcataacaacaattaatttcctctggggcctgaggagggcagaatttcaaccttcggtgtgcttgggagtggcgattgtgatttacacgacaaaatgccgaggtgctcggtggagtcatggcagtgccctttgtggaagactgggacttggtgcaaaccctgggagaaggtgcctatggagaagttcaacttgctgtgaatagagtaactgaagaagcagtcgcagtgaagattgtagatatgaagcgtgccgtagactgtccagaaaatattaagaaagagatctgtatcaataaaatgctaaatcatgaaaatgtagtaaaattctatggtcacaggagagaaggcaatatccaatatttatttctggagtactgtagtggaggagagctttttgacagaatagagccagacataggcatgcctgaaccagatgctcagagattcttccatcaactcatggcaggggtggtttatctgcatggtattggaataactcacagggatattaaaccagaaaatcttctgttggatgaaagggataacctcaaaatctcagactttggcttggcaacagtatttcggtataataatcgtgagcgtttgttgaacaagatgtgtggtactttaccatatgttgctccagaacttctgaagagaagagaatttcatgcagaaccagttgatgtttggtcctgtggaatagtacttactgcaatgctcgctggagaattgccatgggaccaacccagtgacagctgtcaggagtattctgactggaaagaaaaaaaaacatacctcaacccttggaaaaaaatcgattctgctcctctagctctgctgcataaaatcttagttgagaatccatcagcaagaattaccattccagacatcaaaaaagatagatggtacaacaaacccctcaagaaaggggcaaaaaggccccgagtcacttcaggtggtgtgtcagagtctcccagtggattttctaagcacattcaatccaatttggacttctctccagtaaacagtgcttctagtgaagaaaatgtgaagtactccagttctcagccagaaccccgcacaggtctttccttatgggataccagcccctcatacattgataaattggtacaagggatcagcttttcccagcccacatgtcctgatcatatgcttttgaatagtcagttacttggcaccccaggatcctcacagaacccctggcagcggttggtcaaaagaatgacacgattctttaccaaattggatgcagacaaatcttatcaatgcctgaaagagacttgtgagaagttgggctatcaatggaagaaaagttgtatgaatcaggttactatatcaacaactgataggagaaacaataaactcattttcaaagtgaatttgttagaaatggatgataaaatattggttgacttccggctttctaagggtgatggattggagttcaagagacacttcctgaagattaaagggaagctgattgatattgtgagcagccagaagatttggcttcctgccacatgatcggaccatcggctctggggaatcctggtgaatatagtgctgctatgttgacattattcttcctagagaagattatcctgtcctgcaaactgcaaatagtagttcctgaagtgttcacttccctgtttatccaaacatcttccaatttattttgtttgttcggcatacaaataatacctatatcttaattgtaagcaaaactttggggaaaggatgaatagaattcatttgattatttcttcatgtgtgtttagtatctgaatttgaaactcatctggtggaaaccaagtttcaggggacatgagttttccagcttttatacacacgtatctcatttttatcaaaacattttgtttaattcaaaaagtacatattccatgttgatttaattctaagatgaaccaataaagacataattcttgtgacttttggacagtagatttatcagtctgtgaagcgaagccagcttcaaaacatatccccaagatttgtacttatattttcaaaagggcctggccagttatataaacctgtttttgaattataatgattaattaaaattgcaagtaggtgttttttccagtgtagttagtaaaatacttgtattttacagtgttgcataaactctagtgcttaactaactttactctaaaaattactgttgaacatcttaaatatttttctatattttctactttcatagccatattttaaccttttcaacttactggtgaccaagcttttaggtgataaagaataaaagagggaagggaagagtaaggaagctataagaaaaatagatctgattctttgttcctttacctgttagacttacaaaaagtttgtttttctaataaaatttgtatcaactttggggcatattaggttgaggccttggctcctgcctgtagtcccagctacttaggaggctgagagaggaggatcgcgtgaacctggaagtttgaggctgtagtgagctatgattgcaccagtgcactccagcttggatgacagagtaagaccctacctctaataaaaatttttaaaattgtaaaacattataaaattaatcagttattttaatctgaagccaagaacatgtagaatgttatgattagagtttatcacatattaatgtatactggcaaattgtgttactggagtatacccataggaggaataaattcaaacctgttttatttatttgaacctatttacggtatgcttaagaattgaatcagtataaattctcaaatatgggagaaattttgttcttgagaattatctgagtcattaatatttttcaaaaacagctctcactgacttgaacctcttctgtaagctctaaccttttacctgctttacatttccacttgaatgtctagtaggcatctcttgaccaaaaacagcttttgattcctgttctccaacctgttcctctcctagttttctccatctcagaaatgttacttcctctgcaaagtctttccctgacttatctaaaataataacctcctctgtttgctgtgggaatttgtatagaatggtgggaaaatttcaagtttcatatttggattagctctgacatttatttatctgaacactggtaattgcctcagtaaagacactgataataagtaccttttagagttattttaatctttaatgctttaatgtgtaggaagagtatagtgtcctgttttgcacagaaaggcattctgtaaataataagttgccttaattttcctgtaatgttcattatattgttgtgggaaggtatttactcctattattaaaaataaaaatgtgtaaaatttactacctgaa

SEQ ID NO: 116979 - DNA, 1653 bp, Homo sapiens
  Payload ID: 2825
  Gene Symbol: CHEK1
  Gene Name: checkpoint kinase 1
  Uniprot ID: O14757
  ENST ID: ENST00000544373
  CDS Start-End: 115-1263
tttggattcctgcagtggtgggcaaaggacagtccgccgaggtgctcggtggagtcatggcagtgccctttgtggaagactgggacttggtgcaaaccctgggagaaggtgcctatggagaagccagacataggcatgcctgaaccagatgctcagagattcttccatcaactcatggcaggggtggtttatctgcatggtattggaataactcacagggatattaaaccagaaaatcttctgttggatgaaagggataacctcaaaatctcagactttggcttggcaacagtatttcggtataataatcgtgagcgtttgttgaacaagatgtgtggtactttaccatatgttgctccagaacttctgaagagaagagaatttcatgcagaaccagttgatgtttggtcctgtggaatagtacttactgcaatgctcgctggagaattgccatgggaccaacccagtgacagctgtcaggagtattctgactggaaagaaaaaaaaacatacctcaacccttggaaaaaaatcgattctgctcctctagctctgctgcataaaatcttagttgagaatccatcagcaagaattaccattccagacatcaaaaaagatagatggtacaacaaacccctcaagaaaggggcaaaaaggccccgagtcacttcaggtggtgtgtcagagtctcccagtggattttctaagcacattcaatccaatttggacttctctccagtaaacagtgcttctagtgaagaaaatgtgaagtactccagttctcagccagaaccccgcacaggtctttccttatgggataccagcccctcatacattgataaattggtacaagggatcagcttttcccagcccacatgtcctgatcatatgcttttgaatagtcagttacttggcaccccaggatcctcacagaacccctggcagcggttggtcaaaagaatgacacgattctttaccaaattggatgcagacaaatcttatcaatgcctgaaagagacttgtgagaagttgggctatcaatggaagaaaagttgtatgaatcaggttactatatcaacaactgataggagaaacaataaactcattttcaaagtgaatttgttagaaatggatgataaaatattggttgacttccggctttctaagggtgatggattggagttcaagagacacttcctgaagattaaagggaagctgattgatattgtgagcagccagaagatttggcttcctgccacatgatcggaccatcggctctggggaatcctggtgaatatagtgctgctatgttgacattattcttcctagagaagattatcctgtcctgcaaactgcaaatagtagttcctgaagtgttcacttccctgtttatccaaacatcttccaatttattttgtttgttcggcatacaaataatacctatatcttaattgtaagcaaaactttggggaaaggatgaatagaattcatttgattatttcttcatgtgtgtttagtatctgaatttgaaactcatctggtggaaaccaagtttcaggggacatgagttttccagcttttatacacacgtatctcatttttatcaaaacattttgtttaattcaaaaagtacatattccatgttgatttaat

SEQ ID NO: 116980 - DNA, 462 bp, Homo sapiens
  Payload ID: 2825
  Gene Symbol: CHEK1
  Gene Name: checkpoint kinase 1
  ENST ID: ENST00000531607
  CDS Start-End: 131-462
ccgaggtgctcggtggagtcatggcagtgccctttgtggaagactgggacttggtgcaaaccctgggagaagagttcaacttgctgtgaatagagtaactgaagaagcagtcgcagtgaagattgtagatatgaagcgtgccgtagactgtccagaaaatattaagaaagagatctgtatcaataaaatgctaaatcatgaaaatgtagtaaaattctatggtcacaggagagaaggcaatatccaatatttatttctggagtactgtagtggaggagagctttttgacagaatagagccagacataggcatgcctgaaccagatgctcagagattcttccatcaactcatggcaggggtggtttatctgcatggtattggaataactcacagggatattaaaccagaaaatcttctgttggatgaaagggataacctcaaaatctcagactttggcttggc

SEQ ID NO: 116981 - DNA, 755 bp, Homo sapiens
  Payload ID: 2825
  Gene Symbol: CHEK1
  Gene Name: checkpoint kinase 1
  ENST ID: ENST00000498122
  CDS Start-End: 1-270
aaatcttatcaatgcctgaaagagacttgtgagaagttgggctatcaatggaagaaaagttgtatgaatcaggttactatatcaacaactgataggagaaacaataaactcattttcaaagtgaatttgttagaaatggatgataaaatattggttgacttccggctttctaagggtgatggattggagttcaagagacacttcctgaagattaaagggaagctgattgatattgtgagcagccagaagatttggcttcctgccacatgatcggaccatcggctctggggaatcctggttgaggccttggctcctgcctgtagtcccagctacttaggaggctgagagaggaggatcgcgtgaacctggaagtttgaggctgtagtgagctatgattgcaccagtgcactccagcttggatgacagaatggagtttcactcttgtctcccaggctggagtacaatggcatgatctcagcttactgcaacctccgtctcctgggttcaagcgattctcctgcctcagccttccaagtagctgggattacaggtgcccaccaccacacctggctaggttttgtatttttagtagagatggggttttttcatgttggccaggctgatctggaactcctgacctcaagtgatccacctgccttggcctcccaaagtgctgggattttaggtgtgagccacctcgcctggcaagggattctgttcttagtccttgaaaaaataaagttctgaatcttcaa

SEQ ID NO: 116982 - DNA, 4051 bp, Homo sapiens
  Payload ID: 2825
  Gene Symbol: CHEK1
  Gene Name: checkpoint kinase 1
  Uniprot ID: O14757
  ENST ID: ENST00000532449
  CDS Start-End: 898-2226
cttttaaatttgcgttgtaagatttattttggctctccccgcctgttctttgcacattaaaaatgaaaaagtttgtagaactaagctaagcagatggtcttcctgcaaaaagaccgggctgaagtaaagcattgttttggagctggttcacagaaaaaaggcaaaactggttatcctgacttcaagctccaacataaactgctcgctttctccgggaaacttgccccgccacacacacttgactgcgtggccagttctttcgaagcctctcgctcccaacacggagttcctcccatttcttcacagtcggctctcagcagctgctgctggtttctcggctccagcaccacgagtaccgcactctgaggtttacaaagcactctgcttcaccgactgtgatcctcacagtcctgtccggtggcctcacgcaggtggcggtgcagcctttcaggcccagagcggccaggagcgaagcccgcagccccgcctggaagcgcagcgcggtcggtcgcgcgcccctgaggcttggaggcctgggcttcccccagcagcgctcgagcaccgcccagtcgagcctcacaccggatgccacttcatatttgggcccagagctcaattcgcgccgatgcggtccgccgtccttaaatctcttcagccaggatctctccccgactgcaaagcagccctgggcgggagcggcaacatctccacgtcacccttttggagccgccgacattcagaggggcaggacacgggaacgcgcgctgtcttgctttacggcgcgggtgcgcgagtttgcggcagcgtgacgccctcaagttttggcgggaaaagcgctgcatttggattcctgcagtggtgggcaaaggacagtccgccgaggtgctcggtggagtcatggcagtgccctttgtggaagactgggacttggtgcaaaccctgggagaaggtgcctatggagaagttcaacttgctgtgaatagagtaactgaagaagcagtcgcagtgaagattgtagatatgaagcgtgccgtagactgtccagaaaatattaagaaagagatctgtatcaataaaatgctaaatcatgaaaatgtagtaaaattctatggtcacaggagagaaggcaatatccaatatttatttctggagtactgtagtggaggagagctttttgacagaatagagccagacataggcatgcctgaaccagatgctcagagattcttccatcaactcatggcaggggtggtttatctgcatggtattggaataactcacagggatattaaaccagaaaatcttctgttggatgaaagggataacctcaaaatctcagactttggcttggcaacagtatttcggtataataatcgtgagcgtttgttgaacaagatgtgtggtactttaccatatgttgctccagaacttctgaagagaagagaatttcatgcagaaccagttgatgtttggtcctgtggaatagtacttactgcaatgctcgctggagaattgccatgggaccaacccagtgacagctgtcaggagtattctgactggaaagaaaaaaaaacatacctcaacccttggaaaaaaatcgattctgctcctctagctctgctgcataaaatcttagttgagaatccatcagcaagaattaccattccagacatcaaaaaagatagatggtacaacaaacccctcaagaaaggggcaaaaaggccccgagtcacttcaggtggtgtgtcagagtctcccagtggattttctaagcacattcaatccaatttggacttctctccagtaaacagtgcttctagtgaagaaaatgtgaagtactccagttctcagccagaaccccgcacaggtctttccttatgggataccagcccctcatacattgataaattggtacaagggatcagcttttcccagcccacatgtcctgatcatatgcttttgaatagtcagttacttggcaccccaggatcctcacagaacccctggcagcggttggtcaaaagaatgacacgattctttaccaaattggatgcagacaaatcttatcaatgcctgaaagagacttgtgagaagttgggctatcaatggaagaaaagttgtatgaatcagggtgatggattggagttcaagagacacttcctgaagattaaagggaagctgattgatattgtgagcagccagaagatttggcttcctgccacatgatcggaccatcggctctggggaatcctggtgaatatagtgctgctatgttgacattattcttcctagagaagattatcctgtcctgcaaactgcaaatagtagttcctgaagtgttcacttccctgtttatccaaacatcttccaatttattttgtttgttcggcatacaaataatacctatatcttaattgtaagcaaaactttggggaaaggatgaatagaattcatttgattatttcttcatgtgtgtttagtatctgaatttgaaactcatctggtggaaaccaagtttcaggggacatgagttttccagcttttatacacacgtatctcatttttatcaaaacattttgtttaattcaaaaagtacatattccatgttgatttaattctaagatgaaccaataaagacataattcttgtgacttttggacagtagatttatcagtctgtgaagcgaagccagcttcaaaacatatccccaagatttgtacttatattttcaaaagggcctggccagttatataaacctgtttttgaattataatgattaattaaaattgcaagtaggtgttttttccagtgtagttagtaaaatacttgtattttacagtgttgcataaactctagtgcttaactaactttactctaaaaattactgttgaacatcttaaatatttttctatattttctactttcatagccatattttaaccttttcaacttactggtgaccaagcttttaggtgataaagaataaaagagggaagggaagagtaaggaagctataagaaaaatagatctgattctttgttcctttacctgttagacttacaaaaagtttgtttttctaataaaatttgtatcaactttggggcatattaggttgaggccttggctcctgcctgtagtcccagctacttaggaggctgagagaggaggatcgcgtgaacctggaagtttgaggctgtagtgagctatgattgcaccagtgcactccagcttggatgacagagtaagaccctacctctaataaaaatttttaaaattgtaaaacattataaaattaatcagttattttaatctgaagccaagaacatgtagaatgttatgattagagtttatcacatattaatgtatactggcaaattgtgttactggagtatacccataggaggaataaattcaaacctgttttatttatttgaacctatttacggtatgcttaagaattgaatcagtataaattctcaaatatgggagaaattttgttcttgagaattatctgagtcattaatatttttcaaaaacagctctcactgacttgaacctcttctgtaagctctaaccttttacctgctttacatttccacttgaatgtctagtaggcatctcttgaccaaaaacagcttttgattcctgttctccaacctgttcctctcctagttttctccatctcagaaatgttacttcctctgcaaagtctttccctgacttatctaaaataataacctcctctgtttgctgtgggaatttgtatagaatggtgggaaaatttcaagtttcatatttggattagctctgacatttatttatctgaacactggtaattgcctcagtaaagacactgataataagtaccttttagagttattttaatctttaatgctttaatgtgtaggaagagtatagtgtcctgttttgcacagaaaggcattctgtaaataataagttgccttaattttcctgtaatgttcattatattgttgtgggaaggtatttactcctattattaaaaataaaaatgtgtaaaatttactacctg

SEQ ID NO: 116983 - DNA, 1771 bp, Homo sapiens
  Payload ID: 2826
  Gene Symbol: CHEK2
  Gene Name: checkpoint kinase 2
  Uniprot ID: O96017
  ENST ID: ENST00000348295
  CDS Start-End: 73-1617
gcaggtttagcgccactctgctggctgaggctgcggagagtgtgcggctccaggtgggctcacgcggtcgtgatgtctcgggagtcggatgttgaggctcagcagtctcatggcagcagtgcctgttcacagccccatggcagcgttacccagtcccaaggctcctcctcacagtcccagggcatatccagctcctctaccagcacgatgccaaactccagccagtcctctcactccagctctgggacactgagctccttagagacagtgtccactcaggaactctattctattcctgaggaccaagaacctgaggaccaagaacctgaggagcctacccctgccccctgggctcgattatgggcccttcaggatggatttgccaatcttgaatgtgtgaatgacaactactggtttgggagggacaaaagctgtgaatattgctttgatgaaccactgctgaaaagaacagataaataccgaacatacagcaagaaacactttcggattttcagggaagtgggtcctaaaaactcttacattgcatacatagaagatcacagtggcaatggaacctttgtaaatacagagcttgtagggaaaggaaaacgccgtcctttgaataacaattctgaaattgcactgtcactaagcagaaataaagtttttgtcttttttgatctgactgtagatgatcagtcagtttatcctaaggcattaagagatgaatacatcatgtcaaaaactcttggaagtggtgcctgtggagaggtaaagctggctttcgagaggaaaacatgtaagaaagtagccataaagatcatcagcaaaaggaagtttgctattggttcagcaagagaggcagacccagctctcaatgttgaaacagaaatagaaattttgaaaaagctaaatcatccttgcatcatcaagattaaaaacttttttgatgcagaagattattatattgttttggaattgatggaagggggagagctgtttgacaaagtggtggggaataaacgcctgaaagaagctacctgcaagctctatttttaccagatgctcttggctgtgcagattactgattttgggcactccaagattttgggagagacctctctcatgagaaccttatgtggaacccccacctacttggcgcctgaagttcttgtttctgttgggactgctgggtataaccgtgctgtggactgctggagtttaggagttattctttttatctgccttagtgggtatccacctttctctgagcataggactcaagtgtcactgaaggatcagatcaccagtggaaaatacaacttcattcctgaagtctgggcagaagtctcagagaaagctctggaccttgtcaagaagttgttggtagtggatccaaaggcacgttttacgacagaagaagccttaagacacccgtggcttcaggatgaagacatgaagagaaagtttcaagatcttctgtctgaggaaaatgaatccacagctctaccccaggttctagcccagccttctactagtcgaaagcggccccgtgaaggggaagccgagggtgccgagaccacaaagcgcccagctgtgtgtgctgctgtgttgtgaactccgtggtttgaacacgaaagaaatgtaccttctttcactctgtcatctttcttttctttgagtctgtttttttatagtttgtattttaattatgggaataattgctttttcacagtcactgatgtacaattaaaaacctgatggaacctgg

SEQ ID NO: 116984 - DNA, 1867 bp, Homo sapiens
  Payload ID: 2826
  Gene Symbol: CHEK2
  Gene Name: checkpoint kinase 2
  Uniprot ID: O96017
  ENST ID: ENST00000328354
  CDS Start-End: 83-1714
gtttgtatctgcaggtttagcgccactctgctggctgaggctgcggagagtgtgcggctccaggtgggctcacgcggtcgtgatgtctcgggagtcggatgttgaggctcagcagtctcatggcagcagtgcctgttcacagccccatggcagcgttacccagtcccaaggctcctcctcacagtcccagggcatatccagctcctctaccagcacgatgccaaactccagccagtcctctcactccagctctgggacactgagctccttagagacagtgtccactcaggaactctattctattcctgaggaccaagaacctgaggaccaagaacctgaggagcctacccctgccccctgggctcgattatgggcccttcaggatggatttgccaatcttgaatgtgtgaatgacaactactggtttgggagggacaaaagctgtgaatattgctttgatgaaccactgctgaaaagaacagataaataccgaacatacagcaagaaacactttcggattttcagggaagtgggtcctaaaaactcttacattgcatacatagaagatcacagtggcaatggaacctttgtaaatacagagcttgtagggaaaggaaaacgccgtcctttgaataacaattctgaaattgcactgtcactaagcagaaataaagtttttgtcttttttgatctgactgtagatgatcagtcagtttatcctaaggcattaagagatgaatacatcatgtcaaaaactcttggaagtggtgcctgtggagaggtaaagctggctttcgagaggaaaacatgtaagaaagtagccataaagatcatcagcaaaaggaagtttgctattggttcagcaagagaggcagacccagctctcaatgttgaaacagaaatagaaattttgaaaaagctaaatcatccttgcatcatcaagattaaaaacttttttgatgcagaagattattatattgttttggaattgatggaagggggagagctgtttgacaaagtggtggggaataaacgcctgaaagaagctacctgcaagctctatttttaccagatgctcttggctgtgcagtaccttcatgaaaacggtattatacaccgtgacttaaagccagagaatgttttactgtcatctcaagaagaggactgtcttataaagattactgattttgggcactccaagattttgggagagacctctctcatgagaaccttatgtggaacccccacctacttggcgcctgaagttcttgtttctgttgggactgctgggtataaccgtgctgtggactgctggagtttaggagttattctttttatctgccttagtgggtatccacctttctctgagcataggactcaagtgtcactgaaggatcagatcaccagtggaaaatacaacttcattcctgaagtctgggcagaagtctcagagaaagctctggaccttgtcaagaagttgttggtagtggatccaaaggcacgttttacgacagaagaagccttaagacacccgtggcttcaggatgaagacatgaagagaaagtttcaagatcttctgtctgaggaaaatgaatccacagctctaccccaggttctagcccagccttctactagtcgaaagcggccccgtgaaggggaagccgagggtgccgagaccacaaagcgcccagctgtgtgtgctgctgtgttgtgaactccgtggtttgaacacgaaagaaatgtaccttctttcactctgtcatctttcttttctttgagtctgtttttttatagtttgtattttaattatgggaataattgctttttcacagtcactgatgtacaattaaaaacctgatggaacctg

SEQ ID NO: 116985 - DNA, 696 bp, Homo sapiens
  Payload ID: 2826
  Gene Symbol: CHEK2
  Gene Name: checkpoint kinase 2
  ENST ID: ENST00000382565
  CDS Start-End: 73-696
gcaggtttagcgccactctgctggctgaggctgcggagagtgtgcggctccaggtgggctcacgcggtcgtgatgtctcgggagtcggatgttgaggctcagcagtctcatggcagcagtgcctgttcacagccccatggcagcgttacccagtcccaaggctcctcctcacagtcccagggcatatccagctcctctaccagcacgatgccaaactccagccagtcctctcactccagctctgggacactgagctccttagagacagtgtccactcaggaactctattctattcctgaggaccaagaacctgaggaccaagaacctgaggagcctacccctgccccctgggctcgattatgggcccttcaggatggatttgccaatcttgaatgtgtgaatgacaactactggtttgggagggacaaaagctgtgaatattgctttgatgaaccactgctgaaaagaacagataaataccgaacatacagcaagaaacactttcggattttcagggaagtgggtcctaaaaactcttacattgcatacatagaagatcacagtggcaatggaacctttgtaaatacagagcttgtagggaaaggaaaacgccgtcctttgaataacaattctgaaattgcactgtcactaagcagaaataaagagaaaatacttaaaatctactctctcagctga

SEQ ID NO: 116986 - DNA, 1971 bp, Homo sapiens
  Payload ID: 2826
  Gene Symbol: CHEK2
  Gene Name: checkpoint kinase 2
  Uniprot ID: O96017
  ENST ID: ENST00000382580
  CDS Start-End: 77-1837
atctgcaggtttagcgccactctgctggctgaggctgcggagagtgtgcggctccaggtgggctcacgcggtcgtgatgtctcgggagtcggatgttgaggctcagcagtctcatggcagcagtgcctgttcacagccccatggcagcgttacccagtcccaaggctcctcctcacagtcccagggcatatccagctcctctaccagcacgatgccaaactccagccagtcctctcactccagctctgggacactgagctccttagagacagtgtccactcaggaactctattctattcctgaggaccaagaacctgaggaccaagaacctgaggagcctacccctgccccctgggctcgattatgggcccttcaggatggatttgccaatcttgagacagagtctggccatgttacccaatctgatcttgaactcctgctgtcatctgatcctcctgcctcagcctcccaaagtgctgggataagaggtgtgaggcaccatccccggccagtttgcagtctaaaatgtgtgaatgacaactactggtttgggagggacaaaagctgtgaatattgctttgatgaaccactgctgaaaagaacagataaataccgaacatacagcaagaaacactttcggattttcagggaagtgggtcctaaaaactcttacattgcatacatagaagatcacagtggcaatggaacctttgtaaatacagagcttgtagggaaaggaaaacgccgtcctttgaataacaattctgaaattgcactgtcactaagcagaaataaagtttttgtcttttttgatctgactgtagatgatcagtcagtttatcctaaggcattaagagatgaatacatcatgtcaaaaactcttggaagtggtgcctgtggagaggtaaagctggctttcgagaggaaaacatgtaagaaagtagccataaagatcatcagcaaaaggaagtttgctattggttcagcaagagaggcagacccagctctcaatgttgaaacagaaatagaaattttgaaaaagctaaatcatccttgcatcatcaagattaaaaacttttttgatgcagaagattattatattgttttggaattgatggaagggggagagctgtttgacaaagtggtggggaataaacgcctgaaagaagctacctgcaagctctatttttaccagatgctcttggctgtgcagtaccttcatgaaaacggtattatacaccgtgacttaaagccagagaatgttttactgtcatctcaagaagaggactgtcttataaagattactgattttgggcactccaagattttgggagagacctctctcatgagaaccttatgtggaacccccacctacttggcgcctgaagttcttgtttctgttgggactgctgggtataaccgtgctgtggactgctggagtttaggagttattctttttatctgccttagtgggtatccacctttctctgagcataggactcaagtgtcactgaaggatcagatcaccagtggaaaatacaacttcattcctgaagtctgggcagaagtctcagagaaagctctggaccttgtcaagaagttgttggtagtggatccaaaggcacgttttacgacagaagaagccttaagacacccgtggcttcaggatgaagacatgaagagaaagtttcaagatcttctgtctgaggaaaatgaatccacagctctaccccaggttctagcccagccttctactagtcgaaagcggccccgtgaaggggaagccgagggtgccgagaccacaaagcgcccagctgtgtgtgctgctgtgttgtgaactccgtggtttgaacacgaaagaaatgtaccttctttcactctgtcatctttcttttctttgagtctgtttttttatagtttgtattttaattatgggaataattgctttttcacagtcactgatgtacaatt

SEQ ID NO: 116987 - DNA, 713 bp, Homo sapiens
  Payload ID: 2826
  Gene Symbol: CHEK2
  Gene Name: checkpoint kinase 2
  ENST ID: ENST00000398017
  CDS Start-End: 198-713
gcggagagtgtgcggctccaggtgggctcacgcgatactggatttcaccatggtgcccaggctggtcttgaattcctgggctcaagcaatctacctgcgttggcctcccaaagtgctgggattacagacatgaaccaccacacctggcagaacctttgtgaaagatctcaatttaatatggaaataaaaaaatttgtatgctgaggctgctaacgtctatggtcgtgatgtctcgggagtcggatgttgaggctcagcagtctcatggcagcagtgcctgttcacagccccatggcagcgttacccagtcccaaggctcctcctcacagtcccagggcatatccagctcctctaccagcacgatgccaaactccagccagtcctctcactccagctctgggacactgagctccttagagacagtgtccactcaggaactctattctattcctgaggaccaagaacctgaggaccaagaacctgaggagcctacccctgccccctgggctcgattatgggcccttcaggatggatttgccaatcttgaatgtgtgaatgacaactactggtttgggagggacaaaagctgtgaatattgctttgatgaaccactgctgaaaagaacagataaataccgaacatacagcaagaaacactttcggattttcagggaagtgggtcctaaaaactcttacattgcatacatagaagat

SEQ ID NO: 116988 - DNA, 1545 bp, Homo sapiens
  Payload ID: 2826
  Gene Symbol: CHEK2
  Gene Name: checkpoint kinase 2
  Uniprot ID: O96017
  ENST ID: ENST00000402731
  CDS Start-End: 1-1545
atgtctcgggagtcggatgttgaggctcagcagtctcatggcagcagtgcctgttcacagccccatggcagcgttacccagtcccaaggctcctcctcacagtcccagggcatatccagctcctctaccagcacgatgccaaactccagccagtcctctcactccagctctgggacactgagctccttagagacagtgtccactcaggaactctattctattcctgaggaccaagaacctgaggaccaagaacctgaggagcctacccctgccccctgggctcgattatgggcccttcaggatggatttgccaatcttgaatgtgtgaatgacaactactggtttgggagggacaaaagctgtgaatattgctttgatgaaccactgctgaaaagaacagataaataccgaacatacagcaagaaacactttcggattttcagggaagtgggtcctaaaaactcttacattgcatacatagaagatcacagtggcaatggaacctttgtaaatacagagcttgtagggaaaggaaaacgccgtcctttgaataacaattctgaaattgcactgtcactaagcagaaataaagtttttgtcttttttgatctgactgtagatgatcagtcagtttatcctaaggcattaagagatgaatacatcatgtcaaaaactcttggaagtggtgcctgtggagaggtaaagctggctttcgagaggaaaacatgtaagaaagtagccataaagatcatcagcaaaaggaagtttgctattggttcagcaagagaggcagacccagctctcaatgttgaaacagaaatagaaattttgaaaaagctaaatcatccttgcatcatcaagattaaaaacttttttgatgcagaagattattatattgttttggaattgatggaagggggagagctgtttgacaaagtggtggggaataaacgcctgaaagaagctacctgcaagctctatttttaccagatgctcttggctgtgcagattactgattttgggcactccaagattttgggagagacctctctcatgagaaccttatgtggaacccccacctacttggcgcctgaagttcttgtttctgttgggactgctgggtataaccgtgctgtggactgctggagtttaggagttattctttttatctgccttagtgggtatccacctttctctgagcataggactcaagtgtcactgaaggatcagatcaccagtggaaaatacaacttcattcctgaagtctgggcagaagtctcagagaaagctctggaccttgtcaagaagttgttggtagtggatccaaaggcacgttttacgacagaagaagccttaagacacccgtggcttcaggatgaagacatgaagagaaagtttcaagatcttctgtctgaggaaaatgaatccacagctctaccccaggttctagcccagccttctactagtcgaaagcggccccgtgaaggggaagccgagggtgccgagaccacaaagcgcccagctgtgtgtgctgctgtgttgtga

SEQ ID NO: 116989 - DNA, 1359 bp, Homo sapiens
  Payload ID: 2826
  Gene Symbol: CHEK2
  Gene Name: checkpoint kinase 2
  Uniprot ID: O96017
  ENST ID: ENST00000403642
  CDS Start-End: 1-1359
atgtctcgggagtcggatgttgaggctcagcagtctcatggcagcagtgcctgttcacagccccatggcagcgttacccagtcccaaggctcctcctcacagtcccagggcatatccagctcctctaccagcacgatgccaaactccagccagtcctctcactccagctctgggacactgagctccttagagacagtgtccactcaggaactctattctattcctgaggaccaagaacctgaggaccaagaacctgaggagcctacccctgccccctgggctcgattatgggcccttcaggatggatttgccaatcttgtttttgtcttttttgatctgactgtagatgatcagtcagtttatcctaaggcattaagagatgaatacatcatgtcaaaaactcttggaagtggtgcctgtggagaggtaaagctggctttcgagaggaaaacatgtaagaaagtagccataaagatcatcagcaaaaggaagtttgctattggttcagcaagagaggcagacccagctctcaatgttgaaacagaaatagaaattttgaaaaagctaaatcatccttgcatcatcaagattaaaaacttttttgatgcagaagattattatattgttttggaattgatggaagggggagagctgtttgacaaagtggtggggaataaacgcctgaaagaagctacctgcaagctctatttttaccagatgctcttggctgtgcagtaccttcatgaaaacggtattatacaccgtgacttaaagccagagaatgttttactgtcatctcaagaagaggactgtcttataaagattactgattttgggcactccaagattttgggagagacctctctcatgagaaccttatgtggaacccccacctacttggcgcctgaagttcttgtttctgttgggactgctgggtataaccgtgctgtggactgctggagtttaggagttattctttttatctgccttagtgggtatccacctttctctgagcataggactcaagtgtcactgaaggatcagatcaccagtggaaaatacaacttcattcctgaagtctgggcagaagtctcagagaaagctctggaccttgtcaagaagttgttggtagtggatccaaaggcacgttttacgacagaagaagccttaagacacccgtggcttcaggatgaagacatgaagagaaagtttcaagatcttctgtctgaggaaaatgaatccacagctctaccccaggttctagcccagccttctactagtcgaaagcggccccgtgaaggggaagccgagggtgccgagaccacaaagcgcccagctgtgtgtgctgctgtgttgtga

SEQ ID NO: 116990 - DNA, 1785 bp, Homo sapiens
  Payload ID: 2826
  Gene Symbol: CHEK2
  Gene Name: checkpoint kinase 2
  Uniprot ID: O96017
  ENST ID: ENST00000404276
  CDS Start-End: 1-1632
atgtctcgggagtcggatgttgaggctcagcagtctcatggcagcagtgcctgttcacagccccatggcagcgttacccagtcccaaggctcctcctcacagtcccagggcatatccagctcctctaccagcacgatgccaaactccagccagtcctctcactccagctctgggacactgagctccttagagacagtgtccactcaggaactctattctattcctgaggaccaagaacctgaggaccaagaacctgaggagcctacccctgccccctgggctcgattatgggcccttcaggatggatttgccaatcttgaatgtgtgaatgacaactactggtttgggagggacaaaagctgtgaatattgctttgatgaaccactgctgaaaagaacagataaataccgaacatacagcaagaaacactttcggattttcagggaagtgggtcctaaaaactcttacattgcatacatagaagatcacagtggcaatggaacctttgtaaatacagagcttgtagggaaaggaaaacgccgtcctttgaataacaattctgaaattgcactgtcactaagcagaaataaagtttttgtcttttttgatctgactgtagatgatcagtcagtttatcctaaggcattaagagatgaatacatcatgtcaaaaactcttggaagtggtgcctgtggagaggtaaagctggctttcgagaggaaaacatgtaagaaagtagccataaagatcatcagcaaaaggaagtttgctattggttcagcaagagaggcagacccagctctcaatgttgaaacagaaatagaaattttgaaaaagctaaatcatccttgcatcatcaagattaaaaacttttttgatgcagaagattattatattgttttggaattgatggaagggggagagctgtttgacaaagtggtggggaataaacgcctgaaagaagctacctgcaagctctatttttaccagatgctcttggctgtgcagtaccttcatgaaaacggtattatacaccgtgacttaaagccagagaatgttttactgtcatctcaagaagaggactgtcttataaagattactgattttgggcactccaagattttgggagagacctctctcatgagaaccttatgtggaacccccacctacttggcgcctgaagttcttgtttctgttgggactgctgggtataaccgtgctgtggactgctggagtttaggagttattctttttatctgccttagtgggtatccacctttctctgagcataggactcaagtgtcactgaaggatcagatcaccagtggaaaatacaacttcattcctgaagtctgggcagaagtctcagagaaagctctggaccttgtcaagaagttgttggtagtggatccaaaggcacgttttacgacagaagaagccttaagacacccgtggcttcaggatgaagacatgaagagaaagtttcaagatcttctgtctgaggaaaatgaatccacagctctaccccaggttctagcccagccttctactagtcgaaagcggccccgtgaaggggaagccgagggtgccgagaccacaaagcgcccagctgtgtgtgctgctgtgttgtgaactccgtggtttgaacacgaaagaaatgtaccttctttcactctgtcatctttcttttctttgagtctgtttttttatagtttgtattttaattatgggaataattgctttttcacagtcactgatgtacaattaaaaacctgatggaacctg

SEQ ID NO: 116991 - DNA, 1959 bp, Homo sapiens
  Payload ID: 2826
  Gene Symbol: CHEK2
  Gene Name: checkpoint kinase 2
  Uniprot ID: O96017
  ENST ID: ENST00000405598
  CDS Start-End: 193-1824
ggagagtgtgcggctccaggtgggctcacgcgatactggatttcaccatggtgcccaggctggtcttgaattcctgggctcaagcaatctacctgcgttggcctcccaaagtgctgggattacagacatgaaccaccacacctggcagaacctttgtatcttgaaagctgtgtaaatacaatcagtgtcgtgatgtctcgggagtcggatgttgaggctcagcagtctcatggcagcagtgcctgttcacagccccatggcagcgttacccagtcccaaggctcctcctcacagtcccagggcatatccagctcctctaccagcacgatgccaaactccagccagtcctctcactccagctctgggacactgagctccttagagacagtgtccactcaggaactctattctattcctgaggaccaagaacctgaggaccaagaacctgaggagcctacccctgccccctgggctcgattatgggcccttcaggatggatttgccaatcttgaatgtgtgaatgacaactactggtttgggagggacaaaagctgtgaatattgctttgatgaaccactgctgaaaagaacagataaataccgaacatacagcaagaaacactttcggattttcagggaagtgggtcctaaaaactcttacattgcatacatagaagatcacagtggcaatggaacctttgtaaatacagagcttgtagggaaaggaaaacgccgtcctttgaataacaattctgaaattgcactgtcactaagcagaaataaagtttttgtcttttttgatctgactgtagatgatcagtcagtttatcctaaggcattaagagatgaatacatcatgtcaaaaactcttggaagtggtgcctgtggagaggtaaagctggctttcgagaggaaaacatgtaagaaagtagccataaagatcatcagcaaaaggaagtttgctattggttcagcaagagaggcagacccagctctcaatgttgaaacagaaatagaaattttgaaaaagctaaatcatccttgcatcatcaagattaaaaacttttttgatgcagaagattattatattgttttggaattgatggaagggggagagctgtttgacaaagtggtggggaataaacgcctgaaagaagctacctgcaagctctatttttaccagatgctcttggctgtgcagtaccttcatgaaaacggtattatacaccgtgacttaaagccagagaatgttttactgtcatctcaagaagaggactgtcttataaagattactgattttgggcactccaagattttgggagagacctctctcatgagaaccttatgtggaacccccacctacttggcgcctgaagttcttgtttctgttgggactgctgggtataaccgtgctgtggactgctggagtttaggagttattctttttatctgccttagtgggtatccacctttctctgagcataggactcaagtgtcactgaaggatcagatcaccagtggaaaatacaacttcattcctgaagtctgggcagaagtctcagagaaagctctggaccttgtcaagaagttgttggtagtggatccaaaggcacgttttacgacagaagaagccttaagacacccgtggcttcaggatgaagacatgaagagaaagtttcaagatcttctgtctgaggaaaatgaatccacagctctaccccaggttctagcccagccttctactagtcgaaagcggccccgtgaaggggaagccgagggtgccgagaccacaaagcgcccagctgtgtgtgctgctgtgttgtgaactccgtggtttgaacacgaaagaaatgtaccttctttcactctgtcatctttcttttctttgagtctgtttttttatagtttgtattttaattatgggaataattgctttttcacagtcactgatgtacaatta

SEQ ID NO: 116992 - DNA, 722 bp, Homo sapiens
  Payload ID: 2826
  Gene Symbol: CHEK2
  Gene Name: checkpoint kinase 2
  ENST ID: ENST00000454252
  CDS Start-End: 1-138
tcatctgatcctcctgcctcagcctcccaaagtgctgggataagaggtgtgaggcaccatccccggccagtttgcagtctaatagagacggggtttcaccgtgttagccaggatggtctccatctcctgacctcgtgatcgcccgcctcggcctcccaaagtgctgggaatacagatagatagggtctcactctcactctggagtgagtggtgcaaccacagcttagtgcagcctcgaccttcaggctcaagtgatcctccttccttggcctcccaaagtactgggattacaggtgtgagccatcgtgcccagcccatatggtcttgctctgttgcccaggttggagtacagtggcaggatcacagcccattgtagcatcagcttatcttgctcaagtgatcctcctccttcagcctcctgagtagctggactacagaatgtgtgaatgacaactactggtttgggagggacaaaagctgtgaatattgctttgatgaaccactgctgaaaagaacagataaataccgaacatacagcaagaaacactttcggattttcagggaagtgggtcctaaaaactcttacattgcatacatagaagatcacagtggcaatggaacctttgtaaatacagagcttgtagggaaaggaaaacgccgtcctttgaataacaattctgaaattgcactgtcactaagcagaaataaaggtaatattatta

SEQ ID NO: 116993 - DNA, 752 bp, Homo sapiens
  Payload ID: 2826
  Gene Symbol: CHEK2
  Gene Name: checkpoint kinase 2
  ENST ID: ENST00000425190
  CDS Start-End: 388-752
gctgaggctgcggagagtgtgcggctccaggtgggctcacgcgaatgtgtgaatgacaactactggtttgggagggacaaaagctgtgaatattgctttgatgaaccactgctgaaaagaacagataaataccgaacatacagcaagaaacactttcggattttcagggaagtgggtcctaaaaactcttacattgcatacatagaagatcacagtggcaatggaacctttgtaaatacagagcttgtagggaaaggaaaacgccgtcctttgaataacaattctgaaattgcactgtcactaagcagaaataaagtttttgtcttttttgatctgactgtagatgatcagtcagtttatcctaaggcattaagagatgaatacatcatgtcaaaaactcttggaagtggtgcctgtggagaggtaaagctggctttcgagaggaaaacatgtaagaaagtagccataaagatcatcagcaaaaggaagtttgctattggttcagcaagagaggcagacccagctctcaatgttgaaacagaaatagaaattttgaaaaagctaaatcatccttgcatcatcaagattaaaaacttttttgatgcagaagattattatattgttttggaattgatggaagggggagagctgtttgacaaagtggtggggaataaacgcctgaaagaagctacctgcaagctctatttttaccagatgctcttggctgtgcagtaccttcatgaaaacggtat

SEQ ID NO: 116994 - DNA, 588 bp, Homo sapiens
  Payload ID: 2826
  Gene Symbol: CHEK2
  Gene Name: checkpoint kinase 2
  ENST ID: ENST00000456369
  CDS Start-End: 1-434
agatcatcagcaaaaggaagtttgctattggttcagcaagagaggcagacccagctctcaatgttgaaacagaaatagaaattttgaaaaagctaaatcatccttgcatcatcaagattaaaaacttttttgatgcagaagattattatattgttttggaattgatggaagggggagagctgtttgacaaagtggtggggaataaacgcctgaaagaagctacctgcaagctctatttttaccagatgctcttggctgtgcaggatgaagacatgaagagaaagtttcaagatcttctgtctgaggaaaatgaatccacagctctaccccaggttctagcccagccttctactagtcgaaagcggccccgtgaaggggaagccgagggtgccgagaccacaaagcgcccagctgtgtgtgctgctgtgttgtgaactccgtggtttgaacacgaaagaaatgtaccttctttcactctgtcatctttcttttctttgagtctgtttttttatagtttgtattttaattatgggaataattgctttttcacagtcactgatgtacaattaaaaacctgatggaacctgg

SEQ ID NO: 116995 - DNA, 553 bp, Homo sapiens
  Payload ID: 2826
  Gene Symbol: CHEK2
  Gene Name: checkpoint kinase 2
  ENST ID: ENST00000439346
  CDS Start-End: 1-174
ttcagggaagtgggtcctaaaaactcttacattgcatacatagaagatcacagtggcaatggaacctttgtaaatacagagcttgtagggaaaggaaaacgccgtcctttgaataacaattctgaaattgcactgtcactaagcagaaataaagtggtgcctgtggagaggtaaagctggctttcgagaggaaaacatgtaagaaagtagccataaagatcatcagcaaaaggaagtttgctattggttcagcaagagaggcagacccagctctcaatgttgaaacagaaatagaaattttgaaaaagctaaatcatccttgcatcatcaagattaaaaacttttttgatgcagaagattattatattgttttggaattgatggaagggggagagctgtttgacaaagtggtggggaataaacgcctgaaagaagctacctgcaagctctatttttaccagatgctcttggctgtgcaggtaaaagaagccctcaattcttttgacagctgcctttcttttagttgaattactccctgaattaggcagaaatc

SEQ ID NO: 116996 - DNA, 900 bp, Homo sapiens
  Payload ID: 2826
  Gene Symbol: CHEK2
  Gene Name: checkpoint kinase 2
  ENST ID: ENST00000447421
  CDS Start-End: 7-900
gtcgtgatgtctcgggagtcggatgttgaggctcagcagtctcatggcagcagtgcctgttcacagccccatggcagcgttacccagtcccaaggctcctcctcacagtcccagggcatatccagctcctctaccagcacgatgccaaactccagccagtcctctcactccagctctgggacactgagctccttagagacagtgtccactcaggaactctattctattcctgaggaccaagaacctgaggaccaagaacctgaggagcctacccctgccccctgggctcgattatgggcccttcaggatggatttgccaatcttgaatgtgtgaatgacaactactggtttgggagggacaaaagctgtgaatattgctttgatgaaccactgctgaaaagaacagataaataccgaacatacagcaagaaacactttcggattttcagggaggaaaatttgtcctgtccttacagaatatggtttaatggtgcctgtggagaggtaaagctggctttcgagaggaaaacatgtaagaaagtagccataaagatcatcagcaaaaggaagtttgctattggttcagcaagagaggcagacccagctctcaatgttgaaacagaaatagaaattttgaaaaagctaaatcatccttgcatcatcaagattaaaaacttttttgatgcagaagattattatattgttttggaattgatggaagggggagagctgtttgacaaagtggtggggaataaacgcctgaaagaagctacctgcaagctctatttttaccagatgctcttggctgtgcagtaccttcatgaaaacggtattatacaccgtgacttaaagccagagaatgttttactgtcatctcaagaagaggactgtcttataaag

SEQ ID NO: 116997 - DNA, 2560 bp, Homo sapiens
  Payload ID: 2826
  Gene Symbol: CHEK2
  Gene Name: checkpoint kinase 2
  ENST ID: ENST00000416671
  CDS Start-End: 661-1284
cttccgccagccagatccgtcctcccctctcgcaggccagacctcgacgtgtctctcgcccgggcccgtttcccgaaaccgtcgctcgtaccagtccataaggctgaagtagtctcgagtggggtcaggtgcctgcagcgctcggcactgtgggcagaagaacctgtcctcccgcccggggccccatgggccgccgcagttccaacagcggggataattgcttcccgcctgcgacgcagcatcgcagcttagcggtctccttctgggaacccctgtcggccaaaacccccacacccggagcaaagccccggctctcccccgccacatctggccggcggcctatctagccgtggtcactcgtggggaaaagcaaagagagcgtctaaccagactaatgttgctgattggctggggagtcgagggggcgggatcacccgaggggaacccgggttctaagttccgctctcccttctaaactacaactcccaggaggcattgaggcggcgcctgacggccacatctgctgctcctcattggtccggcggcaggggagggggttttgattggctgagggtggagtttgtatctgcaggtttagcgccactctgctggctgaggctgcggagagtgtgcggctccaggtgggctcacgcggtcgtgatgtctcgggagtcggatgttgaggctcagcagtctcatggcagcagtgcctgttcacagccccatggcagcgttacccagtcccaaggctcctcctcacagtcccagggcatatccagctcctctaccagcacgatgccaaactccagccagtcctctcactccagctctgggacactgagctccttagagacagtgtccactcaggaactctattctattcctgaggaccaagaacctgaggaccaagaacctgaggagcctacccctgccccctgggctcgattatgggcccttcaggatggatttgccaatcttgaatgtgtgaatgacaactactggtttgggagggacaaaagctgtgaatattgctttgatgaaccactgctgaaaagaacagataaataccgaacatacagcaagaaacactttcggattttcagggaagtgggtcctaaaaactcttacattgcatacatagaagatcacagtggcaatggaacctttgtaaatacagagcttgtagggaaaggaaaacgccgtcctttgaataacaattctgaaattgcactgtcactaagcagaaataaagagaaaatacttaaaatctactctctcagctgattttcaaaaatacggcggggcgcggtggctcacgtctttaatcccagcactttgggaggccgaggctggcagatcacctgagtttttgtcttttttgatctgactgtagatgatcagtcagtttatcctaaggcattaagagatgaatacatcatgtcaaaaactcttggaagtggtgcctgtggagaggtaaagctggctttcgagaggaaaacatgtaagaaagtagccataaagatcatcagcaaaaggaagtttgctattggttcagcaagagaggcagacccagctctcaatgttgaaacagaaatagaaattttgaaaaagctaaatcatccttgcatcatcaagattaaaaacttttttgatgcagaagattattatattgttttggaattgatggaagggggagagctgtttgacaaagtggtggggaataaacgcctgaaagaagctacctgcaagctctatttttaccagatgctcttggctgtgcagtaccttcatgaaaacggtattatacaccgtgacttaaagccagagaatgttttactgtcatctcaagaagaggactgtcttataaagattactgattttgggcactccaagattttgggagagacctctctcatgagaaccttatgtggaacccccacctacttggcgcctgaagttcttgtttctgttgggactgctgggtataaccgtgctgtggactgctggagtttaggagttattctttttatctgccttagtgggtatccacctttctctgagcataggactcaagtgtcactgaaggatcagatcaccagtggaaaatacaacttcattcctgaagtctgggcagaagtctcagagaaagctctggaccttgtcaagaagttgttggtagtggatccaaaggcacgttttacgacagaagaagccttaagacacccgtggcttcaggatgaagacatgaagagaaagtttcaagatcttctgtctgaggaaaatgaatccacagctctaccccaggttctagcccagccttctactagtcgaaagcggccccgtgaaggggaagccgagggtgccgagaccacaaagcgcccagctgtgtgtgctgctgtgttgtgaactccgtggtttgaacacgaaagaaatgtaccttctttcactctgtcatctttcttttctttgagtctgtttttttatagtttgtattttaattatgggaataattgctttttcacagtcactgatgtacaattaaaaacctgatggaacctgg

SEQ ID NO: 116998 - DNA, 1349 bp, Homo sapiens
  Payload ID: 2826
  Gene Symbol: CHEK2
  Gene Name: checkpoint kinase 2
  ENST ID: ENST00000433028
  CDS Start-End: 45-530
ggctgcggagagtgtgcggctccaggtgggctcacgcggtcgtgatgtctcgggagtcggatgttgaggctcagcagtctcatggcagcagtgcctgttcacagccccatggcagcgttacccagtcccaaggctcctcctcacagtcccagggcatatccagctcctctaccagcacgatgccaaactccagccagtcctctcactccagctctgggacactgagctccttagagacagtgtccactcaggaactctattctattcctgaggaccaagaacctgaggaccaagaacctgaggagcctacccctgccccctgggctcgattatgggcccttcaggatggatttgccaatcttgaatgtgtgaatgacaactactggtttgggagggacaaaagctgtgaatattgctttgatgaaccactgctgaaaagaacagataaataccgaacatacagcaagaaacactttcggattttcagggaggaaaatttgtcctgtccttacagaatatggtttaagtgagtaaagatgagtaagttgctgggcgtggtggctcacacctgtaatcccagcactttgggaggctgaggcggatggatcacctgaggtcaggagttcgagaccagcctgacccacatggagaaaccctgtctctactaaaaatacaaaataagccgggcatggtggtgcatgcctgtaatcccagctattcgggaggctgaggcaggagaatcgcttgaacccgggaggcagaggttgcagtgagccaagatcgtgccattgcactctagcctgggcaacaagagtgaaactctgtctcaaaacaaaaaaaaagatgatttttgtcttttttgatctgactgtagatgatcagtcagtttatcctaaggcattaagagatgaatacatcatgtcaaaaactcttggaagtggtgcctgtggagaggtaaagctggctttcgagaggaaaacatgtaagaaagtagccataaagatcatcagcaaaaggaagtttgctattggttcagcaagagaggcagacccagctctcaatgttgaaacagaaatagaaattttgaaaaagctaaatcatccttgcatcatcaagattaaaaacttttttgatgcagaagattattatattgttttggaattgatggaagggggagagctgtttgacaaagtggtggggaataaacgcctgaaagaagctacctgcaagctctatttttaccagatgctcttggctgtgcagtaccttcatgaaaacggtattatacaccgtgacttaaagccagagaatgttttactgtcatctcaagaagaggactgtcttataaa

SEQ ID NO: 116999 - DNA, 1580 bp, Homo sapiens
  Payload ID: 2826
  Gene Symbol: CHEK2
  Gene Name: checkpoint kinase 2
  Uniprot ID: O96017
  ENST ID: ENST00000433728
  CDS Start-End: 1-870
atgtctcgggagtcggatgttgaggctcagcagtctcatggcagcagtgcctgttcacagccccatggcagcgttacccagtcccaaggctcctcctcacagtcccagggcatatccagctcctctaccagcacgatgccaaactccagccagtcctctcactccagctctgggacactgagctccttagagacagtgtccactcaggaactctattctattcctgaggaccaagaacctgaggaccaagaacctgaggagcctacccctgccccctgggctcgattatgggcccttcaggatggatttgccaatcttgaatgtgtgaatgacaactactggtttgggagggacaaaagctgtgaatattgctttgatgaaccactgctgaaaagaacagataaataccgaacatacagcaagaaacactttcggattttcagggaagtgggtcctaaaaactcttacattgcatacatagaagatcacagtggcaatggaacctttgtaaatacagagcttgtagggaaaggaaaacgccgtcctttgaataacaattctgaaattgcactgtcactaagcagaaataaagtttttgtcttttttgatctgactgtagatgatcagtcagtttatcctaaggcattaagagatgaatacatcatgtcaaaaactcttggaagtggtgcctgtggagaggtaaagctggctttcgagaggaaaacatgtaagaaagtagccataaagatcatcagcaaaaggaagtttgctattggttcagcaagagaggcagacccagctctcaatgttgaaacagaaatagaaattttgaaaaagctaaatcatgatggaagggggagagctgtttgacaaagtggtggggaataaacgcctgaaagaagctacctgcaagctctatttttaccagatgctcttggctgtgcagtaccttcatgaaaacggtattatacaccgtgacttaaagccagagaatgttttactgtcatctcaagaagaggactgtcttataaagattactgattttgggcactccaagattttgggagagacctctctcatgagaaccttatgtggaacccccacctacttggcgcctgaagttcttgtttctgttgggactgctgggtataaccgtgctgtggactgctggagtttaggagttattctttttatctgccttagtgggtatccacctttctctgagcataggactcaagtgtcactgaaggatcagatcaccagtggaaaatacaacttcattcctgaagtctgggcagaagtctcagagaaagctctggaccttgtcaagaagttgttggtagtggatccaaaggcacgttttacgacagaagaagccttaagacacccgtggcttcaggatgaagacatgaagagaaagtttcaagatcttctgtctgaggaaaatgaatccacagctctaccccaggttctagcccagccttctactagtcgaaagcggccccgtgaaggggaagccgagggtgccgagaccacaaagcgcccagctgtgtgtgctgctgtgttgtgaactccgtggt

SEQ ID NO: 117000 - DNA, 1532 bp, Homo sapiens
  Payload ID: 2826
  Gene Symbol: CHEK2
  Gene Name: checkpoint kinase 2
  Uniprot ID: O96017
  ENST ID: ENST00000448511
  CDS Start-End: 1-498
atgtctcgggagtcggatgttgaggctcagcagtctcatggcagcagtgcctgttcacagccccatggcagcgttacccagtcccaaggctcctcctcacagtcccagggcatatccagctcctctaccagcacgatgccaaactccagccagtcctctcactccagctctgggacactgagctccttagagacagtgtccactcaggaactctattctattcctgaggaccaagaacctgaggaccaagaacctgaggagcctacccctgccccctgggctcgattatgggcccttcaggatggatttgccaatcttgaatgtgtgaatgacaactactggtttgggagggacaaaagctgtgaatattgctttgatgaaccactgctgaaaagaacagataaataccgaacatacagcaagaaacactttcggattttcagggaggaaaatttgtcctgtccttacagaatatggtttaatttttgtcttttttgatctgactgtagatgatcagtcagtttatcctaaggcattaagagatgaatacatcatgtcaaaaactcttggaagtggtgcctgtggagaggtaaagctggctttcgagaggaaaacatgtaagaaagtagccataaagatcatcagcaaaaggaagtttgctattggttcagcaagagaggcagacccagctctcaatgttgaaacagaaatagaaattttgaaaaagctaaatcatccttgcatcatcaagattaaaaacttttttgatgcagaagattattatattgttttggaattgatggaagggggagagctgtttgacaaagtggtggggaataaacgcctgaaagaagctacctgcaagctctatttttaccagatgctcttggctgtgcagtaccttcatgaaaacggtattatacaccgtgacttaaagccagagaatgttttactgtcatctcaagaagaggactgtcttataaagattactgattttgggcactccaagattttgggagagacctctctcatgagaaccttatgtggaacccccacctacttggcgcctgaagttcttgtttctgttgggactgctgggtataaccgtgctgtggactgctggagtttaggagttattctttttatctgccttagtgggtatccacctttctctgagcataggactcaagtgtcactgaaggatcagatcaccagtggaaaatacaacttcattcctgaagtctgggcagaagtctcagagaaagctctggaccttgtcaagaagttgttggtagtggatccaaaggcacgttttacgacagaagaagccttaagacacccgtggcttcaggatgaagacatgaagagaaagtttcaagatcttctgtctgaggaaaatgaatccacagctctaccccaggttctagcccagccttctactagtcgaaagcggccccgtgaaggggaagccgagggtgccgagaccacaaagcgcccagctgtgtgtgctgctgtgttgtgaactccgtggt

SEQ ID NO: 117001 - DNA, 906 bp, Homo sapiens
  Payload ID: 2826
  Gene Symbol: CHEK2
  Gene Name: checkpoint kinase 2
  ENST ID: ENST00000439200
  CDS Start-End: 22-906
aggtgggctcacgcggtcgtgatgtctcgggagtcggatgttgaggctcagcagtctcatggcagcagtgcctgttcacagccccatggcagcgttacccagtcccaaggctcctcctcacagtcccagggcatatccagctcctctaccagcacgatgccaaactccagccagtcctctcactccagctctgggacactgagctccttagagacagtgtccactcaggaactctattctattcctgaggaccaagaacctgaggaccaagaacctgaggagcctacccctgccccctgggctcgattatgggcccttcaggatggatttgccaatcttgagacagagtctggccatgttacccaatctgatcttgaactcctgctgtcatctgatcctcctgcctcagcctcccaaagtgctgggataagagaatgtgtgaatgacaactactggtttgggagggacaaaagctgtgaatattgctttgatgaaccactgctgaaaagaacagataaataccgaacatacagcaagaaacactttcggattttcagggaagtgggtcctaaaaactcttacattgcatacatagaagatcacagtggcaatggaacctttgtaaatacagagcttgtagggaaaggaaaacgccgtcctttgaataacaattctgaaattgcactgtcactaagcagaaataaagtttttgtcttttttgatctgactgtagatgatcagtcagtttatcctaaggcattaagagatgaatacatcatgtcaaaaactcttggaagtggtgcctgtggagaggtaaagctggctttcgagaggaaaacatgtaagaaagtagccataaagatcatcagcaaaaggaagtttgctattggttcagcaagagaggca

SEQ ID NO: 117002 - DNA, 1551 bp, Homo sapiens
  Payload ID: 2826
  Gene Symbol: CHEK2
  Gene Name: checkpoint kinase 2
  Uniprot ID: O96017
  ENST ID: ENST00000417588
  CDS Start-End: 1-612
atgtctcgggagtcggatgttgaggctcagcagtctcatggcagcagtgcctgttcacagccccatggcagcgttacccagtcccaaggctcctcctcacagtcccagggcatatccagctcctctaccagcacgatgccaaactccagccagtcctctcactccagctctgggacactgagctccttagagacagtgtccactcaggaactctattctattcctgaggaccaagaacctgaggaccaagaacctgaggagcctacccctgccccctgggctcgattatgggcccttcaggatggatttgccaatcttgaatgtgtgaatgacaactactggtttgggagggacaaaagctgtgaatattgctttgatgaaccactgctgaaaagaacagataaataccgaacatacagcaagaaacactttcggattttcagggaagtgggtcctaaaaactcttacattgcatacatagaagatcacagtggcaatggaacctttgtaaatacagagcttgtagggaaaggaaaacgccgtcctttgaataacaattctgaaattgcactgtcactaagcagaaataaagtggtgcctgtggagaggtaaagctggctttcgagaggaaaacatgtaagaaagtagccataaagatcatcagcaaaaggaagtttgctattggttcagcaagagaggcagacccagctctcaatgttgaaacagaaatagaaattttgaaaaagctaaatcatccttgcatcatcaagattaaaaacttttttgatgcagaagattattatattgttttggaattgatggaagggggagagctgtttgacaaagtggtggggaataaacgcctgaaagaagctacctgcaagctctatttttaccagatgctcttggctgtgcagtaccttcatgaaaacggtattatacaccgtgacttaaagccagagaatgttttactgtcatctcaagaagaggactgtcttataaagattactgattttgggcactccaagattttgggagagacctctctcatgagaaccttatgtggaacccccacctacttggcgcctgaagttcttgtttctgttgggactgctgggtataaccgtgctgtggactgctggagtttaggagttattctttttatctgccttagtgggtatccacctttctctgagcataggactcaagtgtcactgaaggatcagatcaccagtggaaaatacaacttcattcctgaagtctgggcagaagtctcagagaaagctctggaccttgtcaagaagttgttggtagtggatccaaaggcacgttttacgacagaagaagccttaagacacccgtggcttcaggatgaagacatgaagagaaagtttcaagatcttctgtctgaggaaaatgaatccacagctctaccccaggttctagcccagccttctactagtcgaaagcggccccgtgaaggggaagccgagggtgccgagaccacaaagcgcccagctgtgtgtgctgctgtgttgtgaactccgtggt

SEQ ID NO: 117003 - DNA, 984 bp, Homo sapiens
  Payload ID: 2826
  Gene Symbol: CHEK2
  Gene Name: checkpoint kinase 2
  ENST ID: ENST00000434810
  CDS Start-End: 1-830
ctattggttcagcaagagaggcagacccagctctcaatgttgaaacagaaatagaaattttgaaaaagctaaatcatccttgcatcatcaagattaaaaacttttttgatgcagaagattattatattgttttggaattgatggaagggggagagctgtttgacaaagtggtggggaataaacgcctgaaagaagctacctgcaagctctatttttaccagatgctcttggctgtgcagtaccttcatgaaaacggtattatacaccgtgacttaaagccagagaatgttttactgtcatctcaagaagaggactgtcttataaagattactgattttgggcactccaagattttgggagagacctctctcatgagaaccttatgtggaacccccacctacttggcgcctgaagttcttgtttctgttgggactgctgggtataaccgtgctgtggactgctggagtttaggagttattctttttatctggactcaagtgtcactgaaggatcagatcaccagtggaaaatacaacttcattcctgaagtctgggcagaagtctcagagaaagctctggaccttgtcaagaagttgttggtagtggatccaaaggcacgttttacgacagaagaagccttaagacacccgtggcttcaggatgaagacatgaagagaaagtttcaagatcttctgtctgaggaaaatgaatccacagctctaccccaggttctagcccagccttctactagtcgaaagcggccccgtgaaggggaagccgagggtgccgagaccacaaagcgcccagctgtgtgtgctgctgtgttgtgaactccgtggtttgaacacgaaagaaatgtaccttctttcactctgtcatctttcttttctttgagtctgtttttttatagtttgtattttaattatgggaataattgctttttcacagtcactgatgtacaattaaaaacctgatggaacctgg

SEQ ID NO: 117004 - DNA, 425 bp, Homo sapiens
  Payload ID: 2826
  Gene Symbol: CHEK2
  Gene Name: checkpoint kinase 2
  ENST ID: ENST00000464581
  CDS Start-End: 13-425
caaacagggacaatggaaaggctgttatatggaattggtgcctgtggagaggtaaagctggctttcgagaggaaaacatgtaagaaagtagccataaagatcatcagcaaaaggaagtttgctattggttcagcaagagaggcagacccagctctcaatgttgaaacagaaatagaaattttgaaaaagctaaatcatccttgcatcatcaagattaaaaacttttttgatgcagaagattattatattgttttggaattgatggaagggggagagctgtttgacaaagtggtggggaataaacgcctgaaagaagctacctgcaagctctatttttaccagatgctcttggctgtgcagtaccttcatgaaaacggtattatacaccgtgacttaaagccagagaatgttttactgtcatctca

SEQ ID NO: 117005 - DNA, 11133 bp, Homo sapiens
  Payload ID: 2827
  Gene Symbol: CHFR
  Gene Name: checkpoint with forkhead and ring finger domains, E3 ubiquitin protein ligase
  Uniprot ID: Q96EP1
  ENST ID: ENST00000266880
  CDS Start-End: 65-1936
ctcttgacagcggcggcggcgcagccggttccgggttcggcgcggggcggggatgtgaatcccgatggagcggcccgaggaaggcaagcagtcgccgccgccgcagccctggggacggctcctgcgtctgggcgcggaggagggcgagccgcacgtcctcctgaggaagcgggagtggaccatcgggcggagacgaggttgcgacctttccttccccagcaataaactggtctctggagatcactgtagaattgtagtggatgaaaaatcaggtcaggtgacactggaagataccagcaccagtggaacagtgattaacaagctgaaggttgttaagaagcagacatgccctttacagactggggatgtcatctacttggtgtacaggaagaatgaaccggaacacaacgtggcatacctctatgaatctttaagtgaaaagcaaggcatgacacaagaatcctttgagatggtgccttgctgtgttgcccaggctggtctaaaactcctgggatcaagtgatcctcccaccttggcctcccaaagtattgtgattacagggtctgggggtggtggcatctcccctaaaggaagtggtccctctgtggcaagtgatgaagtctccagctttgcctcagctctcccagacagaaagactgcgtccttttcgtcgttggaaccccaggatcaggaggatttggagcccgtgaagaagaaaatgagaggagatggggaccttgacctgaacgggcagttgttggtcgcacaaccgcgtagaaatgcccaaaccgtccacgaggacgtcagagcagcggctgggaagccagacaagatggaggagacgctgacatgcatcatctgccaggacctgctgcacgactgcgtgagtttgcagccctgcatgcacacgttctgcgcggcttgctactcgggctggatggagcgctcgtccctgtgtcctacctgccgctgtcccgtggagcggatctgtaaaaaccacatcctcaacaacctcgtggaagcatacctcatccagcatccagacaagagtcgcagtgaagaagatgtgcaaagtatggatgccagaaataaaatcactcaagacatgctgcagcccaaagtcaggcggtctttttctgatgaagaagggagttcagaggacctgctggagctgtcagacgttgacagtgagtcctcagacattagccagccatacgtcgtgtgccggcagtgtcctgagtacagaaggcaggcggcgcagcctccccactgcccagcacccgagggcgagccaggagccccacaggccctgggggatgcaccctccacgtccgtcagcctgacgacagcagtccaggattacgtgtgccctctgcaaggaagccacgccctgtgcacctgctgcttccagcccatgcccgaccggagagcggagcgcgagcaggacccgcgtgtcgcccctcagcagtgtgcggtctgcctgcagcctttctgccacctgtactggggctgcacccggaccggctgctacggctgcctggccccgttttgtgagctcaacctgggtgacaagtgtctggacggcgtgctgaacaacaacagctacgagtcagacatcctgaagaattacctggcaaccagaggtttgacatggaaaaacatgttgaccgagagcctcgtggctctccagcggggagtgtttctgctgtctgattacagagtcacgggagacaccgttctgtgttactgctgtggcctgcgcagcttccgtgagctgacctatcagtatcggcagaacattcctgcttccgagttgccagtggccgtaacatcccgtcctgactgctactggggccgtaactgccgcactcaggtgaaagctcaccacgccatgaaattcaatcatatctgtgaacagacaaggttcaaaaactaagcatccagaggccctgagcagctttcagcactggaggtgaagagagcgtgtttttaaaatacagagacaagcacgtcaaggtgttttcacagccccctgagggaagggacgcagggtctccgacaggtgctctggggtgactcttctgtggagctttaccctctgagtgagaccctccccagagccccgggggccgcagcccgccctcctggtgagcgctgggcagggctcgtggtggcatcagcagcagagacgaagcctttctgtaacatgcggccgtcccgccgagaggggcagttttgctcttttgtacattttccgaaactacagttaaagcagaagtctgtttttaggaaaagtttcaagggagaagggcaagtttatcaaaaacattgtttcaggagaagggagcataagtttacagcctacaggacgtacacaatatcctgctgctgggaaaaccacagcattttatctattttttattttaataggtttggtgcttatcttctaataagatttaaatgtcacaaactgtagcacaaataatataatttataatttacaaattgactaaaattgggtatagtatggtatttgaaagaataagcatatgcttctgtttattaaaaaaagaaaccttccaatgtccaaaactgctaaccctcgacgtggccgccaagttagtcgctccttgctaaccggtgagtgaccgcggccccgagcctggggctggacgcaggtcccaggacatgctgctcccttgtgtgagtgaccgcggccccgagcctggggctggacgcaggtcccaggacgtgctgctcccttgtgtgagtgaccacggccccaagcccagggctggaggcaggtcccaggacgcgccgctccctcatgctgcccgggcccttcctccaagaccctacagagcctgaggggcaccttggcttccgcctgtgctagctttgccatgtcatctggaataatacttgaaattttgatttttggaaaaaaaagttttttatcttttgttgaaatcacctgttatccttgtttgtaaactgataacttttttgcttcttctcaggaatacagttttcaactgttgtcttgctcttgatagaaactgagaagcagcaatctgtatttgtggaggaaagtcctctcttttgcatattctaataaatgagccgcgtttgctcctccgctctcgtgttgggctcgtgtctggggctgcctcacttccccatgcgagggaggcaggccccatgcagagtgagctccgagtgcctcactgctagtgatggtcactctgtcacctgctgtccctcagtgactcctgtgaaacctgctcaggtctcttcattctgccaatgctgggaagccacaacctgttcatccagtgtggaggctttgtcttcagctgagcaccagaagaagccacaatgcagagaccctgagtttgtgcaagggtggggctgagaggggaggtcccgtgttagtgcaggggtgaggccgggaggggaggtcccgagtttgtgtaggggcgaggctgagcagggaggttctgagttagtgcaggggcgaggctgagcagggaggtcccgagttagtgcaggggcgaggctaagggggaggtcccaagtttgtgcaggggtgaggctgagcagggaggtcccaagttagtgcaggggcgaggctgagaggggagatcccgagtttgtgcaggggcgaggctgagaggggaggtccctagttagtgcaggggtgaggccgagaagggaggtcccaagtttgtgcatggatgaagccaaaaggggagtttgcacgtttgtgcaggggtgaggccaagaagggaagtcttgagttggtgcaggggtgagggagaggggaggtcctgagtttgtgcagaggcgaggctgagaggggaggtccctaagtgcaggggtgaggccgagaggggaggttgcaaatttgtgcaggggtgaggccaagaggggaggtcctgagttagtgcgggggtgaggccgagaggggaggtcctgagtttgtgcagaggcgaggctgagaggggaggtccttagtgcaggggtgaggctgagagggggaggtcccaagtttgtgcaggggtgaggccgaggggaggttgcaagtttgtgcaggggtgaggccaagaggggaggtcctgagttagtgcgggggtgaggccgagaggggagttcctgagtttgtgcagaggcgaggctgagaggggaggttgccagtttgtgcaggtgcgaggctgagaggggaggctggcattcgccaatgaagtgggctggggctaccctgcgtctgtgtcttagagagatcggttgatactcactcttccccttcccatctccaaaaagtagaaacaagaacacttgccctgtagaggatgctggtctttcctcaggaccagctgcacctgtccaggaagggcaggcagctcagagagcctctgggctccaggtgtcctagggactcactcctgcttccttagtccttcagagaagtccaactcctggcccactgtgaagaggatttctacctggagcagtcggaacagcttgggtttggctgtgatgtgagggaggaggccttgggagcagggcagttatcctcccagcgtggtaaggagccgtgttttatggaggcagggagatcagggcagttactcctcgggtgtggtaaggagctgtgttttatggaagcaggtggccgtgaactcattccgtcttttcatgagcttctgtacttcctcgtcctcaagacccagccatcccacccagcaaaactgaccggctgtggtggttttggagccctgctctccttgtggggtggctgcgtgggtcgtccacaggctttctggaggacagcctggtgctgctgcagatcccactgcttcttcctggctccttggcccagccttgggacaaacccagggcagggctgcagctgcccgctggccccacagaccgtctccccacgcactcctcatctgcggctccctctgtgctccctggtgcccctcagaagcgggggtcagccctgcccacccctccgtgtgctgcccaggctccaagccagggaagggggcctcaggttctaggtgaacccgtccaccccagtgaggcctctctgggatggcctctgtcatagcttctgactgcagccaggaagtctgggcagattggcttaaaacagactgagggattcaggccaaccctcctccctaggccagctacaaaggctgttttaaatctgctttaagtcatcttaatgacctcagggccagcaggatgggagtggtcgggcccaggtgtgagagccggggtccaggggctgctcccagcaccacacggccttcaccccaggggtgtggccaaggcagagaggcagctgagtttggaaggggcttccgccagcaagggtttcctggtgacagccccccagcttcgggctggcaggctgggagagtggagcaatgctggccctgaggcagctgcagccggctccctgaagaggccccagagtcactgccagggccgctaggttgccgggagccctgcactgggaagggaaggaaagcatgagaacggaggggatttaggaaagtagatcgtccctccagcctggcttgatggggaaaccagaacgctgtccccgcggccgtgcccgccctctgcctccacgtgggctccgttttggcatgcacgctagctcctgcgccttctgagggcggctgcagccgtgtagagaagccgggtcttgcctccctgaggacggagggccgcatgcagagcacagcctagccctgcagatccgcgcgctgaccagcagcaggacggagccgggtgatcttcgggggagccacctccagaaacgcctagtgctggtaactggtagacagccattattcaagcatcctctacacttagaattgagttacactgaaaacaaaggtgatgagtgctcaggacgcactactttctagttagtttaccgcacctgcctgttacctgcaggcccgagggtgtgtgcttctgtggcctgtgtgggatggcaccccttccagccttacccactcagctcagttggcctggttggaatgggccctgggaggagtgtttgcactgtggaaattggtaaatgcttcaaatcagggtggtttttaattttgcttttgttttcttctgaagagaaggttgttaaacaccagcacagtgctgcaccaggcagccagcatataatcatgagaaataagtagttgtttaagccactgcatttggggtggtttattacatagtaatgataaccatatcatggcccttgaaggcccagcatgtatgacccctgcctccacccctcagaaaacctcttctccctacctgcttctcctggagcccctcaggtgttcctctgcttctccaccgaaccagctaattctcacaaacagcccctcaggtaccagcccctccctctgcagcctctcctcattcagctcctgcagggctgcccccaccccgccagccagtctagtttccccccagcacctgtcactatcggaaaggaaacatctgtttaccgtttgtctccccctctcaaaaaaatagagcagggatcttgcctgtctgcccactgttgtttatttgtctgaaatgtttggccccagggcagcatctactgatcactgaccagttggctactgaacggtgaaggtctgatgagctgatgagccgtcccctgggcttgaaatctttcccgcggcacaaacaggcgccccttcctctgtcgctcacttttcacggttgtctccttctgaggcggtgagtctagatggtggggtcttaaagttcctcacacagagcagacacttggtcgtgcatgtctgtggaaggaatggactcaggagagaatgttgaaggccagtcagaccaggagtgagtgccgtgcgccgtgctgggagcctgtcactgtgagtgccgtgcgccgtgctgggagcctgtcactgtgagtgccgtgcgccgtgctgggagcctgtcactgtgagtgccgtgcgccctgctgggagcctgtcactgtgagtgccgtgcgccgtgctgggagcctgtcactgtgagggccgagcgccgtgctgggagcctgtcactgtgagggccgtgcgccgtgctgggagcctgtcactgtgagggccgtgcgccgtgctgggagcctgtcactgtgagggccgtgcgccgtgctgggagcctggcactgtgagtgccgtgcgccgtgctgggagcctggcactgtgagggccgtgcgccgtgctgggagcctggcactgtgagtgccgtgcgccgtgctgggagcctgtcactgtgagtgccgtgcgccgtgctgggagcctgtcactgtgagtgccgtgcgccgtgctgggagcctggcactgtgagtgccgtgcgccgtgctgggagcctggcactgtgagtgccgtgcgccgtgctgggagcctggcactgtgagtgccgtgcgccgtgctgggagcctggcactctgagtgccgtgcgccgtgctgggagcctgtcactgtgagtgccgtgcgccgtgctgggagcctgtcactgtgagtgccgtgcgccgtgctgggagcctggcactgtgagtgccgtgcgccgtgctgggagcctatcactgtgagggccgtgcgctgtgctgggagcctggcactgtgagggccgtgcgctgtgctgggagcatgcatttgtgagacccgccctgcccagtgctggccttgaatgtgggtccacttgggccgctggatcaaaacgccgcagaacaggcggcttaaacaacagaaagtattttctcacagttctggggcctggaactctgagatcagggtgtcagcggggccggttcctctttggtctgtctccttggctcgtgggcagcatctccttgagttctcacgtcatcttctcttcatgcgtgtttgtgccctaatctcttcctgcgaggacaccagtcctattggattagggcccacaccagtggcctcattttatcttaatcacctctttaaagaccacacctactaaaactggaacgatatagagaagattagcatggcccacgtgcaggcatgacacccaaattcatgacgtgttccatgtctgcagatacagtcacctctgaggtcctgggatttagggcttgaacatattgtaacactctgccatcaaagctcgcacgccacggggttttataaaaattgggtggttttgtttgttgttgtttggcaaaccccacatgctggataccattgacactccgtggtgggctgagccatgtccccgtcccgccaccacagatacccgtatccgatcacttgagcctgtgatgatgttgccttgcaccgtaaaaggggctttgcagatatggtggaattaaggaccttgagatgaggggaggatcctggattagcttgtgggccctctgtgcaacagtaggagtcgttgtaagagggaagcaagaggccgggcgtggtggctcacgcctgtactcccagcactttgggaggctgaggcgggcggatcacgaggtcaggagatcgagaccatcctggctaacatggtgaaaccccgtctctactaaaaaataccaaaaaattagccgggcgtggtggtgggtgcctgtagtcccagctactcgggaggctgaggcaggagaatggcttgaacccgggaggcggagcttgcagtgaaccgagatcgcaccactgcactcccgcctgggcgacagagcgagactctatctcaaaaaaaaaaaaaaaaaaaaagcaagcaagaagtcaaaggcaggaagaggaggcttggtgacagagaagaggtgggagggatgtgctttgcagagggagcaagggcctccagccaggagaggagggcaggctgtcgaagcagaaaagaaaacagatctccctgcagggccaccagaaggaaccagccctgcctgccccttcattttggacttccgagctccagaactgcaagagaataaatctagtttaagcagcaaagttggtggtaacttcttagagcagccacaggaagctcactaccccccacacactcatcccgtttggtttttgttttcaggaagggtccagtctgtctcagaggtgctgtggttggaggtggagtgtggggcatggctgagcacccaacatccgcttcaccctctcccctgctccccagcacgttccttcaccctgtagctctaggtctctgtggcagacactcagctctaactgctgacctgatggctccacttggtgttcaaacatcccagattcatgttgtcaaagagagctgtttccagtggggaccccaggcccaccacgtacgcccggcagacctgccctctccactgtcagaagatggcatggcctccctgtagctcaggcccaaccccaggagtcatcctgctggctgtcctcagtgccccaggcttctcttcaggggcttcttgtggctctgattgttgccccctcacctcactgctcttctcccagatctgtgcgtgcattggtcctccttgtcacgcacgttcagctcaaatattacttcctcaaaggtgcctttgagtactcgttctccttgcctttccctctcctgggacactgttcccaccagtacctgcatgattccttttttttcttttccttttctttttttgtttttgagacagtgtcttgctctgttgtcagggctggagggcagtggcgcaatgtcagctcactgcagcctccacctcctgggctcagatgatcctcccacctcagcctcctgagtagctgggactacaggtgcacaccaccacacccagctaatttttagtagagagcagggtttcaccatgttgcccaggctggtcttgaactcctgagttcaagcgatctgcccgcctctacctcccacagtgctgggattccaggcgtaagccgccacgcccagcaactccgtttcttacttgttggctcacattctcctgagaagtcctccctcaaccatcggcctgaaatagcagcgagcctccccagggttgcctctgccttttcttgactctttctgtcaccttctatgcttgttgtctggtccccactagaatataccttctgtaagagcagggatttgggacagtgcctagaatagtacttgcagacagtaggctacgataaatatgaatgacggccccatgcagatggtagcccctctcgctcgaacgcttcacccagttttattttcttttcatcagttaccgccctctgaaggtatccacacacaaacatgaaactggaccaaagcagggaccccccgcacgcagaatagtgctgggctcgcgtaaggcacctcagtgggtccatcagctgatgcatggacagacaaaatgggtgtatccagacactggagtatcgtgcagcgaggaaacgtgctgagtgtggatggaccttaaacacaccatgcaagtgaaaaggcgtcacagaaggccacatacgatatgatcccatttctatgaaatgtccagaagaggcacattcataaagacagaaggtgactgagtggttgtcgggctgggtggaggggatagggagtgaatgcaagaaggatccttctgaggtaacggaagtatccggaaactgggttggagtgatgggtgcacagctctgcacatttactacagtcgctgaactgcacacacaacacgggtatattttattgcatagaaattgtattaaagctgttaagaattttacttagattagcatttttcccacactgtgccatcaacttagtatatgattagattcattgtttctaactgtatttaaatttaatgtttgtcacattttgcttgctaaatttttaaaattttaaattactgtgggtacataaaaggtgtatatatttatggagtaccttgatattttaatacagacatacaatgtataatgatcaactcccagtaactggggtatccatcacctcaagcctgtatcatttctttgttaggaacattccagttccactctttttgttatttaaaaatatacaatacattattattaactatattcaccctcctgtgctatggaatactagatcttatgctaattaaatgttttccctatttctccc

SEQ ID NO: 117006 - DNA, 2446 bp, Homo sapiens
  Payload ID: 2827
  Gene Symbol: CHFR
  Gene Name: checkpoint with forkhead and ring finger domains, E3 ubiquitin protein ligase
  ENST ID: ENST00000315585
  CDS Start-End: 340-1389
agaatgctgatattcaggccaggcacggtggctcatgcctgtaatcccagcagtttgggaggccaaaacaggaggatctcttgaccctgttgcgacctttccttccccagcaataaactggtctctggagatcactgtagaattgtagtggatgaaaaatcaggtcaggtgacactggaagataccagcaccagtggaacagtgattaacaagctgaaggttgttaagaagcagacatgccctttacagactggggatgtcatctacttggtgtacaggaagaatgaaccggaacacaacgtggcatacctctatgaatctttaagtgaaaagcaaggcatgacacaagaatcctttgggtctgggggtggtggcatctcccctaaaggaagtggtccctctgtggcaagtgatgaagtctccagctttgcctcagctctcccagacagaaagactgcgtccttttcgtcgttggaaccccaggatcaggaggatttggagcccgtgaagaagaaaatgagaggagatggggaccttgacctgaacgggcagttgttggtcgcacaaccgcgtagaaatgcccaaaccgtccacgaggacgtcagagcagcggctgggaagccagacaagatggaggagacgctgacatgcatcatctgccaggacctgctgcacgactgcgtgagtttgcagccctgcatgcacacgttctgcgcggcttgctactcgggctggatggagcgctcgtccctgtgtcctacctgccgctgtcccgtggagcggatctgtaaaaaccacatcctcaacaacctcgtggaagcatacctcatccagcatccagacaagagtcgcagtgaagaagatgtgcaaagtatggatgccagaaataaaatcactcaagacatgctgcagcccaaagtcaggcggtctttttctgatgaagaagggagttcagaggacctgctggagctgtcagacgttgacagtgagtcctcagacattagccagccatacgtcgtgtgccggcagtgtcctgagtacagaaggcaggcggcgcagcctccccactgcccagcacccgagggcgagccaggagccccacaggccctgggggatgcaccctccacgtccgtcagcctgacgacagcagtccaggattacgtgtgccctctgcaaggaagccacgccctgtgcacctgctgcttccagcccatgcccgaccggagagcggagcgcgagcaggacccgcgtgtcgcccctcagcagtgtgcggtctgcctgcagcctttctgccacctgtactggggctgcacccggaccggctgctacggctgcctggccccgttttgtgtgtcgggcagacagtgctttcctgcgacatcattataaacaggtaacattgccccttcatctcggcagagctcaacctgggtgacaagtgtctggacggcgtgctgaacaacaacagctacgagtcagacatcctgaagaattacctggcaaccagaggtttgacatggaaaaacatgttgaccgagagcctcgtggctctccagcggggagtgtttctgctgtctgattacagagtcacgggagacaccgttctgtgttactgctgtggcctgcgcagcttccgtgagctgacctatcagtatcggcagaacattcctgcttccgagttgccagtggccgtaacatcccgtcctgactgctactggggccgtaactgccgcactcaggtgaaagctcaccacgccatgaaattcaatcatatctgtgaacagacaaggttcaaaaactaagcatccagaggccctgagcagctttcagcactggaggtgaagagagcgtgtttttaaaatacagagacaagcacgtcaaggtgttttcacagccccctgagggaagggacgcagggtctccgacaggtgctctggggtgactcttctgtggagctttaccctctgagtgagaccctccccagagccccgggggccgcagcccgccctcctggtgagcgctgggcagggctcgtggtggcatcagcagcagagacgaagcctttctgtaacatgcggccgtcccgccgagaggggcagttttgctcttttgtacattttccgaaactacagttaaagcagaagtctgtttttaggaaaagtttcaagggagaagggcaagtttatcaaaaacattgtttcaggagaagggagcataagtttacagcctacaggacgtacacaatatcctgctgctgggaaaaccacagcattttatctattttttattttaataggtttggtgcttatcttctaataagatttaaatgtcacaaactgtagcacaaataatataatttataatttacaaattgactaaaattgggtatagtatggtatttgaaagaataagcatatgcttctgtttattaaaaaaagaaaccttc

SEQ ID NO: 117007 - DNA, 2648 bp, Homo sapiens
  Payload ID: 2827
  Gene Symbol: CHFR
  Gene Name: checkpoint with forkhead and ring finger domains, E3 ubiquitin protein ligase
  Uniprot ID: Q96EP1
  ENST ID: ENST00000432561
  CDS Start-End: 75-2069
gccgcaatgtctcttgacagcggcggcggcgcagccggttccgggttcggcgcggggcggggatgtgaatcccgatggagcggcccgaggaaggcaagcagtcgccgccgccgcagccctggggacggctcctgcgtctgggcgcggaggagggcgagccgcacgtcctcctgaggaagcgggagtggaccatcgggcggagacgaggttgcgacctttccttccccagcaataaactggtctctggagatcactgtagaattgtagtggatgaaaaatcaggtcaggtgacactggaagataccagcaccagtggaacagtgattaacaagctgaaggttgttaagaagcagacatgccctttacagactggggatgtcatctacttggtgtacaggaagaatgaaccggaacacaacgtggcatacctctatgaatctttaagtgaaaagcaaggcatgacacaagaatcctttgaagctaacaaggaaaatgtgttccatgggaccaaagatacctcaggtgcaggtgcagggcgaggggccgatccccgggtccctccgtcgtcgcccgccactcaggtgtgctttgaggaaccacagccatcaacatcgacgtcagacctcttccccacagcctcggcctcttccacggagccttctcctgcagggcgagagcgttcctccagttgtgggtctgggggtggtggcatctcccctaaaggaagtggtccctctgtggcaagtgatgaagtctccagctttgcctcagctctcccagacagaaagactgcgtccttttcgtcgttggaaccccaggatcaggaggatttggagcccgtgaagaagaaaatgagaggagatggggaccttgacctgaacgggcagttgttggtcgcacaaccgcgtagaaatgcccaaaccgtccacgaggacgtcagagcagcggctgggaagccagacaagatggaggagacgctgacatgcatcatctgccaggacctgctgcacgactgcgtgagtttgcagccctgcatgcacacgttctgcgcggcttgctactcgggctggatggagcgctcgtccctgtgtcctacctgccgctgtcccgtggagcggatctgtaaaaaccacatcctcaacaacctcgtggaagcatacctcatccagcatccagacaagagtcgcagtgaagaagatgtgcaaagtatggatgccagaaataaaatcactcaagacatgctgcagcccaaagtcaggcggtctttttctgatgaagaagggagttcagaggacctgctggagctgtcagacgttgacagtgagtcctcagacattagccagccatacgtcgtgtgccggcagtgtcctgagtacagaaggcaggcggcgcagcctccccactgcccagcacccgagggcgagccaggagccccacaggccctgggggatgcaccctccacgtccgtcagcctgacgacagcagtccaggattacgtgtgccctctgcaaggaagccacgccctgtgcacctgctgcttccagcccatgcccgaccggagagcggagcgcgagcaggacccgcgtgtcgcccctcagcagtgtgcggtctgcctgcagcctttctgccacctgtactggggctgcacccggaccggctgctacggctgcctggccccgttttgtgagctcaacctgggtgacaagtgtctggacggcgtgctgaacaacaacagctacgagtcagacatcctgaagaattacctggcaaccagaggtttgacatggaaaaacatgttgaccgagagcctcgtggctctccagcggggagtgtttctgctgtctgattacagagtcacgggagacaccgttctgtgttactgctgtggcctgcgcagcttccgtgagctgacctatcagtatcggcagaacattcctgcttccgagttgccagtggccgtaacatcccgtcctgactgctactggggccgtaactgccgcactcaggtgaaagctcaccacgccatgaaattcaatcatatctgtgaacagacaaggttcaaaaactaagcatccagaggccctgagcagctttcagcactggaggtgaagagagcgtgtttttaaaatacagagacaagcacgtcaaggtgttttcacagccccctgagggaagggacgcagggtctccgacaggtgctctggggtgactcttctgtggagctttaccctctgagtgagaccctccccagagccccgggggccgcagcccgccctcctggtgagcgctgggcagggctcgtggtggcatcagcagcagagacgaagcctttctgtaacatgcggccgtcccgccgagaggggcagttttgctcttttgtacattttccgaaactacagttaaagcagaagtctgtttttaggaaaagtttcaagggagaagggcaagtttatcaaaaacattgtttcaggagaagggagcataagtttacagcctacaggacgtacacaatatcctgctgctgggaaaaccacagcattttatctattttttattttaataggtttggtgcttatcttctaataagatttaaatgtcacaaactgtagcacaaataatataatttataatttacaaattgactaaaa

SEQ ID NO: 117008 - DNA, 3250 bp, Homo sapiens
  Payload ID: 2827
  Gene Symbol: CHFR
  Gene Name: checkpoint with forkhead and ring finger domains, E3 ubiquitin protein ligase
  Uniprot ID: Q96EP1
  ENST ID: ENST00000450056
  CDS Start-End: 90-2048
ggatcagctgagggagccgcaatgtctcttgacagcggcggcggcgcagccggttccgggttcggcgcggggcggggatgtgaatcccgatggagcggcccgaggaaggcaagcagtcgccgccgccgcagccctggggacggctcctgcgtctgggcgcggaggagggcgagccgcacgtcctcctgaggaagcgggagtggaccatcgggcggagacgaggttgcgacctttccttccccagcaataaactggtctctggagatcactgtagaattgtagtggatgaaaaatcaggtcaggtgacactggaagataccagcaccagtggaacagtgattaacaagctgaaggttgttaagaagcagacatgccctttacagactggggatgtcatctacttggtgtacaggaagaatgaaccggaacacaacgtggcatacctctatgaatctttaagtgaaaagcaaggcatgacacaagaatcctttgatacctcaggtgcaggtgcagggcgaggggccgatccccgggtccctccgtcgtcgcccgccactcaggtgtgctttgaggaaccacagccatcaacatcgacgtcagacctcttccccacagcctcggcctcttccacggagccttctcctgcagggcgagagcgttcctccagttgtgggtctgggggtggtggcatctcccctaaaggaagtggtccctctgtggcaagtgatgaagtctccagctttgcctcagctctcccagacagaaagactgcgtccttttcgtcgttggaaccccaggatcaggaggatttggagcccgtgaagaagaaaatgagaggagatggggaccttgacctgaacgggcagttgttggtcgcacaaccgcgtagaaatgcccaaaccgtccacgaggacgtcagagcagcggctgggaagccagacaagatggaggagacgctgacatgcatcatctgccaggacctgctgcacgactgcgtgagtttgcagccctgcatgcacacgttctgcgcggcttgctactcgggctggatggagcgctcgtccctgtgtcctacctgccgctgtcccgtggagcggatctgtaaaaaccacatcctcaacaacctcgtggaagcatacctcatccagcatccagacaagagtcgcagtgaagaagatgtgcaaagtatggatgccagaaataaaatcactcaagacatgctgcagcccaaagtcaggcggtctttttctgatgaagaagggagttcagaggacctgctggagctgtcagacgttgacagtgagtcctcagacattagccagccatacgtcgtgtgccggcagtgtcctgagtacagaaggcaggcggcgcagcctccccactgcccagcacccgagggcgagccaggagccccacaggccctgggggatgcaccctccacgtccgtcagcctgacgacagcagtccaggattacgtgtgccctctgcaaggaagccacgccctgtgcacctgctgcttccagcccatgcccgaccggagagcggagcgcgagcaggacccgcgtgtcgcccctcagcagtgtgcggtctgcctgcagcctttctgccacctgtactggggctgcacccggaccggctgctacggctgcctggccccgttttgtgagctcaacctgggtgacaagtgtctggacggcgtgctgaacaacaacagctacgagtcagacatcctgaagaattacctggcaaccagaggtttgacatggaaaaacatgttgaccgagagcctcgtggctctccagcggggagtgtttctgctgtctgattacagagtcacgggagacaccgttctgtgttactgctgtggcctgcgcagcttccgtgagctgacctatcagtatcggcagaacattcctgcttccgagttgccagtggccgtaacatcccgtcctgactgctactggggccgtaactgccgcactcaggtgaaagctcaccacgccatgaaattcaatcatatctgtgaacagacaaggttcaaaaactaagcatccagaggccctgagcagctttcagcactggaggtgaagagagcgtgtttttaaaatacagagacaagcacgtcaaggtgttttcacagccccctgagggaagggacgcagggtctccgacaggtgctctggggtgactcttctgtggagctttaccctctgagtgagaccctccccagagccccgggggccgcagcccgccctcctggtgagcgctgggcagggctcgtggtggcatcagcagcagagacgaagcctttctgtaacatgcggccgtcccgccgagaggggcagttttgctcttttgtacattttccgaaactacagttaaagcagaagtctgtttttaggaaaagtttcaagggagaagggcaagtttatcaaaaacattgtttcaggagaagggagcataagtttacagcctacaggacgtacacaatatcctgctgctgggaaaaccacagcattttatctattttttattttaataggtttggtgcttatcttctaataagatttaaatgtcacaaactgtagcacaaataatataatttataatttacaaattgactaaaattgggtatagtatggtatttgaaagaataagcatatgcttctgtttattaaaaaaagaaaccttccaatgtccaaaactgctaaccctcgacgtggccgccaagttagtcgctccttgctaaccggtgagtgaccgcggccccgagcctggggctggacgcaggtcccaggacatgctgctcccttgtgtgagtgaccgcggccccgagcctggggctggacgcaggtcccaggacgtgctgctcccttgtgtgagtgaccacggccccaagcccagggctggaggcaggtcccaggacgcgccgctccctcatgctgcccgggcccttcctccaagaccctacagagcctgaggggcaccttggcttccgcctgtgctagctttgccatgtcatctggaataatacttgaaattttgatttttggaaaaaaaagttttttatcttttgttgaaatcacctgttatccttgtttgtaaactgataacttttttgcttcttctcaggaatacagttttcaactgttgtcttgctcttgatagaaactgagaagcagcaatctgtatttgtggaggaaagtcctctcttttgcatattctaataaatgagccgcgtttgctcctc

SEQ ID NO: 117009 - DNA, 2990 bp, Homo sapiens
  Payload ID: 2827
  Gene Symbol: CHFR
  Gene Name: checkpoint with forkhead and ring finger domains, E3 ubiquitin protein ligase
  Uniprot ID: Q96EP1
  ENST ID: ENST00000443047
  CDS Start-End: 70-1788
aatgtctcttgacagcggcggcggcgcagccggttccgggttcggcgcggggcggggatgtgaatcccgatggagcggcccgaggaaggcaagcagtcgccgccgccgcagccctggggacggctcctgcgtctgggcgcggaggagggcgagccgcacgtcctcctgaggaagcgggagtggaccatcgggcggagacgaggttgcgacctttccttccccagcaataaactggtctctggagatcactgtagaattgtagtggatgaaaaatcaggtcaggtgacactggaagataccagcaccagtggaacagtgattaacaagctgaaggttgttaagaagcagacatgccctttacagactggggatgtcatctacttggtgtacaggaagaatgaaccggaacacaggtctgggggtggtggcatctcccctaaaggaagtggtccctctgtggcaagtgatgaagtctccagctttgcctcagctctcccagacagaaagactgcgtccttttcgtcgttggaaccccaggatcaggaggatttggagcccgtgaagaagaaaatgagaggagatggggaccttgacctgaacgggcagttgttggtcgcacaaccgcgtagaaatgcccaaaccgtccacgaggacgtcagagcagcggctgggaagccagacaagatggaggagacgctgacatgcatcatctgccaggacctgctgcacgactgcgtgagtttgcagccctgcatgcacacgttctgcgcggcttgctactcgggctggatggagcgctcgtccctgtgtcctacctgccgctgtcccgtggagcggatctgtaaaaaccacatcctcaacaacctcgtggaagcatacctcatccagcatccagacaagagtcgcagtgaagaagatgtgcaaagtatggatgccagaaataaaatcactcaagacatgctgcagcccaaagtcaggcggtctttttctgatgaagaagggagttcagaggacctgctggagctgtcagacgttgacagtgagtcctcagacattagccagccatacgtcgtgtgccggcagtgtcctgagtacagaaggcaggcggcgcagcctccccactgcccagcacccgagggcgagccaggagccccacaggccctgggggatgcaccctccacgtccgtcagcctgacgacagcagtccaggattacgtgtgccctctgcaaggaagccacgccctgtgcacctgctgcttccagcccatgcccgaccggagagcggagcgcgagcaggacccgcgtgtcgcccctcagcagtgtgcggtctgcctgcagcctttctgccacctgtactggggctgcacccggaccggctgctacggctgcctggccccgttttgtgagctcaacctgggtgacaagtgtctggacggcgtgctgaacaacaacagctacgagtcagacatcctgaagaattacctggcaaccagaggtttgacatggaaaaacatgttgaccgagagcctcgtggctctccagcggggagtgtttctgctgtctgattacagagtcacgggagacaccgttctgtgttactgctgtggcctgcgcagcttccgtgagctgacctatcagtatcggcagaacattcctgcttccgagttgccagtggccgtaacatcccgtcctgactgctactggggccgtaactgccgcactcaggtgaaagctcaccacgccatgaaattcaatcatatctgtgaacagacaaggttcaaaaactaagcatccagaggccctgagcagctttcagcactggaggtgaagagagcgtgtttttaaaatacagagacaagcacgtcaaggtgttttcacagccccctgagggaagggacgcagggtctccgacaggtgctctggggtgactcttctgtggagctttaccctctgagtgagaccctccccagagccccgggggccgcagcccgccctcctggtgagcgctgggcagggctcgtggtggcatcagcagcagagacgaagcctttctgtaacatgcggccgtcccgccgagaggggcagttttgctcttttgtacattttccgaaactacagttaaagcagaagtctgtttttaggaaaagtttcaagggagaagggcaagtttatcaaaaacattgtttcaggagaagggagcataagtttacagcctacaggacgtacacaatatcctgctgctgggaaaaccacagcattttatctattttttattttaataggtttggtgcttatcttctaataagatttaaatgtcacaaactgtagcacaaataatataatttataatttacaaattgactaaaattgggtatagtatggtatttgaaagaataagcatatgcttctgtttattaaaaaaagaaaccttccaatgtccaaaactgctaaccctcgacgtggccgccaagttagtcgctccttgctaaccggtgagtgaccgcggccccgagcctggggctggacgcaggtcccaggacatgctgctcccttgtgtgagtgaccgcggccccgagcctggggctggacgcaggtcccaggacgtgctgctcccttgtgtgagtgaccacggccccaagcccagggctggaggcaggtcccaggacgcgccgctccctcatgctgcccgggcccttcctccaagaccctacagagcctgaggggcaccttggcttccgcctgtgctagctttgccatgtcatctggaataatacttgaaattttgatttttggaaaaaaaagttttttatcttttgttgaaatcacctgttatccttgtttgtaaactgataacttttttgcttcttctcaggaatacagttttcaactgttgtcttgctcttgatagaaactgagaagcagcaatctgtatttgtggaggaaagtcctctcttttgcatattctaataaatgagccgcgtttgctcctc

SEQ ID NO: 117010 - DNA, 875 bp, Homo sapiens
  Payload ID: 2827
  Gene Symbol: CHFR
  Gene Name: checkpoint with forkhead and ring finger domains, E3 ubiquitin protein ligase
  ENST ID: ENST00000540963
  CDS Start-End: 205-875
cgagggggctgcggcgggcggcgaagggggacctggttgcggccgtgggagggggcgcccgccggcgtccaggccgggctgcggggctgcgtgggcgcgggcggccgggccggggcccgcggggtggggcgggcgccgagtctcggcctctggggtcgggagtctccatgggcgtttccggggtctccgcagatgtgaatcccgatggagcggcccgaggaaggcaagcagtcgccgccgccgcagccctggggacggctcctgcgtctgggcgcggaggagggcgagccgcacgtcctcctgaggaagcgggagtggaccatcgggcggagacgaggttgcgacctttccttccccagcaataaactggtctctggagatcactgtagaattgtagtggatgaaaaatcaggtcaggtgacactggaagataccagcaccagtggaacagtgattaacaagctgaaggttgttaagaagcagacatgccctttacagactggggatgtcatctacttggtgtacaggaagaatgaaccggaacacaacgtggcatacctctatgaatctttaagtgaaaagcaaggcatgacacaagaatcctttgatacctcaggtgcaggtgcagggcgaggggccgatccccgggtccctccgtcgtcgcccgccactcaggtgtgctttgaggaaccacagccatcaacatcgacgtcagacctcttccccacagcctcggcctcttccacggagccttctcctgcagggcgagagcgttcctccagttgtgggtctgggggtggtggcatctcccctaaaggaagtggtccctctgtggcaagtgatgaagtctccagctttgcctcagctctcccaga

SEQ ID NO: 117011 - DNA, 913 bp, Homo sapiens
  Payload ID: 2827
  Gene Symbol: CHFR
  Gene Name: checkpoint with forkhead and ring finger domains, E3 ubiquitin protein ligase
  ENST ID: ENST00000540537
  CDS Start-End: 838-913
tccaaagcccacgtccacacgttccgagcccgccgtcccatcgcaaacatccgggggccgccactgcgcctaacgaccgcccatctctgacgcctcgggtcggcgtttgatttttaacccaagaaaagagtaaaagtcaagcggaaatcaacgcagaagcggtgctgcagcctctgagcttcctgacggccgtgtccagagccgggctcctcctccggcggcagccgccgggctcacttcagtgcgctcagcttctcgcggggacaagcgtctgggcggggacggcccgaggcgggggtgtggcgaggctggagaacgctgaaagctggtgggcttgggaagacaaacgacgctctgaaatttggctcccagatctaagagccctttcttggagcctggactggaactcctctttttcctgtaacaatgacatcgcttctgatcgaagaacccacttcacagtaaatgaggtgcaccgtgggcccatgctcatggaattcatgggtcttgctgtgttctccatcatcctaccgattttggttctgtttttctggtggaactgactgagagaaacatatagtgaaaggttgcgacctttccttccccagcaataaactggtctctggagatcactgtagaattgtagtggatgaaaaatcaggtcaggtgacactggaagataccagcaccagtggaacagtgattaacaagctgaaggttgttaagaagcagacatgccctttacagactggggatgtcatctacttggtgtacaggaagaatgaaccggaacacaacgtggcatacctctatgaatctttaagtgaaaagcaaggcatgacacaagaatcctttgcctcggcctcttccacggagccttctcctgcagggcgagagcgttcctccagttgtg

SEQ ID NO: 117012 - DNA, 542 bp, Homo sapiens
  Payload ID: 2827
  Gene Symbol: CHFR
  Gene Name: checkpoint with forkhead and ring finger domains, E3 ubiquitin protein ligase
  ENST ID: ENST00000542714
  CDS Start-End: 328-542
cagggtgagggagcttggcttcctgagaagccacccaggagccccggcttggggatgacttgaggccgcgtcttcggttgcgacctttccttccccagcaataaactggtctctggagatcactgtagaattgtagtggatgaaaaatcaggtcaggtgacactggaagataccagcaccagtggaacagtgattaacaagctgaaggttgttaagaagcagacatgccctttacagactggggatgtcatctacttggtgtacaggaagaatgaaccggaacacaacgtggcatacctctatgaatctttaagtgaaaagcaaggcatgacacaagaatcctttgaagctaacaaggaaaatgtgttccatgggaccaaagatacctcaggtgcaggtgcagggcgaggggccgatccccgggtccctccgtcgtcgcccgccactcaggtgtgctttgaggaaccacagccatcaacatcgacgtcagacctcttccccacagcctcggcctcttccacggagccttctcctgcagggcg

SEQ ID NO: 117013 - DNA, 758 bp, Homo sapiens
  Payload ID: 2827
  Gene Symbol: CHFR
  Gene Name: checkpoint with forkhead and ring finger domains, E3 ubiquitin protein ligase
  ENST ID: ENST00000541817
  CDS Start-End: 349-758
attccgcccgcggcgtcgccacagggtgagggagcttggcttcctgagaagccacccaggagccccggcttggggatgacttgaggccgcgtcttcggttgcgacctttccttccccagcaataaactggtctctggagatcactgtagaattgtagtggatgaaaaatcaggtcaggtgacactggaagataccagcaccagtggaacagtgattaacaagctgaaggttgttaagaagcagacatgccctttacagactggggatgtcatctacttggtgtacaggaagaatgaaccggaacacaacgtggcatacctctatgaatctttaagtgaaaagcaaggcatgacacaagaatcctttgatacctcaggtgcaggtgcagggcgaggggccgatccccgggtccctccgtcgtcgcccgccactcaggtgtgctttgaggaaccacagccatcaacatcgacgtcagacctcttccccacagcctcggcctcttccacggagccttctcctgcagggcgagagcgttcctccagttgtgggtctgggggtggtggcatctcccctaaaggaagtggtccctctgtggcaagtgatgaagtctccagctttgcctcagctctcccagacagaaagactgcgtccttttcgtcgttggaaccccaggatcaggaggatttggagcccgtgaagaagaaaatgagaggagatggggaccttgacctgaacgggcagttgttggtcgcacaacc

SEQ ID NO: 117014 - DNA, 584 bp, Homo sapiens
  Payload ID: 2827
  Gene Symbol: CHFR
  Gene Name: checkpoint with forkhead and ring finger domains, E3 ubiquitin protein ligase
  ENST ID: ENST00000536932
  CDS Start-End: 491-584
agttctgcgcgttcacgtccccgatcgggccgtgtccgccgcggccctgcgaggtccgaggggcaatagccctctggaacaagacaattcatgtgagataagaaagaagagcccacaagaccaaggatgtattctcagtttacagaccactgaccagaggccactccagggtgtcaggactaagagaagtcacaaaacagcagatttcccaagagcagcggaaaatgatccagtcacaggttgcgacctttccttccccagcaataaactggtctctggagatcactgtagaattgtagtggatgaaaaatcaggtcaggtgacactggaagataccagcaccagtggaacagtgattaacaagctgaaggttgttaagaagcagacatgccctttacagactggggatgtcatctacttggtgtacaggaagaatgaaccggaacacaacgtggcatacctctatgaatctttaagtgaaaagcaaggcatgacacaagaatcctttgatacctcaggtgcaggtgcagggcgaggggccgatccccgggtccctccgtcgtcgcccgccactcaggtgtgct

SEQ ID NO: 117015 - DNA, 746 bp, Homo sapiens
  Payload ID: 2827
  Gene Symbol: CHFR
  Gene Name: checkpoint with forkhead and ring finger domains, E3 ubiquitin protein ligase
  ENST ID: ENST00000535527
  CDS Start-End: 1-183
ctgcagcccaaagtcaggcggtctttttctgatgaagaagggagttcagaggacctgctggagctgtcagacgttgacagtgagtcctcagacattaggtgcggtctgcctgcagcctttctgccacctgtactggggctgcacccggaccggctgctacggctgcctggccccgttttgtgagctcaacctgggtgacaagtgtctggacggcgtgctgaacaacaacagctacgagtcagacatcctgaagaattacctggcaaccagaggtttgacatggaaaaacatgttgaccgagagcctcgtggctctccagcggggagtgtttctgctgtctgattacagagtcacgggagacaccgttctgtgttactgctgtggcctgcgcagcttccgtgagctgacctatcagtatcggcagaacattcctgcttccgagttgccagtggccgtaacatcccgtcctgactgctactggggccgtaactgccgcactcaggtgaaagctcaccacgccatgaaattcaatcatatctgtgaacagacaaggttcaaaaactaagcatccagaggccctgagcagctttcagcactggaggtgaagagagcgtgtttttaaaatacagagacaagcacgtcaaggtgttttcacagccccctgagggaagggacgcagggtctccgacaggtgctctggggtgactcttctgtggagctttaccctctgagtgagaccctcccca

SEQ ID NO: 117016 - DNA, 942 bp, Homo sapiens
  Payload ID: 2827
  Gene Symbol: CHFR
  Gene Name: checkpoint with forkhead and ring finger domains, E3 ubiquitin protein ligase
  ENST ID: ENST00000544093
  CDS Start-End: 1-226
agcggagcgcgagcaggacccgcgtgtcgcccctcagcagtgtgcggtctgcctgcagcctttctgccacctgtactggggctgcacccggaccggctgctacggctgcctggccccgttttgtgaatctgtaatgaaaagaaatatgtttatcctcagtgtcgggcagacagtgctttcctgcgacatcattataaacagaattacctggcaaccagaggtttgacatggaaaaacatgttgaccgagagcctcgtggctctccagcggggagtgtttctgctgtctgattacagagtcacgggagacaccgttctgtgttactgctgtggcctgcgcagcttccgtgagctgacctatcagtatcggcagaacattcctgcttccgagttgccagtggccgtaacatcccgtcctgactgctactggggccgtaactgccgcactcaggtgaaagctcaccacgccatgaaattcaatcatatctgtgaacagacaaggttcaaaaactaagcatccagaggccctgagcagctttcagcactggaggtgaagagagcgtgtttttaaaatacagagacaagcacgtcaaggtgttttcacagccccctgagggaagggacgcagggtctccgacaggtgctctggggtgactcttctgtggagctttaccctctgagtgagaccctccccagagccccgggggccgcagcccgccctcctggtgagcgctgggcagggctcgtggtggcatcagcagcagagacgaagcctttctgtaacatgcggccgtcccgccgagaggggcagttttgctcttttgtacattttccgaaactacagttaaagcagaagtctgtttttaggaaaagtttcaagggagaagggcaagtttatcaaaaacattgtttcaggagaagggagcataagtttacagcctac

SEQ ID NO: 117017 - DNA, 5283 bp, Homo sapiens
  Payload ID: 2828
  Gene Symbol: CMKLR1
  Gene Name: chemerin chemokine-like receptor 1
  Uniprot ID: Q99788
  ENST ID: ENST00000312143
  CDS Start-End: 365-1486
agtcccattcagggaagcagccccggcggccagcagggagctcaggacagagcaggctccctgggaagcctccgggtgataggggtgttccagctgcggcgctctgggggttcagagggggatcttgaatgaacaaatgaatgaactgctttctgggcaaacagccacagccagaggagcctgtgattggcagaaagaagccagggtgtgcaagtctccccaacagcctcgagtggcctgcagtcacagggaaccctcaggaagaccttccgggcagagaccagagggaaggtgtttctagctgtgtacagggactgattggctgaggactcacattggagagctgcagacaacataacggtgaatgagaatggaggatgaagattacaacacttccatcagttacggtgatgaataccctgattatttagactccattgtggttttggaggacttatcccccttggaagccagggtgaccaggatcttcctggtggtggtctacagcatcgtctgcttcctcgggattctgggcaatggtctggtgatcatcattgccaccttcaagatgaagaagacagtgaacatggtctggttcctcaacctggcagtggcagatttcctgttcaacgtcttcctcccaatccatatcacctatgccgccatggactaccactgggttttcgggacagccatgtgcaagatcagcaacttccttctcatccacaacatgttcaccagcgtcttcctgctgaccatcatcagctctgaccgctgcatctctgtgctcctccctgtctggtcccagaaccaccgcagcgttcgcctggcttacatggcctgcatggtcatctgggtcctggctttcttcttgagttccccatctctcgtcttccgggacacagccaacctgcatgggaaaatatcctgcttcaacaacttcagcctgtccacacctgggtcttcctcgtggcccactcactcccaaatggaccctgtggggtatagccggcacatggtggtgactgtcacccgcttcctctgtggcttcctggtcccagtcctcatcatcacagcttgctacctcaccatcgtgtgcaaactgcagcgcaaccgcctggccaagaccaagaagcccttcaagattattgtgaccatcatcattaccttcttcctctgctggtgcccctaccacacactcaacctcctagagctccaccacactgccatgcctggctctgtcttcagcctgggtttgcccctggccactgcccttgccattgccaacagctgcatgaaccccattctgtatgttttcatgggtcaggacttcaagaagttcaaggtggccctcttctctcgcctggtcaatgctctaagtgaagatacaggccactcttcctaccccagccatagaagctttaccaagatgtcatcaatgaatgagaggacttctatgaatgagagggagaccggcatgctttgatcctcactgtggaacccctcaatggactctctcaacccagggacacccaaggatatgtcttctgaagatcaaggcaagaacctctttagcatccaccaattttcactgcattttgcatgggatgaacagtgttttatgctgggaatctagggcctggaacccctttcttctagtggacagaacatgctgtgttccatacagccttggactagcaatttatgcttcttgggaggccagccttgactgactcaaagcaaaaaaggaagaattctcaaaagcattgccatgaactgggattggcatagggcggtgggattaagctgcctattgtgtgtgccccagaaatgacactctccaaggtccattcctggtgtgagcagtgagggggtcagagcaaacccagtgtgatgcagatcacacttggcccttgtatatatattatcagtagctggccagaaaaccctaccttcaagtcactgctctgtgttaaagtatgtggaaatgcataggtgatctgggagaggaaggtgacatatcagcccatgaactccataggccatgaatttggctttcggatcagctaggaagacagagaactggtcctgagaggtcctgtgggctctttgcaagggcaagacaagtgagggatgcaacgaggacttgagatttggcaaagaaatgagaaaggagaaaagaacctttaaaggatgcaggcatggagcagctcaccctagaacatcgcaggctgatggtgctttaggctggagctatttggggcgtcagggtggtgccagcccctgatctcaccttgcccctcttacctgggggtggggttgtggcaggcatcttcaccagcagccctcaccccatcacagggatttttttctgcctttcctaatccactcagctctggctggaggtgcttagaataaaacactggtggtggggcttctcattctggttaatttcctcaacgcctttggagacaggtccaaaatgcagctttgggaagcaactccggagagtcccctgggaagaagagtatgtccgaggactcagtcacttgagacagagtctggagctggactccttgaactgtgtttctgagctgcagacaccaaatacctcctggatacaggtgcctggcatggcttttctcatctaatactgacacgtccctgtggccacagagtgtcatagccccatttacaaatgacatagctgaggcccagatggggaaagtaacttgcccagcatcacacagctaatcagtggcagagttaagatctgaacctggctccgtctggctccagaaactctgttcttctatttggaatttatctgtggagattattctagtatattgatagcctacatttatttagcactttttatattatgcactttacatatgttttctcatttaatcattacagcaaccctgagttaggtatggttataacttcccttttacataggaggaatctgaggcttagagaggttaagtaacttgcccaaaggtacccagctagtctctgccggagcttggatttgaacttcagtttgcctggctcaaatgaggctgcagagttgggaaggacttaaaaagtttggagatttttgccataaatattgatttttctgcaaatgaggatgaacatcttaatggcctttaagaaactttgcaaatagttttcaaaaatgatgcaacatggcagagaaaatgcacttggcttccagctccctcaacagccattaacagcctcctaccgtggctcccacctcctatgtctccagagatcaaggcaatggggagggaaagctggcaggaggcagtcccttgtgggcctgaggccctttggctcctaagtgtccacattctgttctcttccaagtcccttcattgttaagctgattctccaacaagatgcaatgaacagatgcaatgtctaccccgcgctgggcgagttcccgaggccatgggctgtttggaatcacacttcattaagagacaaactgttccttcccttattgtgccttaatgcttatgacaaggcagctctgaattgatcccaagctggagcctctgaatgctttaaagagtttgaatatagacggtttgagagcaaaaagggagctttaaatattgctcagtggcccccatctcccctcttcccacatttactgaggcacgagatgggatgggacctgtcccgggtcacagcagcagtcgtcagcgccttggccctcctggcttgtaggatgctgcttttcctgggcttctggcagtccaggccaggatgggggagccaggaattcatgttgtcattggaaaagctgataaacaggagcacaattcaaaccggctgttttcctccttagagtctggcctccctctttctggctgctctgtgggtcttcctgttctgacttaggttcctgtcaagtacttaaatgcagccttaacatcccatacagtcttgtccccacagcttcatgtgaacatctccatgggtcatgcatatatcgtccctgcagtgtgcaaagtgtgctcacctgcactgctgcacaggcaaccaacatacttagtgcccagagccttctctctgggcccaggactcagtgatggggccttacttagccctgcctcctgggtggggtgggggagctgagggatcgtgaggacaagaggtagagggaaaagaaaagaagatggtgtttgaggataggggagggacaggagaggggacagaaaggtcccagagcatgatgatgaaggaaagggatctggcattcatgaagcacctacgatggttcaggcacaaacactgaaacctcaaattggccctggcagaaggggaccatcatagcaaggtggggggggggtgcagaaagtgagtttctgtttcaagaacagacttcactagttcagagttgcacagctagtgaggtatggagctgggctttgaatcaggtcagctgcctgaatgcccaacttcttcagcccttggaaggagagggtggggagaagaagaaggaaaagacaaggaagaaagaaagaagagagaaggggagaggaatggaagtccaaagagtgggaggaatttgatttcagaaccatctccagctgacccttgagccagcaaggacagggagaagggaagagcaagaacacgaagggcctcaagcaccgggatgcctttgccagccttagataattcccagagcgcacagagccctgcaggttcctgggtccttctccagagaagaggcacagagattctggcagcaaggttcagaaggggtgaggaaactgggcactgacaaagggaggggattggctcaaattcgaccccagagtcagctctggtggggttgggagcctggatgggtgggagaagatagaatccaatcgtgaaaaccataagggaccttcaaactcatcttgcccagatgtctcccatttcacagatgagggaactgaggttttgagagcttcccctgaggactctgcaaaacgaggtggtgtctggtttggatgaaagtggtcggtgattcctcaactcctgccctgcctccctctctcgttcctccctaacatgttatgctcttgttggggctgggatgccctaggcccaaggttaccaaatcctgggtttggaaaattgctgctgggggtggtatctaggaccagagaggaatctactatttctactgtgaaataattcagcagggggtcttcttacttcttccctttgaggacaaagtttctctcgaataaagagactgaagcaaga

SEQ ID NO: 117018 - DNA, 5110 bp, Homo sapiens
  Payload ID: 2828
  Gene Symbol: CMKLR1
  Gene Name: chemerin chemokine-like receptor 1
  Uniprot ID: Q99788
  ENST ID: ENST00000412676
  CDS Start-End: 192-1313
aaagtggaacaggtgtctgtgattctgcccacggaaggagacatggaggaggaagaggctgaggggaagatggaagaaggagggaaggaaggagaaatctttgcttttgggtaatcaggtgtttctagctgtgtacagggactgattggctgaggactcacattggagagctgcagacaacataacggtgaatgagaatggaggatgaagattacaacacttccatcagttacggtgatgaataccctgattatttagactccattgtggttttggaggacttatcccccttggaagccagggtgaccaggatcttcctggtggtggtctacagcatcgtctgcttcctcgggattctgggcaatggtctggtgatcatcattgccaccttcaagatgaagaagacagtgaacatggtctggttcctcaacctggcagtggcagatttcctgttcaacgtcttcctcccaatccatatcacctatgccgccatggactaccactgggttttcgggacagccatgtgcaagatcagcaacttccttctcatccacaacatgttcaccagcgtcttcctgctgaccatcatcagctctgaccgctgcatctctgtgctcctccctgtctggtcccagaaccaccgcagcgttcgcctggcttacatggcctgcatggtcatctgggtcctggctttcttcttgagttccccatctctcgtcttccgggacacagccaacctgcatgggaaaatatcctgcttcaacaacttcagcctgtccacacctgggtcttcctcgtggcccactcactcccaaatggaccctgtggggtatagccggcacatggtggtgactgtcacccgcttcctctgtggcttcctggtcccagtcctcatcatcacagcttgctacctcaccatcgtgtgcaaactgcagcgcaaccgcctggccaagaccaagaagcccttcaagattattgtgaccatcatcattaccttcttcctctgctggtgcccctaccacacactcaacctcctagagctccaccacactgccatgcctggctctgtcttcagcctgggtttgcccctggccactgcccttgccattgccaacagctgcatgaaccccattctgtatgttttcatgggtcaggacttcaagaagttcaaggtggccctcttctctcgcctggtcaatgctctaagtgaagatacaggccactcttcctaccccagccatagaagctttaccaagatgtcatcaatgaatgagaggacttctatgaatgagagggagaccggcatgctttgatcctcactgtggaacccctcaatggactctctcaacccagggacacccaaggatatgtcttctgaagatcaaggcaagaacctctttagcatccaccaattttcactgcattttgcatgggatgaacagtgttttatgctgggaatctagggcctggaacccctttcttctagtggacagaacatgctgtgttccatacagccttggactagcaatttatgcttcttgggaggccagccttgactgactcaaagcaaaaaaggaagaattctcaaaagcattgccatgaactgggattggcatagggcggtgggattaagctgcctattgtgtgtgccccagaaatgacactctccaaggtccattcctggtgtgagcagtgagggggtcagagcaaacccagtgtgatgcagatcacacttggcccttgtatatatattatcagtagctggccagaaaaccctaccttcaagtcactgctctgtgttaaagtatgtggaaatgcataggtgatctgggagaggaaggtgacatatcagcccatgaactccataggccatgaatttggctttcggatcagctaggaagacagagaactggtcctgagaggtcctgtgggctctttgcaagggcaagacaagtgagggatgcaacgaggacttgagatttggcaaagaaatgagaaaggagaaaagaacctttaaaggatgcaggcatggagcagctcaccctagaacatcgcaggctgatggtgctttaggctggagctatttggggcgtcagggtggtgccagcccctgatctcaccttgcccctcttacctgggggtggggttgtggcaggcatcttcaccagcagccctcaccccatcacagggatttttttctgcctttcctaatccactcagctctggctggaggtgcttagaataaaacactggtggtggggcttctcattctggttaatttcctcaacgcctttggagacaggtccaaaatgcagctttgggaagcaactccggagagtcccctgggaagaagagtatgtccgaggactcagtcacttgagacagagtctggagctggactccttgaactgtgtttctgagctgcagacaccaaatacctcctggatacaggtgcctggcatggcttttctcatctaatactgacacgtccctgtggccacagagtgtcatagccccatttacaaatgacatagctgaggcccagatggggaaagtaacttgcccagcatcacacagctaatcagtggcagagttaagatctgaacctggctccgtctggctccagaaactctgttcttctatttggaatttatctgtggagattattctagtatattgatagcctacatttatttagcactttttatattatgcactttacatatgttttctcatttaatcattacagcaaccctgagttaggtatggttataacttcccttttacataggaggaatctgaggcttagagaggttaagtaacttgcccaaaggtacccagctagtctctgccggagcttggatttgaacttcagtttgcctggctcaaatgaggctgcagagttgggaaggacttaaaaagtttggagatttttgccataaatattgatttttctgcaaatgaggatgaacatcttaatggcctttaagaaactttgcaaatagttttcaaaaatgatgcaacatggcagagaaaatgcacttggcttccagctccctcaacagccattaacagcctcctaccgtggctcccacctcctatgtctccagagatcaaggcaatggggagggaaagctggcaggaggcagtcccttgtgggcctgaggccctttggctcctaagtgtccacattctgttctcttccaagtcccttcattgttaagctgattctccaacaagatgcaatgaacagatgcaatgtctaccccgcgctgggcgagttcccgaggccatgggctgtttggaatcacacttcattaagagacaaactgttccttcccttattgtgccttaatgcttatgacaaggcagctctgaattgatcccaagctggagcctctgaatgctttaaagagtttgaatatagacggtttgagagcaaaaagggagctttaaatattgctcagtggcccccatctcccctcttcccacatttactgaggcacgagatgggatgggacctgtcccgggtcacagcagcagtcgtcagcgccttggccctcctggcttgtaggatgctgcttttcctgggcttctggcagtccaggccaggatgggggagccaggaattcatgttgtcattggaaaagctgataaacaggagcacaattcaaaccggctgttttcctccttagagtctggcctccctctttctggctgctctgtgggtcttcctgttctgacttaggttcctgtcaagtacttaaatgcagccttaacatcccatacagtcttgtccccacagcttcatgtgaacatctccatgggtcatgcatatatcgtccctgcagtgtgcaaagtgtgctcacctgcactgctgcacaggcaaccaacatacttagtgcccagagccttctctctgggcccaggactcagtgatggggccttacttagccctgcctcctgggtggggtgggggagctgagggatcgtgaggacaagaggtagagggaaaagaaaagaagatggtgtttgaggataggggagggacaggagaggggacagaaaggtcccagagcatgatgatgaaggaaagggatctggcattcatgaagcacctacgatggttcaggcacaaacactgaaacctcaaattggccctggcagaaggggaccatcatagcaaggtggggggggggtgcagaaagtgagtttctgtttcaagaacagacttcactagttcagagttgcacagctagtgaggtatggagctgggctttgaatcaggtcagctgcctgaatgcccaacttcttcagcccttggaaggagagggtggggagaagaagaaggaaaagacaaggaagaaagaaagaagagagaaggggagaggaatggaagtccaaagagtgggaggaatttgatttcagaaccatctccagctgacccttgagccagcaaggacagggagaagggaagagcaagaacacgaagggcctcaagcaccgggatgcctttgccagccttagataattcccagagcgcacagagccctgcaggttcctgggtccttctccagagaagaggcacagagattctggcagcaaggttcagaaggggtgaggaaactgggcactgacaaagggaggggattggctcaaattcgaccccagagtcagctctggtggggttgggagcctggatgggtgggagaagatagaatccaatcgtgaaaaccataagggaccttcaaactcatcttgcccagatgtctcccatttcacagatgagggaactgaggttttgagagcttcccctgaggactctgcaaaacgaggtggtgtctggtttggatgaaagtggtcggtgattcctcaactcctgccctgcctccctctctcgttcctccctaacatgttatgctcttgttggggctgggatgccctaggcccaaggttaccaaatcctgggtttggaaaattgctgctgggggtggtatctaggaccagagaggaatctactatttctactgtgaaataattcagcagggggtcttcttacttcttccctttgaggacaaagtttctctcgaataaagagactgaagcaaga

SEQ ID NO: 117019 - DNA, 1890 bp, Homo sapiens
  Payload ID: 2828
  Gene Symbol: CMKLR1
  Gene Name: chemerin chemokine-like receptor 1
  Uniprot ID: Q99788
  ENST ID: ENST00000552995
  CDS Start-End: 504-1619
ccattcagggaagcagccccggcggccagcagggagctcaggacagagcaggctccctgggaagcctccgggtgataggggtgttccagctgcggcgctctgggggttcagagggggatcttgaatgaacaaatgaatgaactgctttctgggcaaacagccacagccagaggagcctgtgattggcagaaagaagccagggtgtgcaagtctccccaacagcctcgagtggcctgcagtcacagggaaccctcaggaagaccttccgggcagagaccagagggaagcccatctctccagcagaactgcttggatttttctaccaggaggctcagggctctgcaacaatgatagcagaagctgatggcatctagagatctaggctgggactagcacagcatcacttctaccactttctgttggtcacagcaactcaccatgccagtgcagattcaaggggaggagaaatagagtccacttcttgatgggaggcgtgacatagaatggaggatgaagattacaacacttccatcagttacggtgatgaataccctgattatttagactccattgtggttttggaggacttatcccccttggaagccagggtgaccaggatcttcctggtggtggtctacagcatcgtctgcttcctcgggattctgggcaatggtctggtgatcatcattgccaccttcaagatgaagaagacagtgaacatggtctggttcctcaacctggcagtggcagatttcctgttcaacgtcttcctcccaatccatatcacctatgccgccatggactaccactgggttttcgggacagccatgtgcaagatcagcaacttccttctcatccacaacatgttcaccagcgtcttcctgctgaccatcatcagctctgaccgctgcatctctgtgctcctccctgtctggtcccagaaccaccgcagcgttcgcctggcttacatggcctgcatggtcatctgggtcctggctttcttcttgagttccccatctctcgtcttccgggacacagccaacctgcatgggaaaatatcctgcttcaacaacttcagcctgtccacacctgggtcttcctcgtggcccactcactcccaaatggaccctgtggggtatagccggcacatggtggtgactgtcacccgcttcctctgtggcttcctggtcccagtcctcatcatcacagcttgctacctcaccatcgtgtgcaaactgcagcgcaaccgcctggccaagaccaagaagcccttcaagattattgtgaccatcatcattaccttcttcctctgctggtgcccctaccacacactcaacctcctagagctccaccacactgccatgcctggctctgtcttcagcctgggtttgcccctggccactgcccttgccattgccaacagctgcatgaaccccattctgtatgttttcatgggtcaggacttcaagaagttcaaggtggccctcttctctcgcctggtcaatgctctaagtgaagatacaggccactcttcctaccccagccatagaagctttaccaagatgtcatcaatgaatgagaggacttctatgaatgagagggagaccggcatgctttgatcctcactgtggaacccctcaatggactctctcaacccagggacacccaaggatatgtcttctgaagatcaaggcaagaacctctttagcatccaccaattttcactgcattttgcatgggatgaacagtgttttatgctgggaatctagggcctggaacccctttcttctagtggacagaacatgctgtgttccatacagccttggactagcaatttatgcttcttgggaggccagccttgactgactcaaagcaaaaaaggaagaattc

SEQ ID NO: 117020 - DNA, 555 bp, Homo sapiens
  Payload ID: 2828
  Gene Symbol: CMKLR1
  Gene Name: chemerin chemokine-like receptor 1
  ENST ID: ENST00000549466
  CDS Start-End: 126-555
gtatttctccaaagaaactctggaaggagacatgaggaactaacatagggaggtgtttctagctgtgtacagggactgattggctgaggactcacattggagagctgcagacaacataacggtgaatgagaatggaggatgaagattacaacacttccatcagttacggtgatgaataccctgattatttagactccattgtggttttggaggacttatcccccttggaagccagggtgaccaggatcttcctggtggtggtctacagcatcgtctgcttcctcgggattctgggcaatggtctggtgatcatcattgccaccttcaagatgaagaagacagtgaacatggtctggttcctcaacctggcagtggcagatttcctgttcaacgtcttcctcccaatccatatcacctatgccgccatggactaccactgggttttcgggacagccatgtgcaagatcagcaacttccttctcatccacaacatgttcaccagcgtcttcctgctgaccatcatcagctctgaccgctgcatctctgtgctcctcc

SEQ ID NO: 117021 - DNA, 632 bp, Homo sapiens
  Payload ID: 2828
  Gene Symbol: CMKLR1
  Gene Name: chemerin chemokine-like receptor 1
  ENST ID: ENST00000550573
  CDS Start-End: 192-632
aaagtggaacaggtgtctgtgattctgcccacggaaggagacatggaggaggaagaggctgaggggaagatggaagaaggagggaaggaaggagaaatctttgcttttgggtaatcaggtgtttctagctgtgtacagggactgattggctgaggactcacattggagagctgcagacaacataacggtgaatgagaatggaggatgaagattacaacacttccatcagttacggtgatgaataccctgattatttagactccattgtggttttggaggacttatcccccttggaagccagggtgaccaggatcttcctggtggtggtctacagcatcgtctgcttcctcgggattctgggcaatggtctggtgatcatcattgccaccttcaagatgaagaagacagtgaacatggtctggttcctcaacctggcagtggcagatttcctgttcaacgtcttcctcccaatccatatcacctatgccgccatggactaccactgggttttcgggacagccatgtgcaagatcagcaacttccttctcatccacaacatgttcaccagcgtcttcctgctgaccatcatcagctctgaccgctgcatctctgtgctcctccctgtctggtcc

SEQ ID NO: 117022 - DNA, 1893 bp, Homo sapiens
  Payload ID: 2828
  Gene Symbol: CMKLR1
  Gene Name: chemerin chemokine-like receptor 1
  Uniprot ID: Q99788
  ENST ID: ENST00000550402
  CDS Start-End: 602-1723
gtttctctggctgagttctgtcccagtcccattcagggaagcagccccggcggccagcagggagctcaggacagagcaggctccctgggaagcctccgggtgataggggtgttccagctgcggcgctctgggggttcagagggggatcttgaatgaacaaatgaatgaactgctttctgggcaaacagccacagccagaggagcctgtgattggcagaaagaagccagggtgtgcaagtctccccaacagcctcgagtggcctgcagtcacagggaaccctcaggaagaccttccgggcagagaccagagggaagcccatctctccagcagaactgcttggatttttctaccaggaggctcagggctctgcaacaatgatagcagaagctgatggcatctagagatctaggctgggactagcacagcatcacttctaccactttctgttggtcacagcaactcaccatgccagtgcagattcaaggggaggagaaatagagtccacttcttgatgggaggcgtgacatgtgtttctagctgtgtacagggactgattggctgaggactcacattggagagctgcagacaacataacggtgaatgagaatggaggatgaagattacaacacttccatcagttacggtgatgaataccctgattatttagactccattgtggttttggaggacttatcccccttggaagccagggtgaccaggatcttcctggtggtggtctacagcatcgtctgcttcctcgggattctgggcaatggtctggtgatcatcattgccaccttcaagatgaagaagacagtgaacatggtctggttcctcaacctggcagtggcagatttcctgttcaacgtcttcctcccaatccatatcacctatgccgccatggactaccactgggttttcgggacagccatgtgcaagatcagcaacttccttctcatccacaacatgttcaccagcgtcttcctgctgaccatcatcagctctgaccgctgcatctctgtgctcctccctgtctggtcccagaaccaccgcagcgttcgcctggcttacatggcctgcatggtcatctgggtcctggctttcttcttgagttccccatctctcgtcttccgggacacagccaacctgcatgggaaaatatcctgcttcaacaacttcagcctgtccacacctgggtcttcctcgtggcccactcactcccaaatggaccctgtggggtatagccggcacatggtggtgactgtcacccgcttcctctgtggcttcctggtcccagtcctcatcatcacagcttgctacctcaccatcgtgtgcaaactgcagcgcaaccgcctggccaagaccaagaagcccttcaagattattgtgaccatcatcattaccttcttcctctgctggtgcccctaccacacactcaacctcctagagctccaccacactgccatgcctggctctgtcttcagcctgggtttgcccctggccactgcccttgccattgccaacagctgcatgaaccccattctgtatgttttcatgggtcaggacttcaagaagttcaaggtggccctcttctctcgcctggtcaatgctctaagtgaagatacaggccactcttcctaccccagccatagaagctttaccaagatgtcatcaatgaatgagaggacttctatgaatgagagggagaccggcatgctttgatcctcactgtggaacccctcaatggactctctcaacccagggacacccaaggatatgtcttctgaagatcaaggcaagaacctctttagcatccaccaattttcactgcattttgcatgggatgaacagtgttttatgctgggaatctagggcctggaacccctttcttc

SEQ ID NO: 117023 - DNA, 1367 bp, Homo sapiens
  Payload ID: 2829
  Gene Symbol: XCL1
  Gene Name: chemokine (C motif) ligand 1
  Uniprot ID: P47992
  ENST ID: ENST00000367818
  CDS Start-End: 166-510
taagaaaaataaaagcatcagtattgcaaagactttccatgatcctacacccacctcgaaagccccctctcaccacaggaagtgcactgaccactggaggcataaaagaggtcctcaaagagcccgatcctcactctccttgcacagctcagcaggacctcagccatgagacttctcatcctggccctccttggcatctgctctctcactgcatacattgtggaaggtgtagggagtgaagtctcagataagaggacctgtgtgagcctcactacccagcgactgccggttagcagaatcaagacctacaccatcacggaaggctccttgagagcagtaatttttattaccaaacgtggcctaaaagtctgtgctgatccacaagccacatgggtgagagacgtggtcaggagcatggacaggaaatccaacaccagaaataacatgatccagaccaagccaacaggaacccagcaatcgaccaatacagctgtgactctgactggctagtagtctctggcaccctgtccgtctccagccagccagctcatttcactttacacgctcatggactgagtttatactcaccttttatgaaagcactgcatgaataaaattattcctttgtatttttacttttaaatgtcttctgtattcacttatatgttctaattaataaattatttattattaagaatagttccctagtctattcattatatttagggaaaggtagtgtatcattgttgtttgatttctgaccttgtacctctctttgatggtaaccataatggaagagattctggctagtgtctatcagaggtgaaagctatatcaatctctcttagagtccagcttgtaatggttctttacacatcagtcacaagttacagctgtgacaatggcaacaatttgagatgtatttcaacttgtctctataatagaattctgtttatagaataagggagaaaataatccagtcttcactgggttcccattctgagggtccactactcaaaaatttgcttcactcaatttttttcacctctttgtgttttattttggtgtcctattaaaggaataaaatgacacaacttgtcccttttttgtcccattagcaaaaattagaattttggtataaagaaactttattcaagtaaaaatcaataccctttgaattggacaataatctcactaccttattaggatttctgtatttgccattacgctagttatcatgcatgttatgctttactgcgaataagcttttaatgctccaaatgctgacccatgcaatatttcctcatgtgatcacaatttgcagtaaacttttaattaaatgctcatctggtaactcaacaccccag

SEQ ID NO: 117024 - DNA, 565 bp, Homo sapiens
  Payload ID: 2830
  Gene Symbol: XCL2
  Gene Name: chemokine (C motif) ligand 2
  Uniprot ID: Q9UBD3
  ENST ID: ENST00000367819
  CDS Start-End: 34-378
actctccctgcacagctcagcgggacctcagccatgagacttctcatcctggccctccttggcatctgctctctcactgcatacattgtggaaggtgtagggagtgaagtctcacataggaggacctgtgtgagcctcactacccagcgactgccagttagcagaatcaagacctacaccatcacggaaggctccttgagagcagtaatttttattaccaaacgtggcctaaaagtctgtgctgatccacaagccacgtgggtgagagacgtggtcaggagcatggacaggaaatccaacaccagaaataacatgatccagaccaagccaacaggaacccagcaatcgaccaatacagctgtgaccctgactggctagtagtctctggcaccctgtccgtctccagccagccagctcatttcactttacaccctcatggactgagattatactcaccttttatgaaagcactgcatgaataaaattattcctttgtatttttacttttaaatgtcttctgtattcacttatatgttctaattaataaattatttattattaagaa

SEQ ID NO: 117025 - DNA, 5281 bp, Homo sapiens
  Payload ID: 2831
  Gene Symbol: XCR1
  Gene Name: chemokine (C motif) receptor 1
  Uniprot ID: P46094
  ENST ID: ENST00000309285
  CDS Start-End: 358-1359
gttcatctggattcatggagtaggcgtttctattcaaacatgcaggctcttttctttatccagggcttgcagcttgattttcaggctgttcttggtttgaaggagttccaccaaggatccaccctaactgcctgcctgactggcttcttccttcctcctctctcactagctgtccccctctggccccctggctctctctgagactcctcccatcctcctcctccagccttctgggcaggacaggtgtttcagtttctttaagtgaaatatgaaacagagaagcaccatttctgcctcaagacgcatgtaaagaggtgtagattcagatgctctaaacgtccctgccatctggtccagatggagtcctcaggcaacccagagagcaccacctttttttactatgaccttcagagccagccgtgtgagaaccaggcctgggtctttgctaccctcgccaccactgtcctatactgcctggtgtttctcctcagcctagtgggcaacagcctggtcctgtgggtcctggtgaagtatgagagcctggagtccctcaccaacatcttcatcctcaacctgtgcctctcagacctggtgttcgcctgcttgttgcctgtgtggatctccccataccactggggctgggtgctgggagacttcctctgcaaactcctcaatatgatcttctccatcagcctctacagcagcatcttcttcctgaccatcatgaccatccaccgctacctgtcggtagtgagccccctctccaccctgcgcgtccccaccctccgctgccgggtgctggtgaccatggctgtgtgggtagccagcatcctgtcctccatcctcgacaccatcttccacaaggtgctttcttcgggctgtgattattccgaactcacgtggtacctcacctccgtctaccagcacaacctcttcttcctgctgtccctggggattatcctgttctgctacgtggagatcctcaggaccctgttccgctcacgctccaagcggcgccaccgcacggtcaagctcatcttcgccatcgtggtggcctacttcctcagctggggtccctacaacttcaccctgtttctgcagacgctgtttcggacccagatcatccggagctgcgaggccaaacagcagctagaatacgccctgctcatctgccgcaacctcgccttctcccactgctgctttaacccggtgctctatgtcttcgtgggggtcaagttccgcacacacctgaaacatgttctccggcagttctggttctgccggctgcaggcacccagcccagcctcgatcccccactcccctggtgccttcgcctatgagggcgcctccttctactgaggggcctgtggcggtgcaggcgcaggtgcaggtggacagggactggaatgggggtcatggagaagcgggcctggaaggagcattgcagaacacagcagggtggagacgtctcctccgctgcaggcgtgcagtgaaggtcattcattacaccagtgggtcccgccagcctctcatctgcgggaaagtggcttcctacctgggaattttatactgccatccaaaaaaacatttcttgaactctgagttcatcttgcacgctccttcatttagacatgtgtttctaatcactgtttagttcagaaggttctaagacatgaaaggattctgggaaaggtgcttccttggagactttacagggcctaaagctcattgtgataactgcacgatgctgacaagacaatgcctcccttccctgactgtaaggttgtccctactggtttattcactttggaggcgcctggctccgtattcctcaggtactgctggatgaggctgtctggaagacaaaagtcgccataccctgagataagcagtcatgttgatatctggattctaaaaatccacaactagactggagaaatgttctgtatcctggattcaagtcctagcccacgaactggcccttaaaaatttagctcataaatatttgattgaaggaatgaatttaataagtgctaccttctgcactaagtatttattcagagaatacaaagatgaatgagatacagttgctaccctccaggggccaacagcccagctccaaaggctcacctaccttggtgaacacccaccttggtgaaggcatctagggtggactcctccgacatctcatccttcccaggtggatagtgagctgacttcacatttatcactttgtacctaaagtgtcctcctcctatttggttgatggtggtagctccccccacccacccacactccaaacctcaagtcctcttggaggcctgtgttttcttttcctcaactcccacagccaggtccaaatgactatgcctgtctagtggctttcagagttgactcattcttgccattgcatgcccatggtttcatccctgaaacagggcctcacttccttggcatctccccactgctcctctctttccccaccaggctgttctctgcccttacaccaggtgcttcaaaacccttagtggctcctcattacttacaaatgaagtccatacactttagcaaggctttcaaggcctccacaatccgatgccagccaacttttccattcttattccactctaagcctcctccccacagcagcttgggatccaaccccaaaacaccactggccttctttcagacacatatctccccagtaccctacctctaggcatttgtcatgctgtcacctgggcctggaacatgttctagctgacaggccagcttctccaggaagccctccctaatctgcaaattagaacattctctgggttgtcgtgggattctgcttgtcccctctaaaataaaacaaccttgtgttgtagttacacacatgcaatgtcttatctccctgccccatcaggctgcaagcttcttgagggcaggaacctggtcttgaaccccagtgttctatcactgtgtgctcagtgggagcaaagaatcaacagctgttattatccttcagatttatgcttcttggggagccatgccctggggcacactttaccttctttgtcccaggctgcttctctataaatattaacctttctttcctagtctacactctcagagagtagtagaaagagagtagggtgtagtagtagagagattgcttatctctctctgtggcgatggctatgcttcaccttgccttctagttcatggtacgcatccctgcctctcacactggcccattgcttcacacccaagggcataaataaaagccactctctaaactttgccatgccacaaagacctgggcccaatctgtgaacctgatttggctctggcgtggggatttggaaaagcttcccatgcgattctgacatgcaccttcattaggtacatttggctgcaacttttttaaaaaatgaggagtccagagtcttctacagtcccttgagcagggatttgcacacagaagacactcaatatcttgttattgaataaagtagataccaatgtagccctctggccaacctagagagagcttgtaaggcatttccccttcagttccagatgcaacttcaatgatctatttgccaatggggcagtagatctggaggagtttatcggtctagggaagagccagggcctagttttaataatgaggccagtagcacctgctggacagggctgggcggcataccagtgaagggaaggggctcccatggacctacctgccagcctacaggtggggccactactcaccaccgatgggagaaacagcataaggaagagataatgaggtagtttgtggtatcagagctaagcctatgggcttctagttggcctaatctttcaaacacagtttcacactgattcttaacattttgttcaacttttactcagagggcaggctgagccagggagcaaaaaggcaaaggactcctactcacatacccacttagcaaaaccaaagcaccttgggctttgaacccacccttcttagaaggcaggtttgggggttgaggccccttgagaagctcacttcaccctctccccatgccatcccattcctacccatcccaagatgcttctcttgtatttctttcagcacatccagccatctccctgggagcgtttcatatctgactctttatacttccagtgatgttttggcatccctaatagactggctcccaaggcagtctttaatcaggagtcttcccctaatctagctcctcaagaacccaagggaagaggcacaaagagaagtatgaataggaagatagaagggtaacccagtcagagagggagtggcagatgacactgctgaaaaggagtttccagagagttgcacaccatgagccacgctgtctgtccctgaccacaacctccactggccaccacctcctgggcttcccctccctccacccacagaaaccattgctcaatctcaactggactcttgcaggcctatctctccctccaaacagagatgtcctggacacagagctgcagacctctaaccactcctggaacataaaaaaacccacggtggttctacagcatttacacctccagtttccctcagacagaatccagaagagaagaacctcgctgatctctgagcggagcatgtctccaagctcaggccagccccagaactccaatggcctcaactggagtggaaatccctcaaaggcacaaacccagttcctaccatctccctcagtgcctggcaatgtttgtggttggttgagtgagttaacaggagaccatcttttggccttttttctacctctgttttctcttactatacttgcctacatctcatcttctggtcaacaccaggtactcaccccatgagcttcttgtgaacttgtctggggcccaccggcctaaacatcatcttttttgtttggaattaagctttgttgaacttttcacaggtttcatttatgcaaatgcctgtgatgggacaaaaaggtctgcaaacatggaaacctggtctaaagatgtccaaagtaaactgtctgtggagtcgaatgacatttgagccctggacctaaactccaaatccaagctctttcccactgtgaccttgggcctctcaaggctcagtttcctcacctataaactgtagagaagccaataacagactcatccacactatgaggctgtgcataaggtcatgtatgtaaaactacttgctttgttgatcattctgtcccagataagtatgaattattatgcatcatttcattaaacaagaaagcttcactgtgtt

SEQ ID NO: 117026 - DNA, 332 bp, Homo sapiens
  Payload ID: 2831
  Gene Symbol: XCR1
  Gene Name: chemokine (C motif) receptor 1
  ENST ID: ENST00000395946
  CDS Start-End: 225-332
ctttaagtgaaatatgaaacagagaagcaccatttctgcctcaagacgcatgtaaagaggtgtagattcaggttggagtgcagtggcatgatcacagctctctgcagtctcgccctcctgggctcaagcaatctttccccaccccccggtttcctgagtagctgggactataggcatgcgccaccacacccggatgctctaaacgtccctgccatctggtccagatggagtcctcaggcaacccagagagcaccacctttttttactatgaccttcagagccagccgtgtgagaaccaggcctgggtctttgctaccctcgccaccactgtc

SEQ ID NO: 117027 - DNA, 592 bp, Homo sapiens
  Payload ID: 2832
  Gene Symbol: CCL1
  Gene Name: chemokine (C-C motif) ligand 1
  Uniprot ID: P22362
  ENST ID: ENST00000225842
  CDS Start-End: 71-361
agtggtgagctcttagcttcaccaggctcatcaaagctgctccaggaaggcccaagccagaccagaagacatgcagatcatcaccacagccctggtgtgcttgctgctagctgggatgtggccggaagatgtggacagcaagagcatgcaggtacccttctccagatgttgcttctcatttgcggagcaagagattcccctgagggcaatcctgtgttacagaaataccagctccatctgctccaatgagggcttaatattcaagctgaagagaggcaaagaggcctgcgccttggacacagttggatgggttcagaggcacagaaaaatgctgaggcactgcccgtcaaaaagaaaatgagcagatttctttccattgtgggctctggaaaccacatggcttcacctgtccccgaaactaccagccctacaccattccttctgccctgcttttgctaggtcacagaggatctgcttggtcttgataagctatgttgttgcactttaaacatttaaattatacaatcatcaacccccaaccctctgggtctcttggatttcagagtgaaaacttgattggcattgagaggtg

SEQ ID NO: 117028 - DNA, 1079 bp, Homo sapiens
  Payload ID: 2833
  Gene Symbol: CCL11
  Gene Name: chemokine (C-C motif) ligand 11
  Uniprot ID: P51671
  ENST ID: ENST00000305869
  CDS Start-End: 142-435
atgggcaaaggcttccctggaatctcccacactgtctgctccctataaaaggcaggcagatgggccagaggagcagagaggctgagaccaacccagaaaccaccacctctcacgccaaagctcacaccttcagcctccaacatgaaggtctccgcagcacttctgtggctgctgctcatagcagctgccttcagcccccaggggctcgctgggccagcttctgtcccaaccacctgctgctttaacctggccaataggaagataccccttcagcgactagagagctacaggagaatcaccagtggcaaatgtccccagaaagctgtgatcttcaagaccaaactggccaaggatatctgtgccgaccccaagaagaagtgggtgcaggattccatgaagtatctggaccaaaaatctccaactccaaagccataaataatcaccatttttgaaaccaaaccagagcctgagtgttgcctaatttgttttcccttcttacaatgcattctgaggtaacctcattatcagtccaaagggcatgggttttattatatatatatatttttttttttaaaaaaaaaacgtattgcatttaatttattgaggctttaaaacttatcctccatgaatatcagttatttttaaactgtaaagctttgtgcagattctttaccccctgggagccccaattcgatcccctgtcacgtgtgggcaatgttccccctctcctctcttcctccctggaatcttgtaaaggtcctggcaaagatgatcagtatgaaaatgtcattgttcttgtgaacccaaagtgtgactcattaaatggaagtaaatgttgttttaggaatacataaagtatgtgcatattttattatagtcactagttgtaatttttttgtgggaaatccacactgagctgagggggacaaagatggctgtggccaagaggggcttggttaagggggtgggaactatgtccctgggaaatgagtttttggcttagctggtcttcattgaaatgcagggtgaaactgacaaacccattccagccctctattcccattttcaacagtatttcc

SEQ ID NO: 117029 - DNA, 851 bp, Homo sapiens
  Payload ID: 2834
  Gene Symbol: CCL13
  Gene Name: chemokine (C-C motif) ligand 13
  Uniprot ID: Q99616
  ENST ID: ENST00000225844
  CDS Start-End: 76-372
aaaaggccggcggaacagccagaggagcagagaggcaaagaaacattgtgaaatctccaactcttaaccttcaacatgaaagtctctgcagtgcttctgtgcctgctgctcatgacagcagctttcaacccccagggacttgctcagccagatgcactcaacgtcccatctacttgctgcttcacatttagcagtaagaagatctccttgcagaggctgaagagctatgtgatcaccaccagcaggtgtccccagaaggctgtcatcttcagaaccaaactgggcaaggagatctgtgctgacccaaaggagaagtgggtccagaattatatgaaacacctgggccggaaagctcacaccctgaagacttgaactctgctacccctactgaaatcaagctggagtacgtgaaatgacttttccattctcctctggcctcctcttctatgctttggaatacttctaccataattttcaaataggatgcattcggttttgtgattcaaaatgtactatgtgttaagtaatattggctattatttgacttgttgctggtttggagtttatttgagtattgctgatcttttctaaagcaaggccttgagcaagtaggttgctgtctctaagcccccttcccttccactatgagctgctggcagtgggtttgtattcggttcccaggggttgagagcatgcctgtgggagtcatggacatgaagggatgctgcaatgtaggaaggagagctctttgtgaatgtgaggtgttgctaaatatgttattgtggaaagatgaatgcaatagtaggactgctgacattttgcagaaaatacattttatttaaaatctccta

SEQ ID NO: 117030 - DNA, 669 bp, Homo sapiens
  Payload ID: 2834
  Gene Symbol: CCL13
  Gene Name: chemokine (C-C motif) ligand 13
  ENST ID: ENST00000577681
  CDS Start-End: 1-190
cgtcccatctacttgctgcttcacatttagcagtaagaagatctccttgcagaggctgaagagctatgtgatcaccaccagcagcttcagaaccaaactgggcaaggagatctgtgctgacccaaaggagaagtgggtccagaattatatgaaacacctgggccggaaagctcacaccctgaagacttgaactctgctacccctactgaaatcaagctggagtacgtgaaatgacttttccattctcctctggcctcctcttctatgctttggaatacttctaccataattttcaaataggatgcattcggttttgtgattcaaaatgtactatgtgttaagtaatattggctattatttgacttgttgctggtttggagtttatttgagtattgctgatcttttctaaagcaaggccttgagcaagtaggttgctgtctctaagcccccttcccttccactatgagctgctggcagtgggtttgtattcggttcccaggggttgagagcatgcctgtgggagtcatggacatgaagggatgctgcaatgtaggaaggagagctctttgtgaatgtgaggtgttgctaaatatgttattgtggaaagatgaatgcaatagtaggactgctgacattttgcagaaaatacattttatttaaaatctccta

SEQ ID NO: 117031 - DNA, 472 bp, Homo sapiens
  Payload ID: 2835
  Gene Symbol: CCL14
  Gene Name: chemokine (C-C motif) ligand 14
  Uniprot ID: Q16627
  ENST ID: ENST00000622526
  CDS Start-End: 1-330
atgaagatctccgtggctgccattcccttcttcctcctcatcaccatcgccctagggaccaagactgaatcctcctcacaaactggggggaaaccgaaggttgttaaaatacagctaaagttggtggggggaccttaccacccctcagagtgctgcttcacctacactacctacaagatcccgcgtcagcggattatggattactatgagaccaacagccagtgctccaagcccggaattgtcttcatcaccaaaaggggccattccgtctgtaccaaccccagtgacaagtgggtccaggactatatcaaggacatgaaggagaactgagtgacccagaaggggtggcgaaggcacagctcagagacataaagagaagatgccaaggccccctcctccacccaccgctaactctcagccccagtcaccctcttggagcttccctgctttgaattaaagaccactcatgctc

SEQ ID NO: 117032 - DNA, 898 bp, Homo sapiens
  Payload ID: 2835
  Gene Symbol: CCL14
  Gene Name: chemokine (C-C motif) ligand 14
  Uniprot ID: Q16627
  ENST ID: ENST00000618404
  CDS Start-End: 110-391
attttaaaaaatatttggcctcaatgatcatttctcaacaattcctcaccgcaggagcctctgaagctcccaccaggccagctctcctcccacaacagcttcccacagcatgaagatctccgtggctgccattcccttcttcctcctcatcaccatcgccctagggaccaagactgaatcctcctcacggggaccttaccacccctcagagtgctgcttcacctacactacctacaagatcccgcgtcagcggattatggattactatgagaccaacagccagtgctccaagcccggaattgtcttcatcaccaaaaggggccattccgtctgtaccaaccccagtgacaagtgggtccaggactatatcaaggacatgaaggagaactgagtgacccagaaggggtggcgaaggcacagctcagagacataaagagaagatgccaaggccccctcctccacccaccgctaactctcagccccagtcaccctcttggagcttccctgctttgaattaaagaccactcatgctcttccctggcctcattcctttctacgggatttactcattggccatgcactgaggacaccagggtgtggcaccctcggcatcaagcctcgctctgcagaagttttgctggagcctggtacaaaaaataggtcaggcctgcaatgcaggtagtgagaagcagaaagtgagaaagaaaagcagtgtaaagaccgtctcctcctcagcaacaacagtagcagaccccgttttcttaatgctttctatactccaagcactctgctaggcagtctgtatgcattatcttatttaagcttcatgacaagtgtaaaagctacaaatcatcatttgattttttaggtaacacttcataaagggctctctatagca

SEQ ID NO: 117033 - DNA, 426 bp, Homo sapiens
  Payload ID: 2835
  Gene Symbol: CCL14
  Gene Name: chemokine (C-C motif) ligand 14
  ENST ID: ENST00000618060
  CDS Start-End: 27-224
ctcctcccacaacagcttcccacagcatgaagatctccgtggctgccattcccttcttcctcctcatcaccatcgccctagggaccaagactgaatcctcctcacggggaccttaccacccctcagagtgctgcttcacctacactacctacaagatcccgcgtcagcggattatggattactatgagaccaacagccagtgctccaagcccggaattgtgtagcttcatcaccaaaaggggccattccgtctgtaccaaccccagtgacaagtgggtccaggactatatcaaggacatgaaggagaactgagtgacccagaaggggtggcgaaggcacagctcagagacataaagagaagatgccaaggccccctcctccacccaccgctaactctcagccccagtcaccctcttggagcttccc

SEQ ID NO: 117034 - DNA, 3265 bp, Homo sapiens
  Payload ID: 2835
  Gene Symbol: CCL14
  Gene Name: chemokine (C-C motif) ligand 14
  ENST ID: ENST00000614009
  CDS Start-End: 2408-2755
acatccagccttgagatcttttgctaagtgtgacacagtgcccccagccctgtgctcatgttcatgcctagggaaaggcttctatcaaaagagttgaacttcttcccactggggatggaagaccatttcctcccttaaaccttggctctccctgcttccttcaggccaccaacaacacatgtgcaggatatgaaattgctgaggcatcactgctttcctacttcccttccaagtctcagctcccttattttaaaaaatatttggcctcaatgatcatttctcaacaattcctcaccgcaggagcctctgaagctcccaccaggccagctctcctcccacaacagcttcccacagcatgaagatctccgtggctgccattcccttcttcctcctcatcaccatcgccctagggaccaagactgaatcctcctcacgtgagtgcaatgccttgtcttccttccaacctagagcctgcagggaaataagcaggagtgaggttggggctcaggggaagaccaggagcagggactcagaaaggagggctggtatcttcttgaaattgtgtgtatagcaacattatataaatgaattatctactgagcaccacagcacttcaccccatggtgtggtgagcaggatggagatgagacttaggactgtaggttctgcttaagagtttaagttgggatcttccagccttgaccaatgagacttgacttgggagactccaggcttcattccactaccccaaatgccctctagtctccaaataaacagatcctgaatctccaggcctcacatggccttgatctcttatcattgccccccaggaccagtccccccttgccctcaaggacatggagtgagaccagcctgcctctctactccctcaatttctctctctttgccgctaagcaaaagagtggcccaccccatttggggtatatttcctcagggagattaggagcagtgtcttgagcccctcaagggcatttttctattggcctcctgaggtttgggcccagcctgcttccagcgtcacctgtgcccagtgagtgcagcattgcttgggtatgggctggggggaaacacgacagtgtggggtccatcctaggcccccttttctcagctgatttcttagaataagctgcctttagagataaccaaaactatttatcactcttccattttacctactctccttttcagaaactggggggaaaccgaaggttgttaaaatacagctaaagttggtgggtatgtgcacagtttgacttgccctctccgatgtcatttgtcagctcagaggaacaaggtgggagagtataggagctctgactgggtctcaggaaacaggggccccttatgccgttctttggatcgtgaggatgctgcctggaatggagctggaaaacaggatgagacccttccacccagacatctggccaccctcagtgacctctgaggccattgtgatgcacatccatgattctatgaagcagggtcacataacatgcacacacctgatttctccactccataaccacaacatgtgcctgtttgtacagggctcttggcctacaatgtccttcctgctacctctataattcaagcttggggtggctgctgtcaccttgcttctcctataaaagccatgaaacttctcaatcagaaaatagatgaaaaaatcacccaatccagtgatttttaaaactttttagaccacaaaaccttttcttcaagcaatatcttccacagaggcccaatatgtaaaacagaaaaaatgggttgagtagggtacaagacaccactctcaaatgcagcaaggcctccacaatagtccctgaggcccccagagctccagggagctcagtgtaaaaaccactgatgcagtccaagggcctcatttacagaggagggaacagggggaaagtaaaatggccacagtacacaggaagcacaggcaaggttaggttaggatttgggtgccctgactctgtggcctttgtccttggggcttgctgtgggcatcctgctctctctgcaggttgtcggttcaatggggacatgggcagggtggagcactaggaggggctgggtttgcattcccaaatggcatgtctccaaatccctattgggatttcttccaaatattcctcctatttggagcacctttcccgaataaggcatgaaggctgcatgatattggccaagtccctagccttctctgccagtcggcccccagagatggtgtaagaagatctgagtgtgctgctcttcaatcctggagttgaaagtcatccaccagtctttccaagaggggttgaagaaaaggaggaagggtgattgatgatgagggaggagaaaaagaagagcccaggagtaccatggagaaggagaagagaagatgaggaaagcctactctcccctccaagttctgaggggctgtctcctccttccttccctcctccatgccctcagcttgcaggagcagccaatggtatggcctttaacaaggggcccctcctcagcatctgatgctctctcctcagggggaccttaccacccctcagagtgctgcttcacctacactacctacaagatcccgcgtcagcggattatggattactatgagaccaacagccagtgctccaagcccggaattgtcttcatcaccaaaaggggccattccgtctgtaccaaccccagtgacaagtgggtccaggactatatcaaggacatgaaggagaactgagtgacccagaaggggtggcgaaggcacagctcagagacataaagagaagatgccaaggccccctcctccacccaccgctaactctcagccccagtcaccctcttggagcttccctgctttgaattaaagaccactcatgctcttccctggcctcattcctttctacgggatttactcattggccatgcactgaggacaccagggtgtggcaccctcggcatcaagcctcgctctgcagaagttttgctggagcctggtacaaaaaataggtcaggcctgcaatgcaggtagtgagaagcagaaagtgagaaagaaaagcagtgtaaagaccgtctcctcctcagcaacaacagtagcagaccccgttttcttaatgctttctatactccaagcactctgctaggcagtctgtatgcattatcttatttaagcttcatgacaagtgtaaaagctacaaatcatcatttgattttttaggtaacacttcataaagggctctctatagcagtc

SEQ ID NO: 117035 - DNA, 472 bp, Homo sapiens; identical to SEQ ID NO: 117031
  Payload ID: 2835
  Gene Symbol: CCL14
  Gene Name: chemokine (C-C motif) ligand 14
  Uniprot ID: Q16627
  ENST ID: ENST00000619040
  CDS Start-End: 1-330

SEQ ID NO: 117036 - DNA, 426 bp, Homo sapiens; identical to SEQ ID NO: 117033
  Payload ID: 2835
  Gene Symbol: CCL14
  Gene Name: chemokine (C-C motif) ligand 14
  ENST ID: ENST00000620991
  CDS Start-End: 27-224

SEQ ID NO: 117037 - DNA, 898 bp, Homo sapiens; identical to SEQ ID NO: 117032
  Payload ID: 2835
  Gene Symbol: CCL14
  Gene Name: chemokine (C-C motif) ligand 14
  Uniprot ID: Q16627
  ENST ID: ENST00000632700
  CDS Start-End: 110-391

SEQ ID NO: 117038 - DNA, 3265 bp, Homo sapiens; identical to SEQ ID NO: 117034
  Payload ID: 2835
  Gene Symbol: CCL14
  Gene Name: chemokine (C-C motif) ligand 14
  ENST ID: ENST00000633434
  CDS Start-End: 2408-2755

SEQ ID NO: 117039 - DNA, 1080 bp, Homo sapiens
  Payload ID: 2836
  Gene Symbol: CCL15
  Gene Name: chemokine (C-C motif) ligand 15
  Uniprot ID: Q16663
  ENST ID: ENST00000614050
  CDS Start-End: 554-895
tctcggtctctcactctgccttatacccctcagttgaattatttcttctgaggaggcaagaactgaggctgctgcagactgatatggattcaccactgctaacacctcctggttggaactacaggaatagaactggaaagggaaaaaaggcagcattcaccacatcccaatcctgaatccaagagtctaagatagtcccccactcctatctcaggcttagaggattagattaatctcctggagggaagactcttccttgaaacatttttttttatctgcctgtagctattgggataattcgggaaatccacagggacagttcaagtcatctttgtcctctactttctgttgcactctcagccttgttctctttttagaaactgcatggtaactattatatagctaaagaagagcattctgacctctgccctctgccctgggacttcctggatcctcctcttcttataaatacaagggcagagctggtatcccggggagccaggaagcagtgagcccaggagtcctcggccagccctgcctgcccaccaggaggatgaaggtctccgtggctgccctctcctgcctcatgcttgttgctgtccttggatcccaggcccagttcataaatgatgcagagacagagttaatgatgtcaaagcttccactggaaaatccagtagttctgaacagctttcactttgctgctgactgctgcacctcctacatctcacaaagcatcccgtgttcactcatgaaaagttattttgaaacgagcagcgagtgctccaagccaggtgtcatattcctcaccaagaaggggcggcaagtctgtgccaaacccagtggtccgggagttcaggattgcatgaaaaagctgaagccctactcaatataataataaagagacaaaagaggccagccacccacctccaacacctcctgtgagtttcttggtctgaaatacttaaaaaatatatatattgttgtgtctggtaatgaaagtaatgcatctaataaagagtattcaattttttaactttgcttgagttttaagaggaaataaactaatataaaactgaa

SEQ ID NO: 117040 - DNA, 1073 bp, Homo sapiens
  Payload ID: 2836
  Gene Symbol: CCL15
  Gene Name: chemokine (C-C motif) ligand 15
  Uniprot ID: Q16663
  ENST ID: ENST00000617897
  CDS Start-End: 547-888
tctcggtctctcactctgccttatacccctcagttgaattatttcttctgaggaggcaagaactgaggctgctgcagactgatatggattcaccactgctaacacctcctggttggaactacaggaatagaactggaaagggaaaaaaggcagcattcaccacatcccaatcctgaatccaagagtctaagatagtcccccactcctatctcaggcttagaggattagattaatctcctggagggaagactcttccttgaaacatttttttttatctgcctgtagctattgggataattcgggaaatccacagggacagttcaagtcatctttgtcctctactttctgttgcactctcagccttgttctctttttagaaactgcatggtaactattatatagctaaagaagagcattctgacctctgccctgggacttcctggatcctcctcttcttataaatacaagggcagagctggtatcccggggagccaggaagcagtgagcccaggagtcctcggccagccctgcctgcccaccaggaggatgaaggtctccgtggctgccctctcctgcctcatgcttgttgctgtccttggatcccaggcccagttcacaaatgatgcagagacagagttaatgatgtcaaagcttccactggaaaatccagtagttctgaacagctttcactttgctgctgactgctgcacctcctacatctcacaaagcatcccgtgttcactcatgaaaagttattttgaaacgagcagcgagtgctccaagccaggtgtcatattcctcaccaagaaggggcggcaagtctgtgccaaacccagtggtccgggagttcaggattgcatgaaaaagctgaagccctactcaatataataataaagagacaaaagaggccagccacccacctccaacacctcctgtgagtttcttggtctgaaatacttaaaaaatatatatattgttgtgtctggtaatgaaagtaatgcatctaataaagagtattcaattttttaactttgcttgagttttaagaggaaataaactaatataaaactgaa

SEQ ID NO: 117041 - DNA, 718 bp, Homo sapiens
  Payload ID: 2836
  Gene Symbol: CCL15
  Gene Name: chemokine (C-C motif) ligand 15
  ENST ID: ENST00000614368
  CDS Start-End: 1-185
gctgcacctcctacatctcacaaagcatcccgtgttcactcatgaaaagttattttgaaacgagcagcgagtgctccaagccaggtgtcatattcctcaccaagaaggggcggcaagtctgtgccaaacccagtggtccgggagttcaggattgcatgaaaaagctgaagccctactcaatataataataaagagacaaaagaggccagccacccacctccaacacctcctagatctgagcctggaacaggtgttgcagagaagcagaaaaagagaggactcacaccagttgactcttgtggcatgattttggatgtggcattggagctggtctctctaggattctacctcggcctcccaggttcaagcaattctcctgcctcagcctccctactagctgggattacgtgcctgccaccagacctgactaatttctgtatttttagtagagacagggtttcgccttgttggtcaggctggtctcaaactcctaacctcagatgatccacccacctcggcctcccaaagtactggaattaacggcatgagccactgcactcagcctctacctacttttcaagccttcctgatactacctaaaatctttgcagtaaagtcctttttgcttaatcaaccagagtcagtttgtatagctttccaacaaaaaactccaactgatatgaacaataaactttctgggactttgaaggtctaaaaa

SEQ ID NO: 117042 - DNA, 718 bp, Homo sapiens; identical to SEQ ID NO: 117041
  Payload ID: 2836
  Gene Symbol: CCL15
  Gene Name: chemokine (C-C motif) ligand 15
  ENST ID: ENST00000631730
  CDS Start-End: 1-185

SEQ ID NO: 117043 - DNA, 1506 bp, Homo sapiens
  Payload ID: 2837
  Gene Symbol: CCL16
  Gene Name: chemokine (C-C motif) ligand 16
  Uniprot ID: O15467
  ENST ID: ENST00000611905
  CDS Start-End: 77-439
gttggcaagcggaccaccagcaacagacaacatcttcattcggctctccctgaagctgtactgcctcgctgagaggatgaaggtctccgaggctgccctgtctctccttgtcctcatccttatcattacttcggcttctcgcagccagccaaaagttcctgagtgggtgaacaccccatccacctgctgcctgaagtattatgagaaagtgttgccaaggagactagtggtgggatacagaaaggccctcaactgtcacctgccagcaatcatcttcgtcaccaagaggaaccgagaagtctgcaccaaccccaatgacgactgggtccaagagtacatcaaggatcccaacctacctttgctgcctaccaggaacttgtccacggttaaaattattacagcaaagaatggtcaaccccagctcctcaactcccagtgatgaccaggctttagtggaagcccttgtttacagaagagaggggtaaacctatgaaaacaggggaagccttattaggctgaaactagccagtcacattgagagaagcagaacaatgatcaaaataaaggagaagtatttcgaatattttctcaatcttaggaggaaataccaaagttaagggacgtgggcagaggtacgctcttttatttttatatttatatttttatttttttgagatagggtcttactctgtcacccaggctggagtgcagtggtgtgatcttggctcacttgatcttggctcactgtaacctccacctcccaggctcaagtgatcctcccaccccagcctcccgagtagctgggactacaggcttgcgccaccacacctggctaatttttgtatttttggtagagacgggattctaccatgttgcccaggctggtctcaaactcgtgtgcccaagcaatccacctgcctcagccttccaaaagtgctgggattacaggcgtgagccaccacatccggccagtgcactcttaatacacagaaaaatatatttcacatccttctcctgctctctttcaattcctcacttcacaccagtacacaagccattctaaatacttagccagtttccagccttccagatgatctttgccctctgggtcttgacccattaagagccccatagaactcttgatttttcctgtccatctttatggatttttctggatctatattttcttcaattattctttcattttataatgcaactttttcataggaagtccggatgggaatattcacattaatcatttttgcagagactttgctagatcctctcatattttgtcttcctcagggtggcaggggtacagagagtgcctgattggaaaaaaaaaaaaaagagagagagagagaagaagaagaagaagagacacaaatctctacctcccatgttaagctttgcaggacagggaaagaaagggtatgagacacggctaggggtaaactcttagtccaaaacccaaacatgcaataaataaaactcccttatttgaca

SEQ ID NO: 117044 - DNA, 687 bp, Homo sapiens
  Payload ID: 2837
  Gene Symbol: CCL16
  Gene Name: chemokine (C-C motif) ligand 16
  ENST ID: ENST00000613642
  CDS Start-End: 1-287
aagttcctgagtgggtgaacaccccatccacctgctgcctgaagtattatgagaaagtgttgccaaggagactagtggtgggatacagaaaggccctcaactgtcacctgccagcaatcatcttcgtcaccaagaggaaccgagaagtctgcaccaaccccaatgacgactgggtccaagagtacatcaaggatcccaacctacctttgctgcctaccaggaacttgtccacggttaaaattattacagcaaagaatggtcaaccccagctcctcaactcccagtgatgaccaggctttagtggaagcccttgtttacagaagagaggggtaaacctatgaaaacaggggaagccttattaggctgaaactagccagtcacattgagagaagcagaacaatgatcaaaataaaggagaagtatttcgaatattttctcaatcttaggaggaaataccaaagttaagggacgtgggcagagggtggcaggggtacagagagtgcctgattggaaaaaaaaaaaaaagagagagagagagaagaagaagaagaagagacacaaatctctacctcccatgttaagctttgcaggacagggaaagaaagggtatgagacacggctaggggtaaactcttagtccaaaacccaaacatgcaataaataaaactcccttatttgacagcttga

SEQ ID NO: 117045 - DNA, 1634 bp, Homo sapiens
  Payload ID: 2837
  Gene Symbol: CCL16
  Gene Name: chemokine (C-C motif) ligand 16
  ENST ID: ENST00000610493
  CDS Start-End: 42-203
tcattcggctctccctgaagctgtactgcctcgctgagaggatgaaggtctccgaggctgccctgtctctccttgtcctcatccttatcattacttcggcttctcgcagccagccaagttggagcgcagtgtcgcgatctcggctcaccacaacctccgcctcccgagttcaagtgattctcctgcctcagcctcctgagtagctgggatcacaggcacacaccaccacgcccagctaatttttgtatttttatagagacggggtttcaccatgttggccaggctggtctcaaacttctgacctcaggtgatccgcccgcctcggcctcccaaagtgctgggattacagaagttcctgagtgggtgaacaccccatccacctgctgcctgaagtattatgagaaagtgttgccaaggagactagtggtgggatacagaaaggccctcaactgtcacctgccagcaatcatcttcgtcaccaagaggaaccgagaagtctgcaccaaccccaatgacgactgggtccaagagtacatcaaggatcccaacctacctttgctgcctaccaggaacttgtccacggttaaaattattacagcaaagaatggtcaaccccagctcctcaactcccagtgatgaccaggctttagtggaagcccttgtttacagaagagaggggtaaacctatgaaaacaggggaagccttattaggctgaaactagccagtcacattgagagaagcagaacaatgatcaaaataaaggagaagtatttcgaatattttctcaatcttaggaggaaataccaaagttaagggacgtgggcagaggtacgctcttttatttttatatttatatttttatttttttgagatagggtcttactctgtcacccaggctggagtgcagtggtgtgatcttggctcacttgatcttggctcactgtaacctccacctcccaggctcaagtgatcctcccaccccagcctcccgagtagctgggactacaggcttgcgccaccacacctggctaatttttgtatttttggtagagacgggattctaccatgttgcccaggctggtctcaaactcgtgtgcccaagcaatccacctgcctcagccttccaaaagtgctgggattacaggcgtgagccaccacatccggccagtgcactcttaatacacagaaaaatatatttcacatccttctcctgctctctttcaattcctcacttcacaccagtacacaagccattctaaatacttagccagtttccagccttccagatgatctttgccctctgggtcttgacccattaagagccccatagaactcttgatttttcctgtccatctttatggatttttctggatctatattttcttcaattattctttcattttataatgcaactttttcataggaagtccggatgggaatattcacattaatcatttttgcagagactttgctagatcctctcatattttgtcttcctcagggtggcaggggtacagagagtgcctgattggaaaaaaaaaaaaaagagagagagagagaagaagaagaagaagagacacaaatctctacctcccatgttaagctttgcaggacagggaaagaaagggtatga

SEQ ID NO: 117046 - DNA, 1506 bp, Homo sapiens
  Payload ID: 2837
  Gene Symbol: CCL16
  Gene Name: chemokine (C-C motif) ligand 16
  Uniprot ID: O15467
  ENST ID: ENST00000621559
  CDS Start-End: 77-439
gttggcaagcggaccaccagcaacagacaacatcttcattcggctctccctgaagctgtactgcctcgctgagaggatgaaggtctccgaggctgccctgtctctccttgtcctcatccttatcattacttcggcttctcgcagccagccaaaagttcctgagtgggtgaacaccccatccacctgctgcctgaagtattatgagaaagtgttgccaaggagactagtggtgggatacagaaaggccctcaactgtcacctgccagcaatcatcttcgtcaccaagaggaaccgagaagtctgcaccaaccccaatgacgactgggtccaagagtacatcaaggatcccaacctacctttgctgcctaccaggaacttgtccacggttaaaattattacagcaaagaatggtcaaccccagctcctcaactcccagtgatgaccaggctttagtggaagcccttgtttacagaagagaggggtaaacctatgaaaacaggggaagccttattaggctgaaactagccagtcacattgagagaagcagaacaatgatcaaaataaaggagaagtatttcgaatattttctcaatcttaggaggaaataccaaagttaagggacgtgggcagaggtacgctcttttatttttatatttatatttttatttttttgagatagggtcttactctgtcacccaggctggagtgcagtggtgtgatcttggctcacttgatcttggctcactgtaacctccacctcccaggctcaagtgatcctcccaccccagcctcctgagtagctgggactacaggcttgcgccaccacacctggctaatttttgtatttttggtagagacgggattctaccatgttgcccaggctggtctcaaactcgtgtgcccaagcaatccacctgcctcagccttccaaaagtgctgggattacaggcgtgagccaccacatccggccagtgcactcttaatacacagaaaaatatatttcacatccttctcctgctctctttcaattcctcacttcacaccagtacacaagccattctaaatacttagccagtttccagccttccagatgatctttgccctctgggtcttgacccattaagagccccatagaactcttgatttttcctgtccatctttatggatttttctggatctatattttcttcaattattctttcattttataatgcaactttttcataggaagtccggatgggaatattcacattaatcatttttgcagagactttgctagatcctctcatattttgtcttcctcagggtggcaggggtacagagagtgcctgattggaaaaaaaaaaaaaagagagagagagagaagaagaagaagaagagacacaaatctctacctcccatgttaagctttgcaggacagggaaagaaagggtatgagacacggctaggggtaaactcttagtccaaaacccaagcatgcaataaataaaactcccttatttgaca

SEQ ID NO: 117047 - DNA, 1634 bp, Homo sapiens
  Payload ID: 2837
  Gene Symbol: CCL16
  Gene Name: chemokine (C-C motif) ligand 16
  ENST ID: ENST00000631489
  CDS Start-End: 42-203
tcattcggctctccctgaagctgtactgcctcgctgagaggatgaaggtctccgaggctgccctgtctctccttgtcctcatccttatcattacttcggcttctcgcagccagccaagttggagcgcagtgtcgcgatctcggctcaccacaacctccgcctcccgagttcaagtgattctcctgcctcagcctcctgagtagctgggatcacaggcacacaccaccacgcccagctaatttttgtatttttatagagacggggtttcaccatgttggccaggctggtctcaaacttctgacctcaggtgatccgcccgcctcggcctcccaaagtgctgggattacagaagttcctgagtgggtgaacaccccatccacctgctgcctgaagtattatgagaaagtgttgccaaggagactagtggtgggatacagaaaggccctcaactgtcacctgccagcaatcatcttcgtcaccaagaggaaccgagaagtctgcaccaaccccaatgacgactgggtccaagagtacatcaaggatcccaacctacctttgctgcctaccaggaacttgtccacggttaaaattattacagcaaagaatggtcaaccccagctcctcaactcccagtgatgaccaggctttagtggaagcccttgtttacagaagagaggggtaaacctatgaaaacaggggaagccttattaggctgaaactagccagtcacattgagagaagcagaacaatgatcaaaataaaggagaagtatttcgaatattttctcaatcttaggaggaaataccaaagttaagggacgtgggcagaggtacgctcttttatttttatatttatatttttatttttttgagatagggtcttactctgtcacccaggctggagtgcagtggtgtgatcttggctcacttgatcttggctcactgtaacctccacctcccaggctcaagtgatcctcccaccccagcctcctgagtagctgggactacaggcttgcgccaccacacctggctaatttttgtatttttggtagagacgggattctaccatgttgcccaggctggtctcaaactcgtgtgcccaagcaatccacctgcctcagccttccaaaagtgctgggattacaggcgtgagccaccacatccggccagtgcactcttaatacacagaaaaatatatttcacatccttctcctgctctctttcaattcctcacttcacaccagtacacaagccattctaaatacttagccagtttccagccttccagatgatctttgccctctgggtcttgacccattaagagccccatagaactcttgatttttcctgtccatctttatggatttttctggatctatattttcttcaattattctttcattttataatgcaactttttcataggaagtccggatgggaatattcacattaatcatttttgcagagactttgctagatcctctcatattttgtcttcctcagggtggcaggggtacagagagtgcctgattggaaaaaaaaaaaaaagagagagagagagaagaagaagaagaagagacacaaatctctacctcccatgttaagctttgcaggacagggaaagaaagggtatga

SEQ ID NO: 117048 - DNA, 687 bp, Homo sapiens
  Payload ID: 2837
  Gene Symbol: CCL16
  Gene Name: chemokine (C-C motif) ligand 16
  ENST ID: ENST00000633277
  CDS Start-End: 1-287
aagttcctgagtgggtgaacaccccatccacctgctgcctgaagtattatgagaaagtgttgccaaggagactagtggtgggatacagaaaggccctcaactgtcacctgccagcaatcatcttcgtcaccaagaggaaccgagaagtctgcaccaaccccaatgacgactgggtccaagagtacatcaaggatcccaacctacctttgctgcctaccaggaacttgtccacggttaaaattattacagcaaagaatggtcaaccccagctcctcaactcccagtgatgaccaggctttagtggaagcccttgtttacagaagagaggggtaaacctatgaaaacaggggaagccttattaggctgaaactagccagtcacattgagagaagcagaacaatgatcaaaataaaggagaagtatttcgaatattttctcaatcttaggaggaaataccaaagttaagggacgtgggcagagggtggcaggggtacagagagtgcctgattggaaaaaaaaaaaaaagagagagagagagaagaagaagaagaagagacacaaatctctacctcccatgttaagctttgcaggacagggaaagaaagggtatgagacacggctaggggtaaactcttagtccaaaacccaagcatgcaataaataaaactcccttatttgacagcttga

SEQ ID NO: 117049 - DNA, 615 bp, Homo sapiens
  Payload ID: 2838
  Gene Symbol: CCL17
  Gene Name: chemokine (C-C motif) ligand 17
  Uniprot ID: Q92583
  ENST ID: ENST00000219244
  CDS Start-End: 130-414
gctcagagagaagtgactttgagctcacagtgtcaccgcctgctgatgggagagctgaattcaaaaccagggtgtctccctgagcagagggacctgcacacagagactccctcctgggctcctggcaccatggccccactgaagatgctggccctggtcaccctcctcctgggggcttctctgcagcacatccacgcagctcgagggaccaatgtgggccgggagtgctgcctggagtacttcaagggagccattccccttagaaagctgaagacgtggtaccagacatctgaggactgctccagggatgccatcgtttttgtaactgtgcagggcagggccatctgttcggaccccaacaacaagagagtgaagaatgcagttaaatacctgcaaagccttgagaggtcttgaagcctcctcaccccagactcctgactgtctcccgggactacctgggacctccaccgttggtgttcaccgcccccaccctgagcgcctgggtccaggggaggccttccagggacgaagaagagccacagtgagggagatcccatccccttgtctgaactggagccatgggcacaaagggcccagattaaagtctttatcctc

SEQ ID NO: 117050 - DNA, 550 bp, Homo sapiens
  Payload ID: 2838
  Gene Symbol: CCL17
  Gene Name: chemokine (C-C motif) ligand 17
  Uniprot ID: Q92583
  ENST ID: ENST00000616880
  CDS Start-End: 65-349
agcagggtgtctccctgagcagagggacctgcacacagagactccctcctgggctcctggcaccatggccccactgaagatgctggccctggtcaccctcctcctgggggcttctctgcagcacatccacgcagctcgagggaccaatgtgggccgggagtgctgcctggagtacttcaagggagccattccccttagaaagctgaagacgtggtaccagacatctgaggactgctccagggatgccatcgtttttgtaactgtgcagggcagggccatctgttcggaccccaacaacaagagagtgaagaatgcagttaaatacctgcaaagccttgagaggtcttgaagcctcctcaccccagactcctgactgtctcccgggactacctgggacctccaccgttggtgttcaccgcccccaccctgagcgcctgggtccaggggaggccttccagggacgaagaagagccacagtgagggagatcccatccccttgtctgaactggagccatgggcacaaagggcccagattaaagtctttatcctc

SEQ ID NO: 117051 - DNA, 1324 bp, Homo sapiens
  Payload ID: 2839
  Gene Symbol: CCL18
  Gene Name: chemokine (C-C motif) ligand 18 (pulmonary and activation-regulated)
  Uniprot ID: P55774
  ENST ID: ENST00000616054
  CDS Start-End: 64-333
gccaggagttgtgagtttccaagccccagctcactctgaccacttctctgcctgcccagcatcatgaagggccttgcagctgccctccttgtcctcgtctgcaccatggccctctgctcctgtgcacaagttggtaccaacaaagagctctgctgcctcgtctatacctcctggcagattccacaaaagttcatagttgactattctgaaaccagcccccagtgccccaagccaggtgtcatcctcctaaccaagagaggccggcagatctgtgctgaccccaataagaagtgggtccagaaatacatcagcgacctgaagctgaatgcctgaggggcctggaagctgcgagggcccagtgaacttggtgggcccaggagggaacaggagcctgagccagggcaatggccctgccaccctggaggctacctcttctaagagtcccatctgctatgcccagccacattaactaactttaatcttagtttatgcatcatatttcattttgaaattgatttctattgttgagctgcattatgaaattagtattttctctgacatctcatgacattgtctttatcatcctttcccctttcccttcaactcttcgtacattcaatgcatggatcaatcagtgtgattagctttctcagcagacattgtgccatatgtatcaaatgacaaatctttattgaatggttttgctcagcaccaccttttaatatattggcagtacttattatataaaaggtaaaccagcattctcactgtgacgactctgttgattttgtttcactaatcggaatcacagactgagaggaattctgggggaggagtagggaaatatgaaaaggggcagaaacagcaagatagggaccaagtacttctacagtcataccagacatttccctggagatactttcctgaaaagttgaaacagacaccattagtttataaaccatattgtaactgaaatgtgatagaaaaattttctacttaaatgaatatcaagatgacgctgcaatgcatatttacgcacacaagctcattttcataaatgaagctttcctcagaatgatggctaacatctgttgaggtcttaccaagtgctgggttttgggctaagtacttatattagtaaaagtctagcaaatactgcccatagtctagcaaggactccttacctggaagttgctgaaagccttggtaatgttatctttgttctccactctgcttttggggaggatgttttccatgactatacgagatgaggcttggggctgggtggccagagttagcaaataaaaatacagaatggatacta

SEQ ID NO: 117052 - DNA, 1324 bp, Homo sapiens
  Payload ID: 2839
  Gene Symbol: CCL18
  Gene Name: chemokine (C-C motif) ligand 18 (pulmonary and activation-regulated)
  Uniprot ID: P55774
  ENST ID: ENST00000614828
  CDS Start-End: 64-333
gccaggagttgtgagtttccaagccccagctcactctgaccacttctctgcctgcccagcatcatgaagggccttgcagctgccctccttgtcctcgtctgcaccatggccctctgctcctgtgcacaagttggtaccaacaaagagctctgctgcctcgtctatacctcctggcagattccacaaaagttcatagttgactattctgaaaccagcccccagtgccccaagccaggtgtcatcctcctaaccaagagaggccggcagatctgtgctgaccccaataagaagtgggtccagaaatacatcagcgacctgaagctgaatgcctgaggggcctggaagctgcgagggcccagtgaacttggtgggcccaggagggaacaggagcctgagccagggcaatggccctgccaccctggaggccacctcttctaagagtcccatctgctatgcccagccacattaactaactttaatcttagtttatgcatcatatttcattttgaaattgatttctattgttgagctgcattatgaaattagtattttctctgacatctcatgacattgtctttatcatcctttcccctttcccttcaactcttcgtacattcaatgcatggatcaatcagtgtgattagctttctcagcagacattgtgccatatgtatcaaatgacaaatctttattgaatggttttgctcagcaccaccttttaatatattggcagtacttattatataaaaggtaaaccagcattctcactgtgacgactctgttgattttgtttcactaatcggaatcacagactgagaggaattctgggggaggagtagggaaatatgaaaaggggcagaaacagcaagatagggaccaagtacttctacagtcataccagacatttccctggagatactttcctgaaaagttgaaacagacaccattagtttataaaccatattgtaactgaaatgtgatagaaaaattttctacttaaatgaatatcaagatgacgctgcaatgcatatttacgcacacaagctcattttcataaatgaagctttcctcagaatgatggctaacatctgttgaggtcttaccaagtgctgggttttgggctaagtacttatattagtaaaagtctagcaaatactgcccatagtctagcaaggactccttacctggaagttgctgaaagccttggtaatgttatctttgttctccactctgcttttggggaggatgttttccatgactatacgagatgaggcttggggctgggtggccagagttagcaaataaaaatacagaatggatacta

SEQ ID NO: 117053 - DNA, 1324 bp, Homo sapiens; identical to SEQ ID NO: 117051
  Payload ID: 2839
  Gene Symbol: CCL18
  Gene Name: chemokine (C-C motif) ligand 18 (pulmonary and activation-regulated)
  Uniprot ID: P55774
  ENST ID: ENST00000615723
  CDS Start-End: 64-333

SEQ ID NO: 117054 - DNA, 687 bp, Homo sapiens
  Payload ID: 2840
  Gene Symbol: CCL19
  Gene Name: chemokine (C-C motif) ligand 19
  Uniprot ID: Q99731
  ENST ID: ENST00000311925
  CDS Start-End: 139-435
cattcccagcctcacatcactcacaccttgcatttcacccctgcatcccagtcgccctgcagcctcacacagatcctgcacacacccagacagctggcgctcacacattcaccgttggcctgcctctgttcaccctccatggccctgctactggccctcagcctgctggttctctggacttccccagccccaactctgagtggcaccaatgatgctgaagactgctgcctgtctgtgacccagaaacccatccctgggtacatcgtgaggaacttccactaccttctcatcaaggatggctgcagggtgcctgctgtagtgttcaccacactgaggggccgccagctctgtgcacccccagaccagccctgggtagaacgcatcatccagagactgcagaggacctcagccaagatgaagcgccgcagcagttaacctatgaccgtgcagagggagcccggagtccgagtcaagcattgtgaattattacctaacctggggaaccgaggaccagaaggaaggaccaggcttccagctcctctgcaccagacctgaccagccaggacagggcctggggtgtgtgtgagtgtgagtgtgagcgagagggtgagtgtggtcagagtaaagctgctccacccccagattgcaatgctaccaataaagccgcctggtgtttacaactaattg

SEQ ID NO: 117055 - DNA, 414 bp, Homo sapiens
  Payload ID: 2840
  Gene Symbol: CCL19
  Gene Name: chemokine (C-C motif) ligand 19
  ENST ID: ENST00000378800
  CDS Start-End: 66-380
tcctgcacacacccagacagctggcgctcacacattcaccgttggcctgcctctgttcaccctccatggccctgctactggccctcagcctgctggttctctggacttccccagccccaactctgagtggcaccaatgatgctgaagactgctgcctgtctgtgacccagaaacccatccctgggtacatcgtgaggaacttccactaccttctcatcaaggatggctgcagggtgcctgctgtagtgttcaccacactgaggggccgccagctctgtgcacccccagaccagccctgggtagaacgcatcatccagagactgcagaggacctcagccaaggcaagcctggccctccctggccctgtctcctccctctgagctcctgtctaagattccagcccatgatccttcc

SEQ ID NO: 117056 - DNA, 741 bp, Homo sapiens
  Payload ID: 2841
  Gene Symbol: CCL2
  Gene Name: chemokine (C-C motif) ligand 2
  Uniprot ID: P13500
  ENST ID: ENST00000225831
  CDS Start-End: 66-365
gagaggctgagactaacccagaaacatccaattctcaaactgaagctcgcactctcgcctccagcatgaaagtctctgccgcccttctgtgcctgctgctcatagcagccaccttcattccccaagggctcgctcagccagatgcaatcaatgccccagtcacctgctgttataacttcaccaataggaagatctcagtgcagaggctcgcgagctatagaagaatcaccagcagcaagtgtcccaaagaagctgtgatcttcaagaccattgtggccaaggagatctgtgctgaccccaagcagaagtgggttcaggattccatggaccacctggacaagcaaacccaaactccgaagacttgaacactcactccacaacccaagaatctgcagctaacttattttcccctagctttccccagacaccctgttttattttattataatgaattttgtttgttgatgtgaaacattatgccttaagtaatgttaattcttatttaagttattgatgttttaagtttatctttcatggtactagtgttttttagatacagagacttggggaaattgcttttcctcttgaaccacagttctacccctgggatgttttgagggtctttgcaagaatcattaatacaaagaattttttttaacattccaatgcattgctaaaatattattgtggaaatgaatattttgtaactattacaccaaataaatatatttttgtacaaaa

SEQ ID NO: 117057 - DNA, 736 bp, Homo sapiens
  Payload ID: 2841
  Gene Symbol: CCL2
  Gene Name: chemokine (C-C motif) ligand 2
  ENST ID: ENST00000580907
  CDS Start-End: 66-263
gagaggctgagactaacccagaaacatccaattctcaaactgaagctcgcactctcgcctccagcatgaaagtctctgccgcccttctgtgcctgctgctcatagcagccaccttcattccccaagggctcgctcagccagatgcaatcaatgccccagtcacctgctgttataacttcaccaataggaagatctcagtgcagaggctcgcgagctatagaagaatcaccagcagcaagtgtcccaaagaagctgtgatgtgagttcagcacaccaaccttccctggcctgaagttcttccttgtggagcaagggacaagcctcataaacctagagtcagagagtgcactatttaacttaatgtacaaaggttcccaatgggaaaactgaggcaccaagggaaaaagtgaaccccaacatcactctccacctgggtgcctattcagaacaccccaatttctttagcttgaagtcaggatggctccacctggacacctataggagcagtttgccctgggttccctccttccacctgcgttcctcctctagctcccatggcagccctttggtgcagaatgggctgcacttctagaccaaaactgcaaaggaacttcatctaactctgtcctccctccccacagcttcaagaccattgtggccaaggagatctgtgctgaccccaagcagaagtgggttcaggattccatggaccacctggacaagcaaacccaaactc

SEQ ID NO: 117058 - DNA, 800 bp, Homo sapiens
  Payload ID: 2842
  Gene Symbol: CCL20
  Gene Name: chemokine (C-C motif) ligand 20
  Uniprot ID: P78556
  ENST ID: ENST00000358813
  CDS Start-End: 59-349
cactcccaaagaactgggtactcaacactgagcagatctgttctttgagctaaaaaccatgtgctgtaccaagagtttgctcctggctgctttgatgtcagtgctgctactccacctctgcggcgaatcagaagcagcaagcaactttgactgctgtcttggatacacagaccgtattcttcatcctaaatttattgtgggcttcacacggcagctggccaatgaaggctgtgacatcaatgctatcatctttcacacaaagaaaaagttgtctgtgtgcgcaaatccaaaacagacttgggtgaaatatattgtgcgtctcctcagtaaaaaagtcaagaacatgtaaaaactgtggcttttctggaatggaattggacatagcccaagaacagaaagaaccttgctggggttggaggtttcacttgcacatcatggagggtttagtgcttatctaatttgtgcctcactggacttgtccaattaatgaagttgattcatattgcatcatagtttgctttgtttaagcatcacattaaagttaaactgtattttatgttatttatagctgtaggttttctgtgtttagctatttaatactaattttccataagctattttggtttagtgcaaagtataaaattatatttgggggggaataagattatatggactttcttgcaagcaacaagctattttttaaaaaaaactatttaacattcttttgtttatattgttttgtctcctaaattgttgtaattgcattataaaataagaaaaatattaataagacaaatatt

SEQ ID NO: 117059 - DNA, 839 bp, Homo sapiens
  Payload ID: 2842
  Gene Symbol: CCL20
  Gene Name: chemokine (C-C motif) ligand 20
  Uniprot ID: P78556
  ENST ID: ENST00000409189
  CDS Start-End: 71-358
agaatataacagcactcccaaagaactgggtactcaacactgagcagatctgttctttgagctaaaaaccatgtgctgtaccaagagtttgctcctggctgctttgatgtcagtgctgctactccacctctgcggcgaatcagaagcaagcaactttgactgctgtcttggatacacagaccgtattcttcatcctaaatttattgtgggcttcacacggcagctggccaatgaaggctgtgacatcaatgctatcatctttcacacaaagaaaaagttgtctgtgtgcgcaaatccaaaacagacttgggtgaaatatattgtgcgtctcctcagtaaaaaagtcaagaacatgtaaaaactgtggcttttctggaatggaattggacatagcccaagaacagaaagaaccttgctggggttggaggtttcacttgcacatcatggagggtttagtgcttatctaatttgtgcctcactggacttgtccaattaatgaagttgattcatattgcatcatagtttgctttgtttaagcatcacattaaagttaaactgtattttatgttatttatagctgtaggttttctgtgtttagctatttaatactaattttccataagctattttggtttagtgcaaagtataaaattatatttgggggggaataagattatatggactttcttgcaagcaacaagctattttttaaaaaaaactatttaacattcttttgtttatattgttttgtctcctaaattgttgtaattgcattataaaataagaaaaatattaataagacaaatattgaaaataaagaaacaaaaagttcttctgtt

SEQ ID NO: 117060 - DNA, 852 bp, Homo sapiens
  Payload ID: 2843
  Gene Symbol: CCL21
  Gene Name: chemokine (C-C motif) ligand 21
  Uniprot ID: O00585
  ENST ID: ENST00000259607
  CDS Start-End: 59-463
cttgcagctgcccacctcaccctcagctctggcctcttactcaccctctaccacagacatggctcagtcactggctctgagcctccttatcctggttctggcctttggcatccccaggacccaaggcagtgatggaggggctcaggactgttgcctcaagtacagccaaaggaagattcccgccaaggttgtccgcagctaccggaagcaggaaccaagcttaggctgctccatcccagctatcctgttcttgccccgcaagcgctctcaggcagagctatgtgcagacccaaaggagctctgggtgcagcagctgatgcagcatctggacaagacaccatccccacagaaaccagcccagggctgcaggaaggacaggggggcctccaagactggcaagaaaggaaagggctccaaaggctgcaagaggactgagcggtcacagacccctaaagggccatagcccagtgagcagcctggagccctggagaccccaccagcctcaccagcgcttgaagcctgaacccaagatgcaagaaggaggctatgctcaggggccctggagcagccaccccatgctggccttgccacactctttctcctgctttaaccaccccatctgcattcccagctctaccctgcatggctgagctgcccacagcaggccaggtccagagagaccgaggagggagagtctcccagggagcatgagaggaggcagcaggactgtccccttgaaggagaatcatcaggaccctggacctgatacggctccccagtacaccccacctcttccttgtaaatatgatttatacctaactgaataaaaagctgttctgtcttcccacccaa

SEQ ID NO: 117061 - DNA, 599 bp, Homo sapiens
  Payload ID: 2843
  Gene Symbol: CCL21
  Gene Name: chemokine (C-C motif) ligand 21
  ENST ID: ENST00000378792
  CDS Start-End: 4-378
gacatggctcagtcactggctctgagcctccttatcctggttctggcctttggcatccccaggacccaaggcagtgatggaggggctcaggactgttgcctcaagtacagccaaaggaagattcccgccaaggttgtccgcagctaccggaagcaggaaccaagcttaggctgctccatcccagctatcctgttcttgccccgcaagcgctctcaggcagagctatgtgcagacccaaaggagctctgggtgcagcagctgatgcagcatctggacaagacaccatccccacagaaaccagcccagggctgcaggaaggacaggggggcctccaagactggcaagaaaggaaagggctccaaaggctgcaagaggtgaggaatctgagggatgtgggtaaaggggagcctcagtcagcccctcacacccctcttctgccctcacaggactgagcggtcacagacccctaaagggccatagcccagtgagcagcctggagccctggagaccccaccagcctcaccagcgcttgaagcctgaacccaagatgcaagaaggaggctatgctcaggggccctggagcagccaccccatgctgg

SEQ ID NO: 117062 - DNA, 2929 bp, Homo sapiens
  Payload ID: 2844
  Gene Symbol: CCL22
  Gene Name: chemokine (C-C motif) ligand 22
  Uniprot ID: O00626
  ENST ID: ENST00000219235
  CDS Start-End: 46-327
tatgtccctttgcagacacctgggctgagacatacaggacagagcatggatcgcctacagactgcactcctggttgtcctcgtcctccttgctgtggcgcttcaagcaactgaggcaggcccctacggcgccaacatggaagacagcgtctgctgccgtgattacgtccgttaccgtctgcccctgcgcgtggtgaaacacttctactggacctcagactcctgcccgaggcctggcgtggtgttgctaaccttcagggataaggagatctgtgccgatcccagagtgccctgggtgaagatgattctcaataagctgagccaatgaagagcctactctgatgaccgtggccttggctcctccaggaaggctcaggagccctacctccctgccattatagctgctccccgccagaagcctgtgccaactctctgcattccctgatctccatccctgtggctgtcacccttggtcacctccgtgctgtcactgccatctcccccctgacccctctaacccatcctctgcctccctccctgcagtcagagggtcctgttcccatcagcgattcccctgcttaaacccttccatgactccccactgccctaagctgaggtcagtctcccaagcctggcatgtggccctctggatctgggttccatctctgtctccagcctgcccacttcccttcatgaatgttgggttctagctccctgttctccaaacccatactacacatcccacttctgggtctttgcctgggatgttgctgacacccagaaagtcccaccacctgcacatgtgtagccccaccagccctccaaggcattgctcgcccaagcagctggtaattccatttcatgtattagatgtcccctggccctctgtcccctcttaataaccctagtcacagtctccgcagattcttgggatttgggggttttctcccccacctctccactagttggaccaaggtttctagctaagttactctagtctccaagcctctagcatagagcactgcagacaggccctggctcagaatcagagcccagaaagtggctgcagacaaaatcaataaaactaatgtccctcccctctccctgccaaaaggcagttacatatcaatacagagactcaaggtcactagaaatgggccagctgggtcaatgtgaagccccaaatttgcccagattcacctttcttcccccactccctttttttttttttttttgagatggagtttcgctcttgtcacccacgctggagtgcaatggtgtggtcttggcttattgaagcctctgcctcctgggttcaagtgattctcttgcctcagcctcctgagtagctgggattacaggttcctgctaccacgcccagctaatttttgtatttttagtagagacgaggcttcaccatgttggccaggctggtctcgaactcctgtcctcaggtaatccgcccacctcagcctcccaaagtgctgggattacaggcgtgagccacagtgcctggcctcttccctctccccaccccccccccaacttttttttttttttatggcagggtctcactctgtcgcccaggctggagtgcagtggcgtgatctcggctcactacaacctcgacctcctgggttcaagcgattctcccaccccagcctcccaagtagctgggattacaggtgtgtgccactacggctggctaatttttgtatttttagtagagacaggtttcaccatattggccaggctggtcttgaactcctgacctcaagtgatccaccttccttgtgctcccaaagtgctgagattacaggcgtgagctatcacacccagcctccccctttttttcctaataggagactcctgtacctttcttcgttttacctatgtgtcgtgtctgcttacatttccttctcccctcaggctttttttgggtggtcctccaacctccaatacccaggcctggcctcttcagagtaccccccattccactttccctgcctccttccttaaatagctgacaatcaaattcatgctatggtgtgaaagactacctttgacttggtattataagctggagttatatatgtatttgaaaacagagtaaatacttaagaggccaaatagatgaatggaagaattttaggaactgtgagagggggacaaggtggagctttcctggccctgggaggaagctggctgtggtagcgtagcgctctctctctctgtctgtggcaggaggcaaagagtagggtgtaattgagtgaaggaatcctgggtagagaccattctcaggtggttgggccaggctaaagactgggatttgggtctatctatgcctttctggctgatttttgtagagacggggttttgccatgttacccaggctggtctcaaactcctgggctcaagcgatcctcctggctcagcctcccaaagtgctgggattacaggcgtgagtcactgcgcctggcttcctcttcctcttgagaaatattcttttcatacagcaagtatgggacagcagtgtcccaggtaaaggacataaatgttacaagtgtctggtcctttctgagggaggctggtgccgctctgcagggtatttgaacctgtggaattggaggaggccatttcactccctgaacccagcctgacaaatcacagtgagaatgttcaccttataggcttgctgtggggctcaggttgaaagtgtggggagtgacactgcctaggcatccagctcagtgtcatccagggcctgtgtccctcccgaacccagggtcaacctgcctaccacaggcactagaaggacgaatctgcctactgcccatgaacggggccctcaagcgtcctgggatctccttctccctcctgtcctgtccttgcccctcaggactgctggaaaataaatcctttaaaatagt

SEQ ID NO: 117063 - DNA, 402 bp, Homo sapiens
  Payload ID: 2845
  Gene Symbol: CCL23
  Gene Name: chemokine (C-C motif) ligand 23
  ENST ID: ENST00000613876
  CDS Start-End: 1-42
tttgaaacgaacagcgagtgctccaagccgggtgtcatgtaggtgccaagctcaccaaacatgtgttgagggagaaggactctgtagcatcttgcagggaggacctgatagactggtgtccatcagggcccaccctctggatcctgccagcttcctcaccaagaaggggcgacgtttctgtgccaaccccagtgataagcaagttcaggtttgcatgagaatgctgaagctggacacacggatcaagaccaggaagaattgaacttgtcaaggtgaagggacacaagttgccagccaccaactttcttgcctcaactaccttcctgaattatttttttaagaagcatttattcttgtgttctggatttagagcaattcatctaataaacagtttctcacttt

SEQ ID NO: 117064 - DNA, 624 bp, Homo sapiens
  Payload ID: 2845
  Gene Symbol: CCL23
  Gene Name: chemokine (C-C motif) ligand 23
  Uniprot ID: P55773
  ENST ID: ENST00000615050
  CDS Start-End: 72-485
ctggcatcccgagaagccaggaagcagtgagcccaggagtcctcggccagccctgcctgcccaccaggaggatgaaggtctccgtggctgccctctcctgcctcatgcttgttactgcccttggatcccaggcccgggtcacaaaagatgcagagacagagttcatgatgtcaaagcttccattggaaaatccagtacttctggacatgctctggaggagaaagattggtcctcagatgaccctttctcatgctgcaggattccatgctactagtgctgactgctgcatctcctacaccccacgaagcatcccgtgttcactcctggagagttactttgaaacgaacagcgagtgctccaagccgggtgtcatcttcctcaccaagaaggggcgacgtttctgtgccaaccccagtgataagcaagttcaggtttgcatgagaatgctgaagctggacacacggatcaagaccaggaagaattgaacttgtcaaggtgaagggacacaagttgccagccaccaactttcttgcctcaactaccttcctgaattatttttttaagaagcatttattcttgtgttctggatttagagcaattcatctaataaacagtttctcactt

SEQ ID NO: 117065 - DNA, 624 bp, Homo sapiens
  Payload ID: 2845
  Gene Symbol: CCL23
  Gene Name: chemokine (C-C motif) ligand 23
  Uniprot ID: P55773
  ENST ID: ENST00000610342
  CDS Start-End: 72-485
ctggcatcccgagaagccaggaagcagtgagcccaggagtcctcggccagccctgcctgcccaccaggaggatgaaggtctccgtggctgccctctcctgcctcatgcttgttactgcccttggatcccaggcccgggtcacaaaagatgcagagacagagttcatgatgtcaaagcttccattggaaaatccagtacttctggacatgctctggaggagaaagattggtcctcagatgaccctttctcatgctgcaggattccatgctactagtgctgactgctgcatctcctacaccccacgaagcatcccgtgttcactcctggagagttactttgaaacgaacagcgagtgctccaagccgggtgtcatcttcctcaccaagaaggggcgacgtttctgtgccaaccccagtgataagcaagttcaggtttgcgtgagaatgctgaagctggacacacggatcaagaccaggaagaattgaacttgtcaaggtgaagggacacaagttgccagccaccaactttcttgcctcaactaccttcctgaattattttttaaagaagcatttattcttgtgttctggatttagagcaattcatctaataaacagtttctcactt

SEQ ID NO: 117066 - DNA, 569 bp, Homo sapiens
  Payload ID: 2845
  Gene Symbol: CCL23
  Gene Name: chemokine (C-C motif) ligand 23
  Uniprot ID: P55773
  ENST ID: ENST00000612516
  CDS Start-End: 66-428
tcccgagaagccaggaagcagtgagcccaggagtcctcggccagccctgcctgcccaccaggaggatgaaggtctccgtggctgccctctcctgcctcatgcttgttactgcccttggatcccaggcccgggtcacaaaagatgcagagacagagttcatgatgtcaaagcttccattggaaaatccagtacttctggacagattccatgctactagtgctgactgctgcatctcctacaccccacgaagcatcccgtgttcactcctggagagttactttgaaacgaacagcgagtgctccaagccgggtgtcatcttcctcaccaagaaggggcgacgtttctgtgccaaccccagtgataagcaagttcaggtttgcatgagaatgctgaagctggacacacggatcaagaccaggaagaattgaacttgtcaaggtgaagggacacaagttgccagccaccaactttcttgcctcaactaccttcctgaattatttttttaagaagcatttattcttgtgttctggatttagagcaattcatctaataaacagtttctcactttt

SEQ ID NO: 117067 - DNA, 569 bp, Homo sapiens
  Payload ID: 2845
  Gene Symbol: CCL23
  Gene Name: chemokine (C-C motif) ligand 23
  Uniprot ID: P55773
  ENST ID: ENST00000632633
  CDS Start-End: 66-428
tcccgagaagccaggaagcagtgagcccaggagtcctcggccagccctgcctgcccaccaggaggatgaaggtctccgtggctgccctctcctgcctcatgcttgttactgcccttggatcccaggcccgggtcacaaaagatgcagagacagagttcatgatgtcaaagcttccattggaaaatccagtacttctggacagattccatgctactagtgctgactgctgcatctcctacaccccacgaagcatcccgtgttcactcctggagagttactttgaaacgaacagcgagtgctccaagccgggtgtcatcttcctcaccaagaaggggcgacgtttctgtgccaaccccagtgataagcaagttcaggtttgcgtgagaatgctgaagctggacacacggatcaagaccaggaagaattgaacttgtcaaggtgaagggacacaagttgccagccaccaactttcttgcctcaactaccttcctgaattattttttaaagaagcatttattcttgtgttctggatttagagcaattcatctaataaacagtttctcactttt

SEQ ID NO: 117068 - DNA, 402 bp, Homo sapiens
  Payload ID: 2845
  Gene Symbol: CCL23
  Gene Name: chemokine (C-C motif) ligand 23
  ENST ID: ENST00000631414
  CDS Start-End: 1-42
tttgaaacgaacagcgagtgctccaagccgggtgtcatgtaggtgccaagctcaccaaacatgtgttgagggagaaggactctgtagcatcttgcagggaggacctgatagactggtgtccatcagggcccaccctctggatcctgccagcttcctcaccaagaaggggcgacgtttctgtgccaaccccagtgataagcaagttcaggtttgcgtgagaatgctgaagctggacacacggatcaagaccaggaagaattgaacttgtcaaggtgaagggacacaagttgccagccaccaactttcttgcctcaactaccttcctgaattattttttaaagaagcatttattcttgtgttctggatttagagcaattcatctaataaacagtttctcacttt

SEQ ID NO: 117069 - DNA, 582 bp, Homo sapiens
  Payload ID: 2846
  Gene Symbol: CCL24
  Gene Name: chemokine (C-C motif) ligand 24
  Uniprot ID: O00175
  ENST ID: ENST00000222902
  CDS Start-End: 92-451
actctgcaaggacccgagctatttatccctaggtcctttcctcctgcacgtcagctttgagccccgagctggtgcttctgctctctgagacatggcaggcctgatgaccatagtaaccagccttctgttccttggtgtctgtgcccaccacatcatccctacgggctctgtggtcatcccctctccctgctgcatgttctttgtttccaagagaattcctgagaaccgagtggtcagctaccagctgtccagcaggagcacatgcctcaaggcaggagtgatcttcaccaccaagaagggccagcagttctgtggcgaccccaagcaggagtgggtccagaggtacatgaagaacctggacgccaagcagaagaaggcttcccctagggccagggcagtggctgtcaagggccctgtccagagatatcctggcaaccaaaccacctgctaatccccgcccagccctccagccctgagtttgggcctgagctgcttggcgggctactcggggcctggagaagccacagtgatggggggaagagctaattttcctgtttcttagcaacactctccagggatgtg

SEQ ID NO: 117070 - DNA, 585 bp, Homo sapiens
  Payload ID: 2846
  Gene Symbol: CCL24
  Gene Name: chemokine (C-C motif) ligand 24
  Uniprot ID: O00175
  ENST ID: ENST00000416943
  CDS Start-End: 95-454
acttggcaccaaggctgtcaccctgttacctccgggtcctttcctcctgcacgtcagctttgagccccgagctggtgcttctgctctctgagacatggcaggcctgatgaccatagtaaccagccttctgttccttggtgtctgtgcccaccacatcatccctacgggctctgtggtcatcccctctccctgctgcatgttctttgtttccaagagaattcctgagaaccgagtggtcagctaccagctgtccagcaggagcacatgcctcaaggcaggagtgatcttcaccaccaagaagggccagcagttctgtggcgaccccaagcaggagtgggtccagaggtacatgaagaacctggacgccaagcagaagaaggcttcccctagggccagggcagtggctgtcaagggccctgtccagagatatcctggcaaccaaaccacctgctaatccccgcccagccctccagccctgagtttgggcctgagctgcttggcgggctactcggggcctggagaagccacagtgatggggggaagagctaattttcctgtttcttagcaacactctccagggatgtg

SEQ ID NO: 117071 - DNA, 953 bp, Homo sapiens
  Payload ID: 2847
  Gene Symbol: CCL25
  Gene Name: chemokine (C-C motif) ligand 25
  Uniprot ID: O15444
  ENST ID: ENST00000253451
  CDS Start-End: 107-556
ggacagcttggcctacagcccggcgggcatcagctcccttgacccagtggatatcggtggccccgttattcgtccaggtgcccagggaggaggacccgcctgcagcatgaacctgtggctcctggcctgcctggtggccggcttcctgggagcctgggcccccgctgtccacacccaaggtgtctttgaggactgctgcctggcctaccactaccccattgggtgggctgtgctccggcgcgcctggacttaccggatccaggaggtgagcgggagctgcaatctgcctgctgcgatattctacctccccaagagacacaggaaggtgtgtgggaaccccaaaagcagggaggtgcagagagccatgaagctcctggatgctcgaaataaggtttttgcaaagctccaccacaacacgcagaccttccaaggccctcatgctgtaaagaagttgagttctggaaactccaagttatcatcgtccaagtttagcaatcccatcagcagcagtaagaggaatgtctccctcctgatatcagctaattcaggactgtgagccggctcatttctgggctccatcggcacaggaggggccggatctttctccgataaaaccgtcgccctacagacccagctgtccccacgcctctgtcttttgggtcaagtcttaatccctgcacctgagttggtcctccctctgcacccccaccacctcctgcccgtctggcaactggaaagagggagttggcctgattttaagccttttgccgctccggggaccagcagcaatcctgggcagccagtggctcttgtagagaagacttaggatacctctctcactttctgtttcttgccgtccaccccgggccatgccagtgtgtccctctgggtccctccaaaactctggtcagttcaaggatgcccctcccaggctatgcttttctataactttt

SEQ ID NO: 117072 - DNA, 450 bp, Homo sapiens
  Payload ID: 2847
  Gene Symbol: CCL25
  Gene Name: chemokine (C-C motif) ligand 25
  ENST ID: ENST00000315626
  CDS Start-End: 1-450
atgaacctgtggctcctggcctgcctggtggccggcttcctgggagcctgggcccccgctgtccacacccaaggtgtctttgaggactgctgcctggcctaccactaccccattgggtgggctgtgctccggcgcgcctggacttaccggatccaggaggtgagcgggagctgcaatctgcctgctgcgatattctacctccccaagagacacaggaaggtgtgtgggaaccccaaaagcagggaggtgcagagagccatgaagctcctggatgctcgaaataaggtttttgcaaagctccaccacaacacgcagaccttccaagcaggccctcatgctgtaaagaagttgagttctggaaactccaagttatcatcgtccaagtttagcaatcccatcagcagcagtaagaggaatgtctccctcctgatatcagctaattcaggtaag

SEQ ID NO: 117073 - DNA, 924 bp, Homo sapiens
  Payload ID: 2847
  Gene Symbol: CCL25
  Gene Name: chemokine (C-C motif) ligand 25
  Uniprot ID: O15444
  ENST ID: ENST00000390669
  CDS Start-End: 51-503
gtggccccgttattcgtccaggtgcccagggaggaggacccgcctgcagcatgaacctgtggctcctggcctgcctggtggccggcttcctgggagcctgggcccccgctgtccacacccaaggtgtctttgaggactgctgcctggcctaccactaccccattgggtgggctgtgctccggcgcgcctggacttaccggatccaggaggtgagcgggagctgcaatctgcctgctgcgatattctacctccccaagagacacaggaaggtgtgtgggaaccccaaaagcagggaggtgcagagagccatgaagctcctggatgctcgaaataaggtttttgcaaagctccaccacaacacgcagaccttccaagcaggccctcatgctgtaaagaagttgagttctggaaactccaagttatcatcgtccaagtttagcaatcccatcagcagcagtaagaggaatgtctccctcctgatatcagctaattcaggactgtgagccggctcatttctgggctccatcggcacaggaggggccggatctttctccgataaaaccgtcgccctacagacccagctgtccccacgcctctgtcttttgggtcaagtcttaatccctgcacctgagttggtcctccctctgcacccccaccacctcctgcccgtctggcaactggaaagagggagttggcctgattttaagccttttgccgctccggggaccagcagcaatcctgggcagccagtggctcttgtagagaagacttaggatacctctctcactttctgtttcttgccgtccaccccgggccatgccagtgtgtccctctgggtccctccaaaactctggtcagttcaaggatgcccctcccaggctatgcttttctataacttttaaataaaccttggggggtgatgga

SEQ ID NO: 117074 - DNA, 744 bp, Homo sapiens
  Payload ID: 2847
  Gene Symbol: CCL25
  Gene Name: chemokine (C-C motif) ligand 25
  ENST ID: ENST00000458625
  CDS Start-End: 1-255
atgaacctgtggctcctggcctgcctggtggccggcttcctgggagcctgggcccccgctgtccacacccaaggtgtctttgaggactgctgcctggcctaccactaccccattgggtgggctgtgctccggcgcgcctggacttaccggatccaggaggtgagcgggagctgcaatctgcctgctgcgatcaggccctcatgctgtaaagaagttgagttctggaaactccaagttatcatcgtccaagtttagcaatcccatcagcagcagtaagaggaatgtctccctcctgatatcagctaattcaggactgtgagccggctcatttctgggctccatcggcacaggaggggccggatctttctccgataaaaccgtcgccctacagacccagctgtccccacgcctctgtcttttgggtcaagtcttaatccctgcacctgagttggtcctccctctgcacccccaccacctcctgcccgtctggcaactggaaagagggagttggcctgattttaagccttttgccgctccggggaccagcagcaatcctgggcagccagtggctcttgtagagaagacttaggatacctctctcactttctgtttcttgccgtccaccccgggccatgccagtgtgtccctctgggtccctccaaaactctggtcagttcaaggatgcccctcccaggctatgcttttctataacttttaaataaaccttggggggtgatggagtca

SEQ ID NO: 117075 - DNA, 526 bp, Homo sapiens
  Payload ID: 2848
  Gene Symbol: CCL26
  Gene Name: chemokine (C-C motif) ligand 26
  Uniprot ID: Q9Y258
  ENST ID: ENST00000005180
  CDS Start-End: 82-366
cagggccgtctcagtctcataaaaggggatcaggcaggaggagtttgggagaaacctgagaagggcctgatttgcagcatcatgatgggcctctccttggcctctgctgtgctcctggcctccctcctgagtctccaccttggaactgccacacgtgggagtgacatatccaagacctgctgcttccaatacagccacaagccccttccctggacctgggtgcgaagctatgaattcaccagtaacagctgctcccagcgggctgtgatattcactaccaaaagaggcaagaaagtctgtacccatccaaggaaaaaatgggtgcaaaaatacatttctttactgaaaactccgaaacaattgtgactcagctgaattttcatccgaggacgcttggaccccgctcttggctctgcagccctctggggagcctgcggaatcttttctgaaggctacatggacccgctggggaggagagggtgtttcctcccagagttactttaataaaggttgttcatagagttga

SEQ ID NO: 117076 - DNA, 703 bp, Homo sapiens
  Payload ID: 2848
  Gene Symbol: CCL26
  Gene Name: chemokine (C-C motif) ligand 26
  Uniprot ID: Q9Y258
  ENST ID: ENST00000394905
  CDS Start-End: 259-543
agaacctcagaaatgtgagttatttgggaatggctgtttgtaaatgtccttacgtaagccaagaggaggtcttgacttggggtcccaggggtaccgcagatcccagggactggagcagcactagcaagctctggaggatgagccaggagtctggaattgaggctgagccaaagaccccagggccgtctcagtctcataaaaggggatcaggcaggaggagtttgggagaaacctgagaagggcctgatttgcagcatcatgatgggcctctccttggcctctgctgtgctcctggcctccctcctgagtctccaccttggaactgccacacgtgggagtgacatatccaagacctgctgcttccaatacagccacaagccccttccctggacctgggtgcgaagctatgaattcaccagtaacagctgctcccagcgggctgtgatattcactaccaaaagaggcaagaaagtctgtacccatccaaggaaaaaatgggtgcaaaaatacatttctttactgaaaactccgaaacaattgtgactcagctgaattttcatccgaggacgcttggaccccgctcttggctctgcagccctctggggagcctgcggaatcttttctgaaggctacatggacccgctggggaggagagggtgtttcctcccagagttactttaataaaggttgttcatagagttga

SEQ ID NO: 117077 - DNA, 446 bp, Homo sapiens
  Payload ID: 2849
  Gene Symbol: CCL27
  Gene Name: chemokine (C-C motif) ligand 27
  Uniprot ID: Q9Y4X3
  ENST ID: ENST00000259631
  CDS Start-End: 60-398
cccagataaaaggtaggggaggaggagagagagagaaggaagagtctaggctgagcaacatgaaggggcccccaaccttctgcagcctcctgctgctgtcattgctcctgagcccagaccctacagcagcattcctactgccacccagcactgcctgctgtactcagctctaccgaaagccactctcagacaagctactgaggaaggtcatccaggtggaactgcaggaggctgacggggactgtcacctccaggctttcgtgcttcacctggctcaacgcagcatctgcatccacccccagaaccccagcctgtcacagtggtttgagcaccaagagagaaagctccatgggactctgcccaagctgaattttgggatgctaaggaaaatgggctgaagcccccaatagccaaataataaagcagcattggataataatttctga

SEQ ID NO: 117078 - DNA, 3126 bp, Homo sapiens
  Payload ID: 2850
  Gene Symbol: CCL28
  Gene Name: chemokine (C-C motif) ligand 28
  Uniprot ID: Q9NRJ3
  ENST ID: ENST00000361115
  CDS Start-End: 76-459
aggacacctttagcctcatttcctgatcgaacagcctcacttgtgttgctgtcagtgccagtagggcaggcaggaatgcagcagagaggactcgccatcgtggccttggctgtctgtgcggccctacatgcctcagaagccatacttcccattgcctccagctgttgcacggaggtttcacatcatatttccagaaggctcctggaaagagtgaatatgtgtcgcatccagagagctgatggggattgtgacttggctgctgtcatccttcatgtcaagcgcagaagaatctgtgtcagcccgcacaaccatactgttaagcagtggatgaaagtgcaagctgccaagaaaaatggtaaaggaaatgtttgccacaggaagaaacaccatggcaagaggaacagtaacagggcacatcaggggaaacacgaaacatacggccataaaactccttattagagagtctacagataaatctacagagacaattcctcaagtggacttggccatgattggttgtaagtttatcatctgaattctccttattgtagacaacagaacaaaacaaaatattggtttttaaaaaatgaacaattgtgcggtatgcaaatgtagccaataatatactcaactggaaaatgaaatgaaaagataatactggctgggtatggtggttcacaccttttatcccagcacttcgggaggctgaggcaggaggatcacttgagaccaggagtttgagaccagcctgggcaacatagcaagacctcatttctacaaacaaaaaaaaaattggcccggcatggtagtacttgcctataatcccagccacatgggaggctgaggtgggaggatcacttgagtctgggagagtttgaggttgcagtgagcagcctgggtgacagaatgagaccctgtctctaaaaataataataataatgatagtgtatatcttcatataatattttaagaggagcatatagatataacttctcccaactttttaattatagttttccaaacttacagagaagttaaaagaatggtacaatgaacatctatatatctttcaccacaatattaatcattgttaatattgtgtcacatttgctttctctctcctctctttgtatgtgtttctatataaaatattataacttttaaaatatatcttgttttgctaaaccatttgaaaataagttgcaaaaatcatgacacttcacccctagtttctttttggtgttataacttgacataccctaaaataaagacatttttctacataatcaccttatcagttttatacctaaaaaattaataatttcatctaatatattccatattcaaattttcccaactatttagagagcattttatgtagtttttttttcactccagtaatcaatcaaggttgacatacatattgcaaataattgttatttttctttaatatctttcaatctaagaaagttcctctgtcttttttttttaatttttaaaattattttgttgagggagggtcttgctgtgtcttccaggctggagtgcagtggcacaattttgattttggctcactgaagcctcaacttctagggctcaagcaatcctcccacctcagcctcccgagtatctgggatcaaggtgcatacccaccacacctggctaattttgtttattttttgtagagacagggtctcactatgttgcccaggttgatctcaaactcctgggctcaagcgatcctcccaccttagcctcccaaagtactgggattataggtgtgagccacagtgcctggcctaattattttcttgtgatcaaattcaggtttaatgtttttggttaagaatttcctacgtgaattcgtgtacttattttgtcatttagagttcataaatattagggtttattttctaaatagaatagtttaaactaaatataacttcaaaacgtctagtttgagtagctaccgttgtttggattgaaattttctgatactgaaaagaacaaaaagcctgcctttctgcccagaaccttttgcctcccccagtcagttcttggagcagcactagttaggggcccagagttcggccttctgtgtggtgattttacgctctgcctaaacaaggagcctacatcttttagctcctattccacccttctcacacgtttttgttgttgtttggttgtttttttttgagacagagtctcactctgttgcccaggctggagtgcagtggcacaatctcggctcattgcaacctccgcctcccgcgttcaagtgattctcttgcctcagcctcccaagtaactgatattacaggcgcccagccaccacaccccgctgatttttgtatttttagtagagacggggttttcccacgttggccgggctggtctcaaactcttgacctcaagtgaaccacccgcctgtgcctcccaaagtgctggaattaccagcgtgagccaccatgccgggctcacacgtttgagttgataccattgtgccattcctcttttggcctcttttttgtccatagaggcttcaagatagataggtaagagcccagtagtgttcataagaagccaatagagagcaggagccactttatcaggtggcaggtgtcctgggcctccctgctggctagtcccaagcggtggtgttgccaggatgtcttggaggtgataatgggacacacagaggcactgagtctccataggttaaaatgccaccaaaactggcctttgcctaatatccctcattgactatttagcatttaatttatttattttcctgacatttctgcaagctttgtatttatatttccactttatagatgaggaaatttgaggctcttagaggtaaaatgacttgcccaggtcacacaggaagtggcagagacaagctttttaaataagaaaaaattaataaaatataatatgagagtaacttaaaatattaataaaccacaattttaaattaattaaccgtgataaccaacattaataaaagttaagataccaaaacactggtgtctaattctttcaactaacaacttgaattattttccattttaaattaattaaccgtgataaccaacattaataaaagttaagataccaaaa

SEQ ID NO: 117079 - DNA, 1518 bp, Homo sapiens
  Payload ID: 2850
  Gene Symbol: CCL28
  Gene Name: chemokine (C-C motif) ligand 28
  ENST ID: ENST00000513525
  CDS Start-End: 308-550
cccgcggtaggctaggcctggtcctgggcgccccagccggctcccccgggtccaggcgtgcgcctgcgggcgacgtgcgcgtctgggcatccggccgtcacgcgctgcctgggactccaccctacctacccttcgcgtagtacttgttatactttggcagcttcttcacgtcggtcctctccgcgcgcgggtaggaaccgtccacggccttaaagaagcctcctcaccagccatacttcccattgcctccagctgttgcacggaggtttcacatcatatttccagaaggctcctggaaagagtgaatatgtgtcgcatccagagagctgatggggattgtgacttggctgctgtcatccttcatgtcaagcgcagaagaatctgtgtcagcccgcacaaccatactgttaagcagtggatgaaagtgcaagctgccaagaaaaatggtaaaggaaatgtttgccacaggaagaaacaccatggcaagaggaacagtaacagggcacatcaggggaaacacgaaacatacggccataaaactccttattagagagtctacagataaatctacagagacaattcctcaagtggacttggccatgattggttgtaagtttatcatctgaattctccttattgtagacaacagaacaaaacaaaatattggtttttaaaaaatgaacaattgtgcggtatgcaaatgtagccaataatatactcaactggaaaatgaaatgaaaagataatactggctgggtatggtggttcacaccttttatcccagcacttcgggaggctgaggcaggaggatcacttgagaccaggagtttgagaccagcctgggcaacatagcaagacctcatttctacaaacaaaaaaaaaattggcccggcatggtagtacttgcctataatcccagccacatgggaggctgaggtgggaggatcacttgagtctgggagagtttgaggttgcagtgagcagcctgggtgacagaatgagaccctgtctctaaaaataataataataatgatagtgtatatcttcatataatattttaagaggagcatatagatataacttctcccaactttttaattatagttttccaaacttacagagaagttaaaagaatggtacaatgaacatctatatatctttcaccacaatattaatcattgttaatattgtgtcacatttgctttctctctcctctctttgtatgtgtttctatataaaatattataacttttaaaatatatcttgttttgctaaaccatttgaaaataagttgcaaaaatcatgacacttcacccctagtttctttttggtgttataacttgacataccctaaaataaagacatttttctacataatcaccttatcagttttatacctaaaaaattaataatttcatctaatatattccatattcaaattttcccaactatttagagagcattttatgtagtttttttttcactccagtaatcaatcaaggttgacatacatattgc

SEQ ID NO: 117080 - DNA, 1342 bp, Homo sapiens
  Payload ID: 2850
  Gene Symbol: CCL28
  Gene Name: chemokine (C-C motif) ligand 28
  Uniprot ID: Q9NRJ3
  ENST ID: ENST00000489442
  CDS Start-End: 60-443
catttcctgatcgaacagcctcacttgtgttgctgtcagtgccagtagggcaggcaggaatgcagcagagaggactcgccatcgtggccttggctgtctgtgcggccctacatgcctcagaagccatacttcccattgcctccagctgttgcacggaggtttcacatcatatttccagaaggctcctggaaagagtgaatatgtgtcgcatccagagagctgatggggattgtgacttggctgctgtcatccttcatgtcaagcgcagaagaatctgtgtcagcccgcacaaccatactgttaagcagtggatgaaagtgcaagctgccaagaaaaatggtaaaggaaatgtttgccacaggaagaaacaccatggcaagaggaacagtaacagggcacatcaggggaaacacgaaacatacggccataaaactccttattagagagtctacagataaatctacagagacaattcctcaagtggacttggccatgattggttagtctcactctatcacacaggctggagggcagtggcaggatctcagttcaccccaacctttgcctcacgggttcaagggattctcgtgcctcagccttccaagtagctgggattacaggtgtgcgccagtacgcctggctagttttagtattttttgttacagacggggtttcaccatgttggctgggctggtctcaaacttctgatctcaagtgatccatctgccttggcctcccaaagtgctgggattacaggcatgagccactgcacctggcctacgtattaggctttatgtaagatgtacatagtactccatactcctttccttttcctcctattgaaactgttcctataaactttataaaattaatcagagaagaagagagggtgagaaacataaataatccaagcttgcaccacattcagcattaatcactaggtcactttgcttgctgaccccttcctcatagttgtttggctattgcttcagaattatgtggagtctgttacaagattatagttccccttaactgctctatagataacagcttgaacattatgaaatgctaagttttcccttcgagacattctttcaggtcctgcatactgatgaaactactgatgtcagctggtctgaaggaccctaccagaagctaaatcatcaaagaatgcaatttccatatcctaatgattcaatctcccttaccctgaccaatcagtggcccaaattttccagccccttgcctcccagaaccccagcccagaactcttcagagatttaagaatctcctcctacctcctgactcagcaccatgtaatcattaaactctctgctgcaaa

SEQ ID NO: 117081 - DNA, 778 bp, Homo sapiens
  Payload ID: 2851
  Gene Symbol: CCL3
  Gene Name: chemokine (C-C motif) ligand 3
  Uniprot ID: P10147
  ENST ID: ENST00000613922
  CDS Start-End: 84-362
aaggacacgggcagcagacagtggtcagtcctttcttggctctgctgacactcgagcccacattccgtcacctgctcagaatcatgcaggtctccactgctgcccttgctgtcctcctctgcaccatggctctctgcaaccagttctctgcatcacttgctgctgacacgccgaccgcctgctgcttcagctacacctcccggcagattccacagaatttcatagctgactactttgagacgagcagccagtgctccaagcccggtgtcatcttcctaaccaagcgaagccggcaggtctgtgctgaccccagtgaggagtgggtccagaaatatgtcagcgacctggagctgagtgcctgaggggtccagaagcttcgaggcccagcgacctcggtgggcccagtggggaggagcaggagcctgagccttgggaacatgcgtgtgacctccacagctacctcttctatggactggttgttgccaaacagccacactgtgggactcttcttaacttaaattttaatttatttatactatttagtttttgtaatttattttcgatttcacagtgtgtttgtgattgtttgctctgagagttcccctgtcccctcccccttccctcacaccgcgtctggtgacaaccgagtggctgtcatcagcctgtgtaggcagtcatggcaccaaagccaccagactgacaaatgtgtatcggatgcttttgttcagggctgtgatcggcctggggaaataataaagatgctcttttaaaaggtaaa

SEQ ID NO: 117082 - DNA, 778 bp, Homo sapiens; identical to SEQ ID NO: 117081
  Payload ID: 2851
  Gene Symbol: CCL3
  Gene Name: chemokine (C-C motif) ligand 3
  ENST ID: ENST00000613396
  CDS Start-End: 84-362

SEQ ID NO: 117083 - DNA, 778 bp, Homo sapiens; identical to SEQ ID NO: 117081
  Payload ID: 2851
  Gene Symbol: CCL3
  Gene Name: chemokine (C-C motif) ligand 3
  Uniprot ID: P10147
  ENST ID: ENST00000616221
  CDS Start-End: 84-362

SEQ ID NO: 117084 - DNA, 784 bp, Homo sapiens
  Payload ID: 2852
  Gene Symbol: CCL3L1
  Gene Name: chemokine (C-C motif) ligand 3-like 1
  Uniprot ID: P16619
  ENST ID: ENST00000612067
  CDS Start-End: 86-367
agaaggacgcaggcagcaaagagtagtcagtcccttcttggctctgctgacactcgagcccacattccatcacctgctcccaatcatgcaggtctccactgctgcccttgccgtcctcctctgcaccatggctctctgcaaccaggtcctctctgcaccacttgctgctgacacgccgaccgcctgctgcttcagctacacctcccgacagattccacagaatttcatagctgactactttgagacgagcagccagtgctccaagcccagtgtcatcttcctaaccaagagaggccggcaggtctgtgctgaccccagtgaggagtgggtccagaaatacgtcagtgacctggagctgagtgcctgaggggtccagaagcttcgaggcccagcgacctcagtgggcccagtggggaggagcaggagcctgagccttgggaacatgcgtgtgacctccacagctacctcttctatggactggttattgccaaacagccacactgtgggactcttcttaacttaaattttaatttatttatactatttagtttttataatttatttttgatttcacagtgtgtttgtgattgtttgctctgagagttccccctgtcccctccaccttccctcacagtgtgtctggtgacaaccgagtggctgtcatcggcctgtgtaggcagtcatggcaccaaagccaccagactgacaaatgtgtatcagatgcttttgttcagggctgtgatcggcctggggaaataataaagatgttcttttaaacggtaaa

SEQ ID NO: 117085 - DNA, 784 bp, Homo sapiens
  Payload ID: 2853
  Gene Symbol: CCL3L3
  Gene Name: chemokine (C-C motif) ligand 3-like 3
  Uniprot ID: P16619
  ENST ID: ENST00000615140
  CDS Start-End: 86-367
agaaggacgcaggcagcaaagagtagtcagtcccttcttggctctgctgacactcgagcccacattccatcacctgctcccaatcatgcaggtctccactgctgcccttgccgtcctcctctgcaccatggctctctgcaaccaggtcctctctgcaccacttgctgctgacacgccgaccgcctgctgcttcagctacacctcccgacagattccacagaatttcatagctgactactttgagacgagcagccagtgctccaagcccagtgtcatcttcctaaccaagagaggccggcaggtctgtgctgaccccagtgaggagtgggtccagaaatacgtcagtgacctggagctgagtgcctgaggggtccagaagcttcgaggcccagcgacctcagtgggcccagtggggaggagcaggagcctgagccttgggaacatgcgtgtgacctctacagctacctcttctatggactggttattgccaaacagccacactgtgggactcttcttaacttaaattttaatttatttatactatttagtttttataatttatttttgatttcacagtgtgtttgtgattgtttgctctgagagttccccctgtcccctccaccttccctcacagtgtgtctggtgacaaccgagtggctgtcatcggcctgtgtaggcagtcatggcaccaaagccaccagactgacaaatgtgtatcagatgcttttgttcagggctgtgatcggcctggggaaataataaagatgttcttttaaacggtaaa

SEQ ID NO: 117086 - DNA, 784 bp, Homo sapiens; identical to SEQ ID NO: 117084
  Payload ID: 2853
  Gene Symbol: CCL3L3
  Gene Name: chemokine (C-C motif) ligand 3-like 3
  Uniprot ID: P16619
  ENST ID: ENST00000619989
  CDS Start-End: 86-367

SEQ ID NO: 117087 - DNA, 784 bp, Homo sapiens; identical to SEQ ID NO: 117084
  Payload ID: 2853
  Gene Symbol: CCL3L3
  Gene Name: chemokine (C-C motif) ligand 3-like 3
  Uniprot ID: P16619
  ENST ID: ENST00000621940
  CDS Start-End: 86-367

SEQ ID NO: 117088 - DNA, 667 bp, Homo sapiens
  Payload ID: 2854
  Gene Symbol: CCL4
  Gene Name: chemokine (C-C motif) ligand 4
  ENST ID: ENST00000621600
  CDS Start-End: 80-358
agcacaggacacagctgggttctgaagcttctgagttctgcagcctcacctctgagaaaacctcttttccaccaataccatgaagctctgcgtgactgtcctgtctctcctcatgctagtagctgccttctgctctccagcgctctcagcaccaatgggctcagaccctcccaccgcctgctgcttttcttacaccgcgaggaagcttcctcgcaactttgtggtagattactatgagaccagcagcctctgctcccagccagctgtggtattccaaaccaaaagaagcaagcaagtctgtgctgatcccagtgaatcctgggtccaggagtacgtgtatgacctggaactgaactgagctgctcagagacaggaagtcttcagggaaggtcacctgagcccggatgcttctccatgagacacatctcctccatactcaggactcctctccgcagttcctgtcccttctcttaatttaatcttttttatgtgccgtgttattgtattaggtgtcatttccattatttatattagtttagccaaaggataagtgtcccctatggggatggtccactgtcactgtttctctgctgttgcaaatacatggataacacatttgattctgtgtgttttcataataaaactttaaaataaaatgcagacagtt

SEQ ID NO: 117089 - DNA, 552 bp, Homo sapiens
  Payload ID: 2854
  Gene Symbol: CCL4
  Gene Name: chemokine (C-C motif) ligand 4
  ENST ID: ENST00000613036
  CDS Start-End: 80-238
agcacaggacacagctgggttctgaagcttctgagttctgcagcctcacctctgagaaaacctcttttccaccaataccatgaagctctgcgtgactgtcctgtctctcctcatgctagtagctgccttctgctctccagcgctctcagcaccaaattccaaaccaaaagaagcaagcaagtctgtgctgatcccagtgaatcctgggtccaggagtacgtgtatgacctggaactgaactgagctgctcagagacaggaagtcttcagggaaggtcacctgagcccggatgcttctccatgagacacatctcctccatactcaggactcctctccgcagttcctgtcccttctcttaatttaatcttttttatgtgccgtgttattgtattaggtgtcatttccattatttatattagtttagccaaaggataagtgtcccctatggggatggtccactgtcactgtttctctgctgttgcaaatacatggataacacatttgattctgtgtgttttcataataaaactttaaaataaaatgcagacagtt

SEQ ID NO: 117090 - DNA, 897 bp, Homo sapiens
  Payload ID: 2854
  Gene Symbol: CCL4
  Gene Name: chemokine (C-C motif) ligand 4
  Uniprot ID: P13236
  ENST ID: ENST00000617322
  CDS Start-End: 317-595
agtctcggtcactgcctttggctgtaccacttcccttttcttctcgcctgcacctccctcatctttcctctatgatgacatcgccctggggaagagaagctgagaggaactcctcactcagctagcttcaggagcatgacgtcatctctaccatggaaattccactcactctcctgtgcccccacatttgtcctaggcctcagagtccctataaagagagattcccaagtcagtatcagcacaggacacagctgggttctgaagcttctgagttctgcagcctcacctctgagaaaacctctttgccaccaataccatgaagctctgcgtgactgtcctgtctctcctcatgctagtagctgccttctgctctccagcgctctcagcaccaatgggctcagaccctcccaccgcctgctgcttttcttacactgcgaggaagcttcctcgcaactttgtggtagattactatgagaccagcagcctctgctcccagccagctgtggtattccaaaccaaaagaagcaagcaagtctgtgctgatcccagtgaatcctgggtccaggagtacgtgtatgacctggaactgaactgagctgctcagagacaggaagtcttcagggaaggtcacctgagcccggatgcttctccatgagacacatctcctccatactcaggactcctctccgcagttcctgtcccttctcttaatttaatcttttttatgtgccgtgttattgtattaggtgtcatttccattatttatattagtttagccaaaggataagtgtcccctatggggatggtccactgtcactgtttctctgctgttgcaaatacatggataacacatttgattctgtgtgttttcataataaaactttaaaataaaatgca

SEQ ID NO: 117091 - DNA, 552 bp, Homo sapiens; identical to SEQ ID NO: 117089
  Payload ID: 2854
  Gene Symbol: CCL4
  Gene Name: chemokine (C-C motif) ligand 4
  ENST ID: ENST00000621626
  CDS Start-End: 80-238

SEQ ID NO: 117092 - DNA, 904 bp, Homo sapiens
  Payload ID: 2854
  Gene Symbol: CCL4
  Gene Name: chemokine (C-C motif) ligand 4
  Uniprot ID: P13236
  ENST ID: ENST00000615863
  CDS Start-End: 317-595
agtctcggtcactgcctttggctgtaccacttcccttttcttctcgcctgcacctccctcatctttcctctatgatgacatcgccctggggaagagaagctgagaggaactcctcactcagctagcttcaggagcatgacgtcatctctaccatggaaattccactcactctcctgtgcccccacatttgtcctaggcctcagagtccctataaagagagattcccaagtcagtatcagcacaggacacagctgggttctgaagcttctgagttctgcagcctcacctctgagaaaacctcttttccaccaataccatgaagctctgcgtgactgtcctgtctctcctcatgctagtagctgccttctgctctccagcgctctcagcaccaatgggctcagaccctcccaccgcctgctgcttttcttacaccgcgaggaagcttcctcgcaactttgtggtagattactatgagaccagcagcctctgctcccagccagctgtggtattccaaaccaaaagaagcaagcaagtctgtgctgatcccagtgaatcctgggtccaggagtacgtgtatgacctggaactgaactgagctgctcagagacaggaagtcttcagggaaggtcacctgagcccggatgcttctccatgagacacatctcctccatactcaggactcctctccgcagttcctgtcccttctcttaatttaatcttttttatgtgccgtgttattgtattaggtgtcatttccattatttatattagtttagccaaaggataagtgtcccctatggggatggtccactgtcactgtttctctgctgttgcaaatacatggataacacatttgattctgtgtgttttcataataaaactttaaaataaaatgcagacagtt

SEQ ID NO: 117093 - DNA, 552 bp, Homo sapiens
  Payload ID: 2854
  Gene Symbol: CCL4
  Gene Name: chemokine (C-C motif) ligand 4
  ENST ID: ENST00000610612
  CDS Start-End: 80-238
agcacaggacacagctgggttctgaagcttctgagttctgcagcctcacctctgagaaaacctctttgccaccaataccatgaagctctgcgtgactgtcctgtctctcctcatgctagtagctgccttctgctctccagcgctctcagcaccaaattccaaaccaaaagaagcaagcaagtctgtgctgatcccagtgaatcctgggtccaggagtacgtgtatgacctggaactgaactgagctgctcagagacaggaagtcttcagggaaggtcacctgagcccggatgcttctccatgagacacatctcctccatactcaggactcctctccgcagttcctgtcccttctcttaatttaatcttttttatgtgccgtgttattgtattaggtgtcatttccattatttatattagtttagccaaaggataagtgtcccctatggggatggtccactgtcactgtttctctgctgttgcaaatacatggataacacatttgattctgtgtgttttcataataaaactttaaaataaaatgcagacagtt

SEQ ID NO: 117094 - DNA, 513 bp, Homo sapiens
  Payload ID: 2855
  Gene Symbol: CCL4L2
  Gene Name: chemokine (C-C motif) ligand 4-like 2
  ENST ID: ENST00000611486
  CDS Start-End: 235-513
ccctggggaagagaagctgagaggaactcctcactcagctagcttcaggagccatgacatcatctctaccatggaaattccactcactctcctgtgcccccacatttgtcctaggcctcagagtccctataaagagagattcccaactcagtatcagcacaggacacagctaggttctgaagcttctgagttctgcagcctcacctctgagaaaacctctttgccaccaataccatgaagctctgcgtgactgtcctgtctctcctcgtgctagtagctgccttctgctctctagcactctcagcaccaatgggctcagaccctcccaccgcctgctgcttttcttacaccgcgaggaagcttcctcgcaactttgtggtagattactatgagaccagcagcctctgctcccagccagctgtcccatgggattctaatctaggcaagcaagtctgcgctgaccccagtgagtcctgggtccaggagtacgtgtatgacctggaactgaactga

SEQ ID NO: 117095 - DNA, 667 bp, Homo sapiens
  Payload ID: 2855
  Gene Symbol: CCL4L2
  Gene Name: chemokine (C-C motif) ligand 4-like 2
  Uniprot ID: Q8NHW4
  ENST ID: ENST00000620063
  CDS Start-End: 80-358
agcacaggacacagctaggttctgaagcttctgagttctgcagcctcacctctgagaaaacctctttgccaccaataccatgaagctctgcgtgactgtcctgtctctcctcgtgctagtagctgccttctgctctctagcactctcagcaccaatgggctcagaccctcccaccgcctgctgcttttcttacaccgcgaggaagcttcctcgcaactttgtggtagattactatgagaccagcagcctctgctcccagccagctgtggtattccaaaccaaaagaggcaagcaagtctgcgctgaccccagtgagtcctgggtccaggagtacgtgtatgacctggaactgaactgagctgctcagagacaggaagtcttcagggaaggtcacctgagcctggatgcttctccatgagccgcatctcctccatactcaggactcctctccgcagttcctgtctcttctcttaatgtaatctcttttatgtgctgtattattgtattaggtgttatttccattatttatattagtttagccaaaggataagtgtcccctatggggatggtccactctcactctttctctgctgttgcaaatacatggataacaccgttaattccatgtgttttcataataaaactttaaaataaaatgcaaacagtt

SEQ ID NO: 117096 - DNA, 667 bp, Homo sapiens; identical to SEQ ID NO: 117095
  Payload ID: 2855
  Gene Symbol: CCL4L2
  Gene Name: chemokine (C-C motif) ligand 4-like 2
  Uniprot ID: Q8NHW4
  ENST ID: ENST00000620708
  CDS Start-End: 80-358

SEQ ID NO: 117097 - DNA, 652 bp, Homo sapiens
  Payload ID: 2855
  Gene Symbol: CCL4L2
  Gene Name: chemokine (C-C motif) ligand 4-like 2
  Uniprot ID: Q8NHW4
  ENST ID: ENST00000620576
  CDS Start-End: 80-343
agcacaggacacagctaggttctgaagcttctgagttctgcagcctcacctctgagaaaacctctttgccaccaataccatgaagctctgcgtgactgtcctgtctctcctcgtgctagtagctgccttctgctctctagcactctcagcaccaatgggctcagaccctcccaccgcctgctgcttttcttacaccgcgaggaagcttcctcgcaactttgtggtagattactatgagaccagcagcctctgctcccagccagctgtggtaggcaagcaagtctgcgctgaccccagtgagtcctgggtccaggagtacgtgtatgacctggaactgaactgagctgctcagagacaggaagtcttcagggaaggtcacctgagcctggatgcttctccatgagccgcatctcctccatactcaggactcctctccgcagttcctgtctcttctcttaatgtaatctcttttatgtgctgtattattgtattaggtgttatttccattatttatattagtttagccaaaggataagtgtcccctatggggatggtccactctcactctttctctgctgttgcaaatacatggataacaccgttaattccatgtgttttcataataaaactttaaaataaaatgcaaacagtt

SEQ ID NO: 117098 - DNA, 836 bp, Homo sapiens
  Payload ID: 2855
  Gene Symbol: CCL4L2
  Gene Name: chemokine (C-C motif) ligand 4-like 2
  Uniprot ID: Q8NHW4
  ENST ID: ENST00000620098
  CDS Start-End: 80-391
agcacaggacacagctaggttctgaagcttctgagttctgcagcctcacctctgagaaaacctctttgccaccaataccatgaagctctgcgtgactgtcctgtctctcctcgtgctagtagctgccttctgctctctagcactctcagcaccaatgggctcagaccctcccaccgcctgctgcttttcttacaccgcgaggaagcttcctcgcaactttgtggtagattactatgagaccagcagcctctgctcccagccagctgtggtttacagggagtctgcttccagtgctgctccgggaaggatcccatccaccagagctgccccacatggaccatggtcaggcagaggaagatgcctaccacaggcaagggataaagccagatgacctcaaaggtcccatgggattctaatctgtctgctccttgttctacggattccaaaccaaaagaggcaagcaagtctgcgctgaccccagtgagtcctgggtccaggagtacgtgtatgacctggaactgaactgagctgctcagagacaggaagtcttcagggaaggtcacctgagcctggatgcttctccatgagccgcatctcctccatactcaggactcctctccgcagttcctgtctcttctcttaatgtaatctcttttatgtgctgtattattgtattaggtgttatttccattatttatattagtttagccaaaggataagtgtcccctatggggatggtccactctcactctttctctgctgttgcaaatacatggataacaccgttaattccatgtgttttcataataaaactttaaaataaaatgcaaacagtt

SEQ ID NO: 117099 - DNA, 537 bp, Homo sapiens
  Payload ID: 2855
  Gene Symbol: CCL4L2
  Gene Name: chemokine (C-C motif) ligand 4-like 2
  Uniprot ID: Q8NHW4
  ENST ID: ENST00000622783
  CDS Start-End: 80-223
agcacaggacacagctaggttctgaagcttctgagttctgcagcctcacctctgagaaaacctctttgccaccaataccatgaagctctgcgtgactgtcctgtctctcctcgtgctagtagctgccttctgctctctagcactctcagcaccaaaggcaagcaagtctgcgctgaccccagtgagtcctgggtccaggagtacgtgtatgacctggaactgaactgagctgctcagagacaggaagtcttcagggaaggtcacctgagcctggatgcttctccatgagccgcatctcctccatactcaggactcctctccgcagttcctgtctcttctcttaatgtaatctcttttatgtgctgtattattgtattaggtgttatttccattatttatattagtttagccaaaggataagtgtcccctatggggatggtccactctcactctttctctgctgttgcaaatacatggataacaccgttaattccatgtgttttcataataaaactttaaaataaaatgcaaacagtt

SEQ ID NO: 117100 - DNA, 1258 bp, Homo sapiens
  Payload ID: 2855
  Gene Symbol: CCL4L2
  Gene Name: chemokine (C-C motif) ligand 4-like 2
  Uniprot ID: Q8NHW4
  ENST ID: ENST00000617416
  CDS Start-End: 80-274
agcacaggacacagctaggttctgaagcttctgagttctgcagcctcacctctgagaaaacctctttgccaccaataccatgaagctctgcgtgactgtcctgtctctcctcgtgctagtagctgccttctgctctctagcactctcagcaccaatgggctcagaccctcccaccgcctgctgcttttcttacaccgcgaggaagcttcctcgcaactttgtggtagattactatgagaccagcagcctctgctcccagccagctgtggtgtgagtatcaacccctggctgccctgggaggcaagggtgagggctggatttttaaagggggcctgttttggggagggggtgatgagcgttggggaggcagctctcagggctgaagccttccctgacagcagtgaggtcacaggtcatgaactcacttttcaagtgctgaaggcggctgagtggcagccgagacagaagggggttcctggggaggaagttattcagaggacagggaagcaggggaaggcagacaggtcccgtgagatatggaccaattccttaaaccatgctagaaaaacatgtggaaaagtcactaccaggctggcagggaatggggcaatctattcatactgattgcaatgcccactggttcctaatctgggcaacccctggggcccacagctaaatccagtgagtggaagttacagggagtctgcttccagtgctgctccgggaaggatcccatccaccagagctgccccacatggaccatggtcaggcagaggaagatgcctaccacaggcaagggataaagccagatgacctcaaaggtcccatgggattctaatctgtctgctccttgttctacggattccaaaccaaaagaggcaagcaagtctgcgctgaccccagtgagtcctgggtccaggagtacgtgtatgacctggaactgaactgagctgctcagagacaggaagtcttcagggaaggtcacctgagcctggatgcttctccatgagccgcatctcctccatactcaggactcctctccgcagttcctgtctcttctcttaatgtaatctcttttatgtgctgtattattgtattaggtgttatttccattatttatattagtttagccaaaggataagtgtcccctatggggatggtccactctcactctttctctgctgttgcaaatacatggataacaccgttaattccatgtgttttcataataaaactttaaaataaaatgcaaacagtt

SEQ ID NO: 117101 - DNA, 537 bp, Homo sapiens; identical to SEQ ID NO: 117099
  Payload ID: 2855
  Gene Symbol: CCL4L2
  Gene Name: chemokine (C-C motif) ligand 4-like 2
  Uniprot ID: Q8NHW4
  ENST ID: ENST00000620055
  CDS Start-End: 80-223

SEQ ID NO: 117102 - DNA, 552 bp, Homo sapiens
  Payload ID: 2855
  Gene Symbol: CCL4L2
  Gene Name: chemokine (C-C motif) ligand 4-like 2
  Uniprot ID: Q8NHW4
  ENST ID: ENST00000616729
  CDS Start-End: 80-238
agcacaggacacagctaggttctgaagcttctgagttctgcagcctcacctctgagaaaacctctttgccaccaataccatgaagctctgcgtgactgtcctgtctctcctcgtgctagtagctgccttctgctctctagcactctcagcaccaaattccaaaccaaaagaggcaagcaagtctgcgctgaccccagtgagtcctgggtccaggagtacgtgtatgacctggaactgaactgagctgctcagagacaggaagtcttcagggaaggtcacctgagcctggatgcttctccatgagccgcatctcctccatactcaggactcctctccgcagttcctgtctcttctcttaatgtaatctcttttatgtgctgtattattgtattaggtgttatttccattatttatattagtttagccaaaggataagtgtcccctatggggatggtccactctcactctttctctgctgttgcaaatacatggataacaccgttaattccatgtgttttcataataaaactttaaaataaaatgcaaacagtt

SEQ ID NO: 117103 - DNA, 856 bp, Homo sapiens
  Payload ID: 2855
  Gene Symbol: CCL4L2
  Gene Name: chemokine (C-C motif) ligand 4-like 2
  Uniprot ID: Q8NHW4
  ENST ID: ENST00000620732
  CDS Start-End: 80-274
agcacaggacacagctaggttctgaagcttctgagttctgcagcctcacctctgagaaaacctctttgccaccaataccatgaagctctgcgtgactgtcctgtctctcctcgtgctagtagctgccttctgctctctagcactctcagcaccaatgggctcagaccctcccaccgcctgctgcttttcttacaccgcgaggaagcttcctcgcaactttgtggtagattactatgagaccagcagcctctgctcccagccagctgtggtctaaatccagtgagtggaagttacagggagtctgcttccagtgctgctccgggaaggatcccatccaccagagctgccccacatggaccatggtcaggcagaggaagatgcctaccacaggcaagggataaagccagatgacctcaaaggtcccatgggattctaatctgtctgctccttgttctacggattccaaaccaaaagaggcaagcaagtctgcgctgaccccagtgagtcctgggtccaggagtacgtgtatgacctggaactgaactgagctgctcagagacaggaagtcttcagggaaggtcacctgagcctggatgcttctccatgagccgcatctcctccatactcaggactcctctccgcagttcctgtctcttctcttaatgtaatctcttttatgtgctgtattattgtattaggtgttatttccattatttatattagtttagccaaaggataagtgtcccctatggggatggtccactctcactctttctctgctgttgcaaatacatggataacaccgttaattccatgtgttttcataataaaactttaaaataaaatgcaaacagtt

SEQ ID NO: 117104 - DNA, 954 bp, Homo sapiens
  Payload ID: 2855
  Gene Symbol: CCL4L2
  Gene Name: chemokine (C-C motif) ligand 4-like 2
  Uniprot ID: Q8NHW4
  ENST ID: ENST00000614182
  CDS Start-End: 219-509
ctgagaggaactcctcactcagctagcttcaggagccatgacatcatctctaccatggaaattccactcactctcctgtgcccccacatttgtcctaggcctcagagtccctataaagagagattcccaactcagtatcagcacaggacacagctaggttctgaagcttctgagttctgcagcctcacctctgagaaaacctctttgccaccaataccatgaagctctgcgtgactgtcctgtctctcctcgtgctagtagctgccttctgctctctagcactctcagcaccaatgggctcagaccctcccaccgcctgctgcttttcttacaccgcgaggaagcttcctcgcaactttgtggtagattactatgagaccagcagcctctgctcccagccagctgtggttgctgctccgggaaggatcccatccaccagagctgccccacatggaccatggtcaggcagaggaagatgcctaccacaggcaagggataaagccagatgacctcaaaggtcccatgggattctaatctgtctgctccttgttctacggattccaaaccaaaagaggcaagcaagtctgcgctgaccccagtgagtcctgggtccaggagtacgtgtatgacctggaactgaactgagctgctcagagacaggaagtcttcagggaaggtcacctgagcctggatgcttctccatgagccgcatctcctccatactcaggactcctctccgcagttcctgtctcttctcttaatgtaatctcttttatgtgctgtattattgtattaggtgttatttccattatttatattagtttagccaaaggataagtgtcccctatggggatggtccactctcactctttctctgctgttgcaaatacatggataacaccgttaattccatgtgttttcataataaaactttaaaataaaatgcaaacagtt

SEQ ID NO: 117105 - DNA, 954 bp, Homo sapiens; identical to SEQ ID NO: 117104
  Payload ID: 2855
  Gene Symbol: CCL4L2
  Gene Name: chemokine (C-C motif) ligand 4-like 2
  Uniprot ID: Q8NHW4
  ENST ID: ENST00000615418
  CDS Start-End: 219-509

SEQ ID NO: 117106 - DNA, 846 bp, Homo sapiens
  Payload ID: 2855
  Gene Symbol: CCL4L2
  Gene Name: chemokine (C-C motif) ligand 4-like 2
  Uniprot ID: Q8NHW4
  ENST ID: ENST00000617405
  CDS Start-End: 80-391
agcacaggacacagctaggttctgaagcttctgagttctgcagcctcacctctgagaaaacctctttgccaccaataccatgaagctctgcgtgactgtcctgtctctcctcgtgctagtagctgccttctgctctctagcactctcagcaccaatgggctcagaccctcccaccgcctgctgcttttcttacaccgcgaggaagcttcctcgcaactttgtggtagattactatgagaccagcagcctctgctcccagccagctgtggttgagtggaagttacagggagtctgcttccagtgctgctccgggaaggatcccatccaccagagctgccccacatggaccatggtcaggcagaggaagatgcctaccacaggcaagggataaagccagatgacctcaaaggtcccatgggattctaatctgtctgctccttgttctacggattccaaaccaaaagaggcaagcaagtctgcgctgaccccagtgagtcctgggtccaggagtacgtgtatgacctggaactgaactgagctgctcagagacaggaagtcttcagggaaggtcacctgagcctggatgcttctccatgagccgcatctcctccatactcaggactcctctccgcagttcctgtctcttctcttaatgtaatctcttttatgtgctgtattattgtattaggtgttatttccattatttatattagtttagccaaaggataagtgtcccctatggggatggtccactctcactctttctctgctgttgcaaatacatggataacaccgttaattccatgtgttttcataataaaactttaaaataaaatgcaaacagtt

SEQ ID NO: 117107 - DNA, 667 bp, Homo sapiens; identical to SEQ ID NO: 117095
  Payload ID: 2855
  Gene Symbol: CCL4L2
  Gene Name: chemokine (C-C motif) ligand 4-like 2
  Uniprot ID: Q8NHW4
  ENST ID: ENST00000620250
  CDS Start-End: 80-358

SEQ ID NO: 117108 - DNA, 785 bp, Homo sapiens
  Payload ID: 2855
  Gene Symbol: CCL4L2
  Gene Name: chemokine (C-C motif) ligand 4-like 2
  ENST ID: ENST00000616100
  CDS Start-End: 80-340
agcacaggacacagctaggttctgaagcttctgagttctgcagcctcacctctgagaaaacctctttgccaccaataccatgaagctctgcgtgactgtcctgtctctcctcgtgctagtagctgccttctgctctctagcactctcagcaccaatgggctcagaccctcccaccgcctgctgcttttcttacaccgcgaggaagcttcctcgcaactttgtggtagattactatgagaccagcagcctctgctcccagccagctgtggtagctgccccacatggaccatggtcaggcagaggaagatgcctaccacaggcaagggataaagccagatgacctcaaaggtcccatgggattctaatctgtctgctccttgttctacggattccaaaccaaaagaggcaagcaagtctgcgctgaccccagtgagtcctgggtccaggagtacgtgtatgacctggaactgaactgagctgctcagagacaggaagtcttcagggaaggtcacctgagcctggatgcttctccatgagccgcatctcctccatactcaggactcctctccgcagttcctgtctcttctcttaatgtaatctcttttatgtgctgtattattgtattaggtgttatttccattatttatattagtttagccaaaggataagtgtcccctatggggatggtccactctcactctttctctgctgttgcaaatacatggataacaccgttaattccatgtgttttcataataaaactttaaaataaaatgcaaacagtt

SEQ ID NO: 117109 - DNA, 667 bp, Homo sapiens; identical to SEQ ID NO: 117095
  Payload ID: 2855
  Gene Symbol: CCL4L2
  Gene Name: chemokine (C-C motif) ligand 4-like 2
  ENST ID: ENST00000613828
  CDS Start-End: 80-358

SEQ ID NO: 117110 - DNA, 741 bp, Homo sapiens
  Payload ID: 2855
  Gene Symbol: CCL4L2
  Gene Name: chemokine (C-C motif) ligand 4-like 2
  Uniprot ID: Q8NHW4
  ENST ID: ENST00000613173
  CDS Start-End: 80-286
agcacaggacacagctaggttctgaagcttctgagttctgcagcctcacctctgagaaaacctctttgccaccaataccatgaagctctgcgtgactgtcctgtctctcctcgtgctagtagctgccttctgctctctagcactctcagcaccaactaaatccagtgagtggaagttacagggagtctgcttccagtgctgctccgggaaggatcccatccaccagagctgccccacatggaccatggtcaggcagaggaagatgcctaccacaggcaagggataaagccagatgacctcaaaggtcccatgggattctaatctgtctgctccttgttctacggattccaaaccaaaagaggcaagcaagtctgcgctgaccccagtgagtcctgggtccaggagtacgtgtatgacctggaactgaactgagctgctcagagacaggaagtcttcagggaaggtcacctgagcctggatgcttctccatgagccgcatctcctccatactcaggactcctctccgcagttcctgtctcttctcttaatgtaatctcttttatgtgctgtattattgtattaggtgttatttccattatttatattagtttagccaaaggataagtgtcccctatggggatggtccactctcactctttctctgctgttgcaaatacatggataacaccgttaattccatgtgttttcataataaaactttaaaataaaatgcaaacagtt

SEQ ID NO: 117111 - DNA, 785 bp, Homo sapiens; identical to SEQ ID NO: 117108
  Payload ID: 2855
  Gene Symbol: CCL4L2
  Gene Name: chemokine (C-C motif) ligand 4-like 2
  Uniprot ID: Q8NHW4
  ENST ID: ENST00000610565
  CDS Start-End: 80-340

SEQ ID NO: 117112 - DNA, 815 bp, Homo sapiens
  Payload ID: 2855
  Gene Symbol: CCL4L2
  Gene Name: chemokine (C-C motif) ligand 4-like 2
  ENST ID: ENST00000631808
  CDS Start-End: 80-370
agcacaggacacagctaggttctgaagcttctgagttctgcagcctcacctctgagaaaacctctttgccaccaataccatgaagctctgcgtgactgtcctgtctctcctcgtgctagtagctgccttctgctctctagcactctcagcaccaatgggctcagaccctcccaccgcctgctgcttttcttacaccgcgaggaagcttcctcgcaactttgtggtagattactatgagaccagcagcctctgctcccagccagctgtggttgctgctccgggaaggatcccatccaccagagctgccccacatggaccatggtcaggcagaggaagatgcctaccacaggcaagggataaagccagatgacctcaaaggtcccatgggattctaatctgtctgctccttgttctacggattccaaaccaaaagaggcaagcaagtctgcgctgaccccagtgagtcctgggtccaggagtacgtgtatgacctggaactgaactgagctgctcagagacaggaagtcttcagggaaggtcacctgagcctggatgcttctccatgagccgcatctcctccatactcaggactcctctccgcagttcctgtctcttctcttaatgtaatctcttttatgtgctgtattattgtattaggtgttatttccattatttatattagtttagccaaaggataagtgtcccctatggggatggtccactctcactctttctctgctgttgcaaatacatggataacaccgttaattccatgtgttttcataataaaactttaaaataaaatgcaaacagtt

SEQ ID NO: 117113 - DNA, 856 bp, Homo sapiens; identical to SEQ ID NO: 117103
  Payload ID: 2855
  Gene Symbol: CCL4L2
  Gene Name: chemokine (C-C motif) ligand 4-like 2
  Uniprot ID: Q8NHW4
  ENST ID: ENST00000634191
  CDS Start-End: 80-274

SEQ ID NO: 117114 - DNA, 836 bp, Homo sapiens; identical to SEQ ID NO: 117098
  Payload ID: 2855
  Gene Symbol: CCL4L2
  Gene Name: chemokine (C-C motif) ligand 4-like 2
  ENST ID: ENST00000633849
  CDS Start-End: 80-391

SEQ ID NO: 117115 - DNA, 846 bp, Homo sapiens
  Payload ID: 2855
  Gene Symbol: CCL4L2
  Gene Name: chemokine (C-C motif) ligand 4-like 2
  ENST ID: ENST00000632903
  CDS Start-End: 80-391
agcacaggacacagctaggttctgaagcttctgagttctgcagcctcacctctgagaaaacctctttgccaccaataccatgaagctctgcgtgactgtcctgtctctcctcgtgctagtagctgccttctgctctctagcactctcagcaccaatgggctcagaccctcccaccgcctgctgcttttcttacaccgcgaggaagcttcctcgcaactttgtggtagattactatgagaccagcagcctctgctcccagccagctgtggttgagtggaagttacagggagtctgcttccagtgctgctcgaggaaggatcccatccaccagagctgccccacatggaccatggtcaggcagaggaagatgcctaccacaggcaagggataaagccagatgacctcaaaggtcccatgggattctaatctgtctgctccttgttctacagattccaaaccaaaagaggcaagcaagtctgcgctgaccccagtgagtcctgggtccaggagtacgtgtatgacctggaactgaactgagctgctcagagacaggaagtcttcagggaaggtcacctgagcctggatgcttctccatgagccgcatctcctccatactcaggactcctctccgcagttcctgtctcttctcttaatgtaatctcttttatgtgctgtattattgtattaggtgttatttccattatttatattagtttagccaaaggataagtgtcccctatggggatggtccactctcactctttctctgctgttgcaaatacatggataacaccgttaattccatgtgttttcataataaaactttaaaataaaatgcaaacagtt

SEQ ID NO: 117116 - DNA, 652 bp, Homo sapiens; identical to SEQ ID NO: 117097
  Payload ID: 2855
  Gene Symbol: CCL4L2
  Gene Name: chemokine (C-C motif) ligand 4-like 2
  Uniprot ID: Q8NHW4
  ENST ID: ENST00000632416
  CDS Start-End: 80-343

SEQ ID NO: 117117 - DNA, 741 bp, Homo sapiens
  Payload ID: 2855
  Gene Symbol: CCL4L2
  Gene Name: chemokine (C-C motif) ligand 4-like 2
  ENST ID: ENST00000633574
  CDS Start-End: 80-286
agcacaggacacagctaggttctgaagcttctgagttctgcagcctcacctctgagaaaacctctttgccaccaataccatgaagctctgcgtgactgtcctgtctctcctcgtgctagtagctgccttctgctctctagcactctcagcaccaactaaatccagtgagtggaagttacagggagtctgcttccagtgctgctcgaggaaggatcccatccaccagagctgccccacatggaccatggtcaggcagaggaagatgcctaccacaggcaagggataaagccagatgacctcaaaggtcccatgggattctaatctgtctgctccttgttctacagattccaaaccaaaagaggcaagcaagtctgcgctgaccccagtgagtcctgggtccaggagtacgtgtatgacctggaactgaactgagctgctcagagacaggaagtcttcagggaaggtcacctgagcctggatgcttctccatgagccgcatctcctccatactcaggactcctctccgcagttcctgtctcttctcttaatgtaatctcttttatgtgctgtattattgtattaggtgttatttccattatttatattagtttagccaaaggataagtgtcccctatggggatggtccactctcactctttctctgctgttgcaaatacatggataacaccgttaattccatgtgttttcataataaaactttaaaataaaatgcaaacagtt

SEQ ID NO: 117118 - DNA, 836 bp, Homo sapiens; identical to SEQ ID NO: 117098
  Payload ID: 2855
  Gene Symbol: CCL4L2
  Gene Name: chemokine (C-C motif) ligand 4-like 2
  Uniprot ID: Q8NHW4
  ENST ID: ENST00000631554
  CDS Start-End: 80-391

SEQ ID NO: 117119 - DNA, 836 bp, Homo sapiens
  Payload ID: 2855
  Gene Symbol: CCL4L2
  Gene Name: chemokine (C-C motif) ligand 4-like 2
  ENST ID: ENST00000634014
  CDS Start-End: 80-391
agcacaggacacagctaggttctgaagcttctgagttctgcagcctcacctctgagaaaacctctttgccaccaataccatgaagctctgcgtgactgtcctgtctctcctcgtgctagtagctgccttctgctctctagcactctcagcaccaatgggctcagaccctcccaccgcctgctgcttttcttacaccgcgaggaagcttcctcgcaactttgtggtagattactatgagaccagcagcctctgctcccagccagctgtggtttacagggagtctgcttccagtgctgctcgaggaaggatcccatccaccagagctgccccacatggaccatggtcaggcagaggaagatgcctaccacaggcaagggataaagccagatgacctcaaaggtcccatgggattctaatctgtctgctccttgttctacagattccaaaccaaaagaggcaagcaagtctgcgctgaccccagtgagtcctgggtccaggagtacgtgtatgacctggaactgaactgagctgctcagagacaggaagtcttcagggaaggtcacctgagcctggatgcttctccatgagccgcatctcctccatactcaggactcctctccgcagttcctgtctcttctcttaatgtaatctcttttatgtgctgtattattgtattaggtgttatttccattatttatattagtttagccaaaggataagtgtcccctatggggatggtccactctcactctttctctgctgttgcaaatacatggataacaccgttaattccatgtgttttcataataaaactttaaaataaaatgcaaacagtt

SEQ ID NO: 117120 - DNA, 1258 bp, Homo sapiens; identical to SEQ ID NO: 117100
  Payload ID: 2855
  Gene Symbol: CCL4L2
  Gene Name: chemokine (C-C motif) ligand 4-like 2
  ENST ID: ENST00000631768
  CDS Start-End: 80-274

SEQ ID NO: 117121 - DNA, 785 bp, Homo sapiens
  Payload ID: 2855
  Gene Symbol: CCL4L2
  Gene Name: chemokine (C-C motif) ligand 4-like 2
  Uniprot ID: Q8NHW4
  ENST ID: ENST00000634078
  CDS Start-End: 80-340
agcacaggacacagctaggttctgaagcttctgagttctgcagcctcacctctgagaaaacctctttgccaccaataccatgaagctctgcgtgactgtcctgtctctcctcgtgctagtagctgccttctgctctctagcactctcagcaccaatgggctcagaccctcccaccgcctgctgcttttcttacaccgcgaggaagcttcctcgcaactttgtggtagattactatgagaccagcagcctctgctcccagccagctgtggtagctgccccacatggaccatggtcaggcagaggaagatgcctaccacaggcaagggataaagccagatgacctcaaaggtcccatgggattctaatctgtctgctccttgttctacagattccaaaccaaaagaggcaagcaagtctgcgctgaccccagtgagtcctgggtccaggagtacgtgtatgacctggaactgaactgagctgctcagagacaggaagtcttcagggaaggtcacctgagcctggatgcttctccatgagccgcatctcctccatactcaggactcctctccgcagttcctgtctcttctcttaatgtaatctcttttatgtgctgtattattgtattaggtgttatttccattatttatattagtttagccaaaggataagtgtcccctatggggatggtccactctcactctttctctgctgttgcaaatacatggataacaccgttaattccatgtgttttcataataaaactttaaaataaaatgcaaacagtt

SEQ ID NO: 117122 - DNA, 652 bp, Homo sapiens; identical to SEQ ID NO: 117097
  Payload ID: 2855
  Gene Symbol: CCL4L2
  Gene Name: chemokine (C-C motif) ligand 4-like 2
  Uniprot ID: Q8NHW4
  ENST ID: ENST00000632699
  CDS Start-End: 80-343

SEQ ID NO: 117123 - DNA, 537 bp, Homo sapiens; identical to SEQ ID NO: 117099
  Payload ID: 2855
  Gene Symbol: CCL4L2
  Gene Name: chemokine (C-C motif) ligand 4-like 2
  ENST ID: ENST00000632480
  CDS Start-End: 80-223

SEQ ID NO: 117124 - DNA, 741 bp, Homo sapiens; identical to SEQ ID NO: 117110
  Payload ID: 2855
  Gene Symbol: CCL4L2
  Gene Name: chemokine (C-C motif) ligand 4-like 2
  Uniprot ID: Q8NHW4
  ENST ID: ENST00000633927
  CDS Start-End: 80-286

SEQ ID NO: 117125 - DNA, 846 bp, Homo sapiens; identical to SEQ ID NO: 117106
  Payload ID: 2855
  Gene Symbol: CCL4L2
  Gene Name: chemokine (C-C motif) ligand 4-like 2
  Uniprot ID: Q8NHW4
  ENST ID: ENST00000634027
  CDS Start-End: 80-391

SEQ ID NO: 117126 - DNA, 785 bp, Homo sapiens; identical to SEQ ID NO: 117108
  Payload ID: 2855
  Gene Symbol: CCL4L2
  Gene Name: chemokine (C-C motif) ligand 4-like 2
  Uniprot ID: Q8NHW4
  ENST ID: ENST00000631782
  CDS Start-End: 80-340

SEQ ID NO: 117127 - DNA, 537 bp, Homo sapiens; identical to SEQ ID NO: 117099
  Payload ID: 2855
  Gene Symbol: CCL4L2
  Gene Name: chemokine (C-C motif) ligand 4-like 2
  Uniprot ID: Q8NHW4
  ENST ID: ENST00000631660
  CDS Start-End: 80-223

SEQ ID NO: 117128 - DNA, 815 bp, Homo sapiens
  Payload ID: 2855
  Gene Symbol: CCL4L2
  Gene Name: chemokine (C-C motif) ligand 4-like 2
  ENST ID: ENST00000631972
  CDS Start-End: 80-370
agcacaggacacagctaggttctgaagcttctgagttctgcagcctcacctctgagaaaacctctttgccaccaataccatgaagctctgcgtgactgtcctgtctctcctcgtgctagtagctgccttctgctctctagcactctcagcaccaatgggctcagaccctcccaccgcctgctgcttttcttacaccgcgaggaagcttcctcgcaactttgtggtagattactatgagaccagcagcctctgctcccagccagctgtggttgctgctcgaggaaggatcccatccaccagagctgccccacatggaccatggtcaggcagaggaagatgcctaccacaggcaagggataaagccagatgacctcaaaggtcccatgggattctaatctgtctgctccttgttctacagattccaaaccaaaagaggcaagcaagtctgcgctgaccccagtgagtcctgggtccaggagtacgtgtatgacctggaactgaactgagctgctcagagacaggaagtcttcagggaaggtcacctgagcctggatgcttctccatgagccgcatctcctccatactcaggactcctctccgcagttcctgtctcttctcttaatgtaatctcttttatgtgctgtattattgtattaggtgttatttccattatttatattagtttagccaaaggataagtgtcccctatggggatggtccactctcactctttctctgctgttgcaaatacatggataacaccgttaattccatgtgttttcataataaaactttaaaataaaatgcaaacagtt

SEQ ID NO: 117129 - DNA, 846 bp, Homo sapiens; identical to SEQ ID NO: 117106
  Payload ID: 2855
  Gene Symbol: CCL4L2
  Gene Name: chemokine (C-C motif) ligand 4-like 2
  ENST ID: ENST00000633309
  CDS Start-End: 80-391

SEQ ID NO: 117130 - DNA, 1258 bp, Homo sapiens; identical to SEQ ID NO: 117100
  Payload ID: 2855
  Gene Symbol: CCL4L2
  Gene Name: chemokine (C-C motif) ligand 4-like 2
  Uniprot ID: Q8NHW4
  ENST ID: ENST00000633550
  CDS Start-End: 80-274

SEQ ID NO: 117131 - DNA, 856 bp, Homo sapiens
  Payload ID: 2855
  Gene Symbol: CCL4L2
  Gene Name: chemokine (C-C motif) ligand 4-like 2
  Uniprot ID: Q8NHW4
  ENST ID: ENST00000632710
  CDS Start-End: 80-274
agcacaggacacagctaggttctgaagcttctgagttctgcagcctcacctctgagaaaacctctttgccaccaataccatgaagctctgcgtgactgtcctgtctctcctcgtgctagtagctgccttctgctctctagcactctcagcaccaatgggctcagaccctcccaccgcctgctgcttttcttacaccgcgaggaagcttcctcgcaactttgtggtagattactatgagaccagcagcctctgctcccagccagctgtggtctaaatccagtgagtggaagttacagggagtctgcttccagtgctgctcgaggaaggatcccatccaccagagctgccccacatggaccatggtcaggcagaggaagatgcctaccacaggcaagggataaagccagatgacctcaaaggtcccatgggattctaatctgtctgctccttgttctacagattccaaaccaaaagaggcaagcaagtctgcgctgaccccagtgagtcctgggtccaggagtacgtgtatgacctggaactgaactgagctgctcagagacaggaagtcttcagggaaggtcacctgagcctggatgcttctccatgagccgcatctcctccatactcaggactcctctccgcagttcctgtctcttctcttaatgtaatctcttttatgtgctgtattattgtattaggtgttatttccattatttatattagtttagccaaaggataagtgtcccctatggggatggtccactctcactctttctctgctgttgcaaatacatggataacaccgttaattccatgtgttttcataataaaactttaaaataaaatgcaaacagtt

SEQ ID NO: 117132 - DNA, 856 bp, Homo sapiens; identical to SEQ ID NO: 117103
  Payload ID: 2855
  Gene Symbol: CCL4L2
  Gene Name: chemokine (C-C motif) ligand 4-like 2
  ENST ID: ENST00000633897
  CDS Start-End: 80-274

SEQ ID NO: 117133 - DNA, 719 bp, Homo sapiens
  Payload ID: 2856
  Gene Symbol: CCL5
  Gene Name: chemokine (C-C motif) ligand 5
  ENST ID: ENST00000605509
  CDS Start-End: 1-451
ggcagccctcgctgtcatcctcattgctactgccctctgcgctcctgcatctgcctccccatattcctcggacaccacaccctgctgctttgcctacattgcccgcccactgccccgtgcccacatcaaggagtatttctacaccagtggcaagtgctccaacccagcagtcgtccacaggtcaaggatgccaaagagagagggacagcaagtctggcaggatttcctgtatgactcccggctgaacaagggcaagctttgtcacccgaaagaaccgccaagtgtgtgccaacccagagaagaaatgggttcgggagtacatcaactctttggagatgagctaggatggagagtccttgaacctgaacttacacaaatttgcctgtttctgcttgctcttgtcctagcttgggaggcttcccctcactatcctaccccacccgctccttgaagggcccagattctaccacacagcagcagttacaaaaaccttccccaggctggacgtggtggctcacgcctgtaatcccagcactttgggaggccaaggtgggtggatcacttgaggtcaggagttcgagaccagcctggccaacatgatgaaaccccatctctactaaaaatacaaaaaattagccgggcgtggtagcgggcgcctgtagtcccagctactcgggaggctgaggcaggagaatggcgtgaacccgggaggcggagct

SEQ ID NO: 117134 - DNA, 1365 bp, Homo sapiens
  Payload ID: 2856
  Gene Symbol: CCL5
  Gene Name: chemokine (C-C motif) ligand 5
  Uniprot ID: P13501
  ENST ID: ENST00000603197
  CDS Start-End: 204-479
atttccggaggctatttcagttttcttttccgttttgtgcaatttcacttatgataccggccaatgcttggttgctattttggaaactccccttaggggatgcccctcaactggccctataaagggccagcctgagctgcagaggattcctgcagaggatcaagacagcacgtggacctcgcacagcctctcccacaggtaccatgaaggtctccgcggcagccctcgctgtcatcctcattgctactgccctctgcgctcctgcatctgcctccccatattcctcggacaccacaccctgctgctttgcctacattgcccgcccactgccccgtgcccacatcaaggagtatttctacaccagtggcaagtgctccaacccagcagtcgtctttgtcacccgaaagaaccgccaagtgtgtgccaacccagagaagaaatgggttcgggagtacatcaactctttggagatgagctaggatggagagtccttgaacctgaacttacacaaatttgcctgtttctgcttgctcttgtcctagcttgggaggcttcccctcactatcctaccccacccgctccttgaagggcccagattctaccacacagcagcagttacaaaaaccttccccaggctggacgtggtggctcacgcctgtaatcccagcactttgggaggccaaggtgggtggatcacttgaggtcaggagttcgagaccagcctggccaacatgatgaaaccccatctctactaaaaatacaaaaaattagccgggcgtggtagcgggcgcctgtagtcccagctactcgggaggctgaggcaggagaatggcgtgaacccgggaggcggagcttgcagtgagccgagatcgcgccactgcactccagcctgggcgacagagcgagactccgtctcaaaaaaaaaaaaaaaaaaaaaaatacaaaaattagccgggcgtggtggcccacgcctgtaatcccagctactcgggaggctaaggcaggaaaattgtttgaacccaggaggtggaggctgcagtgagctgagattgtgccacttcactccagcctgggtgacaaagtgagactccgtcacaacaacaacaacaaaaagcttccccaactaaagcctagaagagcttctgaggcgctgctttgtcaaaaggaagtctctaggttctgagctctggctttgccttggctttgccagggctctgtgaccaggaaggaagtcagcatgcctctagaggcaaggaggggaggaacactgcactcttaagcttccgccgtctcaacccctcacaggagcttactggcaaacatgaaaaatcggcttaccattaaagttctcaatgcaaccataaa

SEQ ID NO: 117135 - DNA, 1244 bp, Homo sapiens
  Payload ID: 2856
  Gene Symbol: CCL5
  Gene Name: chemokine (C-C motif) ligand 5
  Uniprot ID: P13501
  ENST ID: ENST00000605140
  CDS Start-End: 83-358
tggatgagggaaaggaggtaagatctgtaatgaataagcaggaactttgaagactcagtgactcacctctcccacaggtaccatgaaggtctccgcggcagccctcgctgtcatcctcattgctactgccctctgcgctcctgcatctgcctccccatattcctcggacaccacaccctgctgctttgcctacattgcccgcccactgccccgtgcccacatcaaggagtatttctacaccagtggcaagtgctccaacccagcagtcgtctttgtcacccgaaagaaccgccaagtgtgtgccaacccagagaagaaatgggttcgggagtacatcaactctttggagatgagctaggatggagagtccttgaacctgaacttacacaaatttgcctgtttctgcttgctcttgtcctagcttgggaggcttcccctcactatcctaccccacccgctccttgaagggcccagattctaccacacagcagcagttacaaaaaccttccccaggctggacgtggtggctcacgcctgtaatcccagcactttgggaggccaaggtgggtggatcacttgaggtcaggagttcgagaccagcctggccaacatgatgaaaccccatctctactaaaaatacaaaaaattagccgggcgtggtagcgggcgcctgtagtcccagctactcgggaggctgaggcaggagaatggcgtgaacccgggaggcggagcttgcagtgagccgagatcgcgccactgcactccagcctgggcgacagagcgagactccgtctcaaaaaaaaaaaaaaaaaaaaaaatacaaaaattagccgggcgtggtggcccacgcctgtaatcccagctactcgggaggctaaggcaggaaaattgtttgaacccaggaggtggaggctgcagtgagctgagattgtgccacttcactccagcctgggtgacaaagtgagactccgtcacaacaacaacaacaaaaagcttccccaactaaagcctagaagagcttctgaggcgctgctttgtcaaaaggaagtctctaggttctgagctctggctttgccttggctttgccagggctctgtgaccaggaaggaagtcagcatgcctctagaggcaaggaggggaggaacactgcactcttaagcttccgccgtctcaacccctcacaggagcttactggcaaacatgaaaaatcggcttaccattaaagttctcaatgcaaccataaa

SEQ ID NO: 117136 - DNA, 1365 bp, Homo sapiens; identical to SEQ ID NO: 117134
  Payload ID: 2856
  Gene Symbol: CCL5
  Gene Name: chemokine (C-C motif) ligand 5
  Uniprot ID: P13501
  ENST ID: ENST00000613606
  CDS Start-End: 204-479

SEQ ID NO: 117137 - DNA, 1244 bp, Homo sapiens; identical to SEQ ID NO: 117135
  Payload ID: 2856
  Gene Symbol: CCL5
  Gene Name: chemokine (C-C motif) ligand 5
  ENST ID: ENST00000618639
  CDS Start-End: 83-358

SEQ ID NO: 117138 - DNA, 719 bp, Homo sapiens; identical to SEQ ID NO: 117133
  Payload ID: 2856
  Gene Symbol: CCL5
  Gene Name: chemokine (C-C motif) ligand 5
  ENST ID: ENST00000632752
  CDS Start-End: 1-451

SEQ ID NO: 117139 - DNA, 810 bp, Homo sapiens
  Payload ID: 2857
  Gene Symbol: CCL7
  Gene Name: chemokine (C-C motif) ligand 7
  Uniprot ID: P80098
  ENST ID: ENST00000378569
  CDS Start-End: 71-370
agcagaggggctgagaccaaaccagaaacctccaattctcatgtggaagcccatgccctcaccctccaacatgaaagcctctgcagcacttctgtgtctgctgctcacagcagctgctttcagcccccaggggcttgctcagccagttgggattaatacttcaactacctgctgctacagatttatcaataagaaaatccctaagcagaggctggagagctacagaaggaccaccagtagccactgtccccgggaagctgtaatcttcaagaccaaactggacaaggagatctgtgctgaccccacacagaagtgggtccaggactttatgaagcacctggacaagaaaacccaaactccaaagctttgaacattcatgactgaactgaaaacaagccatgacttgagaaacaaataatttgtataccctgtcctttctcagagtggttctgagattattttaatctaattctaaggaatatgagctttatgtaataatgtgaatcatggtttttcttagtagattttaaaagttattaatattttaatttaatcttccatggattttggtgggttttgaacataaagccttggatgtatatgtcatctcagtgctgtaaaaactgtgggatgctcctcccttctctacctcatgggggtattgtataagtccttgcaagaatcagtgcaaagatttgctttaattgttaagatatgatgtccctatggaagcatattgttattatataattacatatttgcatatgtatgactcccaaattttcacataaaatagatttttgtataaca

SEQ ID NO: 117140 - DNA, 696 bp, Homo sapiens
  Payload ID: 2857
  Gene Symbol: CCL7
  Gene Name: chemokine (C-C motif) ligand 7
  ENST ID: ENST00000394627
  CDS Start-End: 68-313
agaggggctgagaccaaaccagaaacctccaattctcatgtggaagcccatgccctcaccctccaacatgaaagcctctgcagcacttctgtgtctgctgctcacagcagctgctttcagcccccaggggcttgctcagccagaaagacccaggacacaccctcaatggacttttcttcttgttgtttcattgcagttgggattaatacttcaactacctgctgctacagatttatcaataagaaaatccctaagcagaggctggagagctacagaaggaccaccagtagccactgtccccgggaagctgtaatcttcaagaccaaactggacaaggagatctgtgctgaccccacacagaagtgggtccaggactttatgaagcacctggacaagaaaacccaaactccaaagctttgaacattcatgactgaactgaaaacaagccatgacttgagaaacaaataatttgtataccctgtcctttctcagagtggttctgagattattttaatctaattctaaggaatatgagctttatgtaataatgtgaatcatggtttttcttagtagattttaaaagttattaatattttaatttaatcttccatggattttggtgggttttgaacataaagccttggatgtatatgtcatctcagtgctgtaaaaactgtgggatgctcctcccttctc

SEQ ID NO: 117141 - DNA, 687 bp, Homo sapiens
  Payload ID: 2857
  Gene Symbol: CCL7
  Gene Name: chemokine (C-C motif) ligand 7
  ENST ID: ENST00000394630
  CDS Start-End: 68-211
agaggggctgagaccaaaccagaaacctccaattctcatgtggaagcccatgccctcaccctccaacatgaaagcctctgcagcacttctgtgtctgctgctcacagcagctgctttcagcccccaggggcttgctcagccagcttcaagaccaaactggacaaggagatctgtgctgaccccacacagaagtgggtccaggactttatgaagcacctggacaagaaaacccaaactccaaagctttgaacattcatgactgaactgaaaacaagccatgacttgagaaacaaataatttgtataccctgtcctttctcagagtggttctgagattattttaatctaattctaaggaatatgagctttatgtaataatgtgaatcatggtttttcttagtagattttaaaagttattaatattttaatttaatcttccatggattttggtgggttttgaacataaagccttggatgtatatgtcatctcagtgctgtaaaaactgtgggatgctcctcccttctctacctcatgggggtattgtataagtccttgcaagaatcagtgcaaagatttgctttaattgttaagatatgatgtccctatggaagcatattgttattatataattacatatttgcatatgtatgactcccaaattttcacataaaatagatttttgtataa

SEQ ID NO: 117142 - DNA, 1261 bp, Homo sapiens
  Payload ID: 2858
  Gene Symbol: CCL8
  Gene Name: chemokine (C-C motif) ligand 8
  Uniprot ID: P80075
  ENST ID: ENST00000394620
  CDS Start-End: 467-766
gtgactctagtgtgatggagagcaccagcaaagccttagggcccatccctggcctcctgttacccacagaggggtaggcccttggctctcttccactatgacgtcagcttccattcttcctttcttatagacaattttccatttcaaggaaatcagagcccttaatagttcagtgaggtcactttgctgagcacaatcccatacccttcagcctctgctccacagagcctaagcaaaagatagaaactcacaacttccttgttttgttatctggaaattatcccaggatctggtgcttactcagcatattcaaggaaggtcttacttcattcttccttgattgtgaccatgcccaggctctctgctccctataaaaggcaggcagagccaccgaggagcagagaggttgagaacaacccagaaaccttcacctctcatgctgaagctcacacccttgccctccaagatgaaggtttctgcagcgcttctgtgcctgctgctcatggcagccactttcagccctcagggacttgctcagccagattcagtttccattccaatcacctgctgctttaacgtgatcaataggaaaattcctatccagaggctggagagctacacaagaatcaccaacatccaatgtcccaaggaagctgtgatcttcaagaccaaacggggcaaggaggtctgtgctgaccccaaggagagatgggtcagggattccatgaagcatctggaccaaatatttcaaaatctgaagccatgagccttcatacatggactgagagtcagagcttgaagaaaagcttatttattttccccaacctcccccaggtgcagtgtgacattattttattataacatccacaaagagattatttttaaataatttaaagcataatatttcttaaaaagtatttaattatatttaagttgttgatgttttaactctatctgtcatacatcctagtgaatgtaaaatgcaaaatcctggtgatgtgttttttgtttttgttttcctgtgagctcaactaagttcacggcaaaatgtcattgttctccctcctacctgtctgtagtgttgtggggtcctcccatggatcatcaaggtgaaacactttggtattctttggcaatcagtgctcctgtaagtcaaatgtgtgctttgtactgctgttgttgaaattgatgttactgtatataactatggaattttgaaaaaaaatttcaaaaagaaaaaaatatatataatttaaaacta

SEQ ID NO: 117143 - DNA, 2731 bp, Homo sapiens
  Payload ID: 2859
  Gene Symbol: CCR1
  Gene Name: chemokine (C-C motif) receptor 1
  Uniprot ID: P32246
  ENST ID: ENST00000296140
  CDS Start-End: 127-1194
atcacacaggaagctgagtacttcctacttggtcaggatcttgaaacttgaattcataaaaacccagaaagccccagaaacaaagacttcacggacaaagtcccttggaaccagagagaagccgggatggaaactccaaacaccacagaggactatgacacgaccacagagtttgactatggggatgcaactccgtgccagaaggtgaacgagagggcctttggggcccaactgctgccccctctgtactccttggtatttgtcattggcctggttggaaacatcctggtggtcctggtccttgtgcaatacaagaggctaaaaaacatgaccagcatctacctcctgaacctggccatttctgacctgctcttcctgttcacgcttcccttctggatcgactacaagttgaaggatgactgggtttttggtgatgccatgtgtaagatcctctctgggttttattacacaggcttgtacagcgagatctttttcatcatcctgctgacgattgacaggtacctggccatcgtccacgccgtgtttgccttgcgggcacggaccgtcacttttggtgtcatcaccagcatcatcatttgggccctggccatcttggcttccatgccaggcttatacttttccaagacccaatgggaattcactcaccacacctgcagccttcactttcctcacgaaagcctacgagagtggaagctgtttcaggctctgaaactgaacctctttgggctggtattgcctttgttggtcatgatcatctgctacacagggattataaagattctgctaagacgaccaaatgagaagaaatccaaagctgtccgtttgatttttgtcatcatgatcatcttttttctcttttggaccccctacaatttgactatacttatttctgttttccaagacttcctgttcacccatgagtgtgagcagagcagacatttggacctggctgtgcaagtgacggaggtgatcgcctacacgcactgctgtgtcaacccagtgatctacgccttcgttggtgagaggttccggaagtacctgcggcagttgttccacaggcgtgtggctgtgcacctggttaaatggctccccttcctctccgtggacaggctggagagggtcagctccacatctccctccacaggggagcatgaactctctgctgggttctgactcagaccataggaggccaacccaaaataagcaggcgtgacctgccaggcacactgagccagcagcctggctctcccagccaggttctgactcttggcacagcatggagtcacagccacttgggatagagagggaatgtaatggtggcctggggcttctgaggcttctggggcttcagtcttttccatgaacttctcccctggtagaaagaagatgaatgagcaaaaccaaatattccagagactgggactaagtgtaccagagaagggcttggactcaagcaagatttcagatttgtgaccattagcatttgtcaacaaagtcacccacttcccactattgcttgcacaaaccaattaaacccagtagtggtgactgtgggctccattcaaagtgagctcctaagccatgggagacactgatgtatgaggaatttctgttcttccatcacctccccccccccgccaccctcccactgccaaagaacttggaaatagtgatttccacagtgactccactctgagtcccagagccaatcagtagccagcatctgcctccccttcactcccaccgcaggatttgggctcttggaatcctggggaacatagaactcatgacggaagagttgagacctaacgagaaatagaaatggggaactactgctggcagtggaactaagaaagcccttaggaagaatttttatatccactaaaatcaaacaattcagggagtgggctaagcacgggccatatgaataacatggtgtgcttcttaaaatagccataaaggggagggactcatcatttccatttacccttcttttctgactatttttcagaatctctcttcttttcaagttgggtgatatgttggtagattctaatggctttattgcagcgattaataacaggcaaaaggaagcagggttggtttcccttctttttgttcttcatctaagccttctggttttatgggtcagagttccgactgccatcttggacttgtcagcaaaaaaaaaaaataataataataataaggcctgctgtgtaagctgacagtatttgtagctgatagggggttgggaggaaagtgtctactaggagggtggggtgagattctgtgttgatgtaggaggccgagaaggcccttaactcaaagtagcttatttatccaaaatgttctggatgcatcatctccaaccaaggaccccttatttatcatgcctttgttctcttttccctcagatgtatatttctttaaaaataattttcctaataacaaaacttatttctaaaacagcttaaaaattcaaagaaaaaccccaaacactgacattacctacacttccactacccaaagacaaaatgtgcccactgtgtgcttttgagtgtattttcttttagtttgttttttgttgggtgcatatttatgataataacaatgatggacttcaattgtactcactgttctattgttggttttaattagcagcaagttgtgatcactttcccaggtgaataaatcatttcaaagcatt

SEQ ID NO: 117144 - DNA, 1773 bp, Homo sapiens
  Payload ID: 2860
  Gene Symbol: CCR10
  Gene Name: chemokine (C-C motif) receptor 10
  Uniprot ID: P46092
  ENST ID: ENST00000332438
  CDS Start-End: 21-1109
agaaacctgtgtagccagagatggggacggaggccacagagcaggtttcctggggccattactctggggatgaagaggacgcatactcggctgagccactgccggagctttgctacaaggccgatgtccaggccttcagccgggccttccaacccagtgtctccctgaccgtggctgcgctgggtctggccggcaatggcctggtcctggccacccacctggcagcccgacgcgcagcgcgctcgcccacctctgcccacctgctccagctggccctggccgacctcttgctggccctgactctgcccttcgcggcagcaggggctcttcagggctggagtctgggaagtgccacctgccgcaccatctctggcctctactcggcctccttccacgccggcttcctcttcctggcctgtatcagcgccgaccgctacgtggccatcgcgcgagcgctcccagccgggccgcggccctccactcccggccgcgcacacttggtctccgtcatcgtgtggctgctgtcactgctcctggcgctgcctgcgctgctcttcagccaggatgggcagcgggaaggccaacgacgctgtcgcctcatcttccccgagggcctcacgcagacggtgaagggggcgagcgccgtggcgcaggtggccctgggcttcgcgctgccgctgggcgtcatggtagcctgctacgcgcttctgggccgcacgctgctggccgccagggggcccgagcgccggcgtgcgctgcgcgtcgtggtggctctggtggcggccttcgtggtgctgcagctgccctacagcctcgccctgctgctggatactgccgatctactggctgcgcgcgagcggagctgccctgccagcaaacgcaaggatgtcgcactgctggtgaccagcggcttggccctcgcccgctgtggcctcaatcccgttctctacgccttcctgggcctgcgcttccgccaggacctgcggaggctgctacggggtgggagctgcccctcagggcctcaaccccgccgcggctgcccccgccggccccgcctttcttcctgctcagctcccacggagacccacagtctctcctgggacaactagggctgcgaatctagaggagggggcaggctgagggtcgtgggaaaggggagtaggtgggggaacactgagaaagaggcagggacctaaagggactacctctgtgccttgccacattaaattgataacatggaaatgagatgcaacccaacaactgttactatttttgagtcaccgacttggaagtgatttgtggcggggcagaaccggtgggttaacaccccgcccccgccccaccccccgccctgccccgcgcttggctctctgagtggaagacgctgagggcctgggtgggggtggggggctgctgagtctgctaaagctctagccactgacaccccctccaccgtcacctggcctcagccaacagaggtgaggtgggaaagctgccaggcaaggaggggcggtggttcctcttgcaatactgtaaggaagagctttctaacaaccagagcgctctccagtaatggctgccttagcaaatactgagttcccgctattggaatgttcagactgtcggggacgctgtgggcctttgcgtggtgtggggggagggggaggggcaggggattcccgtttttggtgggcgtttggatttcataaccactttacaatcccttcctagtgtctgtgatggaaagaaaaaatgaaaaaatgaattgtaaaa

SEQ ID NO: 117145 - DNA, 994 bp, Homo sapiens
  Payload ID: 2860
  Gene Symbol: CCR10
  Gene Name: chemokine (C-C motif) receptor 10
  ENST ID: ENST00000591568
  CDS Start-End: 745-994
agcctggcgaatctcggcgcagtaaggagactgtagtaggaggaggcgcccagggagcgtgcatacaggggacccaccagctcctcgtcgcagccgtctagggtttcctggggccattactctggggatgaagaggacgcatactcggctgagccactgccggagctttgctacaaggccgatgtccaggccttcagccgggccttccaacccagtgtctccctgaccgtggctgcgctgggtctggccggcaatggcctggtcctggccacccacctggcagcccgacgcgcagcgcgctcgcccacctctgcccacctgctccagctggccctggccgacctcttgctggccctgactctgcccttcgcggcagcaggggctcttcagggctggagtctgggaagtgccacctgccgcaccatctctggcctctactcggcctccttccacgccggcttcctcttcctggcctgtatcagcgccgaccgctacgtggccatcgcgcgagcgctcccagccgggccgcggccctccactcccggccgcgcacacttggtctccgtcatcgtgtggctgctgtcactgctcctggcgctgcctgcgctgctcttcagccaggatgggcagcgggaaggccaacgacgctgtcgcctcatcttccccgagggcctcacgcagacggtgaagggggcgagcgccgtggcgcaggtggccctgggcttcgcgctgccgctgggcgtcatggtagcctgctacgcgcttctgggccgcacgctgctggccgccagggggcccgagcgccggcgtgcgctgcgcgtcgtggtggctctggtggcggccttcgtggtgctgcagctgccctacagcctcgccctgctgctggatactgccgatctactggctgcgcgcgagcggagctgccctgccagcaaacgcaaggatgtcgcactgctggtgaccagcggcttggccctcgcccgctgtggcctca

SEQ ID NO: 117146 - DNA, 1942 bp, Homo sapiens
  Payload ID: 2860
  Gene Symbol: CCR10
  Gene Name: chemokine (C-C motif) receptor 10
  ENST ID: ENST00000591765
  CDS Start-End: 1387-1809
agagctgcaatgcggagcgcgggggagaggcaggaaaagatgagagccagcgggcgcgcgccggccgggaaggacccgcgaccacccagccgcaatgcggttcggggccgccctgcaggctctggactcctgggcccaaccccacctgcctccaagcccaacactcacagtagccccagccctcggctcctgagaccgcggcgagcaggatgcagaagagccggagatgcatcatgcagggctgacggtcccggcagccgcctccctgtgaacggctccggctagggctcgagttctggcttgggctccaagctctcctcctggggtttgcagcagaccgctctctcctccttacccacccttccctccctctctcctttcgcccccaagcgctctgtctctcctctctcttttctctctctctctctctggttcctggtcctccgctcttctctctctatcctctcctttccaccctctttcctctcacctccccccttccccagcctctgtctcctggcacgcgccggtttcccggaccccgcgcaagcgcgtgcctcagccctgctgcgaaagggcgggggtagagagcctctcgccaccgggaaaaccccaagtaacccgaggctgcccgggactagggccacaggagtgaggacagggaacctagggccagaagcatcctgaaaatttcaagaaaagggaggtggtttgggggaggggtgcctggaaatggaatgaagggtttcctggggccattactctggggatgaagaggacgcatactcggctgagccactgccggagctttgctacaaggccgatgtccaggccttcagccgggccttccaacccagtgtctccctgaccgtggctgcgctgggtctggccggcaatggcctggtcctggccacccacctggcagcccgacgcgcagcgcgctcgcccacctctgcccacctgctccagctggccctggccgacctcttgctggccctgactctgcccttcgcggcagcaggggctcttcagggctggagtctgggaagtgccacctgccgcaccatctctggcctctactcggcctccttccacgccggcttcctcttcctggcctgtatcagcgccgaccgctacgtggccatcgcgcgagcgctcccagccgggccgcggccctccactcccggccgcgcacacttggtctccgtcatcgtgtggctgctgtcactgctcctggcgctgcctgcgctgctcttcagccaggatgggcagcgggaaggccaacgacgctgtcgcctcatcttccccgagggcctcacgcagacggtgaagggggcgagcgccgtggcgcaggtggccctgggcttcgcgctgccgctgggcgtcatggtagcctgctacgcgcttctgggccgcacgctgctggccgccagggggcccgagcgccggcgtgcgctgcgcgtcgtggtggctctggtggcggccttcgtggtgctgcagctgccctacagcctcgccctgctgctggatactgccgatctactggctgcgcgcgagcggagctgccctgccagcaaacgcaaggatgtcgcactgctggtgaccagcggcttggccctcgcccgctgtggcctcaatcccgttctctacgccttcctgggcctgcgcttccgccaggacctgcggaggctgctacggggtgggagctgcccctcagggcctcaaccccgccgcggctgcccccgccggccccgcctttcttcctgctcagctcccacggagacccacagtctctcctgggacaactagggctgcgaatctagaggagggggcaggctgagggtcgtgggaaaggggagtaggtgggggaacactgagaaagaggcagggacctaaagggactacctctgtgccttgccacattaaattgataacatggaaa

SEQ ID NO: 117147 - DNA, 2671 bp, Homo sapiens
  Payload ID: 2861
  Gene Symbol: CCR2
  Gene Name: chemokine (C-C motif) receptor 2
  Uniprot ID: P41597
  ENST ID: ENST00000292301
  CDS Start-End: 486-1610
tttattctctggaacatgaaacattctgttgtgctcatatcatgcaaattatcactagtaggagagcagagagtggaaatgttccaggtataaagacccacaagataaagaagctcagagtcgttagaaacaggagcagatgtacagggtttgcctgactcacactcaaggttgcataagcaagatttcaaaattaatcctattctggagacctcaacccaatgtacaatgttcctgactggaaaagaagaactatatttttctgattttttttttcaaatctttaccattagttgccctgtatctccgccttcactttctgcaggaaactttatttcctacttctgcatgccaagtttctacctctagatctgtttggttcagttgctgagaagcctgacataccaggactgcctgagacaagccacaagctgaacagagaaagtggattgaacaaggacgcatttccccagtacatccacaacatgctgtccacatctcgttctcggtttatcagaaataccaacgagagcggtgaagaagtcaccaccttttttgattatgattacggtgctccctgtcataaatttgacgtgaagcaaattggggcccaactcctgcctccgctctactcgctggtgttcatctttggttttgtgggcaacatgctggtcgtcctcatcttaataaactgcaaaaagctgaagtgcttgactgacatttacctgctcaacctggccatctctgatctgctttttcttattactctcccattgtgggctcactctgctgcaaatgagtgggtctttgggaatgcaatgtgcaaattattcacagggctgtatcacatcggttattttggcggaatcttcttcatcatcctcctgacaatcgatagatacctggctattgtccatgctgtgtttgctttaaaagccaggacggtcacctttggggtggtgacaagtgtgatcacctggttggtggctgtgtttgcttctgtcccaggaatcatctttactaaatgccagaaagaagattctgtttatgtctgtggcccttattttccacgaggatggaataatttccacacaataatgaggaacattttggggctggtcctgccgctgctcatcatggtcatctgctactcgggaatcctgaaaaccctgcttcggtgtcgaaacgagaagaagaggcatagggcagtgagagtcatcttcaccatcatgattgtttactttctcttctggactccctataatattgtcattctcctgaacaccttccaggaattcttcggcctgagtaactgtgaaagcaccagtcaactggaccaagccacgcaggtgacagagactcttgggatgactcactgctgcatcaatcccatcatctatgccttcgttggggagaagttcagaagcctttttcacatagctcttggctgtaggattgccccactccaaaaaccagtgtgtggaggtccaggagtgagaccaggaaagaatgtgaaagtgactacacaaggactcctcgatggtcgtggaaaaggaaagtcaattggcagagcccctgaagccagtcttcaggacaaagaaggagcctagagacagaaatgacagatctctgctttggaaatcacacgtctggcttcacagatgtgtgattcacagtgtgaatcttggtgtctacgttaccaggcaggaaggctgagaggagagagactccagctgggttggaaaacagtattttccaaactaccttccagttcctcatttttgaatacaggcatagagttcagactttttttaaatagtaaaaataaaattaaagctgaaaactgcaacttgtaaatgtggtaaagagttagtttgagttactatcatgtcaaacgtgaaaatgctgtattagtcacagagataattctagctttgagcttaagaattttgagcaggtggtatgtttgggagactgctgagtcaacccaatagttgttgattggcaggagttggaagtgtgtgatctgtgggcacattagcctatgtgcatgcagcatctaagtaatgatgtcgtttgaatcacagtatacgctccatcgctgtcatctcagctggatctccattctctcaggcttgctgccaaaagccttttgtgttttgttttgtatcattatgaagtcatgcgtttaatcacattcgagtgtttcagtgcttcgcagatgtccttgatgctcatattgttccctattttgccagtgggaactcctaaatcaagttggcttctaatcaaagcttttaaaccctattggtaaagaatggaaggtggagaagctccctgaagtaagcaaagactttcctcttagtcgagccaagttaagaatgttcttatgttgcccagtgtgtttctgatctgatgcaagcaagaaacactgggcttctagaaccaggcaacttgggaactagactcccaagctggactatggctctactttcaggccacatggctaaagaaggtttcagaaagaagtggggacagagcagaactttcaccttcatatatttgtatgatcctaatgaatgcataaaatgttaagttgatggtgatgaaatgtaaatactgtttttaacaactatgatttggaaaataaatcaatgctataactatgttg

SEQ ID NO: 117148 - DNA, 2232 bp, Homo sapiens
  Payload ID: 2861
  Gene Symbol: CCR2
  Gene Name: chemokine (C-C motif) receptor 2
  Uniprot ID: P41597
  ENST ID: ENST00000400888
  CDS Start-End: 40-1164
ggattgaacaaggacgcatttccccagtacatccacaacatgctgtccacatctcgttctcggtttatcagaaataccaacgagagcggtgaagaagtcaccaccttttttgattatgattacggtgctccctgtcataaatttgacgtgaagcaaattggggcccaactcctgcctccgctctactcgctggtgttcatctttggttttgtgggcaacatgctggtcgtcctcatcttaataaactgcaaaaagctgaagtgcttgactgacatttacctgctcaacctggccatctctgatctgctttttcttattactctcccattgtgggctcactctgctgcaaatgagtgggtctttgggaatgcaatgtgcaaattattcacagggctgtatcacatcggttattttggcggaatcttcttcatcatcctcctgacaatcgatagatacctggctattgtccatgctgtgtttgctttaaaagccaggacggtcacctttggggtggtgacaagtgtgatcacctggttggtggctgtgtttgcttctgtcccaggaatcatctttactaaatgccagaaagaagattctgtttatgtctgtggcccttattttccacgaggatggaataatttccacacaataatgaggaacattttggggctggtcctgccgctgctcatcatggtcatctgctactcgggaatcctgaaaaccctgcttcggtgtcgaaacgagaagaagaggcatagggcagtgagagtcatcttcaccatcatgattgtttactttctcttctggactccctataatattgtcattctcctgaacaccttccaggaattcttcggcctgagtaactgtgaaagcaccagtcaactggaccaagccacgcaggtgacagagactcttgggatgactcactgctgcatcaatcccatcatctatgccttcgttggggagaagttcagaagcctttttcacatagctcttggctgtaggattgccccactccaaaaaccagtgtgtggaggtccaggagtgagaccaggaaagaatgtgaaagtgactacacaaggactcctcgatggtcgtggaaaaggaaagtcaattggcagagcccctgaagccagtcttcaggacaaagaaggagcctagagacagaaatgacagatctctgctttggaaatcacacgtctggcttcacagatgtgtgattcacagtgtgaatcttggtgtctacgttaccaggcaggaaggctgagaggagagagactccagctgggttggaaaacagtattttccaaactaccttccagttcctcatttttgaatacaggcatagagttcagactttttttaaatagtaaaaataaaattaaagctgaaaactgcaacttgtaaatgtggtaaagagttagtttgagttactatcatgtcaaacgtgaaaatgctgtattagtcacagagataattctagctttgagcttaagaattttgagcaggtggtatgtttgggagactgctgagtcaacccaatagttgttgattggcaggagttggaagtgtgtgatctgtgggcacattagcctatgtgcatgcagcatctaagtaatgatgtcgtttgaatcacagtatacgctccatcgctgtcatctcagctggatctccattctctcaggcttgctgccaaaagccttttgtgttttgttttgtatcattatgaagtcatgcgtttaatcacattcgagtgtttcagtgcttcgcagatgtccttgatgctcatattgttccctattttgccagtgggaactcctaaatcaagttggcttctaatcaaagcttttaaaccctattggtaaagaatggaaggtggagaagctccctgaagtaagcaaagactttcctcttagtcgagccaagttaagaatgttcttatgttgcccagtgtgtttctgatctgatgcaagcaagaaacactgggcttctagaaccaggcaacttgggaactagactcccaagctggactatggctctactttcaggccacatggctaaagaaggtttcagaaagaagtggggacagagcagaactttcaccttcatatatttgtatgatcctaatgaatgcataaaatgttaagttgatggtgatgaaatgtaaatactgtttttaacaactatgatttggaaaataaatcaatgctataactatgttgataaaag

SEQ ID NO: 117149 - DNA, 563 bp, Homo sapiens
  Payload ID: 2861
  Gene Symbol: CCR2
  Gene Name: chemokine (C-C motif) receptor 2
  ENST ID: ENST00000421659
  CDS Start-End: 199-563
agttgctgagaagcctgacataccaggactgcctgagacaagccacaagctgcttctccagatttcaagaatctggctcagtgatatgaaatacaagacttgtgaaaagtgtcaattgcaagagaaatggaaggataaagtatacagaacagagaaagtggattgaacaaggacgcatttccccagtacatccacaacatgctgtccacatctcgttctcggtttatcagaaataccaacgagagcggtgaagaagtcaccaccttttttgattatgattacggtgctccctgtcataaatttgacgtgaagcaaattggggcccaactcctgcctccgctctactcgctggtgttcatctttggttttgtgggcaacatgctggtcgtcctcatcttaataaactgcaaaaagctgaagtgcttgactgacatttacctgctcaacctggccatctctgatctgctttttcttattactctcccattgtgggctcactctgctgcaaatgagtgggtctttgggaatgcaatgtgcaaattattcacagggctgtatcacat

SEQ ID NO: 117150 - DNA, 2386 bp, Homo sapiens
  Payload ID: 2861
  Gene Symbol: CCR2
  Gene Name: chemokine (C-C motif) receptor 2
  Uniprot ID: P41597
  ENST ID: ENST00000445132
  CDS Start-End: 496-1578
accaataccctttattctctggaacatgaaacattctgttgtgctcatatcatgcaaattatcactagtaggagagcagagagtggaaatgttccaggtataaagacccacaagataaagaagctcagagtcgttagaaacaggagcagatgtacagggtttgcctgactcacactcaaggttgcataagcaagatttcaaaattaatcctattctggagacctcaacccaatgtacaatgttcctgactggaaaagaagaactatatttttctgattttttttttcaaatctttaccattagttgccctgtatctccgccttcactttctgcaggaaactttatttcctacttctgcatgccaagtttctacctctagatctgtttggttcagttgctgagaagcctgacataccaggactgcctgagacaagccacaagctgaacagagaaagtggattgaacaaggacgcatttccccagtacatccacaacatgctgtccacatctcgttctcggtttatcagaaataccaacgagagcggtgaagaagtcaccaccttttttgattatgattacggtgctccctgtcataaatttgacgtgaagcaaattggggcccaactcctgcctccgctctactcgctggtgttcatctttggttttgtgggcaacatgctggtcgtcctcatcttaataaactgcaaaaagctgaagtgcttgactgacatttacctgctcaacctggccatctctgatctgctttttcttattactctcccattgtgggctcactctgctgcaaatgagtgggtctttgggaatgcaatgtgcaaattattcacagggctgtatcacatcggttattttggcggaatcttcttcatcatcctcctgacaatcgatagatacctggctattgtccatgctgtgtttgctttaaaagccaggacggtcacctttggggtggtgacaagtgtgatcacctggttggtggctgtgtttgcttctgtcccaggaatcatctttactaaatgccagaaagaagattctgtttatgtctgtggcccttattttccacgaggatggaataatttccacacaataatgaggaacattttggggctggtcctgccgctgctcatcatggtcatctgctactcgggaatcctgaaaaccctgcttcggtgtcgaaacgagaagaagaggcatagggcagtgagagtcatcttcaccatcatgattgtttactttctcttctggactccctataatattgtcattctcctgaacaccttccaggaattcttcggcctgagtaactgtgaaagcaccagtcaactggaccaagccacgcaggtgacagagactcttgggatgactcactgctgcatcaatcccatcatctatgccttcgttggggagaagttcagaaggtatctctcggtgttcttccgaaagcacatcaccaagcgcttctgcaaacaatgtccagttttctacagggagacagtggatggagtgacttcaacaaacacgccttccactggggagcaggaagtctcggctggtttataaaacgaggagcagtttgattgttgtttataaagggagataacaatctgtatataacaacaaacttcaagggtttgttgaacaatagaaacctgtaaagcaggtgcccaggaacctcagggctgtgtgtactaatacagactatgtcacccaatgcatatccaacatgtgctcagggaataatccagaaaaactgtgggtagagactttgactctccagaaagctcatctcagctcctgaaaaatgcctcattaccttgtgctaatcctctttttctagtcttcataatttcttcactcaatctctgattctgtcaatgtcttgaaatcaagggccagctggaggtgaagaagagaatgtgacaggcacagatgaatgggagtgagggatagtggggtcagggctgagaggagaaggagggagacatgagcatggctgagcctggacaaagacaaaggtgagcaaagggctcacgcattcagccaggagatgatactggtccttagccccatctgccacgtgtatttaaccttgaagggttcaccaggtcagggagagtttgggaactgcaataacctgggagttttggtggagtccgatgattctcttttgcataagtgcatgacatatttttgctttattacagtttatctatggcacccatgcaccttacatttgaaatctatgaaatatcatgctccattgttcagatgcttcttaggccacatccccctgtctaaaaattcagaaaatttttgtttataaaagatgcattatctatgatatgctaatatatgtatatgcaatata

SEQ ID NO: 117151 - DNA, 2000 bp, Homo sapiens
  Payload ID: 2862
  Gene Symbol: CCR3
  Gene Name: chemokine (C-C motif) receptor 3
  Uniprot ID: P51677
  ENST ID: ENST00000357422
  CDS Start-End: 544-1611
tgctgggcgaatccctttcttgtctggttcatttggaccctccaaagcccacaggctggaacggctgagtcatccaaacaaaaaaggtggcagcccatccctcccccaggagctctaccctgtctcaagtaggtgctaccctgttgctggtggctggctggaattccaagccagttgatcttatcctgtgaggtcccttggaagtggggcccacagactgacgctgctctgcttcctggattcagccctcttcctaaggagctcatggaccctggccgtcatcaggttcaacctcatattcaactgctgggccttgtcttctggccacacactctctccaaatcagcgatggtggggaactgaggagccagaggccattgtggaagaactccaagaaaacaatctccaggttatcacatctaaagcctgagcaagatttgaggctgggaagaggtggatcccagaattggaagaaggagtggtgacgcctaagctatcactggacatatcaaggacttcactaaattagcagggagaagtgaaatgacaacctcactagatacagttgagacctttggtaccacatcctactatgatgacgtgggcctgctctgtgaaaaagctgataccagagcactgatggcccagtttgtgcccccgctgtactccctggtgttcactgtgggcctcttgggcaatgtggtggtggtgatgatcctcataaaatacaggaggctccgaattatgaccaacatctacctgctcaacctggccatttcggacctgctcttcctcgtcacccttccattctggatccactatgtcagggggcataactgggtttttggccatggcatgtgtaagctcctctcagggttttatcacacaggcttgtacagcgagatctttttcataatcctgctgacaatcgacaggtacctggccattgtccatgctgtgtttgcccttcgagcccggactgtcacttttggtgtcatcaccagcatcgtcacctggggcctggcagtgctagcagctcttcctgaatttatcttctatgagactgaagagttgtttgaagagactctttgcagtgctctttacccagaggatacagtatatagctggaggcatttccacactctgagaatgaccatcttctgtctcgttctccctctgctcgttatggccatctgctacacaggaatcatcaaaacgctgctgaggtgccccagtaaaaaaaagtacaaggccatccggctcatttttgtcatcatggcggtgtttttcattttctggacaccctacaatgtggctatccttctctcttcctatcaatccatcttatttggaaatgactgtgagcggagcaagcatctggacctggtcatgctggtgacagaggtgatcgcctactcccactgctgcatgaacccggtgatctacgcctttgttggagagaggttccggaagtacctgcgccacttcttccacaggcacttgctcatgcacctgggcagatacatcccattccttcctagtgagaagctggaaagaaccagctctgtctctccatccacagcagagccggaactctctattgtgttttaggtcagatgcagaaaattgcctaaagaggaaggaccaaggagatgaagcaaacacattaagccttccacactcacctctaaaacagtccttcaaacttccagtgcaacactgaagctcttgaagacactgaaatatacacacagcagtagcagtagatgcatgtaccctaaggtcattaccacaggccaggggctgggcagcgtactcatcatcaaccctaaaaagcagagctttgcttctctctctaaaatgagttacctacattttaatgcacctgaatgttagatagttactatatgccgctacaaaaaggtaaaactttttatattttatacattaacttcagccagctattgatataaataaaacattttcacacaatacaataa

SEQ ID NO: 117152 - DNA, 1581 bp, Homo sapiens
  Payload ID: 2862
  Gene Symbol: CCR3
  Gene Name: chemokine (C-C motif) receptor 3
  Uniprot ID: P51677
  ENST ID: ENST00000395940
  CDS Start-End: 120-1187
atatcaaggacttcactaaattagcaggtaccactggtcttcttgtgcttatccgggcaagaacttatcgaaatacaatagaagtttttacttagaagagattttcagggagaagtgaaatgacaacctcactagatacagttgagacctttggtaccacatcctactatgatgacgtgggcctgctctgtgaaaaagctgataccagagcactgatggcccagtttgtgcccccgctgtactccctggtgttcactgtgggcctcttgggcaatgtggtggtggtgatgatcctcataaaatacaggaggctccgaattatgaccaacatctacctgctcaacctggccatttcggacctgctcttcctcgtcacccttccattctggatccactatgtcagggggcataactgggtttttggccatggcatgtgtaagctcctctcagggttttatcacacaggcttgtacagcgagatctttttcataatcctgctgacaatcgacaggtacctggccattgtccatgctgtgtttgcccttcgagcccggactgtcacttttggtgtcatcaccagcatcgtcacctggggcctggcagtgctagcagctcttcctgaatttatcttctatgagactgaagagttgtttgaagagactctttgcagtgctctttacccagaggatacagtatatagctggaggcatttccacactctgagaatgaccatcttctgtctcgttctccctctgctcgttatggccatctgctacacaggaatcatcaaaacgctgctgaggtgccccagtaaaaaaaagtacaaggccatccggctcatttttgtcatcatggcggtgtttttcattttctggacaccctacaatgtggctatccttctctcttcctatcaatccatcttatttggaaatgactgtgagcggagcaagcatctggacctggtcatgctggtgacagaggtgatcgcctactcccactgctgcatgaacccggtgatctacgcctttgttggagagaggttccggaagtacctgcgccacttcttccacaggcacttgctcatgcacctgggcagatacatcccattccttcctagtgagaagctggaaagaaccagctctgtctctccatccacagcagagccggaactctctattgtgttttaggtcagatgcagaaaattgcctaaagaggaaggaccaaggagatgaagcaaacacattaagccttccacactcacctctaaaacagtccttcaaacttccagtgcaacactgaagctcttgaagacactgaaatatacacacagcagtagcagtagatgcatgtaccctaaggtcattaccacaggccaggggctgggcagcgtactcatcatcaaccctaaaaagcagagctttgcttctctctctaaaatgagttacctacattttaatgcacctgaatgttagatagttactatatgccgctacaaaaaggtaaaactttttatattttatacattaacttcagccagctattgatataaataaaacattttcacacaatacaataagttaa

SEQ ID NO: 117153 - DNA, 1201 bp, Homo sapiens
  Payload ID: 2862
  Gene Symbol: CCR3
  Gene Name: chemokine (C-C motif) receptor 3
  Uniprot ID: P51677
  ENST ID: ENST00000395942
  CDS Start-End: 32-1099
tttttcttcttctatcacagggagaagtgaaatgacaacctcactagatacagttgagacctttggtaccacatcctactatgatgacgtgggcctgctctgtgaaaaagctgataccagagcactgatggcccagtttgtgcccccgctgtactccctggtgttcactgtgggcctcttgggcaatgtggtggtggtgatgatcctcataaaatacaggaggctccgaattatgaccaacatctacctgctcaacctggccatttcggacctgctcttcctcgtcacccttccattctggatccactatgtcagggggcataactgggtttttggccatggcatgtgtaagctcctctcagggttttatcacacaggcttgtacagcgagatctttttcataatcctgctgacaatcgacaggtacctggccattgtccatgctgtgtttgcccttcgagcccggactgtcacttttggtgtcatcaccagcatcgtcacctggggcctggcagtgctagcagctcttcctgaatttatcttctatgagactgaagagttgtttgaagagactctttgcagtgctctttacccagaggatacagtatatagctggaggcatttccacactctgagaatgaccatcttctgtctcgttctccctctgctcgttatggccatctgctacacaggaatcatcaaaacgctgctgaggtgccccagtaaaaaaaagtacaaggccatccggctcatttttgtcatcatggcggtgtttttcattttctggacaccctacaatgtggctatccttctctcttcctatcaatccatcttatttggaaatgactgtgagcggagcaagcatctggacctggtcatgctggtgacagaggtgatcgcctactcccactgctgcatgaacccggtgatctacgcctttgttggagagaggttccggaagtacctgcgccacttcttccacaggcacttgctcatgcacctgggcagatacatcccattccttcctagtgagaagctggaaagaaccagctctgtctctccatccacagcagagccggaactctctattgtgttttaggtcagatgcagaaaattgcctaaagaggaaggaccaaggagatgaagcaaacacattaagccttccacactcacctctaaaacagtccttcaaacttccagt

SEQ ID NO: 117154 - DNA, 400 bp, Homo sapiens
  Payload ID: 2862
  Gene Symbol: CCR3
  Gene Name: chemokine (C-C motif) receptor 3
  ENST ID: ENST00000452454
  CDS Start-End: 160-400
accactggtcttcttgtgcttatccgggcaagaacttatcgaaatacaatagaagtttttacttagaagagattttcagctgctgtggattggattatgccatttggaataagaatgctgttaagagcacacaagccaggttcctcaaggagaagtgaaatgacaacctcactagatacagttgagacctttggtaccacatcctactatgatgacgtgggcctgctctgtgaaaaagctgataccagagcactgatggcccagtttgtgcccccgctgtactccctggtgttcactgtgggcctcttgggcaatgtggtggtggtgatgatcctcataaaatacaggaggctccgaattatgaccaacatctacctgctcaacctggccatttcggacc

SEQ ID NO: 117155 - DNA, 212 bp, Homo sapiens
  Payload ID: 2862
  Gene Symbol: CCR3
  Gene Name: chemokine (C-C motif) receptor 3
  ENST ID: ENST00000457243
  CDS Start-End: 150-212
ccactggtcttcttgtgcttatccgggcaagaacttatcgaaatacaatagaagtttttacttagaagagattttcagctgctgtggattggattatgccatttggaataagaatgctgttaagagcacacaagccagggagaagtgaaatgacaacctcactagatacagttgagacctttggtaccacatcctactatgatgacgtgggc

SEQ ID NO: 117156 - DNA, 1786 bp, Homo sapiens
  Payload ID: 2862
  Gene Symbol: CCR3
  Gene Name: chemokine (C-C motif) receptor 3
  Uniprot ID: P51677
  ENST ID: ENST00000545097
  CDS Start-End: 176-1306
ctgatggtatctctgtttcaggagtggtgacgcctaagctatcactggacatatcaaggacttcactaaattagcaggtaccactggtcttcttgtgcttatccgggcaagaacttatcgaaatacaatagaagtttttacttagaagagattttcagctgctgtggattggattatgccatttggaataagaatgctgttaagagcacacaagccaggttcctcaaggagaagtgaaatgacaacctcactagatacagttgagacctttggtaccacatcctactatgatgacgtgggcctgctctgtgaaaaagctgataccagagcactgatggcccagtttgtgcccccgctgtactccctggtgttcactgtgggcctcttgggcaatgtggtggtggtgatgatcctcataaaatacaggaggctccgaattatgaccaacatctacctgctcaacctggccatttcggacctgctcttcctcgtcacccttccattctggatccactatgtcagggggcataactgggtttttggccatggcatgtgtaagctcctctcagggttttatcacacaggcttgtacagcgagatctttttcataatcctgctgacaatcgacaggtacctggccattgtccatgctgtgtttgcccttcgagcccggactgtcacttttggtgtcatcaccagcatcgtcacctggggcctggcagtgctagcagctcttcctgaatttatcttctatgagactgaagagttgtttgaagagactctttgcagtgctctttacccagaggatacagtatatagctggaggcatttccacactctgagaatgaccatcttctgtctcgttctccctctgctcgttatggccatctgctacacaggaatcatcaaaacgctgctgaggtgccccagtaaaaaaaagtacaaggccatccggctcatttttgtcatcatggcggtgtttttcattttctggacaccctacaatgtggctatccttctctcttcctatcaatccatcttatttggaaatgactgtgagcggagcaagcatctggacctggtcatgctggtgacagaggtgatcgcctactcccactgctgcatgaacccggtgatctacgcctttgttggagagaggttccggaagtacctgcgccacttcttccacaggcacttgctcatgcacctgggcagatacatcccattccttcctagtgagaagctggaaagaaccagctctgtctctccatccacagcagagccggaactctctattgtgttttaggtcagatgcagaaaattgcctaaagaggaaggaccaaggagatgaagcaaacacattaagccttccacactcacctctaaaacagtccttcaaacttccagtgcaacactgaagctcttgaagacactgaaatatacacacagcagtagcagtagatgcatgtaccctaaggtcattaccacaggccaggggctgggcagcgtactcatcatcaaccctaaaaagcagagctttgcttctctctctaaaatgagttacctacattttaatgcacctgaatgttagatagttactatatgccgctacaaaaaggtaaaactttttatattttatacattaacttcagccagctattgatataaataaaacattttcacacaatacaataagttaactattttattttctaatgtgcctagttctttccctgcttaatgaaaagcttgttttttcagtgtgaataaataatcgtaagcaaca

SEQ ID NO: 117157 - DNA, 3095 bp, Homo sapiens
  Payload ID: 2863
  Gene Symbol: CCR4
  Gene Name: chemokine (C-C motif) receptor 4
  Uniprot ID: P51679
  ENST ID: ENST00000330953
  CDS Start-End: 169-1251
gctcacaggaagccacgcacccttgaaaggcaccgggtccttcttagcatcgtgcttcctgagcaagcctggcattgcctcacagaccttcctcagagccgctttcagaaaagcaagctgcttctggttgggcccagacctgccttgaggagcctgtagagttaaaaaatgaaccccacggatatagcagacaccaccctcgatgaaagcatatacagcaattactatctgtatgaaagtatccccaagccttgcaccaaagaaggcatcaaggcatttggggagctcttcctgcccccactgtattccttggtttttgtatttggtctgcttggaaattctgtggtggttctggtcctgttcaaatacaagcggctcaggtccatgactgatgtgtacctgctcaaccttgccatctcggatctgctcttcgtgttttccctccctttttggggctactatgcagcagaccagtgggtttttgggctaggtctgtgcaagatgatttcctggatgtacttggtgggcttttacagtggcatattctttgtcatgctcatgagcattgatagatacctggcaattgtgcacgcggtgttttccttgagggcaaggaccttgacttatggggtcatcaccagtttggctacatggtcagtggctgtgttcgcctcccttcctggctttctgttcagcacttgttatactgagcgcaaccatacctactgcaaaaccaagtactctctcaactccacgacgtggaaggttctcagctccctggaaatcaacattctcggattggtgatccccttagggatcatgctgttttgctactccatgatcatcaggaccttgcagcattgtaaaaatgagaagaagaacaaggcggtgaagatgatctttgccgtggtggtcctcttccttgggttctggacaccttacaacatagtgctcttcctagagaccctggtggagctagaagtccttcaggactgcacctttgaaagatacttggactatgccatccaggccacagaaactctggcttttgttcactgctgccttaatcccatcatctacttttttctgggggagaaatttcgcaagtacatcctacagctcttcaaaacctgcaggggcctttttgtgctctgccaatactgtgggctcctccaaatttactctgctgacacccccagctcatcttacacgcagtccaccatggatcatgatctccatgatgctctgtagaaaaatgaaatggtgaaatgcagagtcaatgaactttccacattcagagcttacttaaaattgtattttagtaagagattcctgagccagtgtcaggaggaaggcttacacccacagtggaaagacagcttctcatcctgcaggcagctttttctctcccactagacaagtccagcctggcaagggttcacctgggctgaggcatccttcctcacaccaggcttgcctgcaggcatgagtcagtctgatgagaactctgagcagtgcttgaatgaagttgtaggtaatattgcaaggcaaagactattcccttctaacctgaactgatgggtttctccagagggaattgcagagtactggctgatggagtaaatcgctaccttttgctgtggcaaatgggccctctaattaatttcttgcttttgcggaacaatatagataactgtttttctaataacatatctcaggcaaagtatattccattgagccagatgtatgaagaaacaattagcgaagtgatgaaaccagatctcaattatttattgtaaaggattatctgttaattgaaaccaaactttttatactgatataagggtaaggatatgaagacattagccaaggtctgctttccaaacgtgaactacaaggcattcaaaatccaaacatatttatgaaaattcaaacacagtttctcacttgtttgtggacatgttttgttctaattttaacagaggaatattaaaaaattttaaataggctgggcacggtggcctgtaatcccagcactgtgggaggccaaggtgggcggatcacctgaggtcaggagttcgagaccagcctggccaacatggagaaaccctgtctctactaaaaaatacaaaattagccaggtgtggtggcgcatgcctgtaatcccagctactcaggaggctgaggctggagaataacttgaatccgggaggtggaggttgcggtgagccgagatcgcgccattgtactccaacctgggcaaaaagagcgaaactctgtctcaaaaaaaaaaaaaaaaaattaaataatacataggccaagaatacatttatttgaggtcatttacttgtttttttttttttttttttttttgagatggaatcttgctctgtcacccagtctggagtgcagtggcgcgatctcggctcactgcaagctctgcctcacgggttcgcaccattctcctgcctcagcctcccaagtaggtgggactacaggcacctgcccccatgcctggctaattttttgtattttcagtagagatggggtttcaccatgttagcaaggatggttttaatctcctgacctcgtgatccacccgcctcggcctcccaaagtgctgggattacaggtgtgagccatcacgcccggccacttgtttattttttattttattttattttatttttgagatggagtctcactctgtcacccaagctggagtgcagtggcactcggttcactgcaaagtctgcctcccaggttcaagcgattctcctgcctcagcttctcaagcagctgggattagaggtgtgcaccactacgccaggctaatttttgtatttttagtagagatggggtttcaccatattggccaggctagtcttgaactcctgacctcaggtgatctgcctgcttcagcctcccaaagtgctgggattacaggcgtgagccacctcgcccagccaaggtcttttacttgtttataaacagtctcttcataattaaaattaaggattaataaagtatgacaatacctccttaatcattttgaagtgcctgctatcaattgaaataaaaacaatcaactaaaa

SEQ ID NO: 117158 - DNA, 3450 bp, Homo sapiens
  Payload ID: 2864
  Gene Symbol: CCR5
  Gene Name: chemokine (C-C motif) receptor 5 (gene/pseudogene)
  Uniprot ID: P51681
  ENST ID: ENST00000292303
  CDS Start-End: 147-1205
acttaatgatttaactccaccctccttcaaaagaaacagcatttcctacttttatactgtctatatgattgatttgcacagctcatctggccagaagagctgagacatccgttcccctacaagaaactctccccgggtggaacaagatggattatcaagtgtcaagtccaatctatgacatcaattattatacatcggagccctgccaaaaaatcaatgtgaagcaaatcgcagcccgcctcctgcctccgctctactcactggtgttcatctttggttttgtgggcaacatgctggtcatcctcatcctgataaactgcaaaaggctgaagagcatgactgacatctacctgctcaacctggccatctctgacctgtttttccttcttactgtccccttctgggctcactatgctgccgcccagtgggactttggaaatacaatgtgtcaactcttgacagggctctattttataggcttcttctctggaatcttcttcatcatcctcctgacaatcgataggtacctggctgtcgtccatgctgtgtttgctttaaaagccaggacggtcacctttggggtggtgacaagtgtgatcacttgggtggtggctgtgtttgcgtctctcccaggaatcatctttaccagatctcaaaaagaaggtcttcattacacctgcagctctcattttccatacagtcagtatcaattctggaagaatttccagacattaaagatagtcatcttggggctggtcctgccgctgcttgtcatggtcatctgctactcgggaatcctaaaaactctgcttcggtgtcgaaatgagaagaagaggcacagggctgtgaggcttatcttcaccatcatgattgtttattttctcttctgggctccctacaacattgtccttctcctgaacaccttccaggaattctttggcctgaataattgcagtagctctaacaggttggaccaagctatgcaggtgacagagactcttgggatgacgcactgctgcatcaaccccatcatctatgcctttgtcggggagaagttcagaaactacctcttagtcttcttccaaaagcacattgccaaacgcttctgcaaatgctgttctattttccagcaagaggctcccgagcgagcaagctcagtttacacccgatccactggggagcaggaaatatctgtgggcttgtgacacggactcaagtgggctggtgacccagtcagagttgtgcacatggcttagttttcatacacagcctgggctgggggtggggtgggagaggtcttttttaaaaggaagttactgttatagagggtctaagattcatccatttatttggcatctgtttaaagtagattagatcttttaagcccatcaattatagaaagccaaatcaaaatatgttgatgaaaaatagcaacctttttatctccccttcacatgcatcaagttattgacaaactctcccttcactccgaaagttccttatgtatatttaaaagaaagcctcagagaattgctgattcttgagtttagtgatctgaacagaaataccaaaattatttcagaaatgtacaactttttacctagtacaaggcaacatataggttgtaaatgtgtttaaaacaggtctttgtcttgctatggggagaaaagacatgaatatgattagtaaagaaatgacacttttcatgtgtgatttcccctccaaggtatggttaataagtttcactgacttagaaccaggcgagagacttgtggcctgggagagctggggaagcttcttaaatgagaaggaatttgagttggatcatctattgctggcaaagacagaagcctcactgcaagcactgcatgggcaagcttggctgtagaaggagacagagctggttgggaagacatggggaggaaggacaaggctagatcatgaagaaccttgacggcattgctccgtctaagtcatgagctgagcagggagatcctggttggtgttgcagaaggtttactctgtggccaaaggagggtcaggaaggatgagcatttagggcaaggagaccaccaacagccctcaggtcagggtgaggatggcctctgctaagctcaaggcgtgaggatgggaaggagggaggtattcgtaaggatgggaaggagggaggtattcgtgcagcatatgaggatgcagagtcagcagaactggggtggatttgggttggaagtgagggtcagagaggagtcagagagaatccctagtcttcaagcagattggagaaacccttgaaaagacatcaagcacagaaggaggaggaggaggtttaggtcaagaagaagatggattggtgtaaaaggatgggtctggtttgcagagcttgaacacagtctcacccagactccaggctgtctttcactgaatgcttctgacttcatagatttccttcccatcccagctgaaatactgaggggtctccaggaggagactagatttatgaatacacgaggtatgaggtctaggaacatacttcagctcacacatgagatctaggtgaggattgattacctagtagtcatttcatgggttgttgggaggattctatgaggcaaccacaggcagcatttagcacatactacacattcaataagcatcaaactcttagttactcattcagggatagcactgagcaaagcattgagcaaaggggtcccatagaggtgagggaagcctgaaaaactaagatgctgcctgcccagtgcacacaagtgtaggtatcattttctgcatttaaccgtcaataggcaaaggggggaagggacatattcatttggaaataagctgccttgagccttaaaacccacaaaagtacaatttaccagcctccgtatttcagactgaatgggggtggggggggcgccttaggtacttattccagatgccttctccagacaaaccagaagcaacagaaaaaatcgtctctccctccctttgaaatgaatataccccttagtgtttgggtatattcatttcaaagggagagagagaggtttttttctgttctgtctcatatgattgtgcacatacttgagactgttttgaatttgggggatggctaaaaccatcatagtacaggtaaggtgagggaatagtaagtggtgagaactactcagggaatgaaggtgtcagaataataagaggtgctactgactttctcagcctctgaatatgaacggtgagcattgtggctgtcagcaggaagcaacgaagggaaatgtctttccttttgctcttaagttgtggagagtgcaacagtagcataggaccctaccctctgggccaagtcaaagacattctgacatcttagtatttgcatattcttatgtatgtgaaagttacaaattgcttgaaagaaaatatgcatctaataaaaaacaccttctaaaataa

SEQ ID NO: 117159 - DNA, 1292 bp, Homo sapiens
  Payload ID: 2864
  Gene Symbol: CCR5
  Gene Name: chemokine (C-C motif) receptor 5 (gene/pseudogene)
  Uniprot ID: P51681
  ENST ID: ENST00000445772
  CDS Start-End: 234-1292
ccccaacagagccaagctctccatctagtggacagggaagctagcagcaaaccttcccttcactacaaaacttcattgcttggccaaaaagagagttaattcaatgtagacatctatgtaggcaattaaaaacctattgatgtataaaacagtttgcattcatggagggcaactaaatacattctaggactttataaaagatcactttttatttatgcacagggtggaacaagatggattatcaagtgtcaagtccaatctatgacatcaattattatacatcggagccctgccaaaaaatcaatgtgaagcaaatcgcagcccgcctcctgcctccgctctactcactggtgttcatctttggttttgtgggcaacatgctggtcatcctcatcctgataaactgcaaaaggctgaagagcatgactgacatctacctgctcaacctggccatctctgacctgtttttccttcttactgtccccttctgggctcactatgctgccgcccagtgggactttggaaatacaatgtgtcaactcttgacagggctctattttataggcttcttctctggaatcttcttcatcatcctcctgacaatcgataggtacctggctgtcgtccatgctgtgtttgctttaaaagccaggacggtcacctttggggtggtgacaagtgtgatcacttgggtggtggctgtgtttgcgtctctcccaggaatcatctttaccagatctcaaaaagaaggtcttcattacacctgcagctctcattttccatacagtcagtatcaattctggaagaatttccagacattaaagatagtcatcttggggctggtcctgccgctgcttgtcatggtcatctgctactcgggaatcctaaaaactctgcttcggtgtcgaaatgagaagaagaggcacagggctgtgaggcttatcttcaccatcatgattgtttattttctcttctgggctccctacaacattgtccttctcctgaacaccttccaggaattctttggcctgaataattgcagtagctctaacaggttggaccaagctatgcaggtgacagagactcttgggatgacgcactgctgcatcaaccccatcatctatgcctttgtcggggagaagttcagaaactacctcttagtcttcttccaaaagcacattgccaaacgcttctgcaaatgctgttctattttccagcaagaggctcccgagcgagcaagctcagtttacacccgatccactggggagcaggaaatatctgtgggcttgtga

SEQ ID NO: 117160 - DNA, 2980 bp, Homo sapiens
  Payload ID: 2865
  Gene Symbol: CCR6
  Gene Name: chemokine (C-C motif) receptor 6
  Uniprot ID: P51684
  ENST ID: ENST00000349984
  CDS Start-End: 265-1389
caaacgttcccaaatcttcccagtcggcttgcagagactccttgctcccaggagataaccagaagctgcatcttattgacagatggtcatcacattggtgagctggagtcatcagattgtggggcccggagtgaggctgaagggagtggatcagagcactgcctgagagtcacctctactttcctgctaccgctgcctgtgagctgaaggggctgaaccatacactcctttttctacaaccagcttgcattttttctgcccacaatgagcggggaatcaatgaatttcagcgatgttttcgactccagtgaagattattttgtgtcagtcaatacttcatattactcagttgattctgagatgttactgtgctccttgcaggaggtcaggcagttctccaggctatttgtaccgattgcctactccttgatctgtgtctttggcctcctggggaatattctggtggtgatcacctttgctttttataagaaggccaggtctatgacagacgtctatctcttgaacatggccattgcagacatcctctttgttcttactctcccattctgggcagtgagtcatgccaccggtgcgtgggttttcagcaatgccacgtgcaagttgctaaaaggcatctatgccatcaactttaactgcgggatgctgctcctgacttgcattagcatggaccggtacatcgccattgtacaggcgactaagtcattccggctccgatccagaacactaccgcgcagcaaaatcatctgccttgttgtgtgggggctgtcagtcatcatctccagctcaacttttgtcttcaaccaaaaatacaacacccaaggcagcgatgtctgtgaacccaagtaccagactgtctcggagcccatcaggtggaagctgctgatgttggggcttgagctactctttggtttctttatccctttgatgttcatgatattttgttacacgttcattgtcaaaaccttggtgcaagctcagaattctaaaaggcacaaagccatccgtgtaatcatagctgtggtgcttgtgtttctggcttgtcagattcctcataacatggtcctgcttgtgacggctgcaaatttgggtaaaatgaaccgatcctgccagagcgaaaagctaattggctatacgaaaactgtcacagaagtcctggctttcctgcactgctgcctgaaccctgtgctctacgcttttattgggcagaagttcagaaactactttctgaagatcttgaaggacctgtggtgtgtgagaaggaagtacaagtcctcaggcttctcctgtgccgggaggtactcagaaaacatttctcggcagaccagtgagaccgcagataacgacaatgcgtcgtccttcactatgtgatagaaagctgagtctccctaaggcatgtgtgaaacatactcatagatgttatgcaaaaaaaagtctatggccaggtatgcatggaaaatgtgggaattaagcaaaatcaagcaagcctctctcctgcgggacttaacgtgctcatgggctgtgtgatctcttcagggtggggtggtctctgataggtagcattttccagcactttgcaaggaatgttttgtagctctagggtatatatccgcctggcatttcacaaaacagcctttgggaaatgctgaattaaagtgaattgttgacaaatgtaaacattttcagaaatattcatgaagcggtcacagatcacagtgtcttttggttacagcacaaaatgatggcagtggtttgaaaaactaaaacagaaaaaaaaatggaagccaacacatcactcattttaggcaaatgtttaaacatttttatctatcagaatgtttattgttgctggttataagcagcaggattggccggctagtgtttcctctcatttccctttgatacagtcaacaagcctgaccctgtaaaatggaggtggaaagacaagctcaagtgttcacaacctggaagtgcttcgggaagaaggggacaatggcagaacaggtgttggtgacaattgtcaccaattggataaagcagctcaggttgtagtgggccattaggaaactgtcggtttgctttgatttccctgggagctgttctctgtcgtgagtgtctcttgtctaaacgtccattaagctgagagtgctatgaagacaggatctagaataatcttgctcacagctgtgctctgagtgcctagcggagttccagcaaacaaaatggactcaagagagatttgattaatgaatcgtaatgaagttggggtttattgtacagtttaaaatgttagatgtttttaattttttaaataaatggaatactttttttttttttttaaagaaagcaactttactgagacaatgtagaaagaagttttgttccgtttctttaatgtggttgaagagcaatgtgtggctgaagacttttgttatgaggagctgcagattagctaggggacagctggaattatgctggcttctgataattattttaaaggggtctgaaatttgtgatggaatcagattttaacagctctcttcaatgacatagaaagttcatggaactcatgtttttaaagggctatgtaaatatatgaacattagaaaaatagcaacttgtgttacaaaaatacaaacacatgttaggaaggtactgtcatgggctaggcatggtggctcacacctgtaatcccagcattttgggaagctaagatgggtggatcacttgaggtcaggagtttgagaccagcctggccaacatggcgaaacccctctctactaaaaatacaaaaatttgccaggcgtggtggcgggtgcctgtaatcccagctacttgggaggctgaggcaagagaatcgcttgaacccaggaggcagaggttgcagtgagccgagatcgtgccattgcactccagcctgggtgacaaagcgagactccatctcaaaaaaaaaaaaaaaaaa

SEQ ID NO: 117161 - DNA, 4018 bp, Homo sapiens
  Payload ID: 2865
  Gene Symbol: CCR6
  Gene Name: chemokine (C-C motif) receptor 6
  Uniprot ID: P51684
  ENST ID: ENST00000341935
  CDS Start-End: 553-1677
tgcaaacgttcccaaatcttcccagtcggcttgcagagactccttgctcccaggagataaccaggtaaaggagtatgaaagtttgggtacaaactcattgctgcaaattgaaaaccatgcaaaggctgtcttcctctggggagttcaatgcctctctttttcttatcactttaccattggttggactttgattccagggatcctacgattactcaataccctacaggatatacatggttaaccatttgcatttgggcaaataggcgttacttttcaataggaagtggcaatccagaacttgcttttgggcaattctagtagctcaccgcttttttcttaatgactgctagaagctgcatcttattgacagatggtcatcacattggtgagctggagtcatcagattgtggggcccggagtgaggctgaagggagtggatcagagcactgcctgagagtcacctctactttcctgctaccgctgcctgtgagctgaaggggctgaaccatacactcctttttctacaaccagcttgcattttttctgcccacaatgagcggggaatcaatgaatttcagcgatgttttcgactccagtgaagattattttgtgtcagtcaatacttcatattactcagttgattctgagatgttactgtgctccttgcaggaggtcaggcagttctccaggctatttgtaccgattgcctactccttgatctgtgtctttggcctcctggggaatattctggtggtgatcacctttgctttttataagaaggccaggtctatgacagacgtctatctcttgaacatggccattgcagacatcctctttgttcttactctcccattctgggcagtgagtcatgccaccggtgcgtgggttttcagcaatgccacgtgcaagttgctaaaaggcatctatgccatcaactttaactgcgggatgctgctcctgacttgcattagcatggaccggtacatcgccattgtacaggcgactaagtcattccggctccgatccagaacactaccgcgcagcaaaatcatctgccttgttgtgtgggggctgtcagtcatcatctccagctcaacttttgtcttcaaccaaaaatacaacacccaaggcagcgatgtctgtgaacccaagtaccagactgtctcggagcccatcaggtggaagctgctgatgttggggcttgagctactctttggtttctttatccctttgatgttcatgatattttgttacacgttcattgtcaaaaccttggtgcaagctcagaattctaaaaggcacaaagccatccgtgtaatcatagctgtggtgcttgtgtttctggcttgtcagattcctcataacatggtcctgcttgtgacggctgcaaatttgggtaaaatgaaccgatcctgccagagcgaaaagctaattggctatacgaaaactgtcacagaagtcctggctttcctgcactgctgcctgaaccctgtgctctacgcttttattgggcagaagttcagaaactactttctgaagatcttgaaggacctgtggtgtgtgagaaggaagtacaagtcctcaggcttctcctgtgccgggaggtactcagaaaacatttctcggcagaccagtgagaccgcagataacgacaatgcgtcgtccttcactatgtgatagaaagctgagtctccctaaggcatgtgtgaaacatactcatagatgttatgcaaaaaaaagtctatggccaggtatgcatggaaaatgtgggaattaagcaaaatcaagcaagcctctctcctgcgggacttaacgtgctcatgggctgtgtgatctcttcagggtggggtggtctctgataggtagcattttccagcactttgcaaggaatgttttgtagctctagggtatatatccgcctggcatttcacaaaacagcctttgggaaatgctgaattaaagtgaattgttgacaaatgtaaacattttcagaaatattcatgaagcggtcacagatcacagtgtcttttggttacagcacaaaatgatggcagtggtttgaaaaactaaaacagaaaaaaaaatggaagccaacacatcactcattttaggcaaatgtttaaacatttttatctatcagaatgtttattgttgctggttataagcagcaggattggccggctagtgtttcctctcatttccctttgatacagtcaacaagcctgaccctgtaaaatggaggtggaaagacaagctcaagtgttcacaacctggaagtgcttcgggaagaaggggacaatggcagaacaggtgttggtgacaattgtcaccaattggataaagcagctcaggttgtagtgggccattaggaaactgtcggtttgctttgatttccctgggagctgttctctgtcgtgagtgtctcttgtctaaacgtccattaagctgagagtgctatgaagacaggatctagaataatcttgctcacagctgtgctctgagtgcctagcggagttccagcaaacaaaatggactcaagagagatttgattaatgaatcgtaatgaagttggggtttattgtacagtttaaaatgttagatgtttttaattttttaaataaatggaatactttttttttttttttaaagaaagcaactttactgagacaatgtagaaagaagttttgttccgtttctttaatgtggttgaagagcaatgtgtggctgaagacttttgttatgaggagctgcagattagctaggggacagctggaattatgctggcttctgataattattttaaaggggtctgaaatttgtgatggaatcagattttaacagctctcttcaatgacatagaaagttcatggaactcatgtttttaaagggctatgtaaatatatgaacattagaaaaatagcaacttgtgttacaaaaatacaaacacatgttaggaaggtactgtcatgggctaggcatggtggctcacacctgtaatcccagcattttgggaagctaagatgggtggatcacttgaggtcaggagtttgagaccagcctggccaacatggcgaaacccctctctactaaaaatacaaaaatttgccaggcgtggtggcgggtgcctgtaatcccagctacttgggaggctgaggcaagagaatcgcttgaacccaggaggcagaggttgcagtgagccgagatcgtgccattgcactccagcctgggtgacaaagcgagactccatctcaaaaaaaaaaaaaaaaaaaaaggaaagaactgtcatgtaaacataccaacatgtttaaacctgacaatggtgttatttgaaactttatattgttcttgtaagctttaactatatctctctttaaaatgcaaaataatgtcttaagattcaaagtctgtatttttaaagcatggctttggctttgcaaaataaaaaatgtgttttgtacatgaagtaggaatcgtatttcagcttcaaggttcagattgaggggcccactgtttggagaggatggtattcaggctttctcatgtccttcaaatctgttagcgtttgactctagaaatcaaagcaaaggagtggttacccagacacttcttttggtgtgatcaatgcgctgatgtgatctatgaagatgattcatgcttgaaaactagcacagaaacatcttgcttatttgccaaagctgggagatgagcttctctgcataatttaaatgttcagataaatgaagctgacttatttaagcaataaccttttaaacattttagctaagatgtataaaaatgtttccaaaatataccacatactttatttcttcttaaatgtagtacattaggttacatcatttttcttgctgtcttgggcatcaaaacaggtgccatggtaacctgacactctcaggagacattaagatagaaggggctgttcttcagtggttcccattgattctccccatatctttttgctctcaggctctggccgtctcttcctgagccttaactgtgt

SEQ ID NO: 117162 - DNA, 3216 bp, Homo sapiens
  Payload ID: 2865
  Gene Symbol: CCR6
  Gene Name: chemokine (C-C motif) receptor 6
  Uniprot ID: P51684
  ENST ID: ENST00000400926
  CDS Start-End: 306-1430
agtgtatgggtgaaggaggcagcagtgtggccggagaggagagctgggctgggagcacaggaaggtccccaggactctgtggtcatcagtaagagagggcccacgtgtatatgctggtgaacagaaatgtcaaccttttcaaagtctgacatttaagagaaaaaactgtggctgttggtttgtggaacagacagctccttctttattgagtcacctctactttcctgctaccgctgcctgtgagctgaaggggctgaaccatacactcctttttctacaaccagcttgcattttttctgcccacaatgagcggggaatcaatgaatttcagcgatgttttcgactccagtgaagattattttgtgtcagtcaatacttcatattactcagttgattctgagatgttactgtgctccttgcaggaggtcaggcagttctccaggctatttgtaccgattgcctactccttgatctgtgtctttggcctcctggggaatattctggtggtgatcacctttgctttttataagaaggccaggtctatgacagacgtctatctcttgaacatggccattgcagacatcctctttgttcttactctcccattctgggcagtgagtcatgccaccggtgcgtgggttttcagcaatgccacgtgcaagttgctaaaaggcatctatgccatcaactttaactgcgggatgctgctcctgacttgcattagcatggaccggtacatcgccattgtacaggcgactaagtcattccggctccgatccagaacactaccgcgcagcaaaatcatctgccttgttgtgtgggggctgtcagtcatcatctccagctcaacttttgtcttcaaccaaaaatacaacacccaaggcagcgatgtctgtgaacccaagtaccagactgtctcggagcccatcaggtggaagctgctgatgttggggcttgagctactctttggtttctttatccctttgatgttcatgatattttgttacacgttcattgtcaaaaccttggtgcaagctcagaattctaaaaggcacaaagccatccgtgtaatcatagctgtggtgcttgtgtttctggcttgtcagattcctcataacatggtcctgcttgtgacggctgcaaatttgggtaaaatgaaccgatcctgccagagcgaaaagctaattggctatacgaaaactgtcacagaagtcctggctttcctgcactgctgcctgaaccctgtgctctacgcttttattgggcagaagttcagaaactactttctgaagatcttgaaggacctgtggtgtgtgagaaggaagtacaagtcctcaggcttctcctgtgccgggaggtactcagaaaacatttctcggcagaccagtgagaccgcagataacgacaatgcgtcgtccttcactatgtgatagaaagctgagtctccctaaggcatgtgtgaaacatactcatagatgttatgcaaaaaaaagtctatggccaggtatgcatggaaaatgtgggaattaagcaaaatcaagcaagcctctctcctgcgggacttaacgtgctcatgggctgtgtgatctcttcagggtggggtggtctctgataggtagcattttccagcactttgcaaggaatgttttgtagctctagggtatatatccgcctggcatttcacaaaacagcctttgggaaatgctgaattaaagtgaattgttgacaaatgtaaacattttcagaaatattcatgaagcggtcacagatcacagtgtcttttggttacagcacaaaatgatggcagtggtttgaaaaactaaaacagaaaaaaaaatggaagccaacacatcactcattttaggcaaatgtttaaacatttttatctatcagaatgtttattgttgctggttataagcagcaggattggccggctagtgtttcctctcatttccctttgatacagtcaacaagcctgaccctgtaaaatggaggtggaaagacaagctcaagtgttcacaacctggaagtgcttcgggaagaaggggacaatggcagaacaggtgttggtgacaattgtcaccaattggataaagcagctcaggttgtagtgggccattaggaaactgtcggtttgctttgatttccctgggagctgttctctgtcgtgagtgtctcttgtctaaacgtccattaagctgagagtgctatgaagacaggatctagaataatcttgctcacagctgtgctctgagtgcctagcggagttccagcaaacaaaatggactcaagagagatttgattaatgaatcgtaatgaagttggggtttattgtacagtttaaaatgttagatgtttttaattttttaaataaatggaatactttttttttttttttaaagaaagcaactttactgagacaatgtagaaagaagttttgttccgtttctttaatgtggttgaagagcaatgtgtggctgaagacttttgttatgaggagctgcagattagctaggggacagctggaattatgctggcttctgataattattttaaaggggtctgaaatttgtgatggaatcagattttaacagctctcttcaatgacatagaaagttcatggaactcatgtttttaaagggctatgtaaatatatgaacattagaaaaatagcaacttgtgttacaaaaatacaaacacatgttaggaaggtactgtcatgggctaggcatggtggctcacacctgtaatcccagcattttgggaagctaagatgggtggatcacttgaggtcaggagtttgagaccagcctggccaacatggcgaaacccctctctactaaaaatacaaaaatttgccaggcgtggtggcgggtgcctgtaatcccagctacttgggaggctgaggcaagagaatcgcttgaacccaggaggcagaggttgcagtgagccgagatcgtgccattgcactccagcctgggtgacaaagcgagactccatctcaaaaaaaaaaaaaaaaaaaaaggaaagaactgtcatgtaaacataccaacatgtttaaacctgacaatggtgttatttgaaactttatattgttcttgtaagctttaactatatctctctttaaaatgcaaaataatgtcttaagattcaaagtctgtatttttaaagcatggctttggctttgcaaaataaaaaatgtgttttgtacatgaa

SEQ ID NO: 117163 - DNA, 2173 bp, Homo sapiens
  Payload ID: 2866
  Gene Symbol: CCR7
  Gene Name: chemokine (C-C motif) receptor 7
  Uniprot ID: P32248
  ENST ID: ENST00000246657
  CDS Start-End: 64-1200
agacaggggtagtgcgaggccgggcacagccttcctgtgtggttttaccgcccagagagcgtcatggacctggggaaaccaatgaaaagcgtgctggtggtggctctccttgtcattttccaggtatgcctgtgtcaagatgaggtcacggacgattacatcggagacaacaccacagtggactacactttgttcgagtctttgtgctccaagaaggacgtgcggaactttaaagcctggttcctccctatcatgtactccatcatttgtttcgtgggcctactgggcaatgggctggtcgtgttgacctatatctatttcaagaggctcaagaccatgaccgatacctacctgctcaacctggcggtggcagacatcctcttcctcctgacccttcccttctgggcctacagcgcggccaagtcctgggtcttcggtgtccacttttgcaagctcatctttgccatctacaagatgagcttcttcagtggcatgctcctacttctttgcatcagcattgaccgctacgtggccatcgtccaggctgtctcagctcaccgccaccgtgcccgcgtccttctcatcagcaagctgtcctgtgtgggcatctggatactagccacagtgctctccatcccagagctcctgtacagtgacctccagaggagcagcagtgagcaagcgatgcgatgctctctcatcacagagcatgtggaggcctttatcaccatccaggtggcccagatggtgatcggctttctggtccccctgctggccatgagcttctgttaccttgtcatcatccgcaccctgctccaggcacgcaactttgagcgcaacaaggccatcaaggtgatcatcgctgtggtcgtggtcttcatagtcttccagctgccctacaatggggtggtcctggcccagacggtggccaacttcaacatcaccagtagcacctgtgagctcagtaagcaactcaacatcgcctacgacgtcacctacagcctggcctgcgtccgctgctgcgtcaaccctttcttgtacgccttcatcggcgtcaagttccgcaacgatctcttcaagctcttcaaggacctgggctgcctcagccaggagcagctccggcagtggtcttcctgtcggcacatccggcgctcctccatgagtgtggaggccgagaccaccaccaccttctccccataggcgactcttctgcctggactagagggacctctcccagggtccctggggtggggatagggagcagatgcaatgactcaggacatccccccgccaaaagctgctcagggaaaagcagctctcccctcagagtgcaagcccctgctccagaagatagcttcaccccaatcccagctacctcaaccaatgccaaaaaaagacagggctgataagctaacaccagacagacaacactgggaaacagaggctattgtcccctaaaccaaaaactgaaagtgaaagtccagaaactgttcccacctgctggagtgaaggggccaaggagggtgagtgcaaggggcgtgggagtggcctgaagagtcctctgaatgaaccttctggcctcccacagactcaaatgctcagaccagctcttccgaaaaccaggccttatctccaagaccagagatagtggggagacttcttggcttggtgaggaaaagcggacatcagctggtcaaacaaactctctgaacccctccctccatcgttttcttcactgtcctccaagccagcgggaatggcagctgccacgccgccctaaaagcacactcatcccctcacttgccgcgtcgccctcccaggctctcaacaggggagagtgtggtgtttcctgcaggccaggccagctgcctccgcgtgatcaaagccacactctgggctccagagtggggatgacatgcactcagctcttggctccactgggatgggaggagaggacaagggaaatgtcaggggcggggagggtgacagtggccgcccaaggcccacgagcttgttctttgttctttgtcacagggactgaaaacctctcctcatgttctgctttcgattcgttaagagagcaacattttacccacacacagataaagttttcccttgaggaaacaacagctttaaaagaaaaagaaaaaaaaagtctttggtaaatggcaaa

SEQ ID NO: 117164 - DNA, 1874 bp, Homo sapiens
  Payload ID: 2866
  Gene Symbol: CCR7
  Gene Name: chemokine (C-C motif) receptor 7
  ENST ID: ENST00000579344
  CDS Start-End: 344-1462
ctctagatgagtcagtggagggcgggtggagcgttgaaccgtgaagagtgtggttgggcgtaaacgtggacttaaactcaggagctaaggggtaattcagtgaaaaaggggaatgagcggtggggagctctgttgcaacagggtccaatcgcagcaggactacaaatgcccgagcgcaggctgggaacgaggggacagcggctgcctgtccccagaatagaaaatgcagctaggaagccctctttgagtggacagcggaggactggactgccaggccaagcatcaggggcttcatcctcagggccggttagagcccctgaggatttaggaggaagggaaaccaatgaaaagcgtgctggtggtggctctccttgtcattttccaggtatgcctgtgtcaagatgaggtcacggacgattacatcggagacaacaccacagtggactacactttgttcgagtctttgtgctccaagaaggacgtgcggaactttaaagcctggttcctccctatcatgtactccatcatttgtttcgtgggcctactgggcaatgggctggtcgtgttgacctatatctatttcaagaggctcaagaccatgaccgatacctacctgctcaacctggcggtggcagacatcctcttcctcctgacccttcccttctgggcctacagcgcggccaagtcctgggtcttcggtgtccacttttgcaagctcatctttgccatctacaagatgagcttcttcagtggcatgctcctacttctttgcatcagcattgaccgctacgtggccatcgtccaggctgtctcagctcaccgccaccgtgcccgcgtccttctcatcagcaagctgtcctgtgtgggcatctggatactagccacagtgctctccatcccagagctcctgtacagtgacctccagaggagcagcagtgagcaagcgatgcgatgctctctcatcacagagcatgtggaggcctttatcaccatccaggtggcccagatggtgatcggctttctggtccccctgctggccatgagcttctgttaccttgtcatcatccgcaccctgctccaggcacgcaactttgagcgcaacaaggccatcaaggtgatcatcgctgtggtcgtggtcttcatagtcttccagctgccctacaatggggtggtcctggcccagacggtggccaacttcaacatcaccagtagcacctgtgagctcagtaagcaactcaacatcgcctacgacgtcacctacagcctggcctgcgtccgctgctgcgtcaaccctttcttgtacgccttcatcggcgtcaagttccgcaacgatctcttcaagctcttcaaggacctgggctgcctcagccaggagcagctccggcagtggtcttcctgtcggcacatccggcgctcctccatgagtgtggaggccgagaccaccaccaccttctccccataggcgactcttctgcctggactagagggacctctcccagggtccctggggtggggatagggagcagatgcaatgactcaggacatccccccgccaaaagctgctcagggaaaagcagctctcccctcagagtgcaagcccctgctccagaagatagcttcaccccaatcccagctacctcaaccaatgccaaaaaaagacagggctgataagctaacaccagacagacaacactgggaaacagaggctattgtcccctaaaccaaaaactgaaagtgaaagtccagaaactgttcccacctgctggagtgaaggggccaaggagggtgagtgcaaggggcgtgggagtggcctgaagagtcctctgaatgaaccttctggcctcccacagactcaaatgctcagaccagctctt

SEQ ID NO: 117165 - DNA, 787 bp, Homo sapiens
  Payload ID: 2866
  Gene Symbol: CCR7
  Gene Name: chemokine (C-C motif) receptor 7
  ENST ID: ENST00000578085
  CDS Start-End: 190-787
gcgaggccgggcacagccttcctgtgtggttttaccgcccagagagcgtcatggacctgggtatgcctgtgtcaagatgaggtcacggacgattacatcggagacaacaccacagtggactacactttgttcgagtctttgtgctccaagaaggacgtgcggaactttaaagcctggttcctccctatcatgtactccatcatttgtttcgtgggcctactgggcaatgggctggtcgtgttgacctatatctatttcaagaggctcaagaccatgaccgatacctacctgctcaacctggcggtggcagacatcctcttcctcctgacccttcccttctgggcctacagcgcggccaagtcctgggtcttcggtgtccacttttgcaagctcatctttgccatctacaagatgagcttcttcagtggcatgctcctacttctttgcatcagcattgaccgctacgtggccatcgtccaggctgtctcagctcaccgccaccgtgcccgcgtccttctcatcagcaagctgtcctgtgtgggcatctggatactagccacagtgctctccatcccagagctcctgtacagtgacctccagaggagcagcagtgagcaagcgatgcgatgctctctcatcacagagcatgtggaggcctttatcaccatccaggtggcccagatggtgatcggctttctggtccccctgctggccatgagcttctgttaccttgtcatcatccgcaccctgctccaggcacgcaactttgagcgcaacaaggccatca

SEQ ID NO: 117166 - DNA, 1253 bp, Homo sapiens
  Payload ID: 2867
  Gene Symbol: CCR8
  Gene Name: chemokine (C-C motif) receptor 8
  Uniprot ID: P51685
  ENST ID: ENST00000326306
  CDS Start-End: 139-1206
tttgtagtgggaggatacctccagagaggctgctgctcattgagctgcactcacatgaggatacagactttgtgaagaaggaattggcaacactgaaacctccagaacaaaggctgtcactaaggtcccgctgccttgatggattatacacttgacctcagtgtgacaacagtgaccgactactactaccctgatatcttctcaagcccctgtgatgcggaacttattcagacaaatggcaagttgctccttgctgtcttttattgcctcctgtttgtattcagtcttctgggaaacagcctggtcatcctggtccttgtggtctgcaagaagctgaggagcatcacagatgtatacctcttgaacctggccctgtctgacctgctttttgtcttctccttcccctttcagacctactatctgctggaccagtgggtgtttgggactgtaatgtgcaaagtggtgtctggcttttattacattggcttctacagcagcatgtttttcatcaccctcatgagtgtggacaggtacctggctgttgtccatgccgtgtatgccctaaaggtgaggacgatcaggatgggcacaacgctgtgcctggcagtatggctaaccgccattatggctaccatcccattgctagtgttttaccaagtggcctctgaagatggtgttctacagtgttattcattttacaatcaacagactttgaagtggaagatcttcaccaacttcaaaatgaacattttaggcttgttgatcccattcaccatctttatgttctgctacattaaaatcctgcaccagctgaagaggtgtcaaaaccacaacaagaccaaggccatcaggttggtgctcattgtggtcattgcatctttacttttctgggtcccattcaacgtggttcttttcctcacttccttgcacagtatgcacatcttggatggatgtagcataagccaacagctgacttatgccacccatgtcacagaaatcatttcctttactcactgctgtgtgaaccctgttatctatgcttttgttggggagaagttcaagaaacacctctcagaaatatttcagaaaagttgcagccaaatcttcaactacctaggaagacaaatgcctagggagagctgtgaaaagtcatcatcctgccagcagcactcctcccgttcctccagcgtagactacattttgtgaggatcaatgaagactaaatataaaaaacattttcttgaatggcatgc

SEQ ID NO: 117167 - DNA, 1078 bp, Homo sapiens
  Payload ID: 2867
  Gene Symbol: CCR8
  Gene Name: chemokine (C-C motif) receptor 8
  ENST ID: ENST00000414803
  CDS Start-End: 72-428
ctttgtgaagaaggaattggcaacactgaaacctccagaacaaaggctgtcactaaggtcccgctgccttgatggattatacacttgacctcagtgtgacaacagtgaccgactactactaccctgatatcttctcaagcccctgtgatgcggaacttattcagacaaatgacctactatctgctggaccagtgggtgtttgggactgtaatgtgcaaagtggtgtctggcttttattacattggcttctacagcagcatgtttttcatcaccctcatgagtgtggacaggtacctggctgttgtccatgccgtgtatgccctaaaggtgaggacgatcaggatgggcacaacgctgtgcctggcagtatggctaaccgccattatggctaccatcccattgctagtgttttaccaagtggcctctgaagatggtgttctacagtgttattcattttacaatcaacagactttgaagtggaagatcttcaccaacttcaaaatgaacattttaggcttgttgatcccattcaccatctttatgttctgctacattaaaatcctgcaccagctgaagaggtgtcaaaaccacaacaagaccaaggccatcaggttggtgctcattgtggtcattgcatctttacttttctgggtcccattcaacgtggttcttttcctcacttccttgcacagtatgcacatcttggatggatgtagcataagccaacagctgacttatgccacccatgtcacagaaatcatttcctttactcactgctgtgtgaaccctgttatctatgcttttgttggggagaagttcaagaaacacctctcagaaatatttcagaaaagttgcagccaaatcttcaactacctaggaagacaaatgcctagggagagctgtgaaaagtcatcatcctgccagcagcactcctcccgttcctccagcgtagactacattttgtgaggatcaatgaagactaaatataaaaaacattttcttgaatggcatgctagtagcagtgagcaaaggtgtgggtgtgaaaggtttccaaaaaaagttcagcatgaaggatgcc

SEQ ID NO: 117168 - DNA, 2653 bp, Homo sapiens
  Payload ID: 2868
  Gene Symbol: CCR9
  Gene Name: chemokine (C-C motif) receptor 9
  Uniprot ID: P51686
  ENST ID: ENST00000355983
  CDS Start-End: 303-1376
gcttcctttctcgtgttgttatcgggtagctgcctgctcagaacccacaaagcctgcccctcatcccaggcagagagcaacccagctctttccccagacactgagagctggtggtgcctgctgtcccagggagagttgcatcgccctccacagagcaggcttgcatctgactgacccaccatgacacccacagacttcacatctcctccaggccccgctccagatcaccttccctcgctggcccaggaatccatctccttccaggaccttagcccaggactaacacaagccctattcctaacatggctgatgactatggctctgaatccacatcttccatggaagactacgttaacttcaacttcactgacttctactgtgagaaaaacaatgtcaggcagtttgcgagccatttcctcccacccttgtactggctcgtgttcatcgtgggtgccttgggcaacagtcttgttatccttgtctactggtactgcacaagagtgaagaccatgaccgacatgttccttttgaatttggcaattgctgacctcctctttcttgtcactcttcccttctgggccattgctgctgctgaccagtggaagttccagaccttcatgtgcaaggtggtcaacagcatgtacaagatgaacttctacagctgtgtgttgctgatcatgtgcatcagcgtggacaggtacattgccattgcccaggccatgagagcacatacttggagggagaaaaggcttttgtacagcaaaatggtttgctttaccatctgggtattggcagctgctctctgcatcccagaaatcttatacagccaaatcaaggaggaatccggcattgctatctgcaccatggtttaccctagcgatgagagcaccaaactgaagtcagctgtcttgaccctgaaggtcattctggggttcttccttcccttcgtggtcatggcttgctgctataccatcatcattcacaccctgatacaagccaagaagtcttccaagcacaaagccctaaaagtgaccatcactgtcctgaccgtctttgtcttgtctcagtttccctacaactgcattttgttggtgcagaccattgacgcctatgccatgttcatctccaactgtgccgtttccaccaacattgacatctgcttccaggtcacccagaccatcgccttcttccacagttgcctgaaccctgttctctatgtttttgtgggtgagagattccgccgggatctcgtgaaaaccctgaagaacttgggttgcatcagccaggcccagtgggtttcatttacaaggagagagggaagcttgaagctgtcgtctatgttgctggagacaacctcaggagcactctccctctgaggggtcttctctgaggtgcatggttcttttggaagaaatgagaaatacagaaacagtttccccactgatgggaccagagagagtgaaagagaaaagaaaactcagaaagggatgaatctgaactatatgattacttgtagtcagaatttgccaaagcaaatatttcaaaatcaactgactagtgcaggaggctgttgattggctcttgactgtgatgcccgcaattctcaaaggaggactaaggaccggcactgtggagcaccctggctttgccactcgccggagcatcaatgccgctgcctctggaggagcccttggattttctccatgcactgtgaacttctgtggcttcagttctcatgctgcctcttccaaaaggggacacagaagcactggctgctgctacagaccgcaaaagcagaaagtttcgtgaaaatgtccatctttgggaaattttctaccctgctcttgagcctgataacccatgccaggtcttatagattcctgatctagaacctttccaggcaatctcagacctaatttccttctgttctccttgttctgttctgggccagtgaaggtccttgttctgattttgaaacgatctgcaggtcttgccagtgaacccctggacaactgaccacacccacaaggcatccaaagtctgttggcttccaatccatttctgtgtcctgctggaggttttaacctagacaaggattccgcttattccttggtatggtgacagtgtctctccatggcctgagcagggagattataacagctgggttcgcaggagccagccttggccctgttgtaggcttgttctgttgagtggcacttgctttgggtccaccgtctgtctgctccctagaaaatgggctggttcttttggccctcttctttctgaggcccactttattctgaggaatacagtgagcagatatgggcagcagccaggtagggcaaaggggtgaagcgcaggccttgctggaaggctatttacttccatgcttctccttttcttactctatagtggcaacattttaaaagcttttaacttagagattaggctgaaaaaaataagtaatggaattcacctttgcatcttttgtgtctttcttatcatgatttggcaaaatgcatcacctttgaaaatatttcacatattggaaaagtgctttttaatgtgtatatgaagcattaattacttgtcactttctttaccctgtctcaatattttaagtgtgtgcaattaaagatcaaatagatacatt

SEQ ID NO: 117169 - DNA, 2569 bp, Homo sapiens
  Payload ID: 2868
  Gene Symbol: CCR9
  Gene Name: chemokine (C-C motif) receptor 9
  Uniprot ID: P51686
  ENST ID: ENST00000357632
  CDS Start-End: 181-1290
gcttcctttctcgtgttgttatcgggtagctgcctgctcagaacccacaaagcctgcccctcatcccaggcagagagcaacccagctctttccccagacactgagagctggtggtgcctgctgtcccagggagagttgcatcgccctccacagagcaggcttgcatctgactgacccaccatgacacccacagacttcacaagccctattcctaacatggctgatgactatggctctgaatccacatcttccatggaagactacgttaacttcaacttcactgacttctactgtgagaaaaacaatgtcaggcagtttgcgagccatttcctcccacccttgtactggctcgtgttcatcgtgggtgccttgggcaacagtcttgttatccttgtctactggtactgcacaagagtgaagaccatgaccgacatgttccttttgaatttggcaattgctgacctcctctttcttgtcactcttcccttctgggccattgctgctgctgaccagtggaagttccagaccttcatgtgcaaggtggtcaacagcatgtacaagatgaacttctacagctgtgtgttgctgatcatgtgcatcagcgtggacaggtacattgccattgcccaggccatgagagcacatacttggagggagaaaaggcttttgtacagcaaaatggtttgctttaccatctgggtattggcagctgctctctgcatcccagaaatcttatacagccaaatcaaggaggaatccggcattgctatctgcaccatggtttaccctagcgatgagagcaccaaactgaagtcagctgtcttgaccctgaaggtcattctggggttcttccttcccttcgtggtcatggcttgctgctataccatcatcattcacaccctgatacaagccaagaagtcttccaagcacaaagccctaaaagtgaccatcactgtcctgaccgtctttgtcttgtctcagtttccctacaactgcattttgttggtgcagaccattgacgcctatgccatgttcatctccaactgtgccgtttccaccaacattgacatctgcttccaggtcacccagaccatcgccttcttccacagttgcctgaaccctgttctctatgtttttgtgggtgagagattccgccgggatctcgtgaaaaccctgaagaacttgggttgcatcagccaggcccagtgggtttcatttacaaggagagagggaagcttgaagctgtcgtctatgttgctggagacaacctcaggagcactctccctctgaggggtcttctctgaggtgcatggttcttttggaagaaatgagaaatacagaaacagtttccccactgatgggaccagagagagtgaaagagaaaagaaaactcagaaagggatgaatctgaactatatgattacttgtagtcagaatttgccaaagcaaatatttcaaaatcaactgactagtgcaggaggctgttgattggctcttgactgtgatgcccgcaattctcaaaggaggactaaggaccggcactgtggagcaccctggctttgccactcgccggagcatcaatgccgctgcctctggaggagcccttggattttctccatgcactgtgaacttctgtggcttcagttctcatgctgcctcttccaaaaggggacacagaagcactggctgctgctacagaccgcaaaagcagaaagtttcgtgaaaatgtccatctttgggaaattttctaccctgctcttgagcctgataacccatgccaggtcttatagattcctgatctagaacctttccaggcaatctcagacctaatttccttctgttctccttgttctgttctgggccagtgaaggtccttgttctgattttgaaacgatctgcaggtcttgccagtgaacccctggacaactgaccacacccacaaggcatccaaagtctgttggcttccaatccatttctgtgtcctgctggaggttttaacctagacaaggattccgcttattccttggtatggtgacagtgtctctccatggcctgagcagggagattataacagctgggttcgcaggagccagccttggccctgttgtaggcttgttctgttgagtggcacttgctttgggtccaccgtctgtctgctccctagaaaatgggctggttcttttggccctcttctttctgaggcccactttattctgaggaatacagtgagcagatatgggcagcagccaggtagggcaaaggggtgaagcgcaggccttgctggaaggctatttacttccatgcttctccttttcttactctatagtggcaacattttaaaagcttttaacttagagattaggctgaaaaaaataagtaatggaattcacctttgcatcttttgtgtctttcttatcatgatttggcaaaatgcatcacctttgaaaatatttcacatattggaaaagtgctttttaatgtgtatatgaagcattaattacttgtcactttctttaccctgtctcaatattttaagtgtgtgcaattaaagatcaaatagatacattaa

SEQ ID NO: 117170 - DNA, 2512 bp, Homo sapiens
  Payload ID: 2868
  Gene Symbol: CCR9
  Gene Name: chemokine (C-C motif) receptor 9
  Uniprot ID: P51686
  ENST ID: ENST00000395963
  CDS Start-End: 163-1236
ctttctcgtgttgttatcgggtagctgcctgctcagaacccacaaagcctgcccctcatcccaggcagagagcaacccagctctttccccagacactgagagctggtggtgcctgctgtcccagggagagttgcatcgccctccacaagccctattcctaacatggctgatgactatggctctgaatccacatcttccatggaagactacgttaacttcaacttcactgacttctactgtgagaaaaacaatgtcaggcagtttgcgagccatttcctcccacccttgtactggctcgtgttcatcgtgggtgccttgggcaacagtcttgttatccttgtctactggtactgcacaagagtgaagaccatgaccgacatgttccttttgaatttggcaattgctgacctcctctttcttgtcactcttcccttctgggccattgctgctgctgaccagtggaagttccagaccttcatgtgcaaggtggtcaacagcatgtacaagatgaacttctacagctgtgtgttgctgatcatgtgcatcagcgtggacaggtacattgccattgcccaggccatgagagcacatacttggagggagaaaaggcttttgtacagcaaaatggtttgctttaccatctgggtattggcagctgctctctgcatcccagaaatcttatacagccaaatcaaggaggaatccggcattgctatctgcaccatggtttaccctagcgatgagagcaccaaactgaagtcagctgtcttgaccctgaaggtcattctggggttcttccttcccttcgtggtcatggcttgctgctataccatcatcattcacaccctgatacaagccaagaagtcttccaagcacaaagccctaaaagtgaccatcactgtcctgaccgtctttgtcttgtctcagtttccctacaactgcattttgttggtgcagaccattgacgcctatgccatgttcatctccaactgtgccgtttccaccaacattgacatctgcttccaggtcacccagaccatcgccttcttccacagttgcctgaaccctgttctctatgtttttgtgggtgagagattccgccgggatctcgtgaaaaccctgaagaacttgggttgcatcagccaggcccagtgggtttcatttacaaggagagagggaagcttgaagctgtcgtctatgttgctggagacaacctcaggagcactctccctctgaggggtcttctctgaggtgcatggttcttttggaagaaatgagaaatacagaaacagtttccccactgatgggaccagagagagtgaaagagaaaagaaaactcagaaagggatgaatctgaactatatgattacttgtagtcagaatttgccaaagcaaatatttcaaaatcaactgactagtgcaggaggctgttgattggctcttgactgtgatgcccgcaattctcaaaggaggactaaggaccggcactgtggagcaccctggctttgccactcgccggagcatcaatgccgctgcctctggaggagcccttggattttctccatgcactgtgaacttctgtggcttcagttctcatgctgcctcttccaaaaggggacacagaagcactggctgctgctacagaccgcaaaagcagaaagtttcgtgaaaatgtccatctttgggaaattttctaccctgctcttgagcctgataacccatgccaggtcttatagattcctgatctagaacctttccaggcaatctcagacctaatttccttctgttctccttgttctgttctgggccagtgaaggtccttgttctgattttgaaacgatctgcaggtcttgccagtgaacccctggacaactgaccacacccacaaggcatccaaagtctgttggcttccaatccatttctgtgtcctgctggaggttttaacctagacaaggattccgcttattccttggtatggtgacagtgtctctccatggcctgagcagggagattataacagctgggttcgcaggagccagccttggccctgttgtaggcttgttctgttgagtggcacttgctttgggtccaccgtctgtctgctccctagaaaatgggctggttcttttggccctcttctttctgaggcccactttattctgaggaatacagtgagcagatatgggcagcagccaggtagggcaaaggggtgaagcgcaggccttgctggaaggctatttacttccatgcttctccttttcttactctatagtggcaacattttaaaagcttttaacttagagattaggctgaaaaaaataagtaatggaattcacctttgcatcttttgtgtctttcttatcatgatttggcaaaatgcatcacctttgaaaatatttcacatattggaaaagtgctttttaatgtgtatatgaagcattaattacttgtcactttctttaccctgtctcaatattttaagtgtgtgcaattaaagatcaaatagatacat

SEQ ID NO: 117171 - DNA, 1331 bp, Homo sapiens
  Payload ID: 2868
  Gene Symbol: CCR9
  Gene Name: chemokine (C-C motif) receptor 9
  ENST ID: ENST00000422395
  CDS Start-End: 136-459
cacaaagcctgcccctcatcccaggcagagagcaacccagctctttccccagacactgagagctggtggtgcctgctgtcccagggagagttgcatcgccctccacagagcaggcttgcatctgactgacccaccatgacacccacagacttcacatctcctccaggccccgctccagatcaccttccctcgctggcccaggaatccatctccttccaggaccttagcccaggactaacacaagccctattcctaacatggctgatgactatggctctgaatccacatcttccatggaagactacgttaacttcaacttcactgacttctactgtgagaaaaacaatgtcaggcagtttgcgagccatttcctcccacccttgtactggctcgtgttcatcgtgggtgccttgggcaacagtcttgttatccttgtctactggtactgcacaagagtgaagaccatgaccgacatgttccttttgaatttggcaattgctgacctcctctttcttgtcactcttcccttctgggccattgctgctgctgaccagtggaagttccagaccttcatgtgcaaggtggtcaacagcatgtacaagatgaacttctacagctgtgtgttgctgatcatgtgcatcagcgtggacaggtacattgccattgcccaggccatgagagcacatacttggagggagaaaaggcttttgtacagcaaaatggtttgctttaccatctgggtattggcagctgctctctgcatcccagaaatcttatacagccaaatcaaggaggaatccggcattgctatctgcaccatggtttaccctagcgatgagagcaccaaactgaagtcagctgtcttgaccctgaaggtcattctggggttcttccttcccttcgtggtcatggcttgctgctataccatcatcattcacaccctgatacaagccaagaagtcttccaagcacaaagccctaaaagtgaccatcactgtcctgaccgtctttgtcttgtctcagtttccctacaactgcattttgttggtgcagaccattgacgcctatgccatgttcatctccaactgtgccgtttccaccaacattgacatctgcttccaggtcacccagaccatcgccttcttccacagttgcctgaaccctgttctctatgtttttgtgggtgagagattccgccgggatctcgtgaaaaccctgaagaacttgggttgcatcagccaggcccagtgggtttcatttacaaggagagagggaagcttgaagctgtcgtctatgttgctggagacaacctcaggagcactctccctctga

SEQ ID NO: 117172 - DNA, 1593 bp, Homo sapiens
  Payload ID: 2869
  Gene Symbol: CCRL2
  Gene Name: chemokine (C-C motif) receptor-like 2
  Uniprot ID: O00421
  ENST ID: ENST00000357392
  CDS Start-End: 114-1184
gagcatggtttcacttttgcaaacatttatttatacccttcgagagaaaaacgtctcagctgtcacaggaagctgcttcggggggtgagcaaactttttaaaatgcagaaattatgatctacacccgtttcttaaaaggcagtctgaagatggccaattacacgctggcaccagaggatgaatatgatgtcctcatagaaggtgaactggagagcgatgaggcagagcaatgtgacaagtatgacgcccaggcactctcagcccagctggtgccatcactctgctctgctgtgtttgtgatcggtgtcctggacaatctcctggttgtgcttatcctggtaaaatataaaggactcaaacgcgtggaaaatatctatcttctaaacttggcagtttctaacttgtgtttcttgcttaccctgcccttctgggctcatgctgggggcgatcccatgtgtaaaattctcattggactgtacttcgtgggcctgtacagtgagacatttttcaattgccttctgactgtgcaaaggtacctagtgtttttgcacaagggaaactttttctcagccaggaggagggtgccctgtggcatcattacaagtgtcctggcatgggtaacagccattctggccactttgcctgaattcgtggtttataaacctcagatggaagaccagaaatacaagtgtgcatttagcagaactcccttcctgccagctgatgagacattctggaagcattttctgactttaaaaatgaacatttcggttcttgtcctccccctatttatttttacatttctctatgtgcaaatgagaaaaacactaaggttcagggagcagaggtatagccttttcaagcttgtttttgccataatggtagtcttccttctgatgtgggcgccctacaatattgcatttttcctgtccactttcaaagaacacttctccctgagtgactgcaagagcagctacaatctggacaaaagtgttcacatcactaaactcatcgccaccacccactgctgcatcaaccctctcctgtatgcgtttcttgatgggacatttagcaaatacctctgccgctgtttccatctgcgtagtaacaccccacttcaacccagggggcagtctgcacaaggcacatcgagggaagaacctgaccattccaccgaagtgtaaactagcatccaccaaatgcaagaagaataaacatggattttcatctttctgcattatttcatgtaaattttctacacatttgtatacaaaatcggatacaggaagaaaagggagaggtgagctaacatttgctaagcactgaatttgtctcaggcaccgtgcaaggctctttacaaacgtgagctccttcgcctcctaccacttgtccatagtgtggataggactagtctcatttctctgagaagaaaactaaggcgcggaaatttgtctaagatcacataactaggaagtggcagaactgattctccagccctggtagcatttgctcagagcctacgcttggtccagaacatcaaactccaaaccctggggacaaacgacatgaaataaatgtattttaaaacatcta

SEQ ID NO: 117173 - DNA, 1796 bp, Homo sapiens
  Payload ID: 2869
  Gene Symbol: CCRL2
  Gene Name: chemokine (C-C motif) receptor-like 2
  Uniprot ID: O00421
  ENST ID: ENST00000399036
  CDS Start-End: 353-1387
ctcagaaggccagaagacggctgtcaaaggtcacagggaaatcaaaggcggggtacagggccagagggaggaggaaacaacttcccggttgctttcagacgcttcagagatcctctggaggcctgggggagcttttgagtactttatttcagttggtccctgagctcggtgagtggggcgggtagagccaccaggggaatcaacagtggtttctcgtgcccctcagggtcaggagcagtctgatcaaaaggagggcatccactgtccggggccattcccacagctcccggatgctgggtctggaggctgcgcccttcccctgcaggagctcagcccagtgggcagtctgaagatggccaattacacgctggcaccagaggatgaatatgatgtcctcatagaaggtgaactggagagcgatgaggcagagcaatgtgacaagtatgacgcccaggcactctcagcccagctggtgccatcactctgctctgctgtgtttgtgatcggtgtcctggacaatctcctggttgtgcttatcctggtaaaatataaaggactcaaacgcgtggaaaatatctatcttctaaacttggcagtttctaacttgtgtttcttgcttaccctgcccttctgggctcatgctgggggcgatcccatgtgtaaaattctcattggactgtacttcgtgggcctgtacagtgagacatttttcaattgccttctgactgtgcaaaggtacctagtgtttttgcacaagggaaactttttctcagccaggaggagggtgccctgtggcatcattacaagtgtcctggcatgggtaacagccattctggccactttgcctgaattcgtggtttataaacctcagatggaagaccagaaatacaagtgtgcatttagcagaactcccttcctgccagctgatgagacattctggaagcattttctgactttaaaaatgaacatttcggttcttgtcctccccctatttatttttacatttctctatgtgcaaatgagaaaaacactaaggttcagggagcagaggtatagccttttcaagcttgtttttgccataatggtagtcttccttctgatgtgggcgccctacaatattgcatttttcctgtccactttcaaagaacacttctccctgagtgactgcaagagcagctacaatctggacaaaagtgttcacatcactaaactcatcgccaccacccactgctgcatcaaccctctcctgtatgcgtttcttgatgggacatttagcaaatacctctgccgctgtttccatctgcgtagtaacaccccacttcaacccagggggcagtctgcacaaggcacatcgagggaagaacctgaccattccaccgaagtgtaaactagcatccaccaaatgcaagaagaataaacatggattttcatctttctgcattatttcatgtaaattttctacacatttgtatacaaaatcggatacaggaagaaaagggagaggtgagctaacatttgctaagcactgaatttgtctcaggcaccgtgcaaggctctttacaaacgtgagctccttcgcctcctaccacttgtccatagtgtggataggactagtctcatttctctgagaagaaaactaaggcgcggaaatttgtctaagatcacataactaggaagtggcagaactgattctccagccctggtagcatttgctcagagcctacgcttggtccagaacatcaaactccaaaccctggggacaaacgacatgaaataaatgtattttaaaacatcta

SEQ ID NO: 117174 - DNA, 1106 bp, Homo sapiens
  Payload ID: 2869
  Gene Symbol: CCRL2
  Gene Name: chemokine (C-C motif) receptor-like 2
  Uniprot ID: O00421
  ENST ID: ENST00000400880
  CDS Start-End: 72-1106
tttatttatacccttcgagagaaaaacgtctcagctgtcacaggaagctgcttcgggggggcagtctgaagatggccaattacacgctggcaccagaggatgaatatgatgtcctcatagaaggtgaactggagagcgatgaggcagagcaatgtgacaagtatgacgcccaggcactctcagcccagctggtgccatcactctgctctgctgtgtttgtgatcggtgtcctggacaatctcctggttgtgcttatcctggtaaaatataaaggactcaaacgcgtggaaaatatctatcttctaaacttggcagtttctaacttgtgtttcttgcttaccctgcccttctgggctcatgctgggggcgatcccatgtgtaaaattctcattggactgtacttcgtgggcctgtacagtgagacatttttcaattgccttctgactgtgcaaaggtacctagtgtttttgcacaagggaaactttttctcagccaggaggagggtgccctgtggcatcattacaagtgtcctggcatgggtaacagccattctggccactttgcctgaattcgtggtttataaacctcagatggaagaccagaaatacaagtgtgcatttagcagaactcccttcctgccagctgatgagacattctggaagcattttctgactttaaaaatgaacatttcggttcttgtcctccccctatttatttttacatttctctatgtgcaaatgagaaaaacactaaggttcagggagcagaggtatagccttttcaagcttgtttttgccataatggtagtcttccttctgatgtgggcgccctacaatattgcatttttcctgtccactttcaaagaacacttctccctgagtgactgcaagagcagctacaatctggacaaaagtgttcacatcactaaactcatcgccaccacccactgctgcatcaaccctctcctgtatgcgtttcttgatgggacatttagcaaatacctctgccgctgtttccatctgcgtagtaacaccccacttcaacccagggggcagtctgcacaaggcacatcgagggaagaacctgaccattccaccgaagtgtaa

SEQ ID NO: 117175 - DNA, 1642 bp, Homo sapiens
  Payload ID: 2869
  Gene Symbol: CCRL2
  Gene Name: chemokine (C-C motif) receptor-like 2
  Uniprot ID: O00421
  ENST ID: ENST00000400882
  CDS Start-End: 200-1234
ctgctctggggaagtgggcacacgttaaagaaatgtttatttcagtcttctgaaatagggaattactctggctaaaatgtagctccagaaagggaaagtggggctgtatgaatccaggtccagtttgttgtttcctccaggataaggcagctgtcggaggggaaaatcatctcccatttctccacagggcagtctgaagatggccaattacacgctggcaccagaggatgaatatgatgtcctcatagaaggtgaactggagagcgatgaggcagagcaatgtgacaagtatgacgcccaggcactctcagcccagctggtgccatcactctgctctgctgtgtttgtgatcggtgtcctggacaatctcctggttgtgcttatcctggtaaaatataaaggactcaaacgcgtggaaaatatctatcttctaaacttggcagtttctaacttgtgtttcttgcttaccctgcccttctgggctcatgctgggggcgatcccatgtgtaaaattctcattggactgtacttcgtgggcctgtacagtgagacatttttcaattgccttctgactgtgcaaaggtacctagtgtttttgcacaagggaaactttttctcagccaggaggagggtgccctgtggcatcattacaagtgtcctggcatgggtaacagccattctggccactttgcctgaattcgtggtttataaacctcagatggaagaccagaaatacaagtgtgcatttagcagaactcccttcctgccagctgatgagacattctggaagcattttctgactttaaaaatgaacatttcggttcttgtcctccccctatttatttttacatttctctatgtgcaaatgagaaaaacactaaggttcagggagcagaggtatagccttttcaagcttgtttttgccataatggtagtcttccttctgatgtgggcgccctacaatattgcatttttcctgtccactttcaaagaacacttctccctgagtgactgcaagagcagctacaatctggacaaaagtgttcacatcactaaactcatcgccaccacccactgctgcatcaaccctctcctgtatgcgtttcttgatgggacatttagcaaatacctctgccgctgtttccatctgcgtagtaacaccccacttcaacccagggggcagtctgcacaaggcacatcgagggaagaacctgaccattccaccgaagtgtaaactagcatccaccaaatgcaagaagaataaacatggattttcatctttctgcattatttcatgtaaattttctacacatttgtatacaaaatcggatacaggaagaaaagggagaggtgagctaacatttgctaagcactgaatttgtctcaggcaccgtgcaaggctctttacaaacgtgagctccttcgcctcctaccacttgtccatagtgtggataggactagtctcatttctctgagaagaaaactaaggcgcggaaatttgtctaagatcacataactaggaagtggcagaactgattctccagccctggtagcatttgctcagagcctacgcttggtccagaacatcaaactccaaaccctggggacaaacgacatgaaataaatgtattttaaaacatct

SEQ ID NO: 117176 - DNA, 713 bp, Homo sapiens
  Payload ID: 2869
  Gene Symbol: CCRL2
  Gene Name: chemokine (C-C motif) receptor-like 2
  ENST ID: ENST00000433848
  CDS Start-End: 62-713
gtcacaggaagctgcttcggggggcaagtcctgtttctgctaaaagaagggcagtctgaagatggccaattacacgctggcaccagaggatgaatatgatgtcctcatagaaggtgaactggagagcgatgaggcagagcaatgtgacaagtatgacgcccaggcactctcagcccagctggtgccatcactctgctctgctgtgtttgtgatcggtgtcctggacaatctcctggttgtgcttatcctggtaaaatataaaggactcaaacgcgtggaaaatatctatcttctaaacttggcagtttctaacttgtgtttcttgcttaccctgcccttctgggctcatgctgggggcgatcccatgtgtaaaattctcattggactgtacttcgtgggcctgtacagtgagacatttttcaattgccttctgactgtgcaaaggtacctagtgtttttgcacaagggaaactttttctcagccaggaggagggtgccctgtggcatcattacaagtgtcctggcatgggtaacagccattctggccactttgcctgaattcgtggtttataaacctcagatggaagaccagaaatacaagtgtgcatttagcagaactcccttcctgccagctgatgagacattctggaagcattttctgactttaaaaatgaacatttcggttcttgtcctccccctatttatttttacat

SEQ ID NO: 117177 - DNA, 3321 bp, Homo sapiens
  Payload ID: 2870
  Gene Symbol: CX3CL1
  Gene Name: chemokine (C-X3-C motif) ligand 1
  Uniprot ID: P78423
  ENST ID: ENST00000006053
  CDS Start-End: 112-1305
attataaaaagccacagatctctggcggcggcaaggggacagcactgagctctgccgcctggctctagccgcctgcctggcccccgccgggactcttgcccaccctcagccatggctccgatatctctgtcgtggctgctccgcttggccaccttctgccatctgactgtcctgctggctggacagcaccacggtgtgacgaaatgcaacatcacgtgcagcaagatgacatcaaagatacctgtagctttgctcatccactatcaacagaaccaggcatcatgcggcaaacgcgcaatcatcttggagacgagacagcacaggctgttctgtgccgacccgaaggagcaatgggtcaaggacgcgatgcagcatctggaccgccaggctgctgccctaactcgaaatggcggcaccttcgagaagcagatcggcgaggtgaagcccaggaccacccctgccgccgggggaatggacgagtctgtggtcctggagcccgaagccacaggcgaaagcagtagcctggagccgactccttcttcccaggaagcacagagggccctggggacctccccagagctgccgacgggcgtgactggttcctcagggaccaggctccccccgacgccaaaggctcaggatggagggcctgtgggcacggagcttttccgagtgcctcccgtctccactgccgccacgtggcagagttctgctccccaccaacctgggcccagcctctgggctgaggcaaagacctctgaggccccgtccacccaggacccctccacccaggcctccactgcgtcctccccagccccagaggagaatgctccgtctgaaggccagcgtgtgtggggtcagggacagagccccaggccagagaactctctggagcgggaggagatgggtcccgtgccagcgcacacggatgccttccaggactgggggcctggcagcatggcccacgtctctgtggtccctgtctcctcagaagggacccccagcagggagccagtggcttcaggcagctggacccctaaggctgaggaacccatccatgccaccatggacccccagaggctgggcgtccttatcactcctgtccctgacgcccaggctgccacccggaggcaggcggtggggctgctggccttccttggcctcctcttctgcctgggggtggccatgttcacctaccagagcctccagggctgccctcgaaagatggcaggagagatggcggagggccttcgctacatcccccggagctgtggtagtaattcatatgtcctggtgcccgtgtgaactcctctggcctgtgtctagttgtttgattcagacagctgcctgggatccctcatcctcatacccacccccacccaagggcctggcctgagctgggatgattggaggggggaggtgggatcctccaggtgcacaagctccaagctcccaggcattccccaggaggccagccttgaccattctccacctgccagggacagagggggtggcctcccaactcaccccagccccaaaactctcctctgctgctggctggttagaggttccctttgacgccatcccagccccaatgaacaattatttattaaatgcccagccccttctgacccatgctgccctgtgagtactacagtcctcccatctcacacatgagcatcaggccaggccctctgcccactccctgcaacctgattgtgtctcttggtcctgctgcagttgccagtcaccccggccacctgcggtgctatctcccccagccccatcctctgtacagagcccacgcccccactggtgacatgtcttttcttgcatgaggctagtgtggtgtttcctggcactgcttccagtgaggctctgcccttggttaggcattgtgggaaggggagataagggtatctggtgactttcctctttggtctacactgtgctgagtctgaaggctgggttctgatcctagttccaccatcaagccaccaacatactcccatctgtgaaaggaaagagggaggtaaggaatacctgtccccctgacaacactcattgacctgaggcccttctctccagcccctggatgcagcctcacagtccttaccagcagagcaccttagacagtccctgccaatggactaacttgtctttggaccctgaggcccagagggcctgcaagggagtgagttgatagcacagaccctgccctgtgggcccccaaatggaaatgggcagagcagagaccatccctgaaggccccgcccaggcttagtcactgagacagcccgggctctgcctcccatcacccgctaagagggagggagggctccagacacatgtccaagaagcccaggaaaggctccaggagcagccacattcctgatgcttcttcagagactcctgcaggcagccaggccacaagacccttgtggtcccaccccacacacgccagattctttcctgaggctgggctcccttcccacctctctcactccttgaaaacactgttctctgccctccaagaccttctccttcacctttgtccccaccgcagacaggaccagggatttccatgatgttttccatgagtcccctgtttgtttctgaaagggacgctacccgggaagggggctgggacatgggaaaggggaagttgtaggcataaagtcaggggttcccttttttggctgctgaaggctcgagcatgcctggatggggctgcaccggctggcctggcccctcagggtccctggtggcagctcacctctcccttggattgtccccgacccttgccgtctacctgaggggcctcttatgggctgggttctacccaggtgctaggaacactccttcacagatgggtgcttggaggaaggaaacccagctctggtccatagagagcaagacgctgtgctgccctgcccacctggcctctgcactcccctgctgggtgtggcgcagcatattcaggaagctcagggcctggctcaggtggggtcactctggcagctcagagagggtgggagtgggcccaatgcactttgttctggctcttccaggctgggagagccttccaggggtgggacaccctgtgatggggccctgcctcctttgtgaggaagccgctggggccagttggtcccccttccatggactttgttagtttctccaagcaggacatggacaaggatgatctaggaagactttggaaagagtaggaagactttggaaagacttttccaaccctcatcaccaacgtctgtgccattttgtattttactaataaaatttaaaagtcttgtgaatcaa

SEQ ID NO: 117178 - DNA, 3313 bp, Homo sapiens
  Payload ID: 2870
  Gene Symbol: CX3CL1
  Gene Name: chemokine (C-X3-C motif) ligand 1
  ENST ID: ENST00000563383
  CDS Start-End: 93-1304
ctctggcggcggcaaggggacagcactgagctctgccgcctggctctagccgcctgcctggcccccgccgggactcttgcccaccctcagccatggctccgatatctctgtcgtggctgctccgcttggccaccttctgccatctgactgtcctgctggctggaacctctttgaactcaggacagcaccacggtgtgacgaaatgcaacatcacgtgcagcaagatgacatcaaagatacctgtagctttgctcatccactatcaacagaaccaggcatcatgcggcaaacgcgcaatcatcttggagacgagacagcacaggctgttctgtgccgacccgaaggagcaatgggtcaaggacgcgatgcagcatctggaccgccaggctgctgccctaactcgaaatggcggcaccttcgagaagcagatcggcgaggtgaagcccaggaccacccctgccgccgggggaatggacgagtctgtggtcctggagcccgaagccacaggcgaaagcagtagcctggagccgactccttcttcccaggaagcacagagggccctggggacctccccagagctgccgacgggcgtgactggttcctcagggaccaggctccccccgacgccaaaggctcaggatggagggcctgtgggcacggagcttttccgagtgcctcccgtctccactgccgccacgtggcagagttctgctccccaccaacctgggcccagcctctgggctgaggcaaagacctctgaggccccgtccacccaggacccctccacccaggcctccactgcgtcctccccagccccagaggagaatgctccgtctgaaggccagcgtgtgtggggtcagggacagagccccaggccagagaactctctggagcgggaggagatgggtcccgtgccagcgcacacggatgccttccaggactgggggcctggcagcatggcccacgtctctgtggtccctgtctcctcagaagggacccccagcagggagccagtggcttcaggcagctggacccctaaggctgaggaacccatccatgccaccatggacccccagaggctgggcgtccttatcactcctgtccctgacgcccaggctgccacccggaggcaggcggtggggctgctggccttccttggcctcctcttctgcctgggggtggccatgttcacctaccagagcctccagggctgccctcgaaagatggcaggagagatggcggagggccttcgctacatcccccggagctgtggtagtaattcatatgtcctggtgcccgtgtgaactcctctggcctgtgtctagttgtttgattcagacagctgcctgggatccctcatcctcatacccacccccacccaagggcctggcctgagctgggatgattggaggggggaggtgggatcctccaggtgcacaagctccaagctcccaggcattccccaggaggccagccttgaccattctccacctgccagggacagagggggtggcctcccaactcaccccagccccaaaactctcctctgctgctggctggttagaggttccctttgacgccatcccagccccaatgaacaattatttattaaatgcccagccccttctgacccatgctgccctgtgagtactacagtcctcccatctcacacatgagcatcaggccaggccctctgcccactccctgcaacctgattgtgtctcttggtcctgctgcagttgccagtcaccccggccacctgcggtgctatctcccccagccccatcctctgtacagagcccacgcccccactggtgacatgtcttttcttgcatgaggctagtgtggtgtttcctggcactgcttccagtgaggctctgcccttggttaggcattgtgggaaggggagataagggtatctggtgactttcctctttggtctacactgtgctgagtctgaaggctgggttctgatcctagttccaccatcaagccaccaacatactcccatctgtgaaaggaaagagggaggtaaggaatacctgtccccctgacaacactcattgacctgaggcccttctctccagcccctggatgcagcctcacagtccttaccagcagagcaccttagacagtccctgccaatggactaacttgtctttggaccctgaggcccagagggcctgcaagggagtgagttgatagcacagaccctgccctgtgggcccccaaatggaaatgggcagagcagagaccatccctgaaggccccgcccaggcttagtcactgagacagcccgggctctgcctcccatcacccgctaagagggagggagggctccagacacatgtccaagaagcccaggaaaggctccaggagcagccacattcctgatgcttcttcagagactcctgcaggcagccaggccacaagacccttgtggtcccaccccacacacgccagattctttcctgaggctgggctcccttcccacctctctcactccttgaaaacactgttctctgccctccaagaccttctccttcacctttgtccccaccgcagacaggaccagggatttccatgatgttttccatgagtcccctgtttgtttctgaaagggacgctacccgggaagggggctgggacatgggaaaggggaagttgtaggcataaagtcaggggttcccttttttggctgctgaaggctcgagcatgcctggatggggctgcaccggctggcctggcccctcagggtccctggtggcagctcacctctcccttggattgtccccgacccttgccgtctacctgaggggcctcttatgggctgggttctacccaggtgctaggaacactccttcacagatgggtgcttggaggaaggaaacccagctctggtccatagagagcaagacgctgtgctgccctgcccacctggcctctgcactcccctgctgggtgtggcgcagcatattcaggaagctcagggcctggctcaggtggggtcactctggcagctcagagagggtgggagtgggcccaatgcactttgttctggctcttccaggctgggagagccttccaggggtgggacaccctgtgatggggccctgcctcctttgtgaggaagccgctggggccagttggtcccccttccatggactttgttagtttctccaagcaggacatggacaaggatgatctaggaagactttggaaagagtaggaagactttggaaagacttttccaaccctcatcaccaacgtctgtgccattttgtattttactaataaaatttaaaagtcttgt

SEQ ID NO: 117179 - DNA, 563 bp, Homo sapiens
  Payload ID: 2870
  Gene Symbol: CX3CL1
  Gene Name: chemokine (C-X3-C motif) ligand 1
  ENST ID: ENST00000564948
  CDS Start-End: 45-212
gccgcctgcctggcccccgccgggactcttgcccaccctcagccatggctccgatatctctgtcgtggctgctccgcttggccaccttctgccatctgactgtcctgctggctgcttggagacgagacagcacaggctgttctgtgccgacccgaaggagcaatgggtcaaggacgcgatgcagcatctggaccgccaggctgctgccctaactcgaaatggcggcaccttcgagaagcagatcggcgaggtgaagcccaggaccacccctgccgccgggggaatggacgagtctgtggtcctggagcccgaagccacaggcgaaagcagtagcctggagccgactccttcttcccaggaagcacagagggccctggggacctccccagagctgccgacgggcgtgactggttcctcagggaccaggctccccccgacgccaaaggctcaggatggagggcctgtgggcacggagcttttccgagtgcctcccgtctccactgccgccacgtggcagagttctgctccccaccaacctgggcccagcctctgggctgaggcaa

SEQ ID NO: 117180 - DNA, 5796 bp, Homo sapiens
  Payload ID: 2870
  Gene Symbol: CX3CL1
  Gene Name: chemokine (C-X3-C motif) ligand 1
  ENST ID: ENST00000565912
  CDS Start-End: 2707-3786
acaggctccccaggtcagttaaacaatcttcctggcagaaccaagaactgagccgggccaggaccattcagggaccgtggcagagggtggggactttggagacaggatgactctgtggctctttaaagccctggaggtgggcaatggcttttcccatcttggatttggggagcacagaatggaccttctttcctatccattgggcagcctcccttgcctcctcctgtctctggtcactcaggggcaccgtattttctggggcttcccaaagaagacacctgcaggccattttaggggactgccacctggctccactcaatagggcctggggaggctgcaggtgagtcagtctgaggttccattgcagaaggagggtggccagcccacacagtgacttttatatcctggttactcagagagaaaggacagccctgtgacctggggagcccctcctgcacacagcccccaaccccctgaagctactagtgcttctccttgatgactcaacccagacctgccggccctaaaccaccttcccacaaagcagggtgggccaaagctaagggggagcgatggagagaggaagcagcagactctacaaagtctctctgtgtgtgcaagcgtgcatgtgcctgtatttgggaaagtggtgtatgtttgcatggccacatatatgtaaatatttatgcatgagcagttcgtgttctggtggagcccagggatgccctgggggtttcccaggctctgaagggctagataagatcagcttgctctcttgactgccctggtctccagatgtttgcaaaaccctctggggtcttgcttttgctgcatataaccttgactcagatctgaaactcaagctcttccttgttttttatactcatcctccttgagctcaagctaagcagaagaaaatttgctggagattatagaggaagagaaaaggtggaaattcaatgtaaacaacttcaaatgtttatatcaaatagttgggtttatttgtcctgtcccggggtttctctctggttccacgtgacactcagctactgcctgccccttccgccccactctgcccccaccttattcataccgtccatctccaaccctcctccttactcttcttgctccaggaatttcaaatgcctcttccctcctaggcaggatgactcagtacctttcagcaactgctctcgggctcattctggctctcagcagcagaacaaaggatcatctattcagcagaccccaccttccttagaaagcagttgtacttatatattttttaaaaagtttattgctgggcatagtggcttacatctgtaatcccagctattccggaggttgaagtgggagaatcacttgcggtcggggttcaagaccagcctgggcaacatagcaagaccctgtctcttaaaaaaattagccaggcatggtagcaggcacctgtagtcccagctacttgggaggctgaggcaagagatctcttttttttttttcttttttttttgagacggagtcttgttctgtcacccaggctttagtgcagtggtatgatctcagctcactgcaacctctgcctcccggattcaagcaattctcctgtctcagcttcccgagtagctgggactaaaggtgcacaccatcatgccaggctaatttgtgtatttgtagtagagacaaggtttcaccatattgatcaggctggtctcaaactcctgacctcagatgatctatctgtctcggcctcccaaagtgctgggattacaggtgtgagccaccgcacccggccaggaggatttcttgagcccaggattttgaggttgccgtgagctaggattataccactgcactccagcctgggcaacagaacaagaccctatctcttaaaaaaaaatggcagcgggaagaaataaggcagaggtgaggggataggcaaggccacaggcccggtggggactagagcaggagaacctgctccatcacttgctggctgtgtgaccttagcaggtccctgtcactctcagattcatcccccctgctgcacaatggaccacttaattttaaaaattaactcgggcatggtggctcacgcctgtaatcccagcactttgggaggccaaggagggcagatcacctgaggtcgggagtctgagaccagcctgaccaacatggagaaaccccgtctctactaaaaatacaaaattagccaggagtcgtggcacatgcctgtaatcccagctattcgggagtctgaggcaggagaatcgcttgaatctgggaggccgaggttgcggtgagccgagatcatgccattgcactccagcctgggcaacaagagcaagactccaactcaaaaaaaaaaaaattaaactcttaatatgtgccaggcaaaaagaactctataaataagaattcacgtttcttattcttacaacaagactatgaggtagatgctatttttgttcctattttacaggtggggaaactgaggcatagagaagtttggcaggggagggaggctgagtcaaaggccttgaaggccagggtgtacaggggatcagttttggcttgggtggtgtggccgggacaatctggcacggggttgggaagccagatgcccacagacatccctgctgaccaggaacctctttgaactcaggacagcaccacggtgtgacgaaatgcaacatcacgtgcagcaagatgacatcaaagatacctgtagctttgctcatccactatcaacagaaccaggcatcatgcggcaaacgcgcaatcatcttggagacgagacagcacaggctgttctgtgccgacccgaaggagcaatgggtcaaggacgcgatgcagcatctggaccgccaggctgctgccctaactcgaaatggcggcaccttcgagaagcagatcggcgaggtgaagcccaggaccacccctgccgccgggggaatggacgagtctgtggtcctggagcccgaagccacaggcgaaagcagtagcctggagccgactccttcttcccaggaagcacagagggccctggggacctccccagagctgccgacgggcgtgactggttcctcagggaccaggctccccccgacgccaaaggctcaggatggagggcctgtgggcacggagcttttccgagtgcctcccgtctccactgccgccacgtggcagagttctgctccccaccaacctgggcccagcctctgggctgaggcaaagacctctgaggccccgtccacccaggacccctccacccaggcctccactgcgtcctccccagccccagaggagaatgctccgtctgaaggccagcgtgtgtggggtcagggacagagccccaggccagagaactctctggagcgggaggagatgggtcccgtgccagcgcacacggatgccttccaggactgggggcctggcagcatggcccacgtctctgtggtccctgtctcctcagaagggacccccagcagggagccagtggcttcaggcagctggacccctaaggctgaggaacccatccatgccaccatggacccccagaggctgggcgtccttatcactcctgtccctgacgcccaggctgccacccggaggcaggcggtggggctgctggccttccttggcctcctcttctgcctgggggtggccatgttcacctaccagagcctccagggctgccctcgaaagatggcaggagagatggcggagggccttcgctacatcccccggagctgtggtagtaattcatatgtcctggtgcccgtgtgaactcctctggcctgtgtctagttgtttgattcagacagctgcctgggatccctcatcctcatacccacccccacccaagggcctggcctgagctgggatgattggaggggggaggtgggatcctccaggtgcacaagctccaagctcccaggcattccccaggaggccagccttgaccattctccacctgccagggacagagggggtggcctcccaactcaccccagccccaaaactctcctctgctgctggctggttagaggttccctttgacgccatcccagccccaatgaacaattatttattaaatgcccagccccttctgacccatgctgccctgtgagtactacagtcctcccatctcacacatgagcatcaggccaggccctctgcccactccctgcaacctgattgtgtctcttggtcctgctgcagttgccagtcaccccggccacctgcggtgctatctcccccagccccatcctctgtacagagcccacgcccccactggtgacatgtcttttcttgcatgaggctagtgtggtgtttcctggcactgcttccagtgaggctctgcccttggttaggcattgtgggaaggggagataagggtatctggtgactttcctctttggtctacactgtgctgagtctgaaggctgggttctgatcctagttccaccatcaagccaccaacatactcccatctgtgaaaggaaagagggaggtaaggaatacctgtccccctgacaacactcattgacctgaggcccttctctccagcccctggatgcagcctcacagtccttaccagcagagcaccttagacagtccctgccaatggactaacttgtctttggaccctgaggcccagagggcctgcaagggagtgagttgatagcacagaccctgccctgtgggcccccaaatggaaatgggcagagcagagaccatccctgaaggccccgcccaggcttagtcactgagacagcccgggctctgcctcccatcacccgctaagagggagggagggctccagacacatgtccaagaagcccaggaaaggctccaggagcagccacattcctgatgcttcttcagagactcctgcaggcagccaggccacaagacccttgtggtcccaccccacacacgccagattctttcctgaggctgggctcccttcccacctctctcactccttgaaaacactgttctctgccctccaagaccttctccttcacctttgtccccaccgcagacaggaccagggatttccatgatgttttccatgagtcccctgtttgtttctgaaagggacgctacccgggaagggggctgggacatgggaaaggggaagttgtaggcataaagtcaggggttcccttttttggctgctgaaggctcgagcatgcctggatggggctgcaccggctggcctggcccctcagggtccctggtggcagctcacctctcccttggattgtccccgacccttgccgtctacctgaggggcctcttatgggctgggttctacccaggtgctaggaacactccttcacagatgggtgcttggaggaaggaaacccagctctggtccatagagagcaagacgctgtgctgccctgcccacctggcctctgcactcccctgctgggtgtggcgcagcatattcaggaagctcagggcctggctcaggtggggtcactctggcagctcagagagggtgggagtgggcccaatgcactttgttctggctcttccaggctgggagagccttccaggggtgggacaccctgtgatggggccctgcctcctttgtgaggaagccgctggggccagttggtcccccttccatggactttgttagtttctccaagcaggacatggacaaggatgatctaggaagactttggaaagagtaggaagactttggaaagacttttccaaccctcatcaccaacgtctgtgccattttgtattttactaataaaatttaaaagtcttgtg

SEQ ID NO: 117181 - DNA, 3151 bp, Homo sapiens
  Payload ID: 2871
  Gene Symbol: CX3CR1
  Gene Name: chemokine (C-X3-C motif) receptor 1
  Uniprot ID: P49238
  ENST ID: ENST00000358309
  CDS Start-End: 41-1204
ggggcgggccgtgcttaccaggccgtggacttaaaccaggatgagagaacccctggaggcgtttaagttggcagacttggatttcaggaagagctctctggcttctgggtggagaatggccagtggggccttcaccatggatcagttccctgaatcagtgacagaaaactttgagtacgatgatttggctgaggcctgttatattggggacatcgtggtctttgggactgtgttcctgtccatattctactccgtcatctttgccattggcctggtgggaaatttgttggtagtgtttgccctcaccaacagcaagaagcccaagagtgtcaccgacatttacctcctgaacctggccttgtctgatctgctgtttgtagccactttgcccttctggactcactatttgataaatgaaaagggcctccacaatgccatgtgcaaattcactaccgccttcttcttcatcggcttttttggaagcatattcttcatcaccgtcatcagcattgataggtacctggccatcgtcctggccgccaactccatgaacaaccggaccgtgcagcatggcgtcaccatcagcctaggcgtctgggcagcagccattttggtggcagcaccccagttcatgttcacaaagcagaaagaaaatgaatgccttggtgactaccccgaggtcctccaggaaatctggcccgtgctccgcaatgtggaaacaaattttcttggcttcctactccccctgctcattatgagttattgctacttcagaatcatccagacgctgttttcctgcaagaaccacaagaaagccaaagccattaaactgatccttctggtggtcatcgtgtttttcctcttctggacaccctacaacgttatgattttcctggagacgcttaagctctatgacttctttcccagttgtgacatgaggaaggatctgaggctggccctcagtgtgactgagacggttgcatttagccattgttgcctgaatcctctcatctatgcatttgctggggagaagttcagaagatacctttaccacctgtatgggaaatgcctggctgtcctgtgtgggcgctcagtccacgttgatttctcctcatctgaatcacaaaggagcaggcatggaagtgttctgagcagcaattttacttaccacacgagtgatggagatgcattgctccttctctgaagggaatcccaaagccttgtgtctacagagaacctggagttcctgaacctgatgctgactagtgaggaaagatttttgttgttatttcttacaggcacaaaatgatggacccaatgcacacaaaacaaccctagagtgttgttgagaattgtgctcaaaatttgaagaatgaacaaattgaactctttgaatgacaaagagtagacatttctcttactgcaaatgtcatcagaactttttggtttgcagatgacaaaaattcaactcagactagtttagttaaatgagggtggtgaatattgttcatattgtggcacaagcaaaagggtgtctgagccctcaaagtgaggggaaaccagggcctgagccaagctagaattccctctctctgactctcaaatcttttagtcattatagatcccccagactttacatgacacagctttatcaccagagagggactgacacccatgtttctctggccccaagggcaaaattcccagggaagtgctctgataggccaagtttgtatcaggtgcccatccctggaaggtgctgttatccatggggaagggatatataagatggaagcttccagtccaatctcatggagaagcagaaatacatatttccaagaagttggatgggtgggtactattctgattacacaaaacaaatgccacacatcacccttaccatgtgcctgatccagcctctcccctgattacaccagcctcgtcttcattaagccctcttccatcatgtccccaaacctgcaagggctccccactgcctactgcatcgagtcaaaactcaaatgcttggcttctcatacgtccaccatggggtcctaccaatagattccccattgcctcctccttcccaaaggactccacccatcctatcagcctgtctcttccatatgacctcatgcatctccacctgctcccaggccagtaagggaaatagaaaaaccctgcccccaaataagaagggatggattccaaccccaactccagtagcttgggacaaatcaagcttcagtttcctggtctgtagaagagggataaggtacctttcacatagagatcatcctttccagcatgaggaactagccaccaactcttgcaggtctcaacccttttgtctgcctcttagacttctgctttccacacctggcactgctgtgctgtgcccaagttgtggtgctgacaaagcttggaagagcctgcaggtgctgctgcgtggcatagcccagacacagaagaggctggttcttacgatggcacccagtgagcactcccaagtctacagagtgatagccttccgtaacccaactctcctggactgccttgaatatcccctcccagtcaccttgtggcaagcccctgcccatctgggaaaataccccatcattcatgctactgccaacctggggagccagggctatgggagcagcttttttttcccccctagaaacgtttggaacaatctaaaagtttaaagctcgaaaacaattgtaataatgctaaagaaaaagtcatccaatctaaccacatcaatattgtcattcctgtattcacccgtccagaccttgttcacactctcacatgtttagagttgcaatcgtaatgtacagatggttttataatctgatttgttttcctcttaacgttagaccacaaatagtgctcgctttctatgtagtttggtaattatcattttagaagactctaccagactgtgtattcattgaagtcagatgtggtaactgttaaattgctgtgtatctgatagctctttggcagtctatatgtttgtataatgaatgagagaataagtcatgttccttcaagatcatgtaccccaatttacttgccattactcaattgataaacatttaacttgtttccaatgtttagcaaatacatattttatagaacttcc

SEQ ID NO: 117182 - DNA, 3106 bp, Homo sapiens
  Payload ID: 2871
  Gene Symbol: CX3CR1
  Gene Name: chemokine (C-X3-C motif) receptor 1
  Uniprot ID: P49238
  ENST ID: ENST00000399220
  CDS Start-End: 91-1158
aatactcgtctctggtaaagtctgagcaggacagggtggctgactggcagatccagaggttcccttggcagtccacgccaggccttcaccatggatcagttccctgaatcagtgacagaaaactttgagtacgatgatttggctgaggcctgttatattggggacatcgtggtctttgggactgtgttcctgtccatattctactccgtcatctttgccattggcctggtgggaaatttgttggtagtgtttgccctcaccaacagcaagaagcccaagagtgtcaccgacatttacctcctgaacctggccttgtctgatctgctgtttgtagccactttgcccttctggactcactatttgataaatgaaaagggcctccacaatgccatgtgcaaattcactaccgccttcttcttcatcggcttttttggaagcatattcttcatcaccgtcatcagcattgataggtacctggccatcgtcctggccgccaactccatgaacaaccggaccgtgcagcatggcgtcaccatcagcctaggcgtctgggcagcagccattttggtggcagcaccccagttcatgttcacaaagcagaaagaaaatgaatgccttggtgactaccccgaggtcctccaggaaatctggcccgtgctccgcaatgtggaaacaaattttcttggcttcctactccccctgctcattatgagttattgctacttcagaatcatccagacgctgttttcctgcaagaaccacaagaaagccaaagccattaaactgatccttctggtggtcatcgtgtttttcctcttctggacaccctacaacgttatgattttcctggagacgcttaagctctatgacttctttcccagttgtgacatgaggaaggatctgaggctggccctcagtgtgactgagacggttgcatttagccattgttgcctgaatcctctcatctatgcatttgctggggagaagttcagaagatacctttaccacctgtatgggaaatgcctggctgtcctgtgtgggcgctcagtccacgttgatttctcctcatctgaatcacaaaggagcaggcatggaagtgttctgagcagcaattttacttaccacacgagtgatggagatgcattgctccttctctgaagggaatcccaaagccttgtgtctacagagaacctggagttcctgaacctgatgctgactagtgaggaaagatttttgttgttatttcttacaggcacaaaatgatggacccaatgcacacaaaacaaccctagagtgttgttgagaattgtgctcaaaatttgaagaatgaacaaattgaactctttgaatgacaaagagtagacatttctcttactgcaaatgtcatcagaactttttggtttgcagatgacaaaaattcaactcagactagtttagttaaatgagggtggtgaatattgttcatattgtggcacaagcaaaagggtgtctgagccctcaaagtgaggggaaaccagggcctgagccaagctagaattccctctctctgactctcaaatcttttagtcattatagatcccccagactttacatgacacagctttatcaccagagagggactgacacccatgtttctctggccccaagggcaaaattcccagggaagtgctctgataggccaagtttgtatcaggtgcccatccctggaaggtgctgttatccatggggaagggatatataagatggaagcttccagtccaatctcatggagaagcagaaatacatatttccaagaagttggatgggtgggtactattctgattacacaaaacaaatgccacacatcacccttaccatgtgcctgatccagcctctcccctgattacaccagcctcgtcttcattaagccctcttccatcatgtccccaaacctgcaagggctccccactgcctactgcatcgagtcaaaactcaaatgcttggcttctcatacgtccaccatggggtcctaccaatagattccccattgcctcctccttcccaaaggactccacccatcctatcagcctgtctcttccatatgacctcatgcatctccacctgctcccaggccagtaagggaaatagaaaaaccctgcccccaaataagaagggatggattccaaccccaactccagtagcttgggacaaatcaagcttcagtttcctggtctgtagaagagggataaggtacctttcacatagagatcatcctttccagcatgaggaactagccaccaactcttgcaggtctcaacccttttgtctgcctcttagacttctgctttccacacctggcactgctgtgctgtgcccaagttgtggtgctgacaaagcttggaagagcctgcaggtgctgctgcgtggcatagcccagacacagaagaggctggttcttacgatggcacccagtgagcactcccaagtctacagagtgatagccttccgtaacccaactctcctggactgccttgaatatcccctcccagtcaccttgtggcaagcccctgcccatctgggaaaataccccatcattcatgctactgccaacctggggagccagggctatgggagcagcttttttttcccccctagaaacgtttggaacaatctaaaagtttaaagctcgaaaacaattgtaataatgctaaagaaaaagtcatccaatctaaccacatcaatattgtcattcctgtattcacccgtccagaccttgttcacactctcacatgtttagagttgcaatcgtaatgtacagatggttttataatctgatttgttttcctcttaacgttagaccacaaatagtgctcgctttctatgtagtttggtaattatcattttagaagactctaccagactgtgtattcattgaagtcagatgtggtaactgttaaattgctgtgtatctgatagctctttggcagtctatatgtttgtataatgaatgagagaataagtcatgttccttcaagatcatgtaccccaatttacttgccattactcaattgataaacatttaacttgtttccaatgtttagcaaatacatattttatagaacttcca

SEQ ID NO: 117183 - DNA, 699 bp, Homo sapiens
  Payload ID: 2871
  Gene Symbol: CX3CR1
  Gene Name: chemokine (C-X3-C motif) receptor 1
  ENST ID: ENST00000435290
  CDS Start-End: 201-699
actttgaggagaagagctgtgtgtgccccagtgtggtccagtgagtactctgggctccctctcgtgggcagggaagctgagggccccatgagctctcccagcttcctgaaggctccccattaatgagagctgactgtgctgtgctttgctgactgcagggcctgctccctgccccccacctccaggttggggccttcaccatggatcagttccctgaatcagtgacagaaaactttgagtacgatgatttggctgaggcctgttatattggggacatcgtggtctttgggactgtgttcctgtccatattctactccgtcatctttgccattggcctggtgggaaatttgttggtagtgtttgccctcaccaacagcaagaagcccaagagtgtcaccgacatttacctcctgaacctggccttgtctgatctgctgtttgtagccactttgcccttctggactcactatttgataaatgaaaagggcctccacaatgccatgtgcaaattcactaccgccttcttcttcatcggcttttttggaagcatattcttcatcaccgtcatcagcattgataggtacctggccatcgtcctggccgccaactccatgaacaaccggaccgtgcagcatggcgtcaccatcagcctaggcgtctgggcagcagccattttggtggcagcaccccagttcatgt

SEQ ID NO: 117184 - DNA, 559 bp, Homo sapiens
  Payload ID: 2871
  Gene Symbol: CX3CR1
  Gene Name: chemokine (C-X3-C motif) receptor 1
  ENST ID: ENST00000412814
  CDS Start-End: 241-559
gcttttgtcctgtggccttctggccaaaggcagggaaaggtggccaaacactgagaccaagaacaaagaaagaaaactgctggtggacttcttccaccatgagcaggccaccaagcccgcagcactgcactgcagcccccagctctgtcctggggttgggggaggtgaggaggggcaaggtggggagcacacagagcacccgctgtcctcggaacaccacagcgactagaggccttcaccatggatcagttccctgaatcagtgacagaaaactttgagtacgatgatttggctgaggcctgttatattggggacatcgtggtctttgggactgtgttcctgtccatattctactccgtcatctttgccattggcctggtgggaaatttgttggtagtgtttgccctcaccaacagcaagaagcccaagagtgtcaccgacatttacctcctgaacctggccttgtctgatctgctgtttgtagccactttgcccttctggactcactatttgataaatgaaaagggcctccacaatgccatgtgcaaattcactaccg

SEQ ID NO: 117185 - DNA, 3255 bp, Homo sapiens
  Payload ID: 2871
  Gene Symbol: CX3CR1
  Gene Name: chemokine (C-X3-C motif) receptor 1
  Uniprot ID: P49238
  ENST ID: ENST00000541347
  CDS Start-End: 241-1308
gcttttgtcctgtggccttctggccaaaggcagggaaaggtggccaaacactgagaccaagaacaaagaaagaaaactgctggtggacttcttccaccatgagcaggccaccaagcccgcagcactgcactgcagcccccagctctgtcctggggttgggggaggtgaggaggggcaaggtggggagcacacagagcacccgctgtcctcggaacaccacagcgactagaggccttcaccatggatcagttccctgaatcagtgacagaaaactttgagtacgatgatttggctgaggcctgttatattggggacatcgtggtctttgggactgtgttcctgtccatattctactccgtcatctttgccattggcctggtgggaaatttgttggtagtgtttgccctcaccaacagcaagaagcccaagagtgtcaccgacatttacctcctgaacctggccttgtctgatctgctgtttgtagccactttgcccttctggactcactatttgataaatgaaaagggcctccacaatgccatgtgcaaattcactaccgccttcttcttcatcggcttttttggaagcatattcttcatcaccgtcatcagcattgataggtacctggccatcgtcctggccgccaactccatgaacaaccggaccgtgcagcatggcgtcaccatcagcctaggcgtctgggcagcagccattttggtggcagcaccccagttcatgttcacaaagcagaaagaaaatgaatgccttggtgactaccccgaggtcctccaggaaatctggcccgtgctccgcaatgtggaaacaaattttcttggcttcctactccccctgctcattatgagttattgctacttcagaatcatccagacgctgttttcctgcaagaaccacaagaaagccaaagccattaaactgatccttctggtggtcatcgtgtttttcctcttctggacaccctacaacgttatgattttcctggagacgcttaagctctatgacttctttcccagttgtgacatgaggaaggatctgaggctggccctcagtgtgactgagacggttgcatttagccattgttgcctgaatcctctcatctatgcatttgctggggagaagttcagaagatacctttaccacctgtatgggaaatgcctggctgtcctgtgtgggcgctcagtccacgttgatttctcctcatctgaatcacaaaggagcaggcatggaagtgttctgagcagcaattttacttaccacacgagtgatggagatgcattgctccttctctgaagggaatcccaaagccttgtgtctacagagaacctggagttcctgaacctgatgctgactagtgaggaaagatttttgttgttatttcttacaggcacaaaatgatggacccaatgcacacaaaacaaccctagagtgttgttgagaattgtgctcaaaatttgaagaatgaacaaattgaactctttgaatgacaaagagtagacatttctcttactgcaaatgtcatcagaactttttggtttgcagatgacaaaaattcaactcagactagtttagttaaatgagggtggtgaatattgttcatattgtggcacaagcaaaagggtgtctgagccctcaaagtgaggggaaaccagggcctgagccaagctagaattccctctctctgactctcaaatcttttagtcattatagatcccccagactttacatgacacagctttatcaccagagagggactgacacccatgtttctctggccccaagggcaaaattcccagggaagtgctctgataggccaagtttgtatcaggtgcccatccctggaaggtgctgttatccatggggaagggatatataagatggaagcttccagtccaatctcatggagaagcagaaatacatatttccaagaagttggatgggtgggtactattctgattacacaaaacaaatgccacacatcacccttaccatgtgcctgatccagcctctcccctgattacaccagcctcgtcttcattaagccctcttccatcatgtccccaaacctgcaagggctccccactgcctactgcatcgagtcaaaactcaaatgcttggcttctcatacgtccaccatggggtcctaccaatagattccccattgcctcctccttcccaaaggactccacccatcctatcagcctgtctcttccatatgacctcatgcatctccacctgctcccaggccagtaagggaaatagaaaaaccctgcccccaaataagaagggatggattccaaccccaactccagtagcttgggacaaatcaagcttcagtttcctggtctgtagaagagggataaggtacctttcacatagagatcatcctttccagcatgaggaactagccaccaactcttgcaggtctcaacccttttgtctgcctcttagacttctgctttccacacctggcactgctgtgctgtgcccaagttgtggtgctgacaaagcttggaagagcctgcaggtgctgctgcgtggcatagcccagacacagaagaggctggttcttacgatggcacccagtgagcactcccaagtctacagagtgatagccttccgtaacccaactctcctggactgccttgaatatcccctcccagtcaccttgtggcaagcccctgcccatctgggaaaataccccatcattcatgctactgccaacctggggagccagggctatgggagcagcttttttttcccccctagaaacgtttggaacaatctaaaagtttaaagctcgaaaacaattgtaataatgctaaagaaaaagtcatccaatctaaccacatcaatattgtcattcctgtattcacccgtccagaccttgttcacactctcacatgtttagagttgcaatcgtaatgtacagatggttttataatctgatttgttttcctcttaacgttagaccacaaatagtgctcgctttctatgtagtttggtaattatcattttagaagactctaccagactgtgtattcattgaagtcagatgtggtaactgttaaattgctgtgtatctgatagctctttggcagtctatatgtttgtataatgaatgagagaataagtcatgttccttcaagatcatgtaccccaatttacttgccattactcaattgataaacatttaacttgtttccaatgtttagcaaatacatattttatagaacttcc

SEQ ID NO: 117186 - DNA, 3215 bp, Homo sapiens
  Payload ID: 2871
  Gene Symbol: CX3CR1
  Gene Name: chemokine (C-X3-C motif) receptor 1
  Uniprot ID: P49238
  ENST ID: ENST00000542107
  CDS Start-End: 201-1268
actttgaggagaagagctgtgtgtgccccagtgtggtccagtgagtactctgggctccctctcgtgggcagggaagctgagggccccatgagctctcccagcttcctgaaggctccccattaatgagagctgactgtgctgtgctttgctgactgcagggcctgctccctgccccccacctccaggttggggccttcaccatggatcagttccctgaatcagtgacagaaaactttgagtacgatgatttggctgaggcctgttatattggggacatcgtggtctttgggactgtgttcctgtccatattctactccgtcatctttgccattggcctggtgggaaatttgttggtagtgtttgccctcaccaacagcaagaagcccaagagtgtcaccgacatttacctcctgaacctggccttgtctgatctgctgtttgtagccactttgcccttctggactcactatttgataaatgaaaagggcctccacaatgccatgtgcaaattcactaccgccttcttcttcatcggcttttttggaagcatattcttcatcaccgtcatcagcattgataggtacctggccatcgtcctggccgccaactccatgaacaaccggaccgtgcagcatggcgtcaccatcagcctaggcgtctgggcagcagccattttggtggcagcaccccagttcatgttcacaaagcagaaagaaaatgaatgccttggtgactaccccgaggtcctccaggaaatctggcccgtgctccgcaatgtggaaacaaattttcttggcttcctactccccctgctcattatgagttattgctacttcagaatcatccagacgctgttttcctgcaagaaccacaagaaagccaaagccattaaactgatccttctggtggtcatcgtgtttttcctcttctggacaccctacaacgttatgattttcctggagacgcttaagctctatgacttctttcccagttgtgacatgaggaaggatctgaggctggccctcagtgtgactgagacggttgcatttagccattgttgcctgaatcctctcatctatgcatttgctggggagaagttcagaagatacctttaccacctgtatgggaaatgcctggctgtcctgtgtgggcgctcagtccacgttgatttctcctcatctgaatcacaaaggagcaggcatggaagtgttctgagcagcaattttacttaccacacgagtgatggagatgcattgctccttctctgaagggaatcccaaagccttgtgtctacagagaacctggagttcctgaacctgatgctgactagtgaggaaagatttttgttgttatttcttacaggcacaaaatgatggacccaatgcacacaaaacaaccctagagtgttgttgagaattgtgctcaaaatttgaagaatgaacaaattgaactctttgaatgacaaagagtagacatttctcttactgcaaatgtcatcagaactttttggtttgcagatgacaaaaattcaactcagactagtttagttaaatgagggtggtgaatattgttcatattgtggcacaagcaaaagggtgtctgagccctcaaagtgaggggaaaccagggcctgagccaagctagaattccctctctctgactctcaaatcttttagtcattatagatcccccagactttacatgacacagctttatcaccagagagggactgacacccatgtttctctggccccaagggcaaaattcccagggaagtgctctgataggccaagtttgtatcaggtgcccatccctggaaggtgctgttatccatggggaagggatatataagatggaagcttccagtccaatctcatggagaagcagaaatacatatttccaagaagttggatgggtgggtactattctgattacacaaaacaaatgccacacatcacccttaccatgtgcctgatccagcctctcccctgattacaccagcctcgtcttcattaagccctcttccatcatgtccccaaacctgcaagggctccccactgcctactgcatcgagtcaaaactcaaatgcttggcttctcatacgtccaccatggggtcctaccaatagattccccattgcctcctccttcccaaaggactccacccatcctatcagcctgtctcttccatatgacctcatgcatctccacctgctcccaggccagtaagggaaatagaaaaaccctgcccccaaataagaagggatggattccaaccccaactccagtagcttgggacaaatcaagcttcagtttcctggtctgtagaagagggataaggtacctttcacatagagatcatcctttccagcatgaggaactagccaccaactcttgcaggtctcaacccttttgtctgcctcttagacttctgctttccacacctggcactgctgtgctgtgcccaagttgtggtgctgacaaagcttggaagagcctgcaggtgctgctgcgtggcatagcccagacacagaagaggctggttcttacgatggcacccagtgagcactcccaagtctacagagtgatagccttccgtaacccaactctcctggactgccttgaatatcccctcccagtcaccttgtggcaagcccctgcccatctgggaaaataccccatcattcatgctactgccaacctggggagccagggctatgggagcagcttttttttcccccctagaaacgtttggaacaatctaaaagtttaaagctcgaaaacaattgtaataatgctaaagaaaaagtcatccaatctaaccacatcaatattgtcattcctgtattcacccgtccagaccttgttcacactctcacatgtttagagttgcaatcgtaatgtacagatggttttataatctgatttgttttcctcttaacgttagaccacaaatagtgctcgctttctatgtagtttggtaattatcattttagaagactctaccagactgtgtattcattgaagtcagatgtggtaactgttaaattgctgtgtatctgatagctctttggcagtctatatgtttgtataatgaatgagagaataagtcatgttccttcaagatcatgtaccccaatttacttgccattactcaattgataaacatttaacttgtttccaatgtttagcaaatacatattttatagaacttcc

SEQ ID NO: 117187 - DNA, 1097 bp, Homo sapiens
  Payload ID: 2872
  Gene Symbol: CXCL1
  Gene Name: chemokine (C-X-C motif) ligand 1 (melanoma growth stimulating activity, alpha)
  Uniprot ID: P09341
  ENST ID: ENST00000395761
  CDS Start-End: 68-391
gccgcaggcacctcctcgccagctcttccgctcctctcacagccgccagacccgcctgctgagccccatggcccgcgctgctctctccgccgcccccagcaatccccggctcctgcgagtggcactgctgctcctgctcctggtagccgctggccggcgcgcagcaggagcgtccgtggccactgaactgcgctgccagtgcttgcagaccctgcagggaattcaccccaagaacatccaaagtgtgaacgtgaagtcccccggaccccactgcgcccaaaccgaagtcatagccacactcaagaatgggcggaaagcttgcctcaatcctgcatcccccatagttaagaaaatcatcgaaaagatgctgaacagtgacaaatccaactgaccagaagggaggaggaagctcactggtggctgttcctgaaggaggccctgcccttataggaacagaagaggaaagagagacacagctgcagaggccacctggattgtgcctaatgtgtttgagcatcgcttaggagaagtcttctatttatttatttattcattagttttgaagattctatgttaatattttaggtgtaaaataattaagggtatgattaactctacctgcacactgtcctattatattcattctttttgaaatgtcaaccccaagttagttcaatctggattcatatttaatttgaaggtagaatgttttcaaatgttctccagtcattatgttaatatttctgaggagcctgcaacatgccagccactgtgatagaggctggcggatccaagcaaatggccaatgagatcattgtgaaggcaggggaatgtatgtgcacatctgttttgtaactgtttagatgaatgtcagttgttatttattgaaatgatttcacagtgtgtggtcaacatttctcatgttgaaactttaagaactaaaatgttctaaatatcccttggacattttatgtctttcttgtaaggcatactgccttgtttaatggtagttttacagtgtttctggcttagaacaaaggggcttaattattgatgttttcatagagaatataaaaataaagcacttatagaaaaaa

SEQ ID NO: 117188 - DNA, 1176 bp, Homo sapiens
  Payload ID: 2873
  Gene Symbol: CXCL10
  Gene Name: chemokine (C-X-C motif) ligand 10
  Uniprot ID: P02778
  ENST ID: ENST00000306602
  CDS Start-End: 67-363
gagacattcctcaattgcttagacatattctgagcctacagcagaggaacctccagtctcagcaccatgaatcaaactgccattctgatttgctgccttatctttctgactctaagtggcattcaaggagtacctctctctagaactgtacgctgtacctgcatcagcattagtaatcaacctgttaatccaaggtctttagaaaaacttgaaattattcctgcaagccaattttgtccacgtgttgagatcattgctacaatgaaaaagaagggtgagaagagatgtctgaatccagaatcgaaggccatcaagaatttactgaaagcagttagcaaggaaaggtctaaaagatctccttaaaaccagaggggagcaaaatcgatgcagtgcttccaaggatggaccacacagaggctgcctctcccatcacttccctacatggagtatatgtcaagccataattgttcttagtttgcagttacactaaaaggtgaccaatgatggtcaccaaatcagctgctactactcctgtaggaaggttaatgttcatcatcctaagctattcagtaataactctaccctggcactataatgtaagctctactgaggtgctatgttcttagtggatgttctgaccctgcttcaaatatttccctcacctttcccatcttccaagggtactaaggaatctttctgctttggggtttatcagaattctcagaatctcaaataactaaaaggtatgcaatcaaatctgctttttaaagaatgctctttacttcatggacttccactgccatcctcccaaggggcccaaattctttcagtggctacctacatacaattccaaacacatacaggaaggtagaaatatctgaaaatgtatgtgtaagtattcttatttaatgaaagactgtacaaagtagaagtcttagatgtatatatttcctatattgttttcagtgtacatggaataacatgtaattaagtactatgtatcaatgagtaacaggaaaattttaaaaatacagatagatatatgctctgcatgttacataagataaatgtgctgaatggttttcaaaataaaaatgaggtactctcctggaaatattaagaaagactatctaaatgttgaaagatcaaaaggttaataaagtaattataactaag

SEQ ID NO: 117189 - DNA, 1606 bp, Homo sapiens
  Payload ID: 2874
  Gene Symbol: CXCL11
  Gene Name: chemokine (C-X-C motif) ligand 11
  Uniprot ID: O14625
  ENST ID: ENST00000306621
  CDS Start-End: 211-495
agagaacaaaacagaaactcttggaagcaggaaaggtgcatgactcaaagagggaaattcctgtgccataaaaggattgctggtgtataaaatgctctatatatgccaattatcaatttcctttcatgttcagcatttctactccttccaagaagagcagcaaagctgaagtagcagcagcagcaccagcagcaacagcaaaaaacaaacatgagtgtgaagggcatggctatagccttggctgtgatattgtgtgctacagttgttcaaggcttccccatgttcaaaagaggacgctgtctttgcataggccctggggtaaaagcagtgaaagtggcagatattgagaaagcctccataatgtacccaagtaacaactgtgacaaaatagaagtgattattaccctgaaagaaaataaaggacaacgatgcctaaatcccaaatcgaagcaagcaaggcttataatcaaaaaagttgaaagaaagaatttttaaaaatatcaaaacatatgaagtcctggaaaagagcatctgaaaaacctagaacaagtttaactgtgactactgaaatgacaagaattctacagtaggaaactgagacttttctatggttttgtgactttcaacttttgtacagttatgtgaaggatgaaaggtgggtgaaaggaccaaaaacagaaatacagtcttcctgaatgaatgacaatcagaattccactgcccaaaggagtccaacaattaaatggatttctaggaaaagctaccttaagaaaggctggttaccatcggagtttacaaagtgctttcacgttcttacttgttgcattatacattcatgcatttctaggctagagaaccttctagatttgatgcttacaactattctgttgtgactatgagaacatttctgtctctagaagtcatctgtctgtattgatctttatgctatattactatctgtggttacggtggagacattgacattattactggagtcaagcccttataagtcaaaagcatctatgtgtcgtaaaacattcctcaaacattttttcatgcaaatacacacttctttccccaaacatcatgtagcacatcaatatgtagggagacattcttatgcatcatttggtttgttttataaccaattcattaaatgtaattcataaaatgtactatgaaaaaaattatacgctatgggatactggcaaaagtgcacatatttcataaccaaattagtagcaccagtcttaatttgatgtttttcaacttttattcattgagatgttttgaagcaattaggatatgtgtgtttactgtactttttgttttgatccgtttgtataaatgatagcaatatcttggacacatctgaaatacaaaatgtttttgtctaccaaagaaaaatgttgaaaaataagcaaatgtatacctagcaatcacttttactttttgtaattctgtctcttagaaaaatacataatctaatcaatttctttgttcatgcctatatactgtaaaatttaggtatactcaagactagtttaaagaatcaaagtcatttttttctctaataaactaccacaacctttcttttttaaaaaaa

SEQ ID NO: 117190 - DNA, 767 bp, Homo sapiens
  Payload ID: 2874
  Gene Symbol: CXCL11
  Gene Name: chemokine (C-X-C motif) ligand 11
  Uniprot ID: O14625
  ENST ID: ENST00000503860
  CDS Start-End: 380-664
aagacatcaagacttaaacgaaggaaaggattcaaaagaggagaggaaagtgcattttcatgctagaaaaaccatattatacaaatataaaaaatagggatctctcaggctcaccagatgaggggatgctgtgaaagaaggtaatcttcctcatgtgatgtcagagagtatagagccagaacaagtcacaatcctgaagacacgtctgaccccacacatctacaaagccagcagaaatcaggcagactaacttctacaataaggcagaaagtttgaaatttggaacacacggaaaggacttgcatttctactccttccaagaagagcagcaaagctgaagtagcagcagcagcaccagcagcaacagcaaaaaacaaacatgagtgtgaagggcatggctatagccttggctgtgatattgtgtgctacagttgttcaaggcttccccatgttcaaaagaggacgctgtctttgcataggccctggggtaaaagcagtgaaagtggcagatattgagaaagcctccataatgtacccaagtaacaactgtgacaaaatagaagtgattattaccctgaaagaaaataaaggacaacgatgcctaaatcccaaatcgaagcaagcaaggcttataatcaaaaaagttgaaagaaagaatttttaaaaatatcaaaacatatgaagtcctggaaaagagcatctgaaaaacctagaacaagtttaactgtgactactgaaatgacaagaattctacagtaggaaactga

SEQ ID NO: 117191 - DNA, 1857 bp, Homo sapiens
  Payload ID: 2875
  Gene Symbol: CXCL12
  Gene Name: chemokine (C-X-C motif) ligand 12
  Uniprot ID: P48061
  ENST ID: ENST00000343575
  CDS Start-End: 88-357
actttcactctccgtcagccgcattgcccgctcggcgtccggcccccgacccgcgctcgtccgcccgcccgcccgcccgcccgcgccatgaacgccaaggtcgtggtcgtgctggtcctcgtgctgaccgcgctctgcctcagcgacgggaagcccgtcagcctgagctacagatgcccatgccgattcttcgaaagccatgttgccagagccaacgtcaagcatctcaaaattctcaacactccaaactgtgcccttcagattgtagcccggctgaagaacaacaacagacaagtgtgcattgacccgaagctaaagtggattcaggagtacctggagaaagctttaaacaagtaagcacaacagccaaaaaggactttccgctagacccactcgaggaaaactaaaaccttgtgagagatgaaagggcaaagacgtgggggagggggccttaaccatgaggaccaggtgtgtgtgtggggtgggcacattgatctgggatcgggcctgaggtttgccagcatttagaccctgcatttatagcatacggtatgatattgcagcttatattcatccatgccctgtacctgtgcacgttggaacttttattactggggtttttctaagaaagaaattgtattatcaacagcattttcaagcagttagttccttcatgatcatcacaatcatcatcattctcattctcattttttaaatcaacgagtacttcaagatctgaatttggcttgtttggagcatctcctctgctcccctggggagtctgggcacagtcaggtggtggcttaacagggagctggaaaaagtgtcctttcttcagacactgaggctcccgcagcagcgcccctcccaagaggaaggcctctgtggcactcagataccgactggggctgggcgccgccactgccttcacctcctctttcaacctcagtgattggctctgtgggctccatgtagaagccactattactgggactgtgctcagagacccctctcccagctattcctactctctccccgactccgagagcatgcttaatcttgcttctgcttctcatttctgtagcctgatcagcgccgcaccagccgggaagagggtgattgctggggctcgtgccctgcatccctctcctcccagggcctgccccacagctcgggccctctgtgagatccgtctttggcctcctccagaatggagctggccctctcctggggatgtgtaatggtccccctgcttacccgcaaaagacaagtctttacagaatcaaatgcaattttaaatctgagagctcgctttgagtgactgggttttgtgattgcctctgaagcctatgtatgccatggaggcactaacaaactctgaggtttccgaaatcagaagcgaaaaaatcagtgaataaaccatcatcttgccactaccccctcctgaagccacagcagggtttcaggttccaatcagaactgttggcaaggtgacatttccatgcataaatgcgatccacagaaggtcctggtggtatttgtaactttttgcaaggcatttttttatatatatttttgtgcacatttttttttacgtttctttagaaaacaaatgtatttcaaaatatatttatagtcgaacaattcatatatttgaagtggagccatatgaatgtcagtagtttatacttctctattatctcaaactactggcaatttgtaaagaaatatatatgatatataaatgtgattgcagcttttcaatgttagccacagtgtattttttcacttgtactaaaattgtatcaaatgtgacattatatgcactagcaataaaatgctaattgtttcatggta

SEQ ID NO: 117192 - DNA, 470 bp, Homo sapiens
  Payload ID: 2875
  Gene Symbol: CXCL12
  Gene Name: chemokine (C-X-C motif) ligand 12
  Uniprot ID: P48061
  ENST ID: ENST00000374426
  CDS Start-End: 39-398
cccgcgctcgtccgcccgcccgcccgcccgcccgcgccatgaacgccaaggtcgtggtcgtgctggtcctcgtgctgaccgcgctctgcctcagcgacgggaagcccgtcagcctgagctacagatgcccatgccgattcttcgaaagccatgttgccagagccaacgtcaagcatctcaaaattctcaacactccaaactgtgcccttcagattgtagcccggctgaagaacaacaacagacaagtgtgcattgacccgaagctaaagtggattcaggagtacctggagaaagctttaaacaaggggcgcagagaagaaaaagtggggaaaaaagaaaagataggaaaaaagaagcgacagaagaagagaaaggctgcccagaaaaggaaaaactagttatctgccacctcgagatggaccacagttcacttgctctcggcgctttgtaaatttgctcgatcctcctcc

SEQ ID NO: 117193 - DNA, 3532 bp, Homo sapiens
  Payload ID: 2875
  Gene Symbol: CXCL12
  Gene Name: chemokine (C-X-C motif) ligand 12
  Uniprot ID: P48061
  ENST ID: ENST00000374429
  CDS Start-End: 88-369
actttcactctccgtcagccgcattgcccgctcggcgtccggcccccgacccgcgctcgtccgcccgcccgcccgcccgcccgcgccatgaacgccaaggtcgtggtcgtgctggtcctcgtgctgaccgcgctctgcctcagcgacgggaagcccgtcagcctgagctacagatgcccatgccgattcttcgaaagccatgttgccagagccaacgtcaagcatctcaaaattctcaacactccaaactgtgcccttcagattgtagcccggctgaagaacaacaacagacaagtgtgcattgacccgaagctaaagtggattcaggagtacctggagaaagctttaaacaagaggttcaagatgtgagagggtcagacgcctgaggaacccttacagtaggagcccagctctgaaaccagtgttagggaagggcctgccacagcctcccctgccagggcagggccccaggcattgccaagggctttgttttgcacactttgccatattttcaccatttgattatgtagcaaaatacatgacatttatttttcatttagtttgattattcagtgtcactggcgacacgtagcagcttagactaaggccattattgtacttgccttattagagtgtctttccacggagccactcctctgactcagggctcctgggttttgtattctctgagctgtgcaggtggggagactgggctgagggagcctggccccatggtcagccctagggtggagagccaccaagagggacgcctgggggtgccaggaccagtcaacctgggcaaagcctagtgaaggcttctctctgtgggatgggatggtggagggccacatgggaggctcacccccttctccatccacatgggagccgggtctgcctcttctgggagggcagcagggctaccctgagctgaggcagcagtgtgaggccagggcagagtgagacccagccctcatcccgagcacctccacatcctccacgttctgctcatcattctctgtctcatccatcatcatgtgtgtccacgactgtctccatggccctgcaaaaggactctcaggaccaaagctttcatgtaaactgtgcaccaagcaggaaatgaaaatgtcttgtgttacctgaaaacactgtgcacatctgtgtcttgtttggaatattgtccattgtccaatcctatgtttttgttcaaagccagcgtcctcctctgtgaccaatgtcttgatgcatgcactgttccccctgtgcagccgctgagcgaggagatgctccttgggccctttgagtgcagtcctgatcagagccgtggtcctttggggtgaactaccttggttcccccactgatcacaaaaacatggtgggtccatgggcagagcccaagggaattcggtgtgcaccagggttgaccccagaggattgctgccccatcagtgctccctcacatgtcagtaccttcaaactagggccaagcccagcactgcttgaggaaaacaagcattcacaacttgtttttggtttttaaaacccagtccacaaaataaccaatcctggacatgaagattctttcccaattcacatctaacctcatcttcttcaccatttggcaatgccatcatctcctgccttcctcctgggccctctctgctctgcgtgtcacctgtgcttcgggcccttcccacaggacatttctctaagagaacaatgtgctatgtgaagagtaagtcaacctgcctgacatttggagtgttccccttccactgagggcagtcgatagagctgtattaagccacttaaaatgttcacttttgacaaaggcaagcacttgtgggtttttgttttgtttttcattcagtcttacgaatacttttgccctttgattaaagactccagttaaaaaaaattttaatgaagaaagtggaaaacaaggaagtcaaagcaaggaaactatgtaacatgtaggaagtaggaagtaaattatagtgatgtaatcttgaattgtaactgttcttgaatttaataatctgtagggtaattagtaacatgtgttaagtattttcataagtatttcaaattggagcttcatggcagaaggcaaacccatcaacaaaaattgtcccttaaacaaaaattaaaatcctcaatccagctatgttatattgaaaaaatagagcctgagggatctttactagttataaagatacagaactctttcaaaaccttttgaaattaacctctcactataccagtataattgagttttcagtggggcagtcattatccaggtaatccaagatattttaaaatctgtcacgtagaacttggatgtacctgcccccaatccatgaaccaagaccattgaattcttggttgaggaaacaaacatgaccctaaatcttgactacagtcaggaaaggaatcatttctatttctcctccatgggagaaaatagataagagtagaaactgcagggaaaattatttgcataacaattcctctactaacaatcagctccttcctggagactgcccagctaaagcaatatgcatttaaatacagtcttccatttgcaagggaaaagtctcttgtaatccgaatctctttttgctttcgaactgctagtcaagtgcgtccacgagctgtttactagggatccctcatctgtccctccgggacctggtgctgcctctacctgacactcccttgggctccctgtaacctcttcagaggccctcgctgccagctctgtatcaggacccagaggaaggggccagaggctcgttgactggctgtgtgttgggattgagtctgtgccacgtgtttgtgctgtggtgtgtccccctctgtccaggcactgagataccagcgaggaggctccagagggcactctgcttgttattagagattacctcctgagaaaaaaggttccgcttggagcagaggggctgaatagcagaaggttgcacctcccccaaccttagatgttctaagtctttccattggatctcattggacccttccatggtgtgatcgtctgactggtgttatcaccgtgggctccctgactgggagttgatcgcctttcccaggtgctacacccttttccagctggatgagaatttgagtgctctgatccctctacagagcttccctgactcattctgaaggagccccattcctgggaaatattccctagaaacttccaaatcccctaagcagaccactgataaaaccatgtagaaaatttgttattttgcaacctcgctggactctcagtctctgagcagtgaatgattcagtgttaaatgtgatgaatactgtattttgtattgtttcaattgcatctcccagataatgtgaaaatggtccaggagaaggccaattcctatacgcagcgtgctttaaaaaataaataagaaacaactctttgagaaacaacaatttctactttgaagtcataccaatgaaaaaatgtatatgcacttataattttcctaataaagttctgtactcaaatgta

SEQ ID NO: 117194 - DNA, 665 bp, Homo sapiens
  Payload ID: 2875
  Gene Symbol: CXCL12
  Gene Name: chemokine (C-X-C motif) ligand 12
  Uniprot ID: P48061
  ENST ID: ENST00000395793
  CDS Start-End: 88-399
actttcactctccgtcagccgcattgcccgctcggcgtccggcccccgacccgcgctcgtccgcccgcccgcccgcccgcccgcgccatgaacgccaaggtcgtggtcgtgctggtcctcgtgctgaccgcgctctgcctcagcgacgggaagcccgtcagcctgagctacagatgcccatgccgattcttcgaaagccattattgtacttgccttattagagtgtctttccacggagccactcctctgactcagggctcctgggttttgtattctctgagctgtgcaggtggggagactgggctgagggagcctggccccatggtcagccctagggtggagagccaccaagagggacgcctgggggtgccaggaccagtcaacctgggcaaagcctagtgaaggcttctctctgtgggatgggatggtggagggccacatgggaggctcacccccttctccatccacatgggagccgggtctgcctcttctgggagggcagcagggctaccctgagctgaggcagcagtgtgaggccagggcagagtgagacccagccctcatcccgagcacctccacatcctccacgttctgctcatcattctctgtctcatccatcatcatgtgtgtccacgactgtctccatggccctgcaaaaggactct

SEQ ID NO: 117195 - DNA, 1052 bp, Homo sapiens
  Payload ID: 2875
  Gene Symbol: CXCL12
  Gene Name: chemokine (C-X-C motif) ligand 12
  Uniprot ID: P48061
  ENST ID: ENST00000395794
  CDS Start-End: 45-467
ccccgacccgcgctcgtccgcccgcccgcccgcccgcccgcgccatgaacgccaaggtcgtggtcgtgctggtcctcgtgctgaccgcgctctgcctcagcgacgggaagcccgtcagcctgagctacagatgcccatgccgattcttcgaaagccatgttgccagagccaacgtcaagcatctcaaaattctcaacactccaaactgtgcccttcagattgtagcccggctgaagaacaacaacagacaagtgtgcattgacccgaagctaaagtggattcaggagtacctggagaaagctttaaacaacctgatcagcgccgcaccagccgggaagagggtgattgctggggctcgtgccctgcatccctctcctcccagggcctgccccacagctcgggccctctgtgagatccgtctttggcctcctccagaatggagctggccctctcctggggatgtgtaatggtccccctgcttacccgcaaaagacaagtctttacagaatcaaatgcaattttaaatctgagagctcgctttgagtgactgggttttgtgattgcctctgaagcctatgtatgccatggaggcactaacaaactctgaggtttccgaaatcagaagcgaaaaaatcagtgaataaaccatcatcttgccactaccccctcctgaagccacagcagggtttcaggttccaatcagaactgttggcaaggtgacatttccatgcataaatgcgatccacagaaggtcctggtggtatttgtaactttttgcaaggcatttttttatatatatttttgtgcacatttttttttacgtttctttagaaaacaaatgtatttcaaaatatatttatagtcgaacaattcatatatttgaagtggagccatatgaatgtcagtagtttatacttctctattatctcaaactactggcaatttgtaaagaaatatatatgatatataaatgtgattgcagcttttcaatgttagccacagtgtattttttcacttgtactaaaattgtatcaaatgtgacattatatgca

SEQ ID NO: 117196 - DNA, 404 bp, Homo sapiens
  Payload ID: 2875
  Gene Symbol: CXCL12
  Gene Name: chemokine (C-X-C motif) ligand 12
  Uniprot ID: P48061
  ENST ID: ENST00000395795
  CDS Start-End: 93-404
gccgcactttcactctccgtcagccgcattgcccgctcggcgtccggcccccgacccgcgctcgtccgcccgcccgcccgcccgcccgcgccatgaacgccaaggtcgtggtcgtgctggtcctcgtgctgaccgcgctctgcctcagcgacgggaagcccgtcagcctgagctacagatgcccatgccgattcttcgaaagccattattgtacttgccttattagagtgtctttccacggagccactcctctgactcagggctcctgggttttgtattctctgagctgtgcaggtggggagactgggctgagggagcctggccccatggtcagccctagggtggagagccaccaagagggacgcctgggggtgccaggaccagtcaacctgggcaaagcctag

SEQ ID NO: 117197 - DNA, 1203 bp, Homo sapiens
  Payload ID: 2876
  Gene Symbol: CXCL13
  Gene Name: chemokine (C-X-C motif) ligand 13
  Uniprot ID: O43927
  ENST ID: ENST00000286758
  CDS Start-End: 79-408
gagaagatgtttgaaaaaactgactctgctaatgagcctggactcagagctcaagtctgaactctacctccagacagaatgaagttcatctcgacatctctgcttctcatgctgctggtcagcagcctctctccagtccaaggtgttctggaggtctattacacaagcttgaggtgtagatgtgtccaagagagctcagtctttatccctagacgcttcattgatcgaattcaaatcttgccccgtgggaatggttgtccaagaaaagaaatcatagtctggaagaagaacaagtcaattgtgtgtgtggaccctcaagctgaatggatacaaagaatgatggaagtattgagaaaaagaagttcttcaactctaccagttccagtgtttaagagaaagattccctgatgctgatatttccactaagaacacctgcattcttcccttatccctgctctggattttagttttgtgcttagttaaatcttttccaggaaaaagaacttccccatacaaataagcatgagactatgtaaaaataaccttgcagaagctgatggggcaaactcaagcttcttcactcacagcaccctatatacacttggagtttgcattcttattcatcagggaggaaagtttctttgaaaatagttattcagttataagtaatacaggattattttgattatatacttgttgtttaatgtttaaaatttcttagaaaacaatggaatgagaatttaagcctcaaatttgaacatgtggcttgaattaagaagaaaattatggcatatattaaaagcaggcttctatgaaagactcaaaaagctgcctgggaggcagatggaacttgagcctgtcaagaggcaaaggaatccatgtagtagatatcctctgcttaaaaactcactacggaggagaattaagtcctacttttaaagaatttctttataaaatttactgtctaagattaatagcattcgaagatccccagacttcatagaatactcagggaaagcatttaaagggtgatgtacacatgtatcctttcacacatttgccttgacaaacttctttcactcacatctttttcactgactttttttgtggggggcggggccggggggactctggtatctaattctttaatgattcctataaatctaatgacattcaataaagttgagcaaacattttacttaa

SEQ ID NO: 117198 - DNA, 1971 bp, Homo sapiens
  Payload ID: 2877
  Gene Symbol: CXCL14
  Gene Name: chemokine (C-X-C motif) ligand 14
  Uniprot ID: O95715
  ENST ID: ENST00000337225
  CDS Start-End: 466-801
aatgtgtgcgcgctgtggtatgggtgtgcaagtgtgcgaaggcggcgtgttgtgtgagcgagagggtagcggatgtgtgtgtgcgtgtgcgcgcgtggctccgggtgtgcgccgctgcgatagcgggtcctttcccggggcgggcgacgggcgggctgggaaggtctcctcccctcaccacattgagaaatctcagtgagtcaccgagtggttctgcatattaatgagctcgctcgctgcgagggcaggagcggatttaaaagaggccagggcgggcggagggaggctgtggagagagcgcggagacaagcgcagagcgcagcgcacggccacagacagccctgggcatccaccgacggcgcagccggagccagcagagccggaaggcgcgccccgggcagagaaagccgagcagagctgggtggcgtctccgggccgccgctccgacgggccagcgccctccccatgtccctgctcccacgccgcgcccctccggtcagcatgaggctcctggcggccgcgctgctcctgctgctgctggcgctgtacaccgcgcgtgtggacgggtccaaatgcaagtgctcccggaagggacccaagatccgctacagcgacgtgaagaagctggaaatgaagccaaagtacccgcactgcgaggagaagatggttatcatcaccaccaagagcgtgtccaggtaccgaggtcaggagcactgcctgcaccccaagctgcagagcaccaagcgcttcatcaagtggtacaacgcctggaacgagaagcgcagggtctacgaagaatagggtgaaaaacctcagaagggaaaactccaaaccagttgggagacttgtgcaaaggactttgcagattaaaaaaaaaaaaaaaaaaaaaaaaaaaaaaaaaaaaaaaaaaagcctttctttctcacaggcataagacacaaattatatattgttatgaagcactttttaccaacggtcagtttttacattttatagctgcgtgcgaaaggcttccagatgggagacccatctctcttgtgctccagacttcatcacaggctgctttttatcaaaaaggggaaaactcatgcctttcctttttaaaaaatgcttttttgtatttgtccatacgtcactatacatctgagctttataagcgcccgggaggaacaatgagcttggtggacacatttcattgcagtgttgctccattcctagcttgggaagcttccgcttagaggtcctggcgcctcggcacagctgccacgggctctcctgggcttatggccggtcacagcctcagtgtgactccacagtggcccctgtagccgggcaagcaggagcaggtctctctgcatctgttctctgaggaactcaagtttggttgccagaaaaatgtgcttcattcccccctggttaatttttacacaccctaggaaacatttccaagatcctgtgatggcgagacaaatgatccttaaagaaggtgtggggtctttcccaacctgaggatttctgaaaggttcacaggttcaatatttaatgcttcagaagcatgtgaggttcccaacactgtcagcaaaaaccttaggagaaaacttaaaaatatatgaatacatgcgcaatacacagctacagacacacattctgttgacaagggaaaaccttcaaagcatgtttctttccctcaccacaacagaacatgcagtactaaagcaatatatttgtgattccccatgtaattcttcaatgttaaacagtgcagtcctctttcgaaagctaagatgaccatgcgccctttcctctgtacatatacccttaagaacgccccctccacacactgccccccagtatatgccgcattgtactgctgtgttatatgctatgtacatgtcagaaaccattagcattgcatgcaggtttcatattctttctaagatggaaagtaataaaatatatttgaaatgtacc

SEQ ID NO: 117199 - DNA, 1760 bp, Homo sapiens
  Payload ID: 2877
  Gene Symbol: CXCL14
  Gene Name: chemokine (C-X-C motif) ligand 14
  ENST ID: ENST00000512158
  CDS Start-End: 287-586
gcatattaatgagctcgctcgctgcgagggcaggagcggatttaaaagaggccagggcgggcggagggaggctgtggagagagcgcggagacaagcgcagagcgcagcgcacggccacagacagccctgggcatccaccgacggcgcagccggagccagcagagccggaaggcgcgccccgggcagagaaagccgagcagagctgggtggcgtctccgggccgccgctccgacgggccagcgccctccccatgtccctgctcccacgccgcgcccctccggtcagcatgaggctcctggcggccgcgctgctcctgctgctgctggcgctgtacaccgcgcgtgtggacgggtccaaatgcaagtgctcccggaagggacccaagatccgctacagcgacgtgaagaagctggaaatgaagccaaagtacccgcactgcgaggagaagatggttatcatcaccaccaagagcgtgtccaggtaccgaggtcaggagcactgcctgcaccccaagctgcagagcaccaagcgcttcatcaagtggtacaacgcctggaacgagaagcgcagggtctacgaagaatagggtgaaaaacctcagaagggaaaactccaaaccagttgggagacttgtgcaaaggactttgcagattaaaaaaaaaaaaaaaaaaaaaaaaaaaaaaaaaaaaaaaaaaagcctttctttctcacaggcataagacacaaattatatattgttatgaagcactttttaccaacggtcagtttttacattttatagctgcgtgcgaaaggcttccagatgggagacccatctctcttgtgctccagacttcatcacaggctgctttttatcaaaaaggggaaaactcatgcctttcctttttaaaaaatgcttttttgtatttgtccatacgtcactatacatctgagctttataagcgcccgggaggaacaatgagcttggtggacacatttcattgcagtgttgctccattcctagcttgggaagcttccgcttagaggtcctggcgcctcggcacagctgccacgggctctcctgggcttatggccggtcacagcctcagtgtgactccacagtggcccctgtagccgggcaagcaggagcaggtctctctgcatctgttctctgaggaactcaagtttggttgccagaaaaatgtgcttcattcccccctggttaatttttacacaccctaggaaacatttccaagatcctgtgatggcgagacaaatgatccttaaagaaggtgtggggtctttcccaacctgaggatttctgaaaggttcacaggttcaatatttaatgcttcagaagcatgtgaggttcccaacactgtcagcaaaaaccttaggagaaaacttaaaaatatatgaatacatgcgcaatacacagctacagacacacattctgttgacaagggaaaaccttcaaagcatgtttctttccctcaccacaacagaacatgcagtactaaagcaatatatttgtgattccccatgtaattcttcaatgttaaacagtgcagtcctctttcgaaagctaagatgaccatgcgccctttcctctgtacatatacccttaagaacgccccctccacacactgccccccagtatatgccgcattgtactgctgtgttatatgctatgtacatgtcagaaaccattagcattgcatgcaggtttcatattctttctaagatggaaagtaataaaatatatttgaaatgtaccaaaa

SEQ ID NO: 117200 - DNA, 2222 bp, Homo sapiens
  Payload ID: 2878
  Gene Symbol: CXCL16
  Gene Name: chemokine (C-X-C motif) ligand 16
  Uniprot ID: Q9H2A7
  ENST ID: ENST00000293778
  CDS Start-End: 424-1245
cccggatcggggaagtgaaagtgcctcggaggaggagggccggtccggcagtgcagccgcctcacaggtcggcggacgggccaggcgggcggcctcctgaaccgaaccgaatcggctcctcgggccgtcgtcctcccgcccctcctcgcccgccgccggagttttctttcggtttcttccaagattcctggccttccctcgacggagccgggcccagtgcgggggcgcagggcgcgggagctccacctcctcggctttccctgcgtccagaggctggcatggcgcgggccgagtactgagcgcacggtcggggcacagcagggccggggggtgcagctggctcgcgcctcctctccggccgccgtctcctccggtccccggcgaaagccattgagacaccagctggacgtcacgcgccggagcatgtctgggagtcagagcgaggtggctccatccccgcagagtccgcggagccccgagatgggacgggacttgcggcccgggtcccgcgtgctcctgctcctgcttctgctcctgctggtgtacctgactcagccaggcaatggcaacgagggcagcgtcactggaagttgttattgtggtaaaagaatttcttccgactccccgccatcggttcagttcatgaatcgtctccggaaacacctgagagcttaccatcggtgtctatactacacgaggttccagctcctttcctggagcgtgtgtgggggcaacaaggacccatgggttcaggaattgatgagctgtcttgatctcaaagaatgtggacatgcttactcggggattgtggcccaccagaagcatttacttcctaccagccccccaatttctcaggcctcagagggggcatcttcagatatccacacccctgcccagatgctcctgtccaccttgcagtccactcagcgccccaccctcccagtaggatcactgtcctcggacaaagagctcactcgtcccaatgaaaccaccattcacactgcgggccacagtctggcagctgggcctgaggctggggagaaccagaagcagccggaaaaaaatgctggtcccacagccaggacatcagccacagtgccagtcctgtgcctcctggccatcatcttcatcctcaccgcagccctttcctatgtgctgtgcaagaggaggagggggcagtcaccgcagtcctctccagatctgccggttcattatatacctgtggcacctgactctaatacctgagccaagaatggaagcttgtgaggagacggactctatgttgcccaggctgttatggaactcctgagtcaagtgatcctcccaccttggcctctgaaggtgcgaggattataggcgtcacctaccacatccagcctacacgtatttgttaatatctaacataggactaaccagccactgccctctcttaggcccctcatttaaaaacggttatactataaaatctgcttttcacactgggtgataataacttggacaaattctatgtgtattttgttttgttttgctttgctttgttttgagacggagtctcgctctgtcatccaggctggagtgcagtggcatgatctcggctcactgcaacccccatctcccaggttcaagcgattctcctgcctcctcctgagtagctgggactacaggtgctcaccaccacacccggctaattttttgtatttttagtagagacggggtttcaccatgttgaccaggctggtctcgaactcctgacctggtgatctgcccacccaggcctcccaaagtgctgggattaaaggtgtgagccaccatgcctggccctatgtgtgttttttaactactaaaaattatttttgtaatgattgagtcttctttatggaaacaactggcctcagcccttgcgcccttactgtgattcctggcttcattttttgctgatggttccccctcgtcccaaatctctctcccagtacaccagttgttcctcccccacctcagccctctcctgcatcctcctgtacccgcagcgaaggcctgggctttcccaccctccctccttagcaggtgccgtgctgggacaccatacgggttggtttcacctcctcagtcccttgcctaccccagtgagagtctgatcttgtttttattgttattgcttttattattattgcttttattatcattaaaactctagttcttgttttgtctctccgaatgaagaa

SEQ ID NO: 117201 - DNA, 1668 bp, Homo sapiens
  Payload ID: 2878
  Gene Symbol: CXCL16
  Gene Name: chemokine (C-X-C motif) ligand 16
  Uniprot ID: Q9H2A7
  ENST ID: ENST00000574412
  CDS Start-End: 527-1348
tccgcgggtggctgccccgcaggtgcgcgcggccggggctggcggcgactctctccaccgggccgcccgggaggctcatgcagcgcggctgggtcccgcggcgcccggatcggggaagtgaaagtgcctcggaggaggagggccggtccggcagtgcagccgcctcacaggtcggcggacgggccaggcgggcggcctcctgaaccgaaccgaatcggctcctcgggccgtcgtcctcccgcccctcctcgcccgccgccggagttttctttcggtttcttccaagattcctggccttccctcgacggagccgggcccagtgcgggggcgcagggcgcgggagctccacctcctcggctttccctgcgtccagaggctggcatggcgcgggccgagtactgagcgcacggtcggggcacagcagggccggggggtgcagctggctcgcgcctcctctccggccgccgtctcctccggtccccggcgaaagccattgagacaccagctggacgtcacgcgccggagcatgtctgggagtcagagcgaggtggctccatccccgcagagtccgcggagccccgagatgggacgggacttgcggcccgggtcccgcgtgctcctgctcctgcttctgctcctgctggtgtacctgactcagccaggcaatggcaacgagggcagcgtcactggaagttgttattgtggtaaaagaatttcttccgactccccgccatcggttcagttcatgaatcgtctccggaaacacctgagagcttaccatcggtgtctatactacacgaggttccagctcctttcctggagcgtgtgtgggggcaacaaggacccatgggttcaggaattgatgagctgtcttgatctcaaagaatgtggacatgcttactcggggattgtggcccaccagaagcatttacttcctaccagccccccaatttctcaggcctcagagggggcatcttcagatatccacacccctgcccagatgctcctgtccaccttgcagtccactcagcgccccaccctcccagtaggatcactgtcctcggacaaagagctcactcgtcccaatgaaaccaccattcacactgcgggccacagtctggcagctgggcctgaggctggggagaaccagaagcagccggaaaaaaatgctggtcccacagccaggacatcagccacagtgccagtcctgtgcctcctggccatcatcttcatcctcaccgcagccctttcctatgtgctgtgcaagaggaggagggggcagtcaccgcagtcctctccagatctgccggttcattatatacctgtggcacctgactctaatacctgagccaagaatggaagcttgtgagggtaaactgtggcttattcttacaaaaagtgtaataaaggagactgacccctgacaacatggtaggcactgtatacatacttgtttttgttttttgttttttagagacggactctatgttgcccaggctgttatggaactcctgagtcaagtgatcctcccaccttggcctctgaaggtgcgaggattataggcgtcacctaccacatccagcctacacgtatttgttaatatctaacataggactaaccagccactgccctctcttaggcccctcatttaaaaacggttatactata

SEQ ID NO: 117202 - DNA, 589 bp, Homo sapiens
  Payload ID: 2878
  Gene Symbol: CXCL16
  Gene Name: chemokine (C-X-C motif) ligand 16
  ENST ID: ENST00000573123
  CDS Start-End: 309-589
aaagccagccagccgcctggggttggggacagaggcccggggacgcctggctccgggcgggattatggatgttgtcgggggcgtgatgatgtgtgggttgagcctggcgctctgaccctgggtccaccgagaggctgtcatggggctgtggattggatgccagggaacagcggagtggggaccctgggcctgggaatgggtgccgaccacctccgtcccgcgcaggcaatggcaacgagggcagcgtcactggaagttgttattgtggtaaaagaatttcttccgactccccgccatcggttcagttcatgaatcgtctccggaaacacctgagagcttaccatcggtgtctatactacacgaggttccagctcctttcctggagcgtgtgtgggggcaacaaggacccatgggttcaggaattgatgagctgtcttgatctcaaagaatgtggacatgcttactcggggattgtggcccaccagaagcatttacttcctaccagccccccaatttctcaggcctcagagggggcatcttcagatatccacacccctgcccagatgctcctgtccaccttgcagtccac

SEQ ID NO: 117203 - DNA, 748 bp, Homo sapiens
  Payload ID: 2879
  Gene Symbol: CXCL17
  Gene Name: chemokine (C-X-C motif) ligand 17
  ENST ID: ENST00000341918
  CDS Start-End: 21-209
cagctgcaccgacagttgcgatgaaagttctaatctcttccctcctcctgttgctgccactaatgctgatgtccatggtctctagcagcctgaatccaggggtcgccagaggccacagggaccgaggccaggcttctaggagatggctccaggaaggcggccaagaatgtgagtgcaaagcaatgctgttgttccagattggttcctgagagccccgagaagaaaattcatgacagtgtctgggctgccaaagaagcagtgcccctgtgatcatttcaagggcaatgtgaagaaaacaagacaccaaaggcaccacagaaagccaaacaagcattccagagcctgccagcaatttctcaaacaatgtcagctaagaagctttgctctgcctttgtaggagctctgagcgcccactcttccaattaaacattctcagccaagaagacagtgagcacacctaccagacactcttcttctcccacctcactctcccactgtacccacccctaaatcattccagtgctctcaaaaagcatgtttttcaagatcattttgtttgttgctctctctagtgtcttcttctctcgtcagtcttagcctgtgccctccccttacccaggcttaggcttaattacctgaaagattccaggaaactgtagcttcctagctagtgtcatttaaccttaaatgcaatcaggaaagtagcaaacagaagtcaataaatatttttaaatgtcacagatcaaaa

SEQ ID NO: 117204 - DNA, 1172 bp, Homo sapiens
  Payload ID: 2879
  Gene Symbol: CXCL17
  Gene Name: chemokine (C-X-C motif) ligand 17
  Uniprot ID: Q6UXB2
  ENST ID: ENST00000601181
  CDS Start-End: 217-576
gattcccataaagcacatggtctaatctgttacgtaacagcaagacagcgtcacctcacctgttctcgccctcaaatgggaacgctggcctgggactaaagcatagaccaccaggctgagtatcctgacctgagtcatccccagggatcaggagcctccagcagggaaccttccattatattcttcaagcaacttacagctgcaccgacagttgcgatgaaagttctaatctcttccctcctcctgttgctgccactaatgctgatgtccatggtctctagcagcctgaatccaggggtcgccagaggccacagggaccgaggccaggcttctaggagatggctccaggaaggcggccaagaatgtgagtgcaaagattggttcctgagagccccgagaagaaaattcatgacagtgtctgggctgccaaagaagcagtgcccctgtgatcatttcaagggcaatgtgaagaaaacaagacaccaaaggcaccacagaaagccaaacaagcattccagagcctgccagcaatttctcaaacaatgtcagctaagaagctttgctctgcctttgtaggagctctgagcgcccactcttccaattaaacattctcagccaagaagacagtgagcacacctaccagacactcttcttctcccacctcactctcccactgtacccacccctaaatcattccagtgctctcaaaaagcatgtttttcaagatcattttgtttgttgctctctctagtgtcttcttctctcgtcagtcttagcctgtgccctccccttacccaggcttaggcttaattacctgaaagattccaggaaactgtagcttcctagctagtgtcatttaaccttaaatgcaatcaggaaagtagcaaacagaagtcaataaatatttttaaatgtcacagatcaaaattgtttccttcaaatggggtctgccaattcacaaccagatgacccattttaccctattcactgcagactgaatccagattctacacatacttatccccaccaagaccctcactctgtctccattggcctacttgttcatctttcactcattcgacaaatctttctgaggtaagagcgaggtgggacaaaaaaaaaaaagcataccaatgaaccagacacggtcttattaaagataatataggttt

SEQ ID NO: 117205 - DNA, 1218 bp, Homo sapiens
  Payload ID: 2880
  Gene Symbol: CXCL2
  Gene Name: chemokine (C-X-C motif) ligand 2
  Uniprot ID: P19875
  ENST ID: ENST00000508487
  CDS Start-End: 174-497
cgggatcgatctggagctccgggaatttccctggcccgggactccgggctttccagccccaaccatgcataaaaggggttcgccgttctcggagagccacagagcccgggccacaggcagctccttgccagctctcctcctcgcacagccgctcgaaccgcctgctgagccccatggcccgcgccacgctctccgccgcccccagcaatccccggctcctgcgggtggcgctgctgctcctgctcctggtggccgccagccggcgcgcagcaggagcgcccctggccactgaactgcgctgccagtgcttgcagaccctgcagggaattcacctcaagaacatccaaagtgtgaaggtgaagtcccccggaccccactgcgcccaaaccgaagtcatagccacactcaagaatgggcagaaagcttgtctcaaccccgcatcgcccatggttaagaaaatcatcgaaaagatgctgaaaaatggcaaatccaactgaccagaaggaaggaggaagcttattggtggctgttcctgaaggaggccctgcccttacaggaacagaagaggaaagagagacacagctgcagaggccacctggattgcgcctaatgtgtttgagcatcacttaggagaagtcttctatttatttatttatttatttatttgtttgttttagaagattctatgttaatattttatgtgtaaaataaggttatgattgaatctacttgcacactctcccattatatttattgtttattttaggtcaaacccaagttagttcaatcctgattcatatttaatttgaagatagaaggtttgcagatattctctagtcatttgttaatatttcttcgtgatgacatatcacatgtcagccactgtgatagaggctgaggaatccaagaaaatggccagtgagatcaatgtgacggcagggaaatgtatgtgtgtctattttgtaactgtaaagatgaatgtcagttgttatttattgaaatgatttcacagtgtgtggtcaacatttctcatgttgaagctttaagaactaaaatgttctaaatatcccttggacattttatgtctttcttgtaaggcatactgccttgtttaatgttaattatgcagtgtttccctctgtgttagagcagagaggtttcgatatttattgatgttttcacaaagaacaggaaaataaaatatttaaaaatataaaa

SEQ ID NO: 117206 - DNA, 1075 bp, Homo sapiens
  Payload ID: 2881
  Gene Symbol: CXCL3
  Gene Name: chemokine (C-X-C motif) ligand 3
  Uniprot ID: P19876
  ENST ID: ENST00000296026
  CDS Start-End: 79-402
acacagcccgggtcgcaggcacctccccgccagctctcccgcttctcgcacagcttcccgacgcgtctgctgagccccatggcccacgccacgctctccgccgcccccagcaatccccggctcctgcgggtggcgctgctgctcctgctcctggtggccgccagccggcgcgcagcaggagcgtccgtggtcactgaactgcgctgccagtgcttgcagacactgcagggaattcacctcaagaacatccaaagtgtgaatgtaaggtcccccggaccccactgcgcccaaaccgaagtcatagccacactcaagaatgggaagaaagcttgtctcaaccccgcatcccccatggttcagaaaatcatcgaaaagatactgaacaaggggagcaccaactgacaggagagaagtaagaagcttatcagcgtatcattgacacttcctgcagggtggtccctgcccttaccagagctgaaaatgaaaaagagaacagcagctttctagggacagctggaaaggacttaatgtgtttgactatttcttacgagggttctacttatttatgtatttatttttgaaagcttgtattttaatattttacatgctgttatttaaagatgtgagtgtgtttcatcaaacatagctcagtcctgattatttaattggaatatgatgggttttaaatgtgtcattaaactaatatttagtgggagaccataatgtgtcagccaccttgataaatgacagggtggggaactggagggtggggggattgaaatgcaagcaattagtggatcactgttagggtaagggaatgtatgtacacatctattttttatactttttttttaaaaaaagaatgtcagttgttatttattcaaattatctcacattatgtgttcaacatttttatgctgaagtttcccttagacattttatgtcttgcttgtagggcataatgccttgtttaatgtccattctgcagcgtttctctttcccttggaaaagagaatttatcattactgttacatttgtacaaatgacatgataataaaagttttatgaaaaaaaa

SEQ ID NO: 117207 - DNA, 2538 bp, Homo sapiens
  Payload ID: 2882
  Gene Symbol: CXCL5
  Gene Name: chemokine (C-X-C motif) ligand 5
  Uniprot ID: P42830
  ENST ID: ENST00000296027
  CDS Start-End: 199-543
ccatgagttcagggaatttccccagcatcccaaagcttgagtttcctgtcagtggggagagatgagtgtagataaaaggagtgcagaaggcacgaggaagccacagtgctccggatcctccaatcttcgctcctccaatctccgctcctccacccagttcaggaacccgcgaccgctcgcagcgctctcttgaccactatgagcctcctgtccagccgcgcggcccgtgtccccggtccttcgagctccttgtgcgcgctgttggtgctgctgctgctgctgacgcagccagggcccatcgccagcgctggtcctgccgctgctgtgttgagagagctgcgttgcgtttgtttacagaccacgcaaggagttcatcccaaaatgatcagtaatctgcaagtgttcgccataggcccacagtgctccaaggtggaagtggtagcctccctgaagaacgggaaggaaatttgtcttgatccagaagccccttttctaaagaaagtcatccagaaaattttggacggtggaaacaaggaaaactgattaagagaaatgagcacgcatggaaaagtttcccagtcttcagcagagaagttttctggaggtctctgaacccagggaagacaagaaggaaagattttgttgttgtttgtttatttgtttttccagtagttagctttcttcctggattcctcactttgaagagtgtgaggaaaacctatgtttgccgcttaagctttcagctcagctaatgaagtgtttagcatagtacctctgctatttgctgttattttatctgctatgctattgaagttttggcaattgactatagtgtgagccaggaatcactggctgttaatctttcaaagtgtcttgaattgtaggtgactattatatttccaagaaatattccttaagatattaactgagaaggctgtggatttaatgtggaaatgatgtttcataagaattctgttgatggaaatacactgttatcttcacttttataagaaataggaaatattttaatgtttcttggggaatatgttagagaatttccttactcttgattgtgggatactatttaattatttcactttagaaagctgagtgtttcacaccttatctatgtagaatatatttccttattcagaatttctaaaagtttaagttctatgagggctaatatcttatcttcctataattttagacattctttatctttttagtatggcaaactgccatcatttacttttaaactttgattttatatgctatttattaagtattttattaggagtaccataattctggtagctaaatatatattttagatagatgaagaagctagaaaacaggcaaattcctgactgctagtttatatagaaatgtattcttttagtttttaaagtaaaggcaaacttaacaatgacttgtactctgaaagttttggaaacgtattcaaacaatttgaatataaatttatcatttagttataaaaatatatagcgacatcctcgaggccctagcatttctccttggataggggaccagagagagcttggaatgttaaaaacaaaacaaaacaaaaaaaaacaaggagaagttgtccaagggatgtcaattttttatccctctgtatgggttagattttccaaaatcataatttgaagaaggccagcatttatggtagaatatataattatatataaggtggccacgctggggcaagttccctccccactcacagctttggcccctttcacagagtagaacctgggttagaggattgcagaagacgagcgggagcggggagggcagggaagatgcctgtcgggtttttagcacagttcatttcactgggattttgaagcatttctgtctgaatgtaaagcctgttctagtcctggtgggacacactggggttgggggtgggggaagatgcggtaatgaaaccggttagtcagtgttgtcttaatatccttgataatgctgtaaagtttatttttacaaatatttctgtttaagctatttcacctttgtttggaaatccttcccttttaaagagaaaatgtgacacttgtgaaaaggcttgtaggaaagctcctccctttttttctttaaacctttaaatgacaaacctaggtaattaatggttgtgaatttctatttttgctttgtttttaatgaacatttgtctttcagaataggattctgtgataatatttaaatggcaaaaacaaaacataattttgtgcaattaacaaagctactgcaagaaaaataaaacatttcttggtaaaaacgtatgtatttatatattatatatttatatataatatatattatatatttagcattgctgagctttttagatgcctattgtgtatcttttaaaggttttgaccattttgttatgagtaattacatatatattacattcactatattaaaattgtacttttttactatgtgtctcattggttcatagtctttattttgtcctttgaataaacattaaaagatttctaaacttca

SEQ ID NO: 117208 - DNA, 1718 bp, Homo sapiens
  Payload ID: 2883
  Gene Symbol: CXCL6
  Gene Name: chemokine (C-X-C motif) ligand 6
  Uniprot ID: P80162
  ENST ID: ENST00000226317
  CDS Start-End: 255-599
aggcagctcctcccagccacccaccccaccaattcccatcctcccgcccccctccaccaaccccttctttccacactgccccctgagttcagggaatttccccagcatcccaaagcttgagtttcctgccagtcgggagggatgaatgcagataaagggagtgcagaaggcacgaggaaaccaaagtgctctgtatcctccagtctccgcgcctccacccagctcaggaacccgcgaaccctctcttgaccactatgagcctcccgtccagccgcgcggcccgtgtcccgggtccttcgggctccttgtgcgcgctgctcgcgctgctgctcctgctgacgccgccggggcccctcgccagcgctggtcctgtctctgctgtgctgacagagctgcgttgcacttgtttacgcgttacgctgagagtaaaccccaaaacgattggtaaactgcaggtgttccccgcaggcccgcagtgctccaaggtggaagtggtagcctccctgaagaacgggaagcaagtttgtctggacccggaagccccttttctaaagaaagtcatccagaaaattttggacagtggaaacaagaaaaactgagtaacaaaaaagaccatgcatcataaaattgcccagtcttcagcggagcagttttctggagatccctggacccagtaagaataagaaggaagggttggtttttttccattttctacatggattccctactttgaagagtgtgggggaaagcctacgcttctccctgaagtttacagctcagctaatgaagtactaatatagtatttccactatttactgttattttacctgataagttattgaaccctttggcaattgaccatattgtgagcaaagaatcactggttattagtctttcaatgaatattgaattgaagataactattgtatttctatcatacattccttaaagtcttaccgaaaaggctgtggatttcgtatggaaataatgttttattagtgtgctgttgagggaggtatcctgttgttcttactcactcttctcataaaataggaaatattttagttctgtttcttggggaatatgttactctttaccctaggatgctatttaagttgtactgtattagaacactgggtgtgtcataccgttatctgtgcagaatatatttccttattcagaatttctaaaaatttaagttctgtaagggctaatatattctcttcctatggttttagacgtttgatgtcttcttagtatggcataatgtcatgatttactcattaaactttgattttgtatgctattttttcactataggatgactataattctggtcactaaatatacactttagatagatgaagaagcccaaaaacagataaattcctgattgctaatttacatagaaatgtattctcttggttttttaaataaaagcaaaattaacaatgatctgtgctctgaaagttttgaaaatatatttgaacaatttgaatataaattcatcatttagtcctcaaaatatatatagcattgctaagattttcagatatctattgtggatcttttaaaggttttgaccattttgttatgaggaattatacatgtatcacattcactatattaaaattgcacttttattttttcctgtgtgtcatgttggtttttggtacttgtattgtcatttggagaaacaataaaagatttctaaacca

SEQ ID NO: 117209 - DNA, 557 bp, Homo sapiens
  Payload ID: 2883
  Gene Symbol: CXCL6
  Gene Name: chemokine (C-X-C motif) ligand 6
  ENST ID: ENST00000515050
  CDS Start-End: 112-453
gaatgcagataaagggagtgcagaaggcacgaggaaaccaaagtgctctgtatcctccagtctccgcgcctccacccagctcaggaacccgcgaaccctctcttgaccactatgagcctcccgtccagccgcgcggcccgtgtcccgggtccttcgggctccttgtgcgcgctgctcgcgctgctgctcctgctgacgccgccggggcccctcgccagcgctggtcctgtctctgctgtgctgacagagctgcgttgcacttgtttacgcgttacgctgagagtaaaccccaaaacgattggtaaactgcaggtgttccccgcaggcccgcagtgctccaaggtggaagtggtagcctccctgaagaacgggaagcaagtttgtctggacccggaagccccttttctaaagaaagtcatccagaaaattttggacaggtatttgtccctttgatctttgtggtgttttaatatcttctatggaaagcatatacttcacaatgtccttattctctctgtaggatttagactatgcttagaattataaggttgttaaga

SEQ ID NO: 117210 - DNA, 1705 bp, Homo sapiens
  Payload ID: 2884
  Gene Symbol: CXCL8
  Gene Name: chemokine (C-X-C motif) ligand 8
  Uniprot ID: P10145
  ENST ID: ENST00000307407
  CDS Start-End: 154-453
gagggtgcataagttctctagtagggtgatgatataaaaagccaccggagcactccataaggcacaaactttcagagacagcagagcacacaagcttctaggacaagagccaggaagaaaccaccggaaggaaccatctcactgtgtgtaaacatgacttccaagctggccgtggctctcttggcagccttcctgatttctgcagctctgtgtgaaggtgcagttttgccaaggagtgctaaagaacttagatgtcagtgcataaagacatactccaaacctttccaccccaaatttatcaaagaactgagagtgattgagagtggaccacactgcgccaacacagaaattattgtaaagctttctgatggaagagagctctgtctggaccccaaggaaaactgggtgcagagggttgtggagaagtttttgaagagggctgagaattcataaaaaaattcattctctgtggtatccaagaatcagtgaagatgccagtgaaacttcaagcaaatctacttcaacacttcatgtattgtgtgggtctgttgtagggttgccagatgcaatacaagattcctggttaaatttgaatttcagtaaacaatgaatagtttttcattgtaccatgaaatatccagaacatacttatatgtaaagtattatttatttgaatctacaaaaaacaacaaataatttttaaatataaggattttcctagatattgcacgggagaatatacaaatagcaaaattgaggccaagggccaagagaatatccgaactttaatttcaggaattgaatgggtttgctagaatgtgatatttgaagcatcacataaaaatgatgggacaataaattttgccataaagtcaaatttagctggaaatcctggatttttttctgttaaatctggcaaccctagtctgctagccaggatccacaagtccttgttccactgtgccttggtttctcctttatttctaagtggaaaaagtattagccaccatcttacctcacagtgatgttgtgaggacatgtggaagcactttaagttttttcatcataacataaattattttcaagtgtaacttattaacctatttattatttatgtatttatttaagcatcaaatatttgtgcaagaatttggaaaaatagaagatgaatcattgattgaatagttataaagatgttatagtaaatttattttattttagatattaaatgatgttttattagataaatttcaatcagggtttttagattaaacaaacaaacaattgggtacccagttaaattttcatttcagataaacaacaaataattttttagtataagtacattattgtttatctgaaattttaattgaactaacaatcctagtttgatactcccagtcttgtcattgccagctgtgttggtagtgctgtgttgaattacggaataatgagttagaactattaaaacagccaaaactccacagtcaatattagtaatttcttgctggttgaaacttgtttattatgtacaaatagattcttataatattatttaaatgactgcatttttaaatacaaggctttatatttttaactttaagatgtttttatgtgctctccaaattttttttactgtttctgattgtatggaaatataaaagtaaatatgaaacatttaaaatataatttgttgtcaaagtaa

SEQ ID NO: 117211 - DNA, 700 bp, Homo sapiens
  Payload ID: 2884
  Gene Symbol: CXCL8
  Gene Name: chemokine (C-X-C motif) ligand 8
  ENST ID: ENST00000401931
  CDS Start-End: 119-406
aaaaagccaccggagcactccataaggcacaaactttcagagacagcagagcacacaagcttctaggacaagagccaggaagaaaccaccggaaggaaccatctcactgtgtgtaaacatgacttccaagctggccgtggctctcttggcagccttcctgatttctgcagctctgtgtgaaggtgcagttttgccaaggagtgctaaagaacttagatgtcagtgcataaagacatactccaaacctttccaccccaaatttatcaaagaactgagagtgattgagagtggaccacactgcgccaacacagaaattattgtaaagctttctgatggaagagagctctgtctggaccccaaggaaaactgggtgcagagggttgtggagaagtttttgaagaggtaagttatatattttttaatttaaatttttcatttatcctgagacatataatccaaagtcagcctataaatttctttctgttgctaaaaatcgtcattaggtatctgcctttttggttaaaaaaaaaaggaatagcatcaatagtgagtttgttgtactcatgaccagaaagaccatacatagtttgcccaggaaattctgggtttaagcttgtgtcctatactcttagtaaagttctttgtcactcccagtagtgtcctattttagatgataatttctttgatctccctatttata

SEQ ID NO: 117212 - DNA, 2740 bp, Homo sapiens
  Payload ID: 2885
  Gene Symbol: CXCL9
  Gene Name: chemokine (C-X-C motif) ligand 9
  Uniprot ID: Q07325
  ENST ID: ENST00000264888
  CDS Start-End: 40-417
atccaatacaggagtgacttggaactccattctatcactatgaagaaaagtggtgttcttttcctcttgggcatcatcttgctggttctgattggagtgcaaggaaccccagtagtgagaaagggtcgctgttcctgcatcagcaccaaccaagggactatccacctacaatccttgaaagaccttaaacaatttgccccaagcccttcctgcgagaaaattgaaatcattgctacactgaagaatggagttcaaacatgtctaaacccagattcagcagatgtgaaggaactgattaaaaagtgggagaaacaggtcagccaaaagaaaaagcaaaagaatgggaaaaaacatcaaaaaaagaaagttctgaaagttcgaaaatctcaacgttctcgtcaaaagaagactacataagagaccacttcaccaataagtattctgtgttaaaaatgttctattttaattataccgctatcattccaaaggaggatggcatataatacaaaggcttattaatttgactagaaaatttaaaacattactctgaaattgtaactaaagttagaaagttgattttaagaatccaaacgttaagaattgttaaaggctatgattgtctttgttcttctaccacccaccagttgaatttcatcatgcttaaggccatgattttagcaatacccatgtctacacagatgttcacccaaccacatcccactcacaacagctgcctggaagagcagccctaggcttccacgtactgcagcctccagagagtatctgaggcacatgtcagcaagtcctaagcctgttagcatgctggtgagccaagcagtttgaaattgagctggacctcaccaagctgctgtggccatcaacctctgtatttgaatcagcctacaggcctcacacacaatgtgtctgagagattcatgctgattgttattgggtatcaccactggagatcaccagtgtgtggctttcagagcctcctttctggctttggaagccatgtgattccatcttgcccgctcaggctgaccactttatttctttttgttcccctttgcttcattcaagtcagctcttctccatcctaccacaatgcagtgcctttcttctctccagtgcacctgtcatatgctctgatttatctgagtcaactcctttctcatcttgtccccaacaccccacagaagtgctttcttctcccaattcatcctcactcagtccagcttagttcaagtcctgcctcttaaataaacctttttggacacacaaattatcttaaaactcctgtttcacttggttcagtaccacatgggtgaacactcaatggttaactaattcttgggtgtttatcctatctctccaaccagattgtcagctccttgagggcaagagccacagtatatttccctgtttcttccacagtgcctaataatactgtggaactaggttttaataattttttaattgatgttgttatgggcaggatggcaaccagaccattgtctcagagcaggtgctggctctttcctggctactccatgttggctagcctctggtaacctcttacttattatcttcaggacactcactacagggaccagggatgatgcaacatccttgtctttttatgacaggatgtttgctcagcttctccaacaataagaagcacgtggtaaaacacttgcggatattctggactgtttttaaaaaatatacagtttaccgaaaatcatataatcttacaatgaaaaggactttatagatcagccagtgaccaaccttttcccaaccatacaaaaattccttttcccgaaggaaaagggctttctcaataagcctcagctttctaagatctaacaagatagccaccgagatccttatcgaaactcattttaggcaaatatgagttttattgtccgtttacttgtttcagagtttgtattgtgattatcaattaccacaccatctcccatgaagaaagggaacggtgaagtactaagcgctagaggaagcagccaagtcggttagtggaagcatgattggtgcccagttagcctctgcaggatgtggaaacctccttccaggggaggttcagtgaattgtgtaggagaggttgtctgtggccagaatttaaacctatactcactttcccaaattgaatcactgctcacactgctgatgatttagagtgctgtccggtggagatcccacccgaacgtcttatctaatcatgaaactccctagttccttcatgtaacttccctgaaaaatctaagtgtttcataaatttgagagtctgtgacccacttaccttgcatctcacaggtagacagtatataactaacaaccaaagactacatattgtcactgacacacacgttataatcatttatcatatatatacatacatgcatacactctcaaagcaaataatttttcacttcaaaacagtattgacttgtataccttgtaatttgaaatattttctttgttaaaatagaatggtatcaataaatagaccattaatcagaaaacagatcttgattttttttctcttgaatgtacccttcaactgttgaatgtttaatagtaaatcttatatgtccttatttactttttagctttctctcaaataaagtgtaacactagttgagataacacatgaaagctctttaaagggtcgatcgggaacaggaaaaaaaacctatggaaaatatgacaacac

SEQ ID NO: 117213 - DNA, 2488 bp, Homo sapiens
  Payload ID: 2886
  Gene Symbol: CXCR1
  Gene Name: chemokine (C-X-C motif) receptor 1
  Uniprot ID: P25024
  ENST ID: ENST00000295683
  CDS Start-End: 122-1174
tttattcatcaagtgccctctagctgttaagtcactctgatctctgactgcagctcctactgttggacacacctggccggtgcttcagttagatcaaaccattgctgaaactgaagaggacatgtcaaatattacagatccacagatgtgggattttgatgatctaaatttcactggcatgccacctgcagatgaagattacagcccctgtatgctagaaactgagacactcaacaagtatgttgtgatcatcgcctatgccctagtgttcctgctgagcctgctgggaaactccctggtgatgctggtcatcttatacagcagggtcggccgctccgtcactgatgtctacctgctgaacctggccttggccgacctactctttgccctgaccttgcccatctgggccgcctccaaggtgaatggctggatttttggcacattcctgtgcaaggtggtctcactcctgaaggaagtcaacttctacagtggcatcctgctgttggcctgcatcagtgtggaccgttacctggccattgtccatgccacacgcacactgacccagaagcgtcacttggtcaagtttgtttgtcttggctgctggggactgtctatgaatctgtccctgcccttcttccttttccgccaggcttaccatccaaacaattccagtccagtttgctatgaggtcctgggaaatgacacagcaaaatggcggatggtgttgcggatcctgcctcacacctttggcttcatcgtgccgctgtttgtcatgctgttctgctatggattcaccctgcgtacactgtttaaggcccacatggggcagaagcaccgagccatgagggtcatctttgctgtcgtcctcatcttcctgctttgctggctgccctacaacctggtcctgctggcagacaccctcatgaggacccaggtgatccaggagagctgtgagcgccgcaacaacatcggccgggccctggatgccactgagattctgggatttctccatagctgcctcaaccccatcatctacgccttcatcggccaaaattttcgccatggattcctcaagatcctggctatgcatggcctggtcagcaaggagttcttggcacgtcatcgtgttacctcctacacttcttcgtctgtcaatgtctcttccaacctctgaaaaccatcgatgaaggaatatctcttctcagaaggaaagaataaccaacaccctgaggttgtgtgtggaaggtgatctggctctggacaggcactatctgggttttggggggacgctataggatgtggggaagttaggaactggtgtcttcaggggccacaccaaccttctgaggagctgttgaggtacctccaaggaccggcctttgcacctccatggaaacgaagcaccatcattcccgttgaacgtcacatctttaacccactaactggctaattagcatggccacatctgagccccgaatctgacattagatgagagaacagggctgaagctgtgtcctcatgagggctggatgctctcgttgaccctcacaggagcatctcctcaactctgagtgttaagcgttgagccaccaagctggtggctctgtgtgctctgatccgagctcaggggggtggttttcccatctcaggtgtgttgcagtgtctgctggagacattgaggcaggcactgccaaaacatcaacctgccagctggccttgtgaggagctggaaacacatgttccccttgggggtggtggatgaacaaagagaaagagggtttggaagccagatctatgccacaagaaccccctttacccccatgaccaacatcgcagacacatgtgctggccacctgctgagccccaagtggaacgagacaagcagcccttagcccttcccctctgcagcttccaggctggcgtgcagcatcagcatccctagaaagccatgtgcagccaccagtccattgggcaggcagatgttcctaataaagcttctgttccgtgcttgtccctgtggaagtatcttggttgtgacagagtcaagggtgtgtgcagcattgttggctgttcctgcagtagaatgggggcagcacctcctaagaaggcacctctctgggttgaagggcagtgttccctggggctttaactcctgctagaacagtctcttgaggcacagaaactcctgttcatgcccatacccctggccaaggaagatccctttgtccacaagtaaaaggaaatgctcctccagggagtctcagcttcaccctgaggtgagcatcatcttctgggttaggccttgcctaggcatagccctgcctcaagctatgtgagctcaccagtccctccccaaatgctttccatgagttgcagttttttcctagtctgttttccctccttggagacagggccctgtcggtttattcactgtatgtccttggtgcctggagcctactaaatgctcaataaataatgatcacaggaa

SEQ ID NO: 117214 - DNA, 2879 bp, Homo sapiens
  Payload ID: 2887
  Gene Symbol: CXCR2
  Gene Name: chemokine (C-X-C motif) receptor 2
  Uniprot ID: P25025
  ENST ID: ENST00000318507
  CDS Start-End: 428-1510
aggaagtgcaggttcaaaacattcagagacagaaggtggatagacaaatctccaccttcagactggtaggctcctccagaagccatcagacaggaagatgtgaaaatccccagcactcatcccagaatcactaagtggcacctgtcctgggccaaagtcccaggacagacctcattgttcctctgtgggaatacctccccaggagggcatcctggatttcccccttgcaacccaggtcagaagtttcatcgtcaaggttgtttcatcttttttttcctgtctaacagctctgactaccacccaaccttgaggcacagtgaagacatcggtggccactccaataacagcaggtcacagctgctcttctggaggtgtcctacaggtgaaaagcccagcgacccagtcaggatttaagtttacctcaaaaatggaagattttaacatggagagtgacagctttgaagatttctggaaaggtgaagatcttagtaattacagttacagctctaccctgcccccttttctactagatgccgccccatgtgaaccagaatccctggaaatcaacaagtattttgtggtcattatctatgccctggtattcctgctgagcctgctgggaaactccctcgtgatgctggtcatcttatacagcagggtcggccgctccgtcactgatgtctacctgctgaacctagccttggccgacctactctttgccctgaccttgcccatctgggccgcctccaaggtgaatggctggatttttggcacattcctgtgcaaggtggtctcactcctgaaggaagtcaacttctatagtggcatcctgctactggcctgcatcagtgtggaccgttacctggccattgtccatgccacacgcacactgacccagaagcgctacttggtcaaattcatatgtctcagcatctggggtctgtccttgctcctggccctgcctgtcttacttttccgaaggaccgtctactcatccaatgttagcccagcctgctatgaggacatgggcaacaatacagcaaactggcggatgctgttacggatcctgccccagtcctttggcttcatcgtgccactgctgatcatgctgttctgctacggattcaccctgcgtacgctgtttaaggcccacatggggcagaagcaccgggccatgcgggtcatctttgctgtcgtcctcatcttcctgctctgctggctgccctacaacctggtcctgctggcagacaccctcatgaggacccaggtgatccaggagacctgtgagcgccgcaatcacatcgaccgggctctggatgccaccgagattctgggcatccttcacagctgcctcaaccccctcatctacgccttcattggccagaagtttcgccatggactcctcaagattctagctatacatggcttgatcagcaaggactccctgcccaaagacagcaggccttcctttgttggctcttcttcagggcacacttccactactctctaagacctcctgcctaagtgcagccccgtggggttcctcccttctcttcacagtcacattccaagcctcatgtccactggttcttcttggtctcagtgtcaatgcagcccccattgtggtcacaggaagtagaggaggccacgttcttactagtttcccttgcatggtttagaaagcttgccctggtgcctcaccccttgccataattactatgtcatttgctggagctctgcccatcctgcccctgagcccatggcactctatgttctaagaagtgaaaatctacactccagtgagacagctctgcatactcattaggatggctagtatcaaaagaaagaaaatcaggctggccaacggggtgaaaccctgtctctactaaaaatacaaaaaaaaaaaaaaattagccgggcgtggtggtgagtgcctgtaatcacagctacttgggaggctgagatgggagaatcacttgaacccgggaggcagaggttgcagtgagccgagattgtgcccctgcactccagcctgagcgacagtgagactctgtctcagtccatgaagatgtagaggagaaactggaactctcgagcgttgctgggggggattgtaaaatggtgtgaccactgcagaagacagtatggcagctttcctcaaaacttcagacatagaattaacacatgatcctgcaattccacttataggaattgacccacaagaaatgaaagcagggacttgaacccatatttgtacaccaatattcatagcagcttattcacaagacccaaaaggcagaagcaacccaaatgttcatcaatgaatgaatgaatggctaagcaaaatgtgatatgtacctaacgaagtatccttcagcctgaaagaggaatgaagtactcatacatgttacaacacggacgaaccttgaaaactttatgctaagtgaaataagccagacatcaacagataaatagtttatgattccacctacatgaggtactgagagtgaacaaatttacagagacagaaagcagaacagtgattaccagggactgaggggaggggagcatgggaagtgacggtttaatgggcacagggtttatgtttaggatgttgaaaaagttctgcagataaacagtagtgatagttgtaccgcaatgtgacttaatgccactaaattgacacttaaaaatggtttaaatggtcaattttgttatgtatattttatatcaatttaaaaaaaaacctgagccccaaaaggtattttaatcaccaaggctgattaaaccaaggctagaaccacctgcctatattttttgttaaatgatttcattcaatatcttttttttaataaaccatttttacttgggtgtttata

SEQ ID NO: 117215 - DNA, 585 bp, Homo sapiens
  Payload ID: 2887
  Gene Symbol: CXCR2
  Gene Name: chemokine (C-X-C motif) receptor 2
  ENST ID: ENST00000415392
  CDS Start-End: 171-585
gcagtgtctttgttgagcagcagaggggagctctgactaccacccaaccttgaggcacagtgaagacatcggtggccactccaataacagcaggtcacagctgctcttctggaggtgtcctacaggtgaaaagcccagcgacccagtcaggatttaagtttacctcaaaaatggaagattttaacatggagagtgacagctttgaagatttctggaaaggtgaagatcttagtaattacagttacagctctaccctgcccccttttctactagatgccgccccatgtgaaccagaatccctggaaatcaacaagtattttgtggtcattatctatgccctggtattcctgctgagcctgctgggaaactccctcgtgatgctggtcatcttatacagcagggtcggccgctccgtcactgatgtctacctgctgaacctagccttggccgacctactctttgccctgaccttgcccatctgggccgcctccaaggtgaatggctggatttttggcacattcctgtgcaaggtggtctcactcctgaaggaagtcaacttctatagtggcatcctgctactggcct

SEQ ID NO: 117216 - DNA, 621 bp, Homo sapiens
  Payload ID: 2887
  Gene Symbol: CXCR2
  Gene Name: chemokine (C-X-C motif) receptor 2
  ENST ID: ENST00000428565
  CDS Start-End: 105-621
gttctcaccaccacctccctttcataggtcacagctgctcttctggaggtgtcctacaggtgaaaagcccagcgacccagtcaggatttaagtttacctcaaaaatggaagattttaacatggagagtgacagctttgaagatttctggaaaggtgaagatcttagtaattacagttacagctctaccctgcccccttttctactagatgccgccccatgtgaaccagaatccctggaaatcaacaagtattttgtggtcattatctatgccctggtattcctgctgagcctgctgggaaactccctcgtgatgctggtcatcttatacagcagggtcggccgctccgtcactgatgtctacctgctgaacctagccttggccgacctactctttgccctgaccttgcccatctgggccgcctccaaggtgaatggctggatttttggcacattcctgtgcaaggtggtctcactcctgaaggaagtcaacttctatagtggcatcctgctactggcctgcatcagtgtggaccgttacctggccattgtccatgccacacgcacactgacccagaagcgctacttggtcaaattcatatgtctcagcatctggggtctgt

SEQ ID NO: 117217 - DNA, 262 bp, Homo sapiens
  Payload ID: 2887
  Gene Symbol: CXCR2
  Gene Name: chemokine (C-X-C motif) receptor 2
  ENST ID: ENST00000449014
  CDS Start-End: 218-262
ggggaggtgaggaagtggagagagcagctgtggtggctgaagggtgctaggacagagggagcatgataaagccataactctgactaccacccaaccttgaggcacagtgaagacatcggtggccactccaataacagcaggtcacagctgctcttctggaggtgtcctacaggtgaaaagcccagcgacccagtcaggatttaagtttacctcaaaaatggaagattttaacatggagagtgacagctttgaagatttctgg

SEQ ID NO: 117218 - DNA, 813 bp, Homo sapiens
  Payload ID: 2887
  Gene Symbol: CXCR2
  Gene Name: chemokine (C-X-C motif) receptor 2
  ENST ID: ENST00000453237
  CDS Start-End: 212-813
taagcagtggtgatagctgagaatatgcagccgttttctccttcctgggtacagtgctattctgcctagagctctgactaccacccaaccttgaggcacagtgaagacatcggtggccactccaataacagcaggtcacagctgctcttctggaggtgtcctacaggtgaaaagcccagcgacccagtcaggatttaagtttacctcaaaaatggaagattttaacatggagagtgacagctttgaagatttctggaaaggtgaagatcttagtaattacagttacagctctaccctgcccccttttctactagatgccgccccatgtgaaccagaatccctggaaatcaacaagtattttgtggtcattatctatgccctggtattcctgctgagcctgctgggaaactccctcgtgatgctggtcatcttatacagcagggtcggccgctccgtcactgatgtctacctgctgaacctagccttggccgacctactctttgccctgaccttgcccatctgggccgcctccaaggtgaatggctggatttttggcacattcctgtgcaaggtggtctcactcctgaaggaagtcaacttctatagtggcatcctgctactggcctgcatcagtgtggaccgttacctggccattgtccatgccacacgcacactgacccagaagcgctacttggtcaaattcatatgtctcagcatctggggtctgtccttgctcctggccctgcctgtcttacttttccgaaggaccgtctactcatccaatgttagcccagcctgctatgaggacatggg

SEQ ID NO: 117219 - DNA, 597 bp, Homo sapiens
  Payload ID: 2887
  Gene Symbol: CXCR2
  Gene Name: chemokine (C-X-C motif) receptor 2
  ENST ID: ENST00000454148
  CDS Start-End: 191-597
aaaacattcagagacagaaggtggatagacaaatctccaccttcagactgctctgactaccacccaaccttgaggcacagtgaagacatcggtggccactccaataacagcaggtcacagctgctcttctggaggtgtcctacaggtgaaaagcccagcgacccagtcaggatttaagtttacctcaaaaatggaagattttaacatggagagtgacagctttgaagatttctggaaaggtgaagatcttagtaattacagttacagctctaccctgcccccttttctactagatgccgccccatgtgaaccagaatccctggaaatcaacaagtattttgtggtcattatctatgccctggtattcctgctgagcctgctgggaaactccctcgtgatgctggtcatcttatacagcagggtcggccgctccgtcactgatgtctacctgctgaacctagccttggccgacctactctttgccctgaccttgcccatctgggccgcctccaaggtgaatggctggatttttggcacattcctgtgcaaggtggtctcactcctgaaggaagtcaacttctatagtggcatcctgct

SEQ ID NO: 117220 - DNA, 223 bp, Homo sapiens
  Payload ID: 2887
  Gene Symbol: CXCR2
  Gene Name: chemokine (C-X-C motif) receptor 2
  ENST ID: ENST00000418878
  CDS Start-End: 179-223
gacctggttctccttgctgagttctctaccttctgtcctgacttgcatgctctccctctggaacctgaagctgacccataatgcctgggagcatgagctcacccatacacctccagcccacccccagcacagctgagcactggattatccacagtcaggatttaagtttacctcaaaaatggaagattttaacatggagagtgacagctttgaagatttctgg

SEQ ID NO: 117221 - DNA, 1861 bp, Homo sapiens
  Payload ID: 2888
  Gene Symbol: CXCR3
  Gene Name: chemokine (C-X-C motif) receptor 3
  Uniprot ID: P49682
  ENST ID: ENST00000373691
  CDS Start-End: 165-1412
caagcaccaaagcagaggggcaggcagcacaccacccagcagccagagcaccagcccagccatggtccttgaggggtccctgggccgatgggatcacgcagaagaatgcgagagaagcagcctttgagaagggaagtcactatcccagagcccaggctgagcggatggagttgaggaagtacggccctggaagactggcggggacagttataggaggagctgctcagagtaaatcacagactaaatcagactcaatcacaaaagagttcctgccaggcctttacacagccccttcctccccgttcccgccctcacaggtgagtgaccaccaagtgctaaatgacgccgaggttgccgccctcctggagaacttcagctcttcctatgactatggagaaaacgagagtgactcgtgctgtacctccccgccctgcccacaggacttcagcctgaacttcgaccgggccttcctgccagccctctacagcctcctctttctgctggggctgctgggcaacggcgcggtggcagccgtgctgctgagccggcggacagccctgagcagcaccgacaccttcctgctccacctagctgtagcagacacgctgctggtgctgacactgccgctctgggcagtggacgctgccgtccagtgggtctttggctctggcctctgcaaagtggcaggtgccctcttcaacatcaacttctacgcaggagccctcctgctggcctgcatcagctttgaccgctacctgaacatagttcatgccacccagctctaccgccgggggcccccggcccgcgtgaccctcacctgcctggctgtctgggggctctgcctgcttttcgccctcccagacttcatcttcctgtcggcccaccacgacgagcgcctcaacgccacccactgccaatacaacttcccacaggtgggccgcacggctctgcgggtgctgcagctggtggctggctttctgctgcccctgctggtcatggcctactgctatgcccacatcctggccgtgctgctggtttccaggggccagcggcgcctgcgggccatgcggctggtggtggtggtcgtggtggcctttgccctctgctggaccccctatcacctggtggtgctggtggacatcctcatggacctgggcgctttggcccgcaactgtggccgagaaagcagggtagacgtggccaagtcggtcacctcaggcctgggctacatgcactgctgcctcaacccgctgctctatgcctttgtaggggtcaagttccgggagcggatgtggatgctgctcttgcgcctgggctgccccaaccagagagggctccagaggcagccatcgtcttcccgccgggattcatcctggtctgagacctcagaggcctcctactcgggcttgtgaggccggaatccgggctcccctttcgcccacagtctgacttccccgcattccaggctcctccctccctctgccggctctggctctccccaatatcctcgctcccgggactcactggcagccccagcaccaccaggtctcccgggaagccaccctcccagctctgaggactgcaccattgctgctccttagctgccaagccccatcctgccgcccgaggtggctgcctggagccccactgcccttctcatttggaaactaaaacttcatcttccccaagtgcggggagtacaaggcatggcgtagagggtgctgccccatgaagccacagcccaggcctccagctcagcagtgactgtggccatggtccccaagacctctatatttgctcttttatttttatgtctaaaatcctgcttaaaacttttcaataaacaagatcgtcaggacca

SEQ ID NO: 117222 - DNA, 1624 bp, Homo sapiens
  Payload ID: 2888
  Gene Symbol: CXCR3
  Gene Name: chemokine (C-X-C motif) receptor 3
  Uniprot ID: P49682
  ENST ID: ENST00000373693
  CDS Start-End: 69-1175
ccaaccacaagcaccaaagcagaggggcaggcagcacaccacccagcagccagagcaccagcccagccatggtccttgaggtgagtgaccaccaagtgctaaatgacgccgaggttgccgccctcctggagaacttcagctcttcctatgactatggagaaaacgagagtgactcgtgctgtacctccccgccctgcccacaggacttcagcctgaacttcgaccgggccttcctgccagccctctacagcctcctctttctgctggggctgctgggcaacggcgcggtggcagccgtgctgctgagccggcggacagccctgagcagcaccgacaccttcctgctccacctagctgtagcagacacgctgctggtgctgacactgccgctctgggcagtggacgctgccgtccagtgggtctttggctctggcctctgcaaagtggcaggtgccctcttcaacatcaacttctacgcaggagccctcctgctggcctgcatcagctttgaccgctacctgaacatagttcatgccacccagctctaccgccgggggcccccggcccgcgtgaccctcacctgcctggctgtctgggggctctgcctgcttttcgccctcccagacttcatcttcctgtcggcccaccacgacgagcgcctcaacgccacccactgccaatacaacttcccacaggtgggccgcacggctctgcgggtgctgcagctggtggctggctttctgctgcccctgctggtcatggcctactgctatgcccacatcctggccgtgctgctggtttccaggggccagcggcgcctgcgggccatgcggctggtggtggtggtcgtggtggcctttgccctctgctggaccccctatcacctggtggtgctggtggacatcctcatggacctgggcgctttggcccgcaactgtggccgagaaagcagggtagacgtggccaagtcggtcacctcaggcctgggctacatgcactgctgcctcaacccgctgctctatgcctttgtaggggtcaagttccgggagcggatgtggatgctgctcttgcgcctgggctgccccaaccagagagggctccagaggcagccatcgtcttcccgccgggattcatcctggtctgagacctcagaggcctcctactcgggcttgtgaggccggaatccgggctcccctttcgcccacagtctgacttccccgcattccaggctcctccctccctctgccggctctggctctccccaatatcctcgctcccgggactcactggcagccccagcaccaccaggtctcccgggaagccaccctcccagctctgaggactgcaccattgctgctccttagctgccaagccccatcctgccgcccgaggtggctgcctggagccccactgcccttctcatttggaaactaaaacttcatcttccccaagtgcggggagtacaaggcatggcgtagagggtgctgccccatgaagccacagcccaggcctccagctcagcagtgactgtggccatggtccccaagacctctatatttgctcttttatttttatgtctaaaatcctgcttaaaacttttcaataaacaagatcgtcaggacca

SEQ ID NO: 117223 - DNA, 1682 bp, Homo sapiens
  Payload ID: 2889
  Gene Symbol: CXCR4
  Gene Name: chemokine (C-X-C motif) receptor 4
  Uniprot ID: P61073
  ENST ID: ENST00000241393
  CDS Start-End: 106-1164
cgcggccagaaacttcagtttgttggctgcggcagcaggtagcaaagtgacgccgagggcctgagtgctccagtagccaccgcatctggagaaccagcggttaccatggaggggatcagtatatacacttcagataactacaccgaggaaatgggctcaggggactatgactccatgaaggaaccctgtttccgtgaagaaaatgctaatttcaataaaatcttcctgcccaccatctactccatcatcttcttaactggcattgtgggcaatggattggtcatcctggtcatgggttaccagaagaaactgagaagcatgacggacaagtacaggctgcacctgtcagtggccgacctcctctttgtcatcacgcttcccttctgggcagttgatgccgtggcaaactggtactttgggaacttcctatgcaaggcagtccatgtcatctacacagtcaacctctacagcagtgtcctcatcctggccttcatcagtctggaccgctacctggccatcgtccacgccaccaacagtcagaggccaaggaagctgttggctgaaaaggtggtctatgttggcgtctggatccctgccctcctgctgactattcccgacttcatctttgccaacgtcagtgaggcagatgacagatatatctgtgaccgcttctaccccaatgacttgtgggtggttgtgttccagtttcagcacatcatggttggccttatcctgcctggtattgtcatcctgtcctgctattgcattatcatctccaagctgtcacactccaagggccaccagaagcgcaaggccctcaagaccacagtcatcctcatcctggctttcttcgcctgttggctgccttactacattgggatcagcatcgactccttcatcctcctggaaatcatcaagcaagggtgtgagtttgagaacactgtgcacaagtggatttccatcaccgaggccctagctttcttccactgttgtctgaaccccatcctctatgctttccttggagccaaatttaaaacctctgcccagcacgcactcacctctgtgagcagagggtccagcctcaagatcctctccaaaggaaagcgaggtggacattcatctgtttccactgagtctgagtcttcaagttttcactccagctaacacagatgtaaaagacttttttttatacgataaataacttttttttaagttacacatttttcagatataaaagactgaccaatattgtacagtttttattgcttgttggatttttgtcttgtgtttctttagtttttgtgaagtttaattgacttatttatataaattttttttgtttcatattgatgtgtgtctaggcaggacctgtggccaagttcttagttgctgtatgtctcgtggtaggactgtagaaaagggaactgaacattccagagcgtgtagtgaatcacgtaaagctagaaatgatccccagctgtttatgcatagataatctctccattcccgtggaacgtttttcctgttcttaagacgtgattttgctgtagaagatggcacttataaccaaagcccaaagtggtatagaaatgctggtttttcagttttcaggagtgggttgatttcagcacctacagtgtacagtcttgtattaagttgttaataaaagtacatgttaaact

SEQ ID NO: 117224 - DNA, 1895 bp, Homo sapiens
  Payload ID: 2889
  Gene Symbol: CXCR4
  Gene Name: chemokine (C-X-C motif) receptor 4
  Uniprot ID: P61073
  ENST ID: ENST00000409817
  CDS Start-End: 305-1375
ttttttttcttccctctagtgggcggggcagaggagttagccaagatgtgactttgaaaccctcagcgtctcagtgcccttttgttctaaacaaagaattttgtaattggttctaccaaagaaggatataatgaagtcactatgggaaaagatggggaggagagttgtaggattctacattaattctcttgtgcccttagcccactacttcagaatttcctgaagaaagcaagcctgaattggttttttaaattgctttaaaaattttttttaactgggttaatgcttgctgaattggaagtgaatgtccattcctttgcctcttttgcagatatacacttcagataactacaccgaggaaatgggctcaggggactatgactccatgaaggaaccctgtttccgtgaagaaaatgctaatttcaataaaatcttcctgcccaccatctactccatcatcttcttaactggcattgtgggcaatggattggtcatcctggtcatgggttaccagaagaaactgagaagcatgacggacaagtacaggctgcacctgtcagtggccgacctcctctttgtcatcacgcttcccttctgggcagttgatgccgtggcaaactggtactttgggaacttcctatgcaaggcagtccatgtcatctacacagtcaacctctacagcagtgtcctcatcctggccttcatcagtctggaccgctacctggccatcgtccacgccaccaacagtcagaggccaaggaagctgttggctgaaaaggtggtctatgttggcgtctggatccctgccctcctgctgactattcccgacttcatctttgccaacgtcagtgaggcagatgacagatatatctgtgaccgcttctaccccaatgacttgtgggtggttgtgttccagtttcagcacatcatggttggccttatcctgcctggtattgtcatcctgtcctgctattgcattatcatctccaagctgtcacactccaagggccaccagaagcgcaaggccctcaagaccacagtcatcctcatcctggctttcttcgcctgttggctgccttactacattgggatcagcatcgactccttcatcctcctggaaatcatcaagcaagggtgtgagtttgagaacactgtgcacaagtggatttccatcaccgaggccctagctttcttccactgttgtctgaaccccatcctctatgctttccttggagccaaatttaaaacctctgcccagcacgcactcacctctgtgagcagagggtccagcctcaagatcctctccaaaggaaagcgaggtggacattcatctgtttccactgagtctgagtcttcaagttttcactccagctaacacagatgtaaaagacttttttttatacgataaataacttttttttaagttacacatttttcagatataaaagactgaccaatattgtacagtttttattgcttgttggatttttgtcttgtgtttctttagtttttgtgaagtttaattgacttatttatataaattttttttgtttcatattgatgtgtgtctaggcaggacctgtggccaagttcttagttgctgtatgtctcgtggtaggactgtagaaaagggaactgaacattccagagcgtgtagtgaatcacgtaaagctagaaatgatccccagctgtttatgcatagataatctctccattcccgtggaacgtttttcctgttcttaagacgtgattttgctgtagaagatggcacttataaccaaagcccaaagtggtatagaaatgctggtttttcagttttcaggagtgggttgatttcagcacctacagtgtacagtcttgtattaagttgttaataaaagtacatgttaaactta

SEQ ID NO: 117225 - DNA, 4431 bp, Homo sapiens
  Payload ID: 2890
  Gene Symbol: CXCR5
  Gene Name: chemokine (C-X-C motif) receptor 5
  Uniprot ID: P32302
  ENST ID: ENST00000292174
  CDS Start-End: 177-1295
aaaaaaaaaaagtgatgagttgtgaggcaggtcgcggccctactgcctcaggagacgatgcgcagctcatttgcttaaatttgcagctgacggctgccacctctctagaggcacctggcggggagcctctcaacataagacagtgaccagtctggtgactcacagccggcacagccatgaactacccgctaacgctggaaatggacctcgagaacctggaggacctgttctgggaactggacagattggacaactataacgacacctccctggtggaaaatcatctctgccctgccacagaggggcccctcatggcctccttcaaggccgtgttcgtgcccgtggcctacagcctcatcttcctcctgggcgtgatcggcaacgtcctggtgctggtgatcctggagcggcaccggcagacacgcagttccacggagaccttcctgttccacctggccgtggccgacctcctgctggtcttcatcttgccctttgccgtggccgagggctctgtgggctgggtcctggggaccttcctctgcaaaactgtgattgccctgcacaaagtcaacttctactgcagcagcctgctcctggcctgcatcgccgtggaccgctacctggccattgtccacgccgtccatgcctaccgccaccgccgcctcctctccatccacatcacctgtgggaccatctggctggtgggcttcctccttgccttgccagagattctcttcgccaaagtcagccaaggccatcacaacaactccctgccacgttgcaccttctcccaagagaaccaagcagaaacgcatgcctggttcacctcccgattcctctaccatgtggcgggattcctgctgcccatgctggtgatgggctggtgctacgtgggggtagtgcacaggttgcgccaggcccagcggcgccctcagcggcagaaggcagtcagggtggccatcctggtgacaagcatcttcttcctctgctggtcaccctaccacatcgtcatcttcctggacaccctggcgaggctgaaggccgtggacaatacctgcaagctgaatggctctctccccgtggccatcaccatgtgtgagttcctgggcctggcccactgctgcctcaaccccatgctctacactttcgccggcgtgaagttccgcagtgacctgtcgcggctcctgacgaagctgggctgtaccggccctgcctccctgtgccagctcttccctagctggcgcaggagcagtctctctgagtcagagaatgccacctctctcaccacgttctaggtcccagtgtccccttttattgctgcttttccttggggcaggcagtgatgctggatgctccttccaacaggagctgggatcctaagggctcaccgtggctaagagtgtcctaggagtatcctcatttggggtagctagaggaaccaacccccatttctagaacatccctgccagctcttctgccggccctggggctaggctggagcccagggagcggaaagcagctcaaaggcacagtgaaggctgtccttacccatctgcacccccctgggctgagagaacctcacgcacctcccatcctaatcatccaatgctcaagaaacaacttctacttctgcccttgccaacggagagcgcctgcccctcccagaacacactccatcagcttaggggctgctgacctccacagcttcccctctctcctcctgcccacctgtcaaacaaagccagaagctgagcaccaggggatgagtggaggttaaggctgaggaaaggccagctggcagcagagtgtggccttcggacaactcagtccctaaaaacacagacattctgccaggcccccaagcctgcagtcatcttgaccaagcaggaagctcagactggttgagttcaggtagctgcccctggctctgaccgaaacagcgctgggtccaccccatgtcaccggatcctgggtggtctgcaggcagggctgactctaggtgcccttggaggccagccagtgacctgaggaagcgtgaaggccgagaagcaagaaagaaacccgacagagggaagaaaagagctttcttcccgaaccccaaggagggagatggatcaatcaaacccggcggtcccctccgccaggcgagatggggtggggtggagaactcctagggtggctgggtccaggggatgggaggttgtgggcattgatggggaaggaggctggcttgtcccctcctcactcccttcccataagctatagacccgaggaaactcagagtcggaacggagaaaggtggactggaaggggcccgtgggagtcatctcaaccatcccctccgtggcatcaccttaggcagggaagtgtaagaaacacactgaggcagggaagtccccaggccccaggaagccgtgccctgcccccgtgaggatgtcactcagatggaaccgcaggaagctgctccgtgcttgtttgctcacctggggtgtgggaggcccgtccggcagttctgggtgctccctaccacctccccagcctttgatcaggtggggagtcagggacccctgcccttgtcccactcaagccaagcagccaagctccttgggaggccccactggggaaataacagctgtggctcacgtgagagtgtcttcacggcaggacaacgaggaagccctaagacgtcccttttttctctgagtatctcctcgcaagctgggtaatcgatgggggagtctgaagcagatgcaaagaggcaagaggctggattttgaattttctttttaataaaaaggcacctataaaacaggtcaatacagtacaggcagcacagagacccccggaacaagcctaaaaattgtttcaaaataaaaaccaagaagatgtcttcacatattgtatttatatatttatatttatatatatatttatataatggtacaaaatggctgggggtgtggccatggatggagggaagagtaggctggcctgtggcgtgggtgggaggagaggggacggagagggcactcggcccgctgcaatctgacccctctctcctcagggcaggaaacacagagtcagacagtttgggggggtcttgggccaggggtggagggctcaagggcacagggcccaggctgaggcagggcgggcaaagcgcctggcaggatgaagggcaagtggccccccaaacacagaggccctggccatggaccctgggaggtgaccggggtgagtcaggggcctgttgtcagccccagaggaagcgctggacctggccgatggtgggccgagaggacagcaccaggctgggagaagtggggcgagttccctttgtattacagctgccagtgcaagaccaggccctccaggccaggaaggctagggacgggtcctggtagaagacaccctgtctagaatggcccttggtcctggaggtggggcgcaaaaggcctcagccagggaactgccctgccacctcccgaggcaggaaaggaagtgagaaaaggagaagtttttttactcctggggccaaagtagggggacaaacacccagtcgtatatggcttcagctctgaccaaaggcggatagggagctctcctgggtaggagcagggagccaagggggaggcagtggctgtgcctgggtgggcacagacagatctggtacatggccctgagccctgggcagagggacaaccttgccggtgagtgggcaggcagagaggaggcggcaggatgctgtttccccgattccatcctcagggagtggagactggaggggaggtgcactgactcagatgaactgttctcccccttctttgataagaagtaggtggcagcagcctctggaaaagtcagggccctggaggttacctggcccagggctactacagccacaggccccagtggcaccatgccaccccttccatggctccactcaagggggccacacagccaccgcctcttcctcctttccttcatcccaaactgggacaaaagacttcaagttctggctaagatgtagcagcagcggatgcccgggcatccaaagtggaaagccagggccccgtgtcaccggtgtgggcaaacacacatgcacgtgcacacatgttctccctgaatcactcagcagcagacaggctgccgccctgggggtctcagccctgctagggctcaccaggtggaagcctaggtggtctgacctcagtttaggagtgggtcatttacgtcatcttaccatttggggacgagacaggaatggtatcccttagggacccagagacactgcaaacagtgggtggccatgtagggctgcatgtccctgggtccaggggaatggagggagcaataacttgaagaaggggggaagggtttcttttatccttttttttttgtgtgacttctatcaaaacacagaaatacagc

SEQ ID NO: 117226 - DNA, 1962 bp, Homo sapiens
  Payload ID: 2891
  Gene Symbol: CXCR6
  Gene Name: chemokine (C-X-C motif) receptor 6
  Uniprot ID: O00574
  ENST ID: ENST00000304552
  CDS Start-End: 91-1119
gaagtagaggcagaccttgcttcatgagcaagctcatctctggaacaaactggcaaagcatctctgctggtgttcatcagaacagacaccatggcagagcatgattaccatgaagactatgggttcagcagtttcaatgacagcagccaggaggagcatcaagacttcctgcagttcagcaaggtctttctgccctgcatgtacctggtggtgtttgtctgtggtctggtggggaactctctggtgctggtcatatccatcttctaccataagttgcagagcctgacggatgtgttcctggtgaacctacccctggctgacctggtgtttgtctgcactctgcccttctgggcctatgcaggcatccatgaatgggtgtttggccaggtcatgtgcaagagcctactgggcatctacactattaacttctacacgtccatgctcatcctcacctgcatcactgtggatcgtttcattgtagtggttaaggccaccaaggcctacaaccagcaagccaagaggatgacctggggcaaggtcaccagcttgctcatctgggtgatatccctgctggtttccttgccccaaattatctatggcaatgtctttaatctcgacaagctcatatgtggttaccatgacgaggcaatttccactgtggttcttgccacccagatgacactggggttcttcttgccactgctcaccatgattgtctgctattcagtcataatcaaaacactgcttcatgctggaggcttccagaagcacagatctctaaagatcatcttcctggtgatggctgtgttcctgctgacccagatgcccttcaacctcatgaagttcatccgcagcacacactgggaatactatgccatgaccagctttcactacaccatcatggtgacagaggccatcgcatacctgagggcctgccttaaccctgtgctctatgcctttgtcagcctgaagtttcgaaagaacttctggaaacttgtgaaggacattggttgcctcccttaccttggggtctcacatcaatggaaatcttctgaggacaattccaagactttttctgcctcccacaatgtggaggccaccagcatgttccagttataggccttgccagggtttcgagaagctgctctggaatttgcaagtcatggctgtgccctcttgatgtggtgaggcaggctttgtttatagcttgcgcattctcatggagaagttatcagacactctggctggtttggaatgcttcttctcaggcatgaacatgtactgttctcttcttgaacactcatgctgaaagcccaagtagggggtctaaaatttttaaggactttccttcctccatctccaagaatgctgaaaccaagggggatgacatgtgactcctatgatctcaggttctccttgattgggactggggctgaaggttgaagaggtgagcacggccaacaaagctgttgatggtaggtggcacactgggtgcccaagctcagaaggctcttctgactactgggcaaagagtgtagatcagagcagcagtgaaaacaagtgctggcaccaccaggcacctcacagaaatgagatcaggctctgcctcaccttggggcttgacttttgtataggtagatgttcagattgctttgattaatccagaataactagcaccagggactatgaatgggcaaaactgaattataagaggctgataattccagtggtccatggaatgcttgaaaaatgtgcaaaacagcgtttaagactgtaatgaatctaagcagcatttctgaagtggactctttggtggctttgcattttaaaaatgaaattttccaatgtctgccacacaaacgtatgtaaatgtatatacccacacacatacacacatatgtcatatattactagcatatgagtttcatagctaagaaataaaactgttaaagtctccaaact

SEQ ID NO: 117227 - DNA, 2805 bp, Homo sapiens
  Payload ID: 2891
  Gene Symbol: CXCR6
  Gene Name: chemokine (C-X-C motif) receptor 6
  Uniprot ID: O00574
  ENST ID: ENST00000458629
  CDS Start-End: 1464-2492
atttttattaagcagtcttagcccaaaggcagcatccttccttgctagagagaaagggcactttggtccctggaaagacagaggcaagcagcagcatcggagacactgctcccagtcaggactcaaagtcagcgacagaagtgtttctgagtggattaggaaaggtaacctcatcgtttatatgcacttgtctggtcaggcaatattttgactttgctggcagagattctgtccaaacacctgctcttcttcatacatcttctagaggtgctggccagacatggctccaggtcactggaaatgagctgctgcatgttgagtatctgcagtcctgtagcaagggcagacttggcactcatgggctgatgttgccgcagctgcccctgctcccacaccacaggttacatgatcccttgtcctgtccatggtctttggcagggtcacagggcagagggaagggtcagagagaagtgacatcttgaagggctggtgccctgggtaagaaaggttgcccatctggcatcccatttcaattgggttttctgcttgttaaatgaggcccctaagtcctaacctgccaatcacaggagctaaggcaaggttccgctttggggaaatctaccttttaagagacttcttgttcagaagtcttcaggaaatgaggctctgatggtagaatgccataaactgtgttaactgatgaaggggaaagtttagttgggaagtgaggagaaccacccaatgctttaaccatgaagccagctcagccaaagtgctgggcagtcgtgggcttttctatgctttgtttccccattagtagcctttgaaaatctatgcaattgaggggaagtaaaggcaggaaggactacctacccaggcagagcagtcttgccatccccaaacacctgtggtctccaggagtctccttgataggagagccccctggtaggggcacttgctttagctttcacaatttattaggaaatggggctcaggatgggtgggcaactgtggtgaggcagggggagatgaaaacaggcatgttccattgatgagctcatattatcagtgggctcaaccatccatcatcagtgttgctcttccaaacagcactgtgcccacctggcagcaaagcgacttttggtttcaaaataattgagcacaggattttatggaatgtgcttaggggtcagttatgagttgtctcccagatgggtgagatcctgagaattttcaggctaatggagagtcctcatcctgtctgagcaatttcccctcagaattggttatcttcaatatactggactgtgctgtttctacacatcccagtgggtgggtttagaagatgactatttgccccctaaatgtggtcaatgggatagcaggaagacaaagaatgccatcctcagccccaaatataattcctgggttctgactcacaggtgttcatcagaacagacaccatggcagagcatgattaccatgaagactatgggttcagcagtttcaatgacagcagccaggaggagcatcaagacttcctgcagttcagcaaggtctttctgccctgcatgtacctggtggtgtttgtctgtggtctggtggggaactctctggtgctggtcatatccatcttctaccataagttgcagagcctgacggatgtgttcctggtgaacctacccctggctgacctggtgtttgtctgcactctgcccttctgggcctatgcaggcatccatgaatgggtgtttggccaggtcatgtgcaagagcctactgggcatctacactattaacttctacacgtccatgctcatcctcacctgcatcactgtggatcgtttcattgtagtggttaaggccaccaaggcctacaaccagcaagccaagaggatgacctggggcaaggtcaccagcttgctcatctgggtgatatccctgctggtttccttgccccaaattatctatggcaatgtctttaatctcgacaagctcatatgtggttaccatgacgaggcaatttccactgtggttcttgccacccagatgacactggggttcttcttgccactgctcaccatgattgtctgctattcagtcataatcaaaacactgcttcatgctggaggcttccagaagcacagatctctaaagatcatcttcctggtgatggctgtgttcctgctgacccagatgcccttcaacctcatgaagttcatccgcagcacacactgggaatactatgccatgaccagctttcactacaccatcatggtgacagaggccatcgcatacctgagggcctgccttaaccctgtgctctatgcctttgtcagcctgaagtttcgaaagaacttctggaaacttgtgaaggacattggttgcctcccttaccttggggtctcacatcaatggaaatcttctgaggacaattccaagactttttctgcctcccacaatgtggaggccaccagcatgttccagttataggccttgccagggtttcgagaagctgctctggaatttgcaagtcatggctgtgccctcttgatgtggtgaggcaggctttgtttatagcttgcgcattctcatggagaagttatcagacactctggctggtttggaatgcttcttctcaggcatgaacatgtactgttctcttcttgaacactcatgctgaaagcccaagtagggggtctaaaatttttaaggactttccttcctccatctccaagaatgctgaaaccaagggggatgacatgtgactcctatgatctcaggttctccttgattgggactgggg

SEQ ID NO: 117228 - DNA, 2242 bp, Homo sapiens
  Payload ID: 2891
  Gene Symbol: CXCR6
  Gene Name: chemokine (C-X-C motif) receptor 6
  Uniprot ID: O00574
  ENST ID: ENST00000438735
  CDS Start-End: 387-1415
gtcaacccctgtacgcggtttccttctcctgctctcctgcttatagaacaattgttcctccagaacaattcctctcagccatagtggctctgctcccaccagatgatctctcagctcatcctggtgacttgcaggggtacaggtctgccggctatgttgcccaggctggcctcaaactcctggcttcaatgatcctctcatcttagcctcttgagtactgggactataagtgcccactgccacgcctggctggttaggctacttttctgtggatcacagcccatcatccaccaatgccttgccaacaactgtaaatgtctcatccctgaatcctggaactgataacagctctgccaggtcttcaggtgttcatcagaacagacaccatggcagagcatgattaccatgaagactatgggttcagcagtttcaatgacagcagccaggaggagcatcaagacttcctgcagttcagcaaggtctttctgccctgcatgtacctggtggtgtttgtctgtggtctggtggggaactctctggtgctggtcatatccatcttctaccataagttgcagagcctgacggatgtgttcctggtgaacctacccctggctgacctggtgtttgtctgcactctgcccttctgggcctatgcaggcatccatgaatgggtgtttggccaggtcatgtgcaagagcctactgggcatctacactattaacttctacacgtccatgctcatcctcacctgcatcactgtggatcgtttcattgtagtggttaaggccaccaaggcctacaaccagcaagccaagaggatgacctggggcaaggtcaccagcttgctcatctgggtgatatccctgctggtttccttgccccaaattatctatggcaatgtctttaatctcgacaagctcatatgtggttaccatgacgaggcaatttccactgtggttcttgccacccagatgacactggggttcttcttgccactgctcaccatgattgtctgctattcagtcataatcaaaacactgcttcatgctggaggcttccagaagcacagatctctaaagatcatcttcctggtgatggctgtgttcctgctgacccagatgcccttcaacctcatgaagttcatccgcagcacacactgggaatactatgccatgaccagctttcactacaccatcatggtgacagaggccatcgcatacctgagggcctgccttaaccctgtgctctatgcctttgtcagcctgaagtttcgaaagaacttctggaaacttgtgaaggacattggttgcctcccttaccttggggtctcacatcaatggaaatcttctgaggacaattccaagactttttctgcctcccacaatgtggaggccaccagcatgttccagttataggccttgccagggtttcgagaagctgctctggaatttgcaagtcatggctgtgccctcttgatgtggtgaggcaggctttgtttatagcttgcgcattctcatggagaagttatcagacactctggctggtttggaatgcttcttctcaggcatgaacatgtactgttctcttcttgaacactcatgctgaaagcccaagtagggggtctaaaatttttaaggactttccttcctccatctccaagaatgctgaaaccaagggggatgacatgtgactcctatgatctcaggttctccttgattgggactggggctgaaggttgaagaggtgagcacggccaacaaagctgttgatggtaggtggcacactgggtgcccaagctcagaaggctcttctgactactgggcaaagagtgtagatcagagcagcagtgaaaacaagtgctggcaccaccaggcacctcacagaaatgagatcaggctctgcctcaccttggggcttgacttttgtataggtagatgttcagattgctttgattaatccagaataactagcaccagggactatgaatgggcaaaactgaattataagaggctgataattccagtggtccatggaatgcttgaaaaatgtgcaaaacagcgtttaagactgtaatgaatctaagcagcatttctgaagtggactctttggtggctttgcattttaaaaatgaaattttccaatgtctgccacacaaacgtatgtaaatgtatatacccacacacatacacacatatgtcatatattactagcatatgagtttcatagctaagaaataaaactg

SEQ ID NO: 117229 - DNA, 1184 bp, Homo sapiens
  Payload ID: 2891
  Gene Symbol: CXCR6
  Gene Name: chemokine (C-X-C motif) receptor 6
  Uniprot ID: O00574
  ENST ID: ENST00000457814
  CDS Start-End: 156-1184
agcatccttccttgctagagagaaagggcactttggtccctggaaagacagaggcaagcagcagcatcggagacactgctcccagtcaggactcaaagtcagcgacagaagtgtttctgagtggattaggaaaggtgttcatcagaacagacaccatggcagagcatgattaccatgaagactatgggttcagcagtttcaatgacagcagccaggaggagcatcaagacttcctgcagttcagcaaggtctttctgccctgcatgtacctggtggtgtttgtctgtggtctggtggggaactctctggtgctggtcatatccatcttctaccataagttgcagagcctgacggatgtgttcctggtgaacctacccctggctgacctggtgtttgtctgcactctgcccttctgggcctatgcaggcatccatgaatgggtgtttggccaggtcatgtgcaagagcctactgggcatctacactattaacttctacacgtccatgctcatcctcacctgcatcactgtggatcgtttcattgtagtggttaaggccaccaaggcctacaaccagcaagccaagaggatgacctggggcaaggtcaccagcttgctcatctgggtgatatccctgctggtttccttgccccaaattatctatggcaatgtctttaatctcgacaagctcatatgtggttaccatgacgaggcaatttccactgtggttcttgccacccagatgacactggggttcttcttgccactgctcaccatgattgtctgctattcagtcataatcaaaacactgcttcatgctggaggcttccagaagcacagatctctaaagatcatcttcctggtgatggctgtgttcctgctgacccagatgcccttcaacctcatgaagttcatccgcagcacacactgggaatactatgccatgaccagctttcactacaccatcatggtgacagaggccatcgcatacctgagggcctgccttaaccctgtgctctatgcctttgtcagcctgaagtttcgaaagaacttctggaaacttgtgaaggacattggttgcctcccttaccttggggtctcacatcaatggaaatcttctgaggacaattccaagactttttctgcctcccacaatgtggaggccaccagcatgttccagttatag

SEQ ID NO: 117230 - DNA, 669 bp, Homo sapiens
  Payload ID: 2892
  Gene Symbol: CKLF
  Gene Name: chemokine-like factor
  Uniprot ID: Q9UBR5
  ENST ID: ENST00000264001
  CDS Start-End: 150-608
gcgcaagagagcgggaagccgagctgggcgagaagtaggggagggcggtgctccgccgcggtggcggttgctatcgcttcgcagaacctactcaggcagccagctgagaagagttgagggaaagtgctgctgctgggtctgcagacgcgatggataacgtgcagccgaaaataaaacatcgccccttctgcttcagtgtgaaaggccacgtgaagatgctgcggctggcactaactgtgacatctatgaccttttttatcatcgcacaagcccctgaaccatatattgttatcactggatttgaagtcaccgttatcttatttttcatacttttatatgtactcagacttgatcgattaatgaagtggttattttggcctttgcttgatattatcaactcactggtaacaacagtattcatgctcatcgtatctgtgttggcactgataccagaaaccacaacattgacagttggtggaggggtgtttgcacttgtgacagcagtatgctgtcttgccgacggggcccttatttaccggaagcttctgttcaatcccagcggtccttaccagaaaaagcctgtgcatgaaaaaaaagaagttttgtaattttatattactttttagtttgatactaagtattaaacatatttctgtattcttccacata

SEQ ID NO: 117231 - DNA, 508 bp, Homo sapiens
  Payload ID: 2892
  Gene Symbol: CKLF
  Gene Name: chemokine-like factor
  Uniprot ID: Q9UBR5
  ENST ID: ENST00000351137
  CDS Start-End: 148-447
gcaagagagcgggaagccgagctgggcgagaagtaggggagggcggtgctccgccgcggtggcggttgctatcgcttcgcagaacctactcaggcagccagctgagaagagttgagggaaagtgctgctgctgggtctgcagacgcgatggataacgtgcagccgaaaataaaacatcgccccttctgcttcagtgtgaaaggccacgtgaagatgctgcggctggatattatcaactcactggtaacaacagtattcatgctcatcgtatctgtgttggcactgataccagaaaccacaacattgacagttggtggaggggtgtttgcacttgtgacagcagtatgctgtcttgccgacggggcccttatttaccggaagcttctgttcaatcccagcggtccttaccagaaaaagcctgtgcatgaaaaaaaagaagttttgtaattttatattactttttagtttgatactaagtattaaacatatttctgtattcttccacata

SEQ ID NO: 117232 - DNA, 571 bp, Homo sapiens
  Payload ID: 2892
  Gene Symbol: CKLF
  Gene Name: chemokine-like factor
  Uniprot ID: Q9UBR5
  ENST ID: ENST00000345436
  CDS Start-End: 148-510
gcaagagagcgggaagccgagctgggcgagaagtaggggagggcggtgctccgccgcggtggcggttgctatcgcttcgcagaacctactcaggcagccagctgagaagagttgagggaaagtgctgctgctgggtctgcagacgcgatggataacgtgcagccgaaaataaaacatcgccccttctgcttcagtgtgaaaggccacgtgaagatgctgcggctggcactaactgtgacatctatgaccttttttatcatcgcacaagcccctgaaccatatattgttatcactggatttgaagtcaccgttatcttatttttcatacttttatatgtactcagacttgatcgattaatgaagtggttattttggcctttgcttgtgtttgcacttgtgacagcagtatgctgtcttgccgacggggcccttatttaccggaagcttctgttcaatcccagcggtccttaccagaaaaagcctgtgcatgaaaaaaaagaagttttgtaattttatattactttttagtttgatactaagtattaaacatatttctgtattcttccacata

SEQ ID NO: 117233 - DNA, 412 bp, Homo sapiens
  Payload ID: 2892
  Gene Symbol: CKLF
  Gene Name: chemokine-like factor
  Uniprot ID: Q9UBR5
  ENST ID: ENST00000362093
  CDS Start-End: 148-351
gcaagagagcgggaagccgagctgggcgagaagtaggggagggcggtgctccgccgcggtggcggttgctatcgcttcgcagaacctactcaggcagccagctgagaagagttgagggaaagtgctgctgctgggtctgcagacgcgatggataacgtgcagccgaaaataaaacatcgccccttctgcttcagtgtgaaaggccacgtgaagatgctgcggctggtgtttgcacttgtgacagcagtatgctgtcttgccgacggggcccttatttaccggaagcttctgttcaatcccagcggtccttaccagaaaaagcctgtgcatgaaaaaaaagaagttttgtaattttatattactttttagtttgatactaagtattaaacatatttctgtattcttccacata

SEQ ID NO: 117234 - DNA, 628 bp, Homo sapiens
  Payload ID: 2892
  Gene Symbol: CKLF
  Gene Name: chemokine-like factor
  Uniprot ID: Q9UBR5
  ENST ID: ENST00000417030
  CDS Start-End: 135-476
aagccgagctgggcgagaagtaggggagggcggtgctccgccgcggtggcggttgctatcgcttcgcagaacctactcaggcagccagctgagaagagttgagggaaagtgctgctgctgggtctgcagacgcgatggataacgtgcagccgaaaataaaacatcgccccttctgcttcagtgtgaaaggccacgtgaagatgctgcggctggcactaactgtgacatctatgaccttttttatcatcgcacaagcccctgaaccatatattgttatcactggatttgaagtcaccgttatcttatttttcatacttttatatgtactcagacttgatcgattaatgaagtggttattttggcctttgcttgatattatcaactcactggtaacaacagtattcatgctcatcgtatctgtgttggcactgataccagaaaccacaacattgacagttggtggagggttattttaactcagtataggagctagaggaagagatttccgaagtctgcaccccgcgcagagcactactgtaacttccaagggagcgctgggagcagcgggatcgggttttccggcacccgggcctgggtggcagggaagaatgtgccgggatccgcctca

SEQ ID NO: 117235 - DNA, 546 bp, Homo sapiens
  Payload ID: 2892
  Gene Symbol: CKLF
  Gene Name: chemokine-like factor
  ENST ID: ENST00000534692
  CDS Start-End: 154-255
atgcgcgcaagagagcgggaagccgagctgggcgagaagtaggggagggcggtgctccgccgcggtggcggttgctatcgcttcgcagaacctactcaggcagccagctgagaagagttgagggaaagtgctgctgctgggtctgcagacgcgatggataacgtgcagccgaaaataaaacatcgccccttctgcttcagtgtgaaaggccacgtgaagatgctgcggctgcattgcttggtagtcttcatgtaaggctcagctttattgtgtgtttttaggatattatcaactcactggtaacaacagtattcatgctcatcgtatctgtgttggcactgataccagaaaccacaacattgacagttggtggagggttattttaactcagtataggagctagaggaagagatttccgaagtctgcaccccgcgcagagcactactgtaacttccaagggagcgctgggagcagcgggatcgggttttccggcacccgggcctgggtggcagggaagaatgtgccgggatccgcctcagggatctt

SEQ ID NO: 117236 - DNA, 1133 bp, Homo sapiens
  Payload ID: 2893
  Gene Symbol: CBY1
  Gene Name: chibby homolog 1 (Drosophila)
  Uniprot ID: Q9Y3M2
  ENST ID: ENST00000216029
  CDS Start-End: 135-515
gcggcaggaggcgggtgggtcaaggtaactctgggctacagagtccttgctgggggttcggggagcgcttggaccccggcttctgggacgcgtcaggagaagggagcactggctttgctttcatcaggccaaagatgcctttctttgggaatacgttcagtccgaagaagacacctcctcggaagtcggcatctctctccaacctgcattctttggatcgatcaacccgggaggtggagctgggcttggaatacggatccccgactatgaacctggcagggcaaagcctgaagtttgaaaatggccagtggatagcagagacaggggttagtggcggtgtggaccggagggaggttcagcgccttcgcaggcggaaccagcagttggaggaagagaacaatctcttgcggctgaaagtggacatcttattagacatgctttcagagtccactgctgaatcccacttaatggagaaggaactggatgaactgaggatcagccggaagagaaaatgaagaccccagagacatttattggggagtaggatgtggctgagtgctttttttttggccagactagcggattcagtcctggaagagagtatcatataatgagacccacaggcactggcacccttgggttggcaatagaaggtgacatggaatggagaaaaccaagattccagatggggatagtaactagaaggtgcttcagatgcactgcctgcgggtgccagtctgaaaaccagaccgcacagaggcctggggctgctgatgagctttttggtgctctccacacacaagctcgcaaacacacatgtcccagaatagctctgttgggttgtgttgggagaagcggctggagttcattctctcacccccttatgttggtgtttggcgtgtgacagcagttctacagagctctgtgttggggtcatggatgagcggctctcttggctcttaaaggcaggcctctctcttcttgcctttaaagaatcctccttcctcacacctggcctcctctggcttcagcttctcagcagcaagcaccagccttccacaacaacactatatttttatgctactttcctgtttgcactactacttttttattaaacgatgttaaataatctc

SEQ ID NO: 117237 - DNA, 1269 bp, Homo sapiens
  Payload ID: 2893
  Gene Symbol: CBY1
  Gene Name: chibby homolog 1 (Drosophila)
  Uniprot ID: Q9Y3M2
  ENST ID: ENST00000396811
  CDS Start-End: 279-659
gcaggcggcaggaggcgggtgggtcaaggtaactctgggctacagagtccttgctgggggttcggggagcgcttggaccccggcttctgggacgcgtcagaatattatccagcaatgcaaatgaacaaactataactacacacagctgcatggataaatgtcagaaacatgacgttgagtgtgagaagccagatgcaaacgaggactcactgtgcaattctgtgcatgtacagtggccaggagaagggagcactggctttgctttcatcaggccaaagatgcctttctttgggaatacgttcagtccgaagaagacacctcctcggaagtcggcatctctctccaacctgcattctttggatcgatcaacccgggaggtggagctgggcttggaatacggatccccgactatgaacctggcagggcaaagcctgaagtttgaaaatggccagtggatagcagagacaggggttagtggcggtgtggaccggagggaggttcagcgccttcgcaggcggaaccagcagttggaggaagagaacaatctcttgcggctgaaagtggacatcttattagacatgctttcagagtccactgctgaatcccacttaatggagaaggaactggatgaactgaggatcagccggaagagaaaatgaagaccccagagacatttattggggagtaggatgtggctgagtgctttttttttggccagactagcggattcagtcctggaagagagtatcatataatgagacccacaggcactggcacccttgggttggcaatagaaggtgacatggaatggagaaaaccaagattccagatggggatagtaactagaaggtgcttcagatgcactgcctgcgggtgccagtctgaaaaccagaccgcacagaggcctggggctgctgatgagctttttggtgctctccacacacaagctcgcaaacacacatgtcccagaatagctctgttgggttgtgttgggagaagcggctggagttcattctctcacccccttatgttggtgtttggcgtgtgacagcagttctacagagctctgtgttggggtcatggatgagcggctctcttggctcttaaaggcaggcctctctcttcttgcctttaaagaatcctccttcctcacacctggcctcctctggcttcagcttctcagcagcaagcaccagccttccacaacaacactatatttttatgctactttcctgtttgcactactacttttttattaaacgatgttaa

SEQ ID NO: 117238 - DNA, 744 bp, Homo sapiens
  Payload ID: 2893
  Gene Symbol: CBY1
  Gene Name: chibby homolog 1 (Drosophila)
  ENST ID: ENST00000416285
  CDS Start-End: 442-744
aaggtaactctgggctacagagtccttgctgggggttcggggagcgcttggaccccggcttctgggacgcgtcaggtcgccgtgaagatgattgcatgagatcgtgcgtgtgaacgtttgttgacagctgttacttgagtccgacagccctgggggccgtgcatctgcgtaacatggctacctctgaactccttgggggacacgtatatctttgagaatccgatgaaaaccagagattccgcccttgttttcttagaattaaaaatattatccagcaatgcaaatgaacaaactataactacacacagctgcatggataaatgtcagaaacatgacgttgagtgtgagaagccagatgcaaacgaggactcactgtgcaattctgtgcatgtacagtggccaggagaagggagcactggctttgctttcatcaggccaaagatgcctttctttgggaatacgttcagtccgaagaagacacctcctcggaagtcggcatctctctccaacctgcattctttggatcgatcaacccgggaggtggagctgggcttggaatacggatccccgactatgaacctggcagggcaaagcctgaagtttgaaaatggccagtggatagcagagacaggggttagtggcggtgtggaccggagggaggttcagcgccttcgcaggcggaaccagcagttggaggaagagaacaatctcttgcggctgaaagtggacatcttattagacatg

SEQ ID NO: 117239 - DNA, 615 bp, Homo sapiens
  Payload ID: 2893
  Gene Symbol: CBY1
  Gene Name: chibby homolog 1 (Drosophila)
  ENST ID: ENST00000411557
  CDS Start-End: 432-615
gcgcgtggcgggcaggcggcaggaggcgggtgggtcaaggtaactctgggctacagagtccttgctgggggttcggggagcgcttggaccccggcttctgggacgcgtcaggtcgccgtgaagatgattgcatgagatcgtgcgtgtgaacgtttgttgacagctgttacttgagtccgacagccctgggggccgtgcatctgcgtaacatggctacctctgaactccttgggggacacgtatatctttgagaatccgatgaaaaccagagattccgcccttgttttcttagaattaaaattaccacagactgggtaatttataaagaaaagaagtttatttggctcacagttctggagactgggaagtccaagagcatggtgcaagtatctggagaagggagcactggctttgctttcatcaggccaaagatgcctttctttgggaatacgttcagtccgaagaagacacctcctcggaagtcggcatctctctccaacctgcattctttggatcgatcaacccgggaggtggagctgggcttggaatacggatccccgactatgaacctggcagggcaaagcctgaagtttgaaaatggccagtggatagcag

SEQ ID NO: 117240 - DNA, 1118 bp, Homo sapiens
  Payload ID: 2893
  Gene Symbol: CBY1
  Gene Name: chibby homolog 1 (Drosophila)
  ENST ID: ENST00000619293
  CDS Start-End: 1-510
atggataaatgtcagaaacatgacgttgagtgtgagaagccagatgcaaacgaggactcactgtgcaattctgtgcatgtacagtggccaggagaagggagcactggctttgctttcatcaggccaaagatgcctttctttgggaatacgttcagtccgaagaagacacctcctcggaagtcggcatctctctccaacctgcattctttggatcgatcaacccgggaggtggagctgggcttggaatacggatccccgactatgaacctggcagggcaaagcctgaagtttgaaaatggccagtggatagcagagacaggggttagtggcggtgtggaccggagggaggttcagcgccttcgcaggcggaaccagcagttggaggaagagaacaatctcttgcggctgaaagtggacatcttattagacatgctttcagagtccactgctgaatcccacttaatggagaaggaactggatgaactgaggatcagccggaagagaaaatgaagaccccagagacatttattggggagtaggatgtggctgagtgctttttttttggccagactagcggattcagtcctggaagagagtatcatataatgagacccacaggcactggcacccttgggttggcaatagaaggtgacatggaatggagaaaaccaagattccagatggggatagtaactagaaggtgcttcagatgcactgcctgcgggtgccagtctgaaaaccagaccgcacagaggcctggggctgctgatgagctttttggtgctctccacacacaagctcgcaaacacacatgtcccagaatagctctgttgggttgtgttgggagaagcggctggagttcattctctcacccccttatgttggtgtttggcgtgtgacagcagttctacagagctctgtgttggggtcatggatgagcggctctcttggctcttaaaggcaggcctctctcttcttgcctttaaagaatcctccttcctcacacctggcctcctctggcttcagcttctcagcagcaagcaccagccttccacaacaacactatatttttatgctactttcctgtttgcactactacttttttattaaacgatgtt

SEQ ID NO: 117241 - DNA, 785 bp, Homo sapiens
  Payload ID: 2894
  Gene Symbol: CBY3
  Gene Name: chibby homolog 3 (Drosophila)
  Uniprot ID: A6NI87
  ENST ID: ENST00000376974
  CDS Start-End: 57-785
tgaggactaacggggaaacatcctccgagaagatacaatctcaagggtgggcctggatgtgggcttccagagaccatctccctgaaccagatcttggggatgcagcgccccctggctcgccttcatcattctggacatccgggctcccgagacaagagcgcagcacgagtcgccagcgctcccgaggctccccttcgagcacctgcgtgccctacaaggtccacgccctggcaaccttcgagtgctcggctacgagccatgccagccgcctgtggcagacgctgcagcagttttgggccgatcacatctcgcggcccttctcgccacggcggccgccactgcgccgcatgccctccctgtccaccttctacctgctggaccacaacacgcgccaggccgagctgggcctcgcctacggcgcgccgtgcatgcgcctcagcaaccaggccttcgtgttccgcggcgggcggtggaccactgagagccagctggcgaggacgcggtcgccgctgctctcgcggaccgcctggggctggaaggcgcaggtgcagcggtccaaaagccaagtgttgctggaggagaacaactacctgaagctgcagcaggaactgctcatagacatgctgactgagaccatggcgcgcatgcacttgctggagaagcagcgcaaccccgaggtgatcccgacggctgcggcgcgcgccgggcagaggaagatgcgcaagcgcgcaggcgccagcgcgggcgtgctcatgatccagccgtgcgctctggactcgcagtga

SEQ ID NO: 117242 - DNA, 2047 bp, Homo sapiens
  Payload ID: 2895
  Gene Symbol: CHN1
  Gene Name: chimerin 1
  Uniprot ID: P15882
  ENST ID: ENST00000295497
  CDS Start-End: 419-1423
agtatgtaggcatctttcattcagaatggacattaatatcttgaatagagaagaaagcttttagaaatgtatcatttgtcaaaattgcatgccttttaaaaaatgataaagagagatgctgagtgttttgtatgttagcatcgactctttctttttatttctgttcagactcaagtttttagaagctagaatatagatccctttaagaaaaaaaaaggaagaaagaagaatttgctggttagtcgacctctgtttaagaagtgcttcatcctcctcctccacctctccgtggtgtttctctgcagctctctgtaggttagggttctgtgctgcctggcagaatgctcatgtgttagctgaatagatatcatcgacagacatagaccactataggttttctttccttgtgaattccaaaatgccatccaaagagtcttggtcagggaggaaaactaatagggctgcagttcacaaatcaaaacaagagggccgtcagcaagatttattgatagcagccttgggaatgaaactgggttctccaaagtcgtctgtgacaatctggcaacctctgaaactctttgcttattcgcagttgacatcacttgttagaagagcaactctgaaagaaaacgagcaaattccaaaatatgaaaagattcacaatttcaaggtgcatacattcagagggccacactggtgtgaatactgtgccaactttatgtggggtctcattgctcagggagtgaaatgtgcagattgtggtttgaatgttcataagcagtgttccaagatggtcccaaatgactgtaagccagacttgaagcatgtcaaaaaggtgtacagctgtgaccttacgacgctcgtgaaagcacataccactaagcggccaatggtggtagacatgtgcatcagggagattgagtctagaggtcttaattctgaaggactataccgagtatcaggatttagtgacctaattgaagatgtcaagatggctttcgacagagatggtgagaaggcagatatttctgtgaacatgtatgaagatatcaacattatcactggtgcacttaaactgtacttcagggatttgccaattccactcattacatatgatgcctaccctaagtttatagaatctgccaaaattatggatccggatgagcaattggaaacccttcatgaagcactgaaactactgccacctgctcactgcgaaaccctccggtacctcatggcacatctaaagagagtgaccctccacgaaaaggagaatcttatgaatgcagagaaccttggaatcgtctttggacccacccttatgagatctccagaactagacgccatggctgcattgaatgatatacggtatcagagactggtggtggagctgcttatcaaaaacgaagacattttattttaaatttttaatttgaggggaaaagaaatgttttacagatgaaggaatgttttatagtaatttaatttgctcctgtagctgcattatttcttgattagaggtttgggcatataaccagattaaagtgaaggaactttctgttgtttttgtagcaccgctcagctgtcttgtaaaacagtgaacacacgctttctggttctagtaatcctgggtgtttatcacgttcagagaaactcaagctattgcatgattagccccctatctggcaaggaaaccccatacagaagaaacaacaaacctgcgcctgcaccgcctctgcgtcctgggtagtctgtgcttgtaatccagcatgtttcacagagtaagcctgttgtgactttgcttttggggtctatgtcattggtttctgatgcttgtacaaacacgcacacacaaatggataaaacagcacctctggctgttacattaccataaaccatatcacatgcctacattttacaaatgatttctggtttctcttagttcttctctaacatagtactttctttccagcaaaagcaaaatgtgttttcagatttgttactttaataaaggttatccataccaataaaaagtgtacaacacagc

SEQ ID NO: 117243 - DNA, 779 bp, Homo sapiens
  Payload ID: 2895
  Gene Symbol: CHN1
  Gene Name: chimerin 1
  ENST ID: ENST00000409089
  CDS Start-End: 196-779
actcaagtttttagaagctagaatatagatccctttaagaaaaaaaaaggaagaaagaagaatttgctgttgacatcacttgttagaagagcaactctgaaagaaaacgagcaaattccaaaatatgaaaagattcacaatttcaaggtgcatacattcagagggccacactggtgtgaatactgtgccaactttatgtggggtctcattgctcagggagtgaaatgtgcagttctggaggccaggaagtccaagatcaagctggcagcaggttcagtgtctgattgtggtttgaatgttcataagcagtgttccaagatggtcccaaatgactgtaagccagacttgaagcatgtcaaaaaggtgtacagctgtgaccttacgacgctcgtgaaagcacataccactaagcggccaatggtggtagacatgtgcatcagggagattgagtctagaggtcttaattctgaaggactataccgagtatcaggatttagtgacctaattgaagatgtcaagatggctttcgacagagatggtgagaaggcagatatttctgtgaacatgtatgaagatatcaacattatcactggtgcacttaaactgtacttcagggatttgccaattccactcattacatatgatgcctaccctaagtttatagaatctgccaaaattatggatccggatgagcaattggaaacccttcatgaagcactgaaactactgccacctgctcactgcgaaaccctccggtacctcatggcacatctaaagag

SEQ ID NO: 117244 - DNA, 1445 bp, Homo sapiens
  Payload ID: 2895
  Gene Symbol: CHN1
  Gene Name: chimerin 1
  ENST ID: ENST00000409597
  CDS Start-End: 17-844
ccatgatgaaaggaggatggctaccatgggactgttgatgctgctgacactagcagcttctcctcactttttgagtatttgctttcaccatgtgcatacattcagagggccacactggtgtgaatactgtgccaactttatgtggggtctcattgctcagggagtgaaatgtgcagattgtggtttgaatgttcataagcagtgttccaagatggtcccaaatgactgtaagccagacttgaagcatgtcaaaaaggtgtacagctgtgaccttacgacgctcgtgaaagcacataccactaagcggccaatggtggtagacatgtgcatcagggagattgagtctagaggtcttaattctgaaggactataccgagtatcaggatttagtgacctaattgaagatgtcaagatggctttcgacagagatggtgagaaggcagatatttctgtgaacatgtatgaagatatcaacattatcactggtgcacttaaactgtacttcagggatttgccaattccactcattacatatgatgcctaccctaagtttatagaatctgccaaaattatggatccggatgagcaattggaaacccttcatgaagcactgaaactactgccacctgctcactgcgaaaccctccggtacctcatggcacatctaaagagagtgaccctccacgaaaaggagaatcttatgaatgcagagaaccttggaatcgtctttggacccacccttatgagatctccagaactagacgccatggctgcattgaatgatatacggtatcagagactggtggtggagctgcttatcaaaaacgaagacattttattttaaatttttaatttgaggggaaaagaaatgttttacagatgaaggaatgttttatagtaatttaatttgctcctgtagctgcattatttcttgattagaggtttgggcatataaccagattaaagtgaaggaactttctgttgtttttgtagcaccgctcagctgtcttgtaaaacagtgaacacacgctttctggttctagtaatcctgggtgtttatcacgttcagagaaactcaagctattgcatgattagccccctatctggcaaggaaaccccatacagaagaaacaacaaacctgcgcctgcaccgcctctgcgtcctgggtagtctgtgcttgtaatccagcatgtttcacagagtaagcctgttgtgactttgcttttggggtctatgtcattggtttctgatgcttgtacaaacacgcacacacaaatggataaaacagcacctctggctgttacattaccataaaccatatcacatgcctacattttacaaatgatttctggtttctcttagttcttctctaacatagtactttctttccagcaaaagcaaaatgtgttttcagatttgttactttaataaaggttatccatac

SEQ ID NO: 117245 - DNA, 1761 bp, Homo sapiens
  Payload ID: 2895
  Gene Symbol: CHN1
  Gene Name: chimerin 1
  Uniprot ID: P15882
  ENST ID: ENST00000409156
  CDS Start-End: 333-1634
atcgcaagatggcgtctgcgaggccgcgggatgcggagtgagcgcgccccgccgggggctgtgcgaggctgctgctgctctccccgtcgccgccgccgccgccgccagtgcggcgccgcctctccgccagccactgcgccgcggccaagcctcctgcctcgcagcggtcccccgcgtcccggcctgcagcctccccgggcgccggcgcccccagcacgccccatcgggcaccccactctctccgaggtgtgggtgcggcgggctgatgaggtgatccctagcccgcctgggaggagcgcctggactcgcgggcggcggcgagcgcctttacaatggccctgaccctgtttgatacagatgaatatagacctcctgtttggaaatcttacttatatcagctacaacaggaagcccctcatcctcgaagaattacctgtacttgcgaggtggaaaacagaccaaagtattatggaagagagtttcatggcatgatctccagagaagcagccgaccagctcttgattgtggctgaggggagctacctcatccgggagagccagcggcagccagggacctacactttggctttaagatttggaagtcaaaccagaaacttcaggctctactacgatggcaagcactttgttggggagaaacgctttgagtccatccacgatctggtgactgatggcttgattactctctatattgaaaccaaggcagcagaatacattgccaagatgacgataaacccaatttatgagcacgtaggatacacaaccttaaacagagagccagcatacaaaaaacatatgccagtcctgaaagagacacatgatgagagagattctacaggccaggatggggtgtcagagaaaagggtgcatacattcagagggccacactggtgtgaatactgtgccaactttatgtggggtctcattgctcagggagtgaaatgtgcagattgtggtttgaatgttcataagcagtgttccaagatggtcccaaatgactgtaagccagacttgaagcatgtcaaaaaggtgtacagctgtgaccttacgacgctcgtgaaagcacataccactaagcggccaatggtggtagacatgtgcatcagggagattgagtctagaggtcttaattctgaaggactataccgagtatcaggatttagtgacctaattgaagatgtcaagatggctttcgacagagatggtgagaaggcagatatttctgtgaacatgtatgaagatatcaacattatcactggtgcacttaaactgtacttcagggatttgccaattccactcattacatatgatgcctaccctaagtttatagaatctgccaaaattatggatccggatgagcaattggaaacccttcatgaagcactgaaactactgccacctgctcactgcgaaaccctccggtacctcatggcacatctaaagagagtgaccctccacgaaaaggagaatcttatgaatgcagagaaccttggaatcgtctttggacccacccttatgagatctccagaactagacgccatggctgcattgaatgatatacggtatcagagactggtggtggagctgcttatcaaaaacgaagacattttattttaaatttttaatttgaggggaaaagaaatgttttacagatgaaggaatgttttatagtaatttaatttgctcctgtagctgcattatttcttgattagaggtttgggcatataaccagattaaagtgaag

SEQ ID NO: 117246 - DNA, 2447 bp, Homo sapiens
  Payload ID: 2895
  Gene Symbol: CHN1
  Gene Name: chimerin 1
  Uniprot ID: P15882
  ENST ID: ENST00000409900
  CDS Start-End: 315-1694
gccaagcctcctgcctcgcaggtacctcctcccgcgcgcacgctccgcgcctgatggcagcgacaagtgccggctcgcggagagctagcggggctccctgggcccggtgcgcccgacaataacgcgtgaataactttttcttgcagcggtcccccgcgtcccggcctgcagcctccccgggcgccggcgcccccagcacgccccatcgggcaccccactctctccgaggtgtgggtgcggcgggctgatgaggtgatccctagcccgcctgggaggagcgcctggactcgcgggcggcggcgagcgcctttacaatggccctgaccctgtttgatacagatgaatatagacctcctgtttggaaatcttacttatatcagctacaacaggaagcccctcatcctcgaagaattacctgtacttgcgaggtggaaaacagaccaaagtattatggaagagagtttcatggcatgatctccagagaagcagccgaccagctcttgattgtggctgaggggagctacctcatccgggagagccagcggcagccagggacctacactttggctttaagatttggaagtcaaaccagaaacttcaggctctactacgatggcaagcactttgttggggagaaacgctttgagtccatccacgatctggtgactgatggcttgattactctctatattgaaaccaaggcagcagaatacattgccaagatgacgataaacccaatttatgagcacgtaggatacacaaccttaaacagagagccagcatacaaaaaacatatgccagtcctgaaagagacacatgatgagagagattctacaggccaggatggggtgtcagagaaaaggttgacatcacttgttagaagagcaactctgaaagaaaacgagcaaattccaaaatatgaaaagattcacaatttcaaggtgcatacattcagagggccacactggtgtgaatactgtgccaactttatgtggggtctcattgctcagggagtgaaatgtgcagattgtggtttgaatgttcataagcagtgttccaagatggtcccaaatgactgtaagccagacttgaagcatgtcaaaaaggtgtacagctgtgaccttacgacgctcgtgaaagcacataccactaagcggccaatggtggtagacatgtgcatcagggagattgagtctagaggtcttaattctgaaggactataccgagtatcaggatttagtgacctaattgaagatgtcaagatggctttcgacagagatggtgagaaggcagatatttctgtgaacatgtatgaagatatcaacattatcactggtgcacttaaactgtacttcagggatttgccaattccactcattacatatgatgcctaccctaagtttatagaatctgccaaaattatggatccggatgagcaattggaaacccttcatgaagcactgaaactactgccacctgctcactgcgaaaccctccggtacctcatggcacatctaaagagagtgaccctccacgaaaaggagaatcttatgaatgcagagaaccttggaatcgtctttggacccacccttatgagatctccagaactagacgccatggctgcattgaatgatatacggtatcagagactggtggtggagctgcttatcaaaaacgaagacattttattttaaatttttaatttgaggggaaaagaaatgttttacagatgaaggaatgttttatagtaatttaatttgctcctgtagctgcattatttcttgattagaggtttgggcatataaccagattaaagtgaaggaactttctgttgtttttgtagcaccgctcagctgtcttgtaaaacagtgaacacacgctttctggttctagtaatcctgggtgtttatcacgttcagagaaactcaagctattgcatgattagccccctatctggcaaggaaaccccatacagaagaaacaacaaacctgcgcctgcaccgcctctgcgtcctgggtagtctgtgcttgtaatccagcatgtttcacagagtaagcctgttgtgactttgcttttggggtctatgtcattggtttctgatgcttgtacaaacacgcacacacaaatggataaaacagcacctctggctgttacattaccataaaccatatcacatgcctacattttacaaatgatttctggtttctcttagttcttctctaacatagtactttctttccagcaaaagcaaaatgtgttttcagatttgttactttaataaaggttatccataccaataaaaagtgtacaacacagcattttctgttaaattattattggttttcagttgtaatttggtattttttctggcatgcgtttattaatttattaaattggcttttagaaataaaaaatattgatagcttacttttttctcataagaata

SEQ ID NO: 117247 - DNA, 561 bp, Homo sapiens
  Payload ID: 2895
  Gene Symbol: CHN1
  Gene Name: chimerin 1
  ENST ID: ENST00000444573
  CDS Start-End: 68-561
gttagctgaatagatatcatcgacagacatagaccactataggttttctttccttgtgaattccaaaatgccatccaaagagtcttggtcagggaggaaaactaatagggctgcagttcacaaatcaaaacaagagggccgtcagcaagatttattgatagcagccttgggaatgaaactgggttctccaaagtcgtctgtgacaatctggcaacctctgaaactctttgcttattcgcagttgacatcacttgttagaagagcaactctgaaagaaaacgagcaaattccaaaatatgaaaagattcacaatttcaaggtgcatacattcagagggccacactggtgtgaatactgtgccaactttatgtggggtctcattgctcagggagtgaaatgtgcagttctggaggccaggaagtccaagatcaagctggcagcaggttcagtgtctgattgtggtttgaatgttcataagcagtgttccaagatggtcccaaatgactgtaagccagacttgaagcatgtcaaaaaggtgtacagctgtgaccttacgacgct

SEQ ID NO: 117248 - DNA, 873 bp, Homo sapiens
  Payload ID: 2895
  Gene Symbol: CHN1
  Gene Name: chimerin 1
  ENST ID: ENST00000425395
  CDS Start-End: 309-380
cgcgggatgcggagtgagcgcgccccgccgggggctgtgcgaggctgctgctgctctccccgtcgccgccgccgccgccgccagtgcggcgccgcctctccgccagccactgcgccgcggccaagcctcctgcctcgcagcggtcccccgcgtcccggcctgcagcctccccgggcgccggcgcccccagcacgccccatcgggcaccccactctctccgaggtgtgggtgcggcgggctgatgaggtgatccctagcccgcctgggaggagcgcctggactcgcgggcggcggcgagcgcctttacaatggccctgaccctgtttgatacagatgaatatagacctcctgtttggaaatcttactgtttcatggcatgatctccagagaagcagccgaccagctcttgattgtggctgaggggagctacctcatccgggagagccagcggcagccagggacctacactttggctttaagttgacatcacttgttagaagagcaactctgaaagaaaacgagcaaattccaaaatatgaaaagattcacaatttcaaggtgcatacattcagagggccacactggtgtgaatactgtgccaactttatgtggggtctcattgctcagggagtgaaatgtgcagattgtggtttgaatgttcataagcagtgttccaagatggtcccaaatgactgtaagccagacttgaagcatgtcaaaaaggtgtacagctgtgaccttacgacgctcgtgaaagcacataccactaagcggccaatggtggtagacatgtgcatcagggagattgagtctagaggtcttaattctgaaggactataccgagtatcaggatttagtgacctaattgaagat

SEQ ID NO: 117249 - DNA, 564 bp, Homo sapiens
  Payload ID: 2895
  Gene Symbol: CHN1
  Gene Name: chimerin 1
  ENST ID: ENST00000443238
  CDS Start-End: 7-564
acttacatgagaggagggagaaacagagacagattgacatcacttgttagaagagcaactctgaaagaaaacgagcaaattccaaaatatgaaaagattcacaatttcaaggtgcatacattcagagggccacactggtgtgaatactgtgccaactttatgtggggtctcattgctcagggagtgaaatgtgcagattgtggtttgaatgttcataagcagtgttccaagatggtcccaaatgactgtaagccagacttgaagcatgtcaaaaaggtgtacagctgtgaccttacgacgctcgtgaaagcacataccactaagcggccaatggtggtagacatgtgcatcagggagattgagtctagaggtcttaattctgaaggactataccgagtatcaggatttagtgacctaattgaagatgtcaagatggctttcgacagagatggtgagaaggcagatatttctgtgaacatgtatgaagatatcaacattatcactggtgcacttaaactgtacttcagggatttgccaattccactcattacatatgatgcctac

SEQ ID NO: 117250 - DNA, 582 bp, Homo sapiens
  Payload ID: 2895
  Gene Symbol: CHN1
  Gene Name: chimerin 1
  ENST ID: ENST00000413882
  CDS Start-End: 27-582
aatgaattgaccatgatgaaaggaggatggctaccatgggactgttgatgctgctgacactagcagcttctcctcactttttgagtatttgctttcaccatgtatgcgtgcatacattcagagggccacactggtgtgaatactgtgccaactttatgtggggtctcattgctcagggagtgaaatgtgcagattgtggtttgaatgttcataagcagtgttccaagatggtcccaaatgactgtaagccagacttgaagcatgtcaaaaaggtgtacagctgtgaccttacgacgctcgtgaaagcacataccactaagcggccaatggtggtagacatgtgcatcagggagattgagtctagaggtcttaattctgaaggactataccgagtatcaggatttagtgacctaattgaagatgtcaagatggctttcgacagagatggtgagaaggcagatatttctgtgaacatgtatgaagatatcaacattatcactggtgcacttaaactgtacttcagggatttgccaattccactcattacatatgatgcctaccctaagtttatagaatctgcca

SEQ ID NO: 117251 - DNA, 898 bp, Homo sapiens
  Payload ID: 2895
  Gene Symbol: CHN1
  Gene Name: chimerin 1
  ENST ID: ENST00000444394
  CDS Start-End: 380-898
gaaactgattgcaggcagtatgtaggcatctttcattcagaatggacattaatatcttgaatagagaagaaagcttttagaaatgtatcatttgtcaaaattgcatgccttttaaaaaatgataaagagagatgctgagtgttttgtatgttagcatcgactctttctttttatttctgttcagactcaagtttttagaagctagaatatagatccctttaagaaaaaaaaaggaagaaagaagaatttgctgttgacatcacttgttagaagagcaactctgaaagaaaacgagcaaattccaaaatatgaaaagattcacaatttcaaggtgcatacattcagagggccacactggtgtgaatactgtgccaactttatgtggggtctcattgctcagggagtgaaatgtgcagattgtggtttgaatgttcataagcagtgttccaagatggtcccaaatgactgtaagccagacttgaagcatgtcaaaaaggtgtacagctgtgaccttacgacgctcgtgaaagcacataccactaagcggccaatggtggtagacatgtgcatcagggagattgagtctagaggtcttaattctgaaggactataccgagtatcaggatttagtgacctaattgaagatgtcaagatggctttcgacagagatggtgagaaggcagatatttctgtgaacatgtatgaagatatcaacattatcactggtgcacttaaactgtacttcagggatttgccaattccactcattacatatgatgcctaccctaagtttatagaatctgccaaaattatggatccggatgagcaattggaaacccttcatgaagcactgaaactactgccacctgctcactgcgaaaccctccggtacctcatg

SEQ ID NO: 117252 - DNA, 569 bp, Homo sapiens
  Payload ID: 2895
  Gene Symbol: CHN1
  Gene Name: chimerin 1
  ENST ID: ENST00000451799
  CDS Start-End: 227-295
agtgcggcgccgcctctccgccagccactgcgccgcggccaagcctcctgcctcgcagcggtcccccgcgtcccggcctgcagcctccccgggcgccggcgcccccagcacgccccatcgggcaccccactctctccgaggtgtgggtgcggcgggctgatgaggtgatccctagcccgcctgggaggagcgcctggactcgcgggcggcggcgagcgcctttacaatggccctgaccctgtttgatacagatgaatatagacctcctgtttggaaatcttactacatcctttaatatccccacaaagaactggggaaaataaatgaccagattatggagaacagagccaaatatccagcactgacttgttataagtatatcagctacaacaggaagcccctcatcctcgaagaattacctgtacttgcgaggtggaaaacagaccaaagtattatggaagagagtttcatggcatgatctccagagaagcagccgaccagctcttgattgtggctgaggggagctacctcatccgggagagccagcggcagccagggacctacacttt

SEQ ID NO: 117253 - DNA, 3530 bp, Homo sapiens
  Payload ID: 2896
  Gene Symbol: CHN2
  Gene Name: chimerin 2
  Uniprot ID: P52757
  ENST ID: ENST00000222792
  CDS Start-End: 531-1937
ttcttcctttgtgtgtgcgcgagcggagttggggcggagggagaagggggaggtcgctctgtctgtccgtctcccgccgcctctgcccggtctactcgaagtgcggcgggagaggcgggagcccaggagagggtgcgggagctggcggggcggctcggagctgccaggacgccctggtcccagccgcgcacaggggagcgtggacggcagaggggctcggcgggagccgagatccgcccgtcccggctgcccctcggcctccctctgctcccacctaccccctgacacccatagaaaagcgtgcaaaggcgcggagcgggacggaaaccacaaataaatagcggcggcggcagcgcgtcatctggtggagcaggaagtgcaggcagagtccggaggctggtgctttctgcgcgtccccaggactttgccatgggctgggggccgcggaggctgcgagcggccgggcgagggcagcggcggcggcgtccgcaccggggctgagcgagcagcgacgcgaggggcgcgcggagatggcagcgtccagcaactccagcctgtccggctcgtcggtgtcctccgatgctgaagaataccagcctcctatatggaaatcatacttatatcagttacagcaagaggcacctcgtcccaagagaatcatttgtcctcgggaggtggaaaacagaccaaaatattatggaagagagtttcatgggatcatctctcgggagcaggcggatgagcttcttggaggcgtggagggtgcctacatccttagagaaagccagcggcaaccaggatgctacacgctggctctcaggtttggaaaccagaccttaaactacaggctcttccacgacgggaaacactttgtgggtgagaagaggtttgagtcgattcatgatctggtgacagatggcttgataacactgtacatagaaacaaaagctgccgagtacatttcaaaaatgacaactaaccccatctatgaacacattggatatgccaccctactcagagaaaaagtatccagaaggctgagcaggtctaaaaatgaaccaagaaaaacaaacgtcacacatgaagaacacacagcggtggaaaagatctcctccctggttcgaagggctgccctcacacacaacgacaaccacttcaattatgagaagacacacaactttaaggtccacacgttccgaggcccacactggtgtgaatattgtgccaatttcatgtgggggctcatcgcccaaggggtccggtgctcagactgtggattgaacgtacacaaacagtgttccaagcacgttcccaatgactgccaacctgatctcaagaggatcaagaaagtgtactgttgtgacctcacaacacttgtgaaggctcacaacactcagagacccatggtggtagacatatgcattcgggaaattgaagcaagaggattaaaatcggaaggcctttacagagtctctgggttcactgaacacattgaagatgtcaaaatggcatttgacagagatggtgaaaaggccgatatatctgccaatgtctatccagacataaacatcatcactggagcccttaaactgtatttcagagacttacccatccctgtcatcacatatgatacctattccaaatttatagatgcagcaaaaatctccaatgcagatgagaggctggaagccgtccatgaagtgctgatgctgctgcctcctgcccactatgaaaccctccggtacctaatgatccacctcaaaaaggttactatgaatgaaaaagacaatttcatgaatgcagaaaatctggggatcgtgtttgggcccactctgatgaggccccctgaggacagcaccctgaccaccctgcatgatatgcggtaccaaaagctgattgtgcagattttaatagaaaacgaagacgttttattctaatccatcagggaaatgagctgaatggccccagcaccatccaagttgacacagctaaaggaataaaaacatttcttaccacttgatttgttttccaagcaagtgctagaatttcctggactgcagaggatcgctgagtggggtactgtgtctcatagacatgcgccacctccacgtgagaacaagggtgaaggtgagggaagcccctcaccttgggtcttttgctgtgcctcctatgtatgtctggtttgctggaagagtgattaatacatctttaatttattaaaaaacaatgtagacctttaaacttcagtcttattggtaataaaagggaacttaattcatacaggtacttgatacagttatacattttccacttacaaaaagaagacaattctgttaaatgaaacgtgtatcgtaaaatgtatttttattttacccacgagaatgttgttatttttagcaaatagaactcaatgcagtgcattggttattaccctgtgtaccttgtccctcattttgctgtgacaccctgaaaaagctgaccacaaatgcagtattatcttgacatacctctgtcctcctcagtgctttttaatgaaatttcacctgccccttgtgttcctgctttggatagtttttgctcttaagcattggcattcttctattgtatggtatgtatttatagcaattgtaggatggtctgaaatgtccacacactttctatgcatacaaattttgtgaattcccaaagtatgctttggaattggtcatagtcttttcgtatcatgagtgtgtatcccagaagatacagaatgcggtcattttacctgaaattatttgagaacactggatgtatctggtctgtgtaaaaagttagcacttaccctcttttcttcctggccaagccctctgaattcatctgttaatatcaaattgtatttttgccacatttctgtattggtgaaaagcgaatctgcagaataactgtcaacgtttttcattcttgttttacaaacctattttttaaagtgagaataaggttggtttttaccaaatatttgttcctccttgacaaaagtagctctgtgtggataatatgattttattactacagttccagtcacttggttatatttatcttagcatgagcctttcacaccaagatttctatattttgtaacataggtgaaatatttaaaacatcaaaaactgtaaatctagatttttaaaaaatccaactgcaatgtcttttcctttgattgagatgatttgtgtaaactcaccagtcttgctttggagtgagcagaagagaatgactattttacgtggagcatcattgtgtgactgttgacctggacagtcccaagggctatgcagatggactccattggcacagggaggtttgacctcttccctgctattatccctcctcccaactgtacagatttgtttgttgtagtttatgtacttcttgatactgtcaaaaaattatctggaaatggttttattttgtgaagtgaacaatactttgtaatttatgatagtgtaaatggaaggcaaagcatcacatgtattaaattcttctgtctatta

SEQ ID NO: 117254 - DNA, 2375 bp, Homo sapiens
  Payload ID: 2896
  Gene Symbol: CHN2
  Gene Name: chimerin 2
  ENST ID: ENST00000409041
  CDS Start-End: 1-783
atgttctctgaagaactgtggctggaaaatgagaaaaagtgtgctgtggttcggaagtctaagcagggcaggaaacgccaagaactgctggccgtagccttcggggtgaaggtgggtgtcaaaggcggctttctttggccccctctcaaactctttgcctgttcacagatctcctccctggttcgaagggctgccctcacacacaacgacaaccacttcaattatgagaagacacacaactttaaggtccacacgttccgaggcccacactggtgtgaatattgtgccaatttcatgtgggggctcatcgcccaaggggtccggtgctcagactgtggattgaacgtacacaaacagtgttccaagcacgttcccaatgactgccaacctgatctcaagaggatcaagaaagtgtactgttgtgacctcacaacacttgtgaaggctcacaacactcagagacccatggtggtagacatatgcattcgggaaattgaagcaagagaaatctccaatgcagatgagaggctggaagccgtccatgaagtgctgatgctgctgcctcctgcccactatgaaaccctccggtacctaatgatccacctcaaaaaggttactatgaatgaaaaagacaatttcatgaatgcagaaaatctggggatcgtgtttgggcccactctgatgaggccccctgaggacagcaccctgaccaccctgcatgatatgcggtaccaaaagctgattgtgcagattttaatagaaaacgaagacgttttattctaatccatcagggaaatgagctgaatggccccagcaccatccaagttgacacagctaaaggaataaaaacatttcttaccacttgatttgttttccaagcaagtgctagaatttcctggactgcagaggatcgctgagtggggtactgtgtctcatagacatgcgccacctccacgtgagaacaagggtgaaggtgagggaagcccctcaccttgggtcttttgctgtgcctcctatgtatgtctggtttgctggaagagtgattaatacatctttaatttattaaaaaacaatgtagacctttaaacttcagtcttattggtaataaaagggaacttaattcatacaggtacttgatacagttatacattttccacttacaaaaagaagacaattctgttaaatgaaacgtgtatcgtaaaatgtatttttattttacccacgagaatgttgttatttttagcaaatagaactcaatgcagtgcattggttattaccctgtgtaccttgtccctcattttgctgtgacaccctgaaaaagctgaccacaaatgcagtattatcttgacatacctctgtcctcctcagtgctttttaatgaaatttcacctgccccttgtgttcctgctttggatagtttttgctcttaagcattggcattcttctattgtatggtatgtatttatagcaattgtaggatggtctgaaatgtccacacactttctatgcatacaaattttgtgaattcccaaagtatgctttggaattggtcatagtcttttcgtatcatgagtgtgtatcccagaagatacagaatgcggtcattttacctgaaattatttgagaacactggatgtatctggtctgtgtaaaaagttagcacttaccctcttttcttcctggccaagccctctgaattcatctgttaatatcaaattgtatttttgccacatttctgtattggtgaaaagcgaatctgcagaataactgtcaacgtttttcattcttgttttacaaacctattttttaaagtgagaataaggttggtttttaccaaatatttgttcctccttgacaaaagtagctctgtgtggataatatgattttattactacagttccagtcacttggttatatttatcttagcatgagcctttcacaccaagatttctatattttgtaacataggtgaaatatttaaaacatcaaaaactgtaaatctagatttttaaaaaatccaactgcaatgtcttttcctttgattgagatgatttgtgtaaactcaccagtcttgctttggagtgagcagaagagaatgactattttacgtggagcatcattgtgtgactgttgacctggacagtcccaagggctatgcagatggactccattggcacagggaggtttgacctcttccctgctattatccctcctcccaactgtacagatttgtttgttgtagtttatgtacttcttgatactgtcaaaaaattatctggaaatggttttattttgtgaagtgaacaatactttgtaatttatgatagtgtaaatggaaggcaaagcatcacatgtattaaattcttctgtctatt

SEQ ID NO: 117255 - DNA, 539 bp, Homo sapiens
  Payload ID: 2896
  Gene Symbol: CHN2
  Gene Name: chimerin 2
  ENST ID: ENST00000409350
  CDS Start-End: 18-539
gcgaggggcgcgcggagatggcagcgtccagcaactccagcctgtccggctcgtcggtgtcctccgtctattctgaacccagaagcccgagagagcttccaaaatatgctgaagaataccagcctcctatatggaaatcatacttatatcagttacagcaagaggcacctcgtcccaagagaatcatttgtcctcgggaggtggaaaacagaccaaaatattatggaagagagtttcatgggatcatctctcgggagcaggcggatgagcttcttggaggcgtggagggtgcctacatccttagagaaagccagcggcaaccaggatgctacacgctggctctcaggtttggaaaccagaccttaaactacaggctcttccacgacgggaaacactttgtgggtgagaagaggtttgagtcgattcatgatctggtgacagatggcttgataacactgtacatagaaacaaaagctgccgagtacatttcaaaaatgacaactaaccccatctatgaacacattggatatgccacccta

SEQ ID NO: 117256 - DNA, 755 bp, Homo sapiens
  Payload ID: 2896
  Gene Symbol: CHN2
  Gene Name: chimerin 2
  ENST ID: ENST00000439711
  CDS Start-End: 1-594
atgttctctgaagaactgtggctggaaaatgagaaaaagtgtgctgtggttcggaagtctaagcagggcaggaaacgccaagaactgctggccgtagccttcggggtgaaggtgggtgtcaaaggcggctttctttggccccctctcaaactctttgcctgttcacagatctcctccctggttcgaagggctgccctcacacacaacgacaaccacttcaattatgagaagacacacaactttaaggtccacacgttccgaggcccacactggtgtgaatattgtgccaatttcatgtgggggctcatcgcccaaggggtccggtgctcagactgtggattgaacgtacacaaacagtgttccaagcacgttcccaatgactgccaacctgatctcaagaggatcaagaaagtgtactgttgtgacctcacaacacttgtgaaggctcacaacactcagagacccatggtggtagacatatgcattcgggaaattgaagcaagaggattaaaatcggaaggcctttacagagtctctgggttcactgaacacattgaagatgtcaaaatggcatttgacagagggttactatgaatgaaaaagacaatttcatgaatgcagaaaatctggggatcgtgtttgggcccactctgatgaggccccctgaggacagcaccctgaccaccctgcatgatatgcggtaccaaaagctgattgtgcagattttaatagaaaacgaagacgttttattctaa

SEQ ID NO: 117257 - DNA, 825 bp, Homo sapiens
  Payload ID: 2896
  Gene Symbol: CHN2
  Gene Name: chimerin 2
  Uniprot ID: P52757
  ENST ID: ENST00000421775
  CDS Start-End: 1-825
atgttctctgaagaactgtggctggaaaatgagaaaaagtgtgctgtggttcggaagtctaagcagggcaggaaacgccaagaactgctggccgtagccttcggggtgaaggtgggtgtcaaaggcggctttctttggccccctctcaaactctttgcctgttcacagatctcctccctggttcgaagggctgccctcacacacaacgacaaccacttcaattatgagaagacacacaactttaaggtccacacgttccgaggcccacactggtgtgaatattgtgccaatttcatgtgggggctcatcgcccaaggggtccggtgctcaggattaaaatcggaaggcctttacagagtctctgggttcactgaacacattgaagatgtcaaaatggcatttgacagagatggtgaaaaggccgatatatctgccaatgtctatccagacataaacatcatcactggagcccttaaactgtatttcagagacttacccatccctgtcatcacatatgatacctattccaaatttatagatgcagcaaaaatctccaatgcagatgagaggctggaagccgtccatgaagtgctgatgctgctgcctcctgcccactatgaaaccctccggtacctaatgatccacctcaaaaaggttactatgaatgaaaaagacaatttcatgaatgcagaaaatctggggatcgtgtttgggcccactctgatgaggccccctgaggacagcaccctgaccaccctgcatgatatgcggtaccaaaagctgattgtgcagattttaatagaaaacgaagacgttttattctaa

SEQ ID NO: 117258 - DNA, 542 bp, Homo sapiens
  Payload ID: 2896
  Gene Symbol: CHN2
  Gene Name: chimerin 2
  ENST ID: ENST00000446446
  CDS Start-End: 1-542
aaccccatctatgaacacattggatatgccaccctactcagagaaaaagtatccagaaggctgagcaggtctaaaaatgaaccaagaaaaacaaacgtcacacatgaagaacacacagcggtggaaaaggtccacacgttccgaggcccacactggtgtgaatattgtgccaatttcatgtgggggctcatcgcccaaggggtccggtgctcagactgtggattgaacgtacacaaacagtgttccaagcacgttcccaatgactgccaacctgatctcaagaggatcaagaaagtgtactgttgtgacctcacaacacttgtgaaggctcacaacactcagagacccatggtggtagacatatgcattcgggaaattgaagcaagaggattaaaatcggaaggcctttacagagtctctgggttcactgaacacattgaagatgtcaaaatggcatttgacagagatggtgaaaaggccgatatatctgccaatgtctatccagacataaacatcatcactggagcccttaaactgtattt

SEQ ID NO: 117259 - DNA, 546 bp, Homo sapiens
  Payload ID: 2896
  Gene Symbol: CHN2
  Gene Name: chimerin 2
  ENST ID: ENST00000433720
  CDS Start-End: 1-275
aagatgtcaaaatggcatttgacagagatggtgaaaaggccgatatatctgccaatgtctatccagacataaacatcatcactggagcccttaaactgtatttcagagacttacccatccctgtcatcacatatgatacctattccaaatttatagatgcagcaaaaatctccaatgcagatgagaggctggaagccgtccatgaagtgctgatgctgctgcctcctgcccactatgaaaccctccggtacctaatgatccacctcaaaaagtaagctcatgtctcgtgcacaaagcctgctctgctcctagagcggttaatgcatgaggaaaagtggacggcattcctccccagccataactgctggagtttcactgtgccaggaaccactccaggcactttcagtgtatcatccctatgaaaggggcgccactgtgatggctcacgcctgtaatcccagcactttgggaggccgaggtgggcggatcatgaggtcaggagattgagaccatcctggctaacacggtgaaaccctgtctctacta

SEQ ID NO: 117260 - DNA, 2404 bp, Homo sapiens
  Payload ID: 2896
  Gene Symbol: CHN2
  Gene Name: chimerin 2
  ENST ID: ENST00000435288
  CDS Start-End: 438-812
actcgaagtgcggcgggagaggcgggagcccaggagagggtgcgggagctggcggggcggctcggagctgccaggacgccctggtcccagccgcgcacaggggagcgtggacggcagaggggctcggcgggagccgagatccgcccgtcccggctgcccctcggcctccctctgctcccacctaccccctgacacccatagaaaagcgtgcaaaggcgcggagcgggacggaaaccacaaataaatagcggcggcggcagcgcgtcatctggtggagcaggaagtgcaggcagagtccggaggctggtgctttctgcgcgtccccaggactttgccatgggctgggggccgcggaggctgcgagcggccgggcgagggcagcggcggcggcgtccgcaccggggctgagcgagcagcgacgcgaggggcgcgcggagatggcagcgtccagcaactccagcctgtccggctcgtcggtgtcctccgatgctgaagaataccagcctcctatatggaaatcatacttatatcagttacagcaagaggcacctcgtcccaagagaatcatttgtcctcgggaggtggaaaacagaccaaaatattatgaaaccctccggtacctaatgatccacctcaaaaaggttactatgaatgaaaaagacaatttcatgaatgcagaaaatctggggatcgtgtttgggcccactctgatgaggccccctgaggacagcaccctgaccaccctgcatgatatgcggtaccaaaagctgattgtgcagattttaatagaaaacgaagacgttttattctaatccatcagggaaatgagctgaatggccccagcaccatccaagttgacacagctaaaggaataaaaacatttcttaccacttgatttgttttccaagcaagtgctagaatttcctggactgcagaggatcgctgagtggggtactgtgtctcatagacatgcgccacctccacgtgagaacaagggtgaaggtgagggaagcccctcaccttgggtcttttgctgtgcctcctatgtatgtctggtttgctggaagagtgattaatacatctttaatttattaaaaaacaatgtagacctttaaacttcagtcttattggtaataaaagggaacttaattcatacaggtacttgatacagttatacattttccacttacaaaaagaagacaattctgttaaatgaaacgtgtatcgtaaaatgtatttttattttacccacgagaatgttgttatttttagcaaatagaactcaatgcagtgcattggttattaccctgtgtaccttgtccctcattttgctgtgacaccctgaaaaagctgaccacaaatgcagtattatcttgacatacctctgtcctcctcagtgctttttaatgaaatttcacctgccccttgtgttcctgctttggatagtttttgctcttaagcattggcattcttctattgtatggtatgtatttatagcaattgtaggatggtctgaaatgtccacacactttctatgcatacaaattttgtgaattcccaaagtatgctttggaattggtcatagtcttttcgtatcatgagtgtgtatcccagaagatacagaatgcggtcattttacctgaaattatttgagaacactggatgtatctggtctgtgtaaaaagttagcacttaccctcttttcttcctggccaagccctctgaattcatctgttaatatcaaattgtatttttgccacatttctgtattggtgaaaagcgaatctgcagaataactgtcaacgtttttcattcttgttttacaaacctattttttaaagtgagaataaggttggtttttaccaaatatttgttcctccttgacaaaagtagctctgtgtggataatatgattttattactacagttccagtcacttggttatatttatcttagcatgagcctttcacaccaagatttctatattttgtaacataggtgaaatatttaaaacatcaaaaactgtaaatctagatttttaaaaaatccaactgcaatgtcttttcctttgattgagatgatttgtgtaaactcaccagtcttgctttggagtgagcagaagagaatgactattttacgtggagcatcattgtgtgactgttgacctggacagtcccaagggctatgcagatggactccattggcacagggaggtttgacctcttccctgctattatccctcctcccaactgtacagatttgtttgttgtagtttatgtacttcttgatactgtcaaaaaattatctggaaatggttttattttgtgaagtgaacaatactttgtaatttatgatagtgtaaatggaaggcaaagcatcacatgtattaaattcttctgtctatt

SEQ ID NO: 117261 - DNA, 2279 bp, Homo sapiens
  Payload ID: 2896
  Gene Symbol: CHN2
  Gene Name: chimerin 2
  ENST ID: ENST00000424025
  CDS Start-End: 1-687
atgttctctgaagaactgtggctggaaaatgagaaaaagtgtgctgtggttcggaagtctaagcagggcaggaaacgccaagaactgctggccgtagccttcggggtgaaggtgggtgtcaaaggcggctttctttggccccctctcaaactctttgcctgttcacagatctcctccctggttcgaagggctgccctcacacacaacgacaaccacttcaattatgagaagacacacaactttaaggtccacacgttccgaggcccacactggtgtgaatattgtgccaatttcatgtgggggctcatcgcccaaggggtccggtgctcaggattaaaatcggaaggcctttacagagtctctgggttcactgaacacattgaagatgtcaaaatggcatttgacagagaaatctccaatgcagatgagaggctggaagccgtccatgaagtgctgatgctgctgcctcctgcccactatgaaaccctccggtacctaatgatccacctcaaaaaggttactatgaatgaaaaagacaatttcatgaatgcagaaaatctggggatcgtgtttgggcccactctgatgaggccccctgaggacagcaccctgaccaccctgcatgatatgcggtaccaaaagctgattgtgcagattttaatagaaaacgaagacgttttattctaatccatcagggaaatgagctgaatggccccagcaccatccaagttgacacagctaaaggaataaaaacatttcttaccacttgatttgttttccaagcaagtgctagaatttcctggactgcagaggatcgctgagtggggtactgtgtctcatagacatgcgccacctccacgtgagaacaagggtgaaggtgagggaagcccctcaccttgggtcttttgctgtgcctcctatgtatgtctggtttgctggaagagtgattaatacatctttaatttattaaaaaacaatgtagacctttaaacttcagtcttattggtaataaaagggaacttaattcatacaggtacttgatacagttatacattttccacttacaaaaagaagacaattctgttaaatgaaacgtgtatcgtaaaatgtatttttattttacccacgagaatgttgttatttttagcaaatagaactcaatgcagtgcattggttattaccctgtgtaccttgtccctcattttgctgtgacaccctgaaaaagctgaccacaaatgcagtattatcttgacatacctctgtcctcctcagtgctttttaatgaaatttcacctgccccttgtgttcctgctttggatagtttttgctcttaagcattggcattcttctattgtatggtatgtatttatagcaattgtaggatggtctgaaatgtccacacactttctatgcatacaaattttgtgaattcccaaagtatgctttggaattggtcatagtcttttcgtatcatgagtgtgtatcccagaagatacagaatgcggtcattttacctgaaattatttgagaacactggatgtatctggtctgtgtaaaaagttagcacttaccctcttttcttcctggccaagccctctgaattcatctgttaatatcaaattgtatttttgccacatttctgtattggtgaaaagcgaatctgcagaataactgtcaacgtttttcattcttgttttacaaacctattttttaaagtgagaataaggttggtttttaccaaatatttgttcctccttgacaaaagtagctctgtgtggataatatgattttattactacagttccagtcacttggttatatttatcttagcatgagcctttcacaccaagatttctatattttgtaacataggtgaaatatttaaaacatcaaaaactgtaaatctagatttttaaaaaatccaactgcaatgtcttttcctttgattgagatgatttgtgtaaactcaccagtcttgctttggagtgagcagaagagaatgactattttacgtggagcatcattgtgtgactgttgacctggacagtcccaagggctatgcagatggactccattggcacagggaggtttgacctcttccctgctattatccctcctcccaactgtacagatttgtttgttgtagtttatgtacttcttgatactgtcaaaaaattatctggaaatggttttattttgtgaagtgaacaatactttgtaatttatgatagtgtaaatggaaggcaaagcatcacatgtattaaattcttctgtctatt

SEQ ID NO: 117262 - DNA, 578 bp, Homo sapiens
  Payload ID: 2896
  Gene Symbol: CHN2
  Gene Name: chimerin 2
  ENST ID: ENST00000439384
  CDS Start-End: 16-578
ctcctctaggctcacatgacccagacccacagggcaaaaagtgcgtcgtcgtgtcccaacctcctggtcccagaaacctggccgcatcaagtcagcgcttcccatgctggaagaagcaagcagccccagggtggaatcttaaaaattaatgaagagcatcggcggggtgccattcaggacttacttgcaagcccaggatttacatttggaaagcgagtggtgtttgattcccactgtttaaaaaggcaacacacgttcgctgatggtctacattccagctgcactagcaatgctgaagaataccagcctcctatatggaaatcatacttatatcagttacagcaagaggcacctcgtcccaagagaatcatttgtcctcgggaggtggaaaacagaccaaaatattatggaagagagtttcatgggatcatctctcgggagcaggcggatgagcttcttggaggcgtggagggtgcctacatccttagagaaagccagcggcaaccaggatgctacacgctggctctcaggtttggaaaccagaccttaaactacaggctcttccacgacgggaaaca

SEQ ID NO: 117263 - DNA, 725 bp, Homo sapiens
  Payload ID: 2896
  Gene Symbol: CHN2
  Gene Name: chimerin 2
  ENST ID: ENST00000495789
  CDS Start-End: 1-651
atggcagcgtccagcaactccagcctgtccggctcgtcggtgtcctccgatgctgaagaataccagcctcctatatggaaatcatacttatatcagttacagcaagaggcacctcgtcccaagagaatcatttgtcctcgggaggtggaaaacagaccaaaatattatggaagagagtttcatgggatcatctctcgggagcaggcggatgagcttcttggaggcgtggagggtgcctacatccttagagaaagccagcggcaaccaggatgctacacgctggctctcaggtttggaaaccagaccttaaactacaggctcttccacgacgggaaacactttgtgggtgagaagaggtttgagtcgattcatgatctggtgacagatggcttgataacactgtacatagaaacaaaagctgccgagtacatttcaaaaatgacaactaaccccatctatgaacacattggatatgccaccctactcagagaaaaagtatccagaaggctgagcaggtctaaaaatgaaccaagaaaaacaaacgtcacacatgaagaacacacagcggtggaaaagatctcctccctggttcgaagggctgccctcacacacaacgacaaccacttcaattatgagaggacagcaccctgaccaccctgcatgatatgcggtaccaaaagctgattgtgcagattttaatagaaaacgaagacgttttattctaa

SEQ ID NO: 117264 - DNA, 570 bp, Homo sapiens
  Payload ID: 2896
  Gene Symbol: CHN2
  Gene Name: chimerin 2
  ENST ID: ENST00000539389
  CDS Start-End: 1-570
atggcagcgtccagcaactccagcctgtccggctcgtcggtgtcctccgatgctgaagaataccagcctcctatatggaaatcatacttatatcagttacagcaagaggcacctcgtcccaagagaatcatttgtcctcgggaggtggaaaacagaccaaaatattatggaagagagtttcatgggatcatctctcgggagcaggcggatgagcttcttggaggcgtggagggtgcctacatccttagagaaagccagcggcaaccaggatgctacacgctggctctcagagaaatctccaatgcagatgagaggctggaagccgtccatgaagtgctgatgctgctgcctcctgcccactatgaaaccctccggtacctaatgatccacctcaaaaaggttactatgaatgaaaaagacaatttcatgaatgcagaaaatctggggatcgtgtttgggcccactctgatgaggccccctgaggacagcaccctgaccaccctgcatgatatgcggtaccaaaagctgattgtgcagattttaatagaaaacgaagacgttttattctaa

SEQ ID NO: 117265 - DNA, 754 bp, Homo sapiens
  Payload ID: 2896
  Gene Symbol: CHN2
  Gene Name: chimerin 2
  ENST ID: ENST00000474070
  CDS Start-End: 1-410
acagggcaaaaagtgcgtcgtcgtgtcccaacctcctggtcccagaaacctggccgcatcaagtcagcgcttcccatgctggaagaagcaagcagccccagggtggaatcttaaaaattaatgaagagcatcggcggggtgccattcagatgctgaagaataccagcctcctatatggaaatcatacttatatcagttacagcaagaggcacctcgtcccaagagaatcatttgtcctcgggaggtggaaaacagaccaaaatattatggaagagagtttcatgggatcatctctcgggagcaggcggatgagcttcttggaggcgtggagggtgcctacatccttagagaaagccagcggcaaccaggatgctacacgctggctctcaggtttggaaaccagaccttaaactacaggctcttccacgacgggaaacactttgtgggtgagaagaggtttgagtcgattcatgatctggtgacagatggcttgataacactgtacatagaaacaaaagctgccgagtacatttcaaaaatgacaactaaccccatctatgaacacattggatatgccaccctactcagagaaaaagtatccagaaggctgagcaggtctaaaaatgaaccaagaaaaacaaacgtcacacatgaagaacacacagcggtggaaaagatctcctccctggttcgaagggctgccctcacacacaacgacaaccacttcaattatgagaagacacacaactttaag

SEQ ID NO: 117266 - DNA, 549 bp, Homo sapiens
  Payload ID: 2896
  Gene Symbol: CHN2
  Gene Name: chimerin 2
  ENST ID: ENST00000539406
  CDS Start-End: 1-549
atggcagcgtccagcaactccagcctgtccggctcgtcggtgtcctccgatgctgaagaataccagcctcctatatggaaatcatacttatatcagttacagcaagaggcacctcgtcccaagagaatcatttgtcctcgggaggtggaaaacagaccaaaatattatggaagagagtttcatgggatcatctctcgggagcaggcggatgagcttcttggaggcgtggagggtgcctacatccttagagaaagccagcggcaaccaggatgctacacgctggctctcaggtttggaaaccagaccttaaactacaggctcttccacgacgggaaacactatgaaaccctccggtacctaatgatccacctcaaaaaggttactatgaatgaaaaagacaatttcatgaatgcagaaaatctggggatcgtgtttgggcccactctgatgaggccccctgaggacagcaccctgaccaccctgcatgatatgcggtaccaaaagctgattgtgcagattttaatagaaaacgaagacgttttattctaa

SEQ ID NO: 117267 - DNA, 989 bp, Homo sapiens
  Payload ID: 2896
  Gene Symbol: CHN2
  Gene Name: chimerin 2
  ENST ID: ENST00000423511
  CDS Start-End: 878-989
gccatgaaccttgtgatggatgaggaaaagatattctttttctccccttacagtttctggcagccaacatggggtggctgtgacaccccactagttccagaacctgcagatgagatcctgggacaaccaataaaaaaacaacaaaaaggagctgcttccacctgtctcctgtgcccttggtttctgctaatcctacattccaagaataaaagtcttcctatgcgttcctaggcagaagccaagtttccctgctttgggcacgttcaaaatagaaggtattttccgcttctcttgcttctgagcacccacgaaatcaacacatccccaaaacacgcgttgagggagtaagggaaagtgtcctgcacccgccaccctcccgcgctaagagcggcagaggaccccacagcttcgtacttccccggaggagctcctggagtaggagacggcttctagcctggaagaaccccgggtgcgacagttgtgccaggaaacttcaagagtattccctcggctgggcgcacgcagtacatccccaatgctccaatttgaactttgactcggccacgaccaccccactccagtctcactctacggtgctttctcccctgttggtgctgagggcttttgagactacctgccccgcgctccctaagtccgagggaccgaggcgaggacctgtcccgctgagctggcacgacccacgcagggcaggcggcacttacgcggcgcagtcggtgctcctccctgagccgcggcgcgcaaggaccccagccggttgtccttgcagcgcttcccaaatcaggcagaagtgaggcagccccacccagtcacgaggaccctgcagaactcgagcctttaagcgctcctctaggctcacatgacccagacccacagggcaaaaagtgcgtcgtcgtgtcccaacctcctggtcccagaaacctggccgcatcaagtcagcgcttcccatgctggaagaagcaagcagcccc

SEQ ID NO: 117268 - DNA, 2991 bp, Homo sapiens
  Payload ID: 2896
  Gene Symbol: CHN2
  Gene Name: chimerin 2
  Uniprot ID: P52757
  ENST ID: ENST00000412711
  CDS Start-End: 400-1398
gtgtgtttgagtgtgaaatgtgctaataaggaggagagacctctcctttgcaatgtgctgcggcaggagaaagcaggctgccggcccctgcctccctgaatcctcagtggctgactggataccgcttctgggggttgctgtgcacatgaatgtttgctattgttccaggcgcacgtcggccttaagaaatagcacaaaacaggcccatccttattcagaagccgggccccctccatcactcaaactgggcctttcaggtcacatgccggaggctgctgcagacaggacccagctgcctcaaatctgccgcctaacataagctgcggttcgaaaatcctgacagcacagggcttcctgggctctgcagagcaaactggaaagagctgggatccaggcactatgttctctgaagaactgtggctggaaaatgagaaaaagtgtgctgtggttcggaagtctaagcagggcaggaaacgccaagaactgctggccgtagccttcggggtgaaggtgggtgtcaaaggcggctttctttggccccctctcaaactctttgcctgttcacagatctcctccctggttcgaagggctgccctcacacacaacgacaaccacttcaattatgagaagacacacaactttaaggtccacacgttccgaggcccacactggtgtgaatattgtgccaatttcatgtgggggctcatcgcccaaggggtccggtgctcagactgtggattgaacgtacacaaacagtgttccaagcacgttcccaatgactgccaacctgatctcaagaggatcaagaaagtgtactgttgtgacctcacaacacttgtgaaggctcacaacactcagagacccatggtggtagacatatgcattcgggaaattgaagcaagaggattaaaatcggaaggcctttacagagtctctgggttcactgaacacattgaagatgtcaaaatggcatttgacagagatggtgaaaaggccgatatatctgccaatgtctatccagacataaacatcatcactggagcccttaaactgtatttcagagacttacccatccctgtcatcacatatgatacctattccaaatttatagatgcagcaaaaatctccaatgcagatgagaggctggaagccgtccatgaagtgctgatgctgctgcctcctgcccactatgaaaccctccggtacctaatgatccacctcaaaaaggttactatgaatgaaaaagacaatttcatgaatgcagaaaatctggggatcgtgtttgggcccactctgatgaggccccctgaggacagcaccctgaccaccctgcatgatatgcggtaccaaaagctgattgtgcagattttaatagaaaacgaagacgttttattctaatccatcagggaaatgagctgaatggccccagcaccatccaagttgacacagctaaaggaataaaaacatttcttaccacttgatttgttttccaagcaagtgctagaatttcctggactgcagaggatcgctgagtggggtactgtgtctcatagacatgcgccacctccacgtgagaacaagggtgaaggtgagggaagcccctcaccttgggtcttttgctgtgcctcctatgtatgtctggtttgctggaagagtgattaatacatctttaatttattaaaaaacaatgtagacctttaaacttcagtcttattggtaataaaagggaacttaattcatacaggtacttgatacagttatacattttccacttacaaaaagaagacaattctgttaaatgaaacgtgtatcgtaaaatgtatttttattttacccacgagaatgttgttatttttagcaaatagaactcaatgcagtgcattggttattaccctgtgtaccttgtccctcattttgctgtgacaccctgaaaaagctgaccacaaatgcagtattatcttgacatacctctgtcctcctcagtgctttttaatgaaatttcacctgccccttgtgttcctgctttggatagtttttgctcttaagcattggcattcttctattgtatggtatgtatttatagcaattgtaggatggtctgaaatgtccacacactttctatgcatacaaattttgtgaattcccaaagtatgctttggaattggtcatagtcttttcgtatcatgagtgtgtatcccagaagatacagaatgcggtcattttacctgaaattatttgagaacactggatgtatctggtctgtgtaaaaagttagcacttaccctcttttcttcctggccaagccctctgaattcatctgttaatatcaaattgtatttttgccacatttctgtattggtgaaaagcgaatctgcagaataactgtcaacgtttttcattcttgttttacaaacctattttttaaagtgagaataaggttggtttttaccaaatatttgttcctccttgacaaaagtagctctgtgtggataatatgattttattactacagttccagtcacttggttatatttatcttagcatgagcctttcacaccaagatttctatattttgtaacataggtgaaatatttaaaacatcaaaaactgtaaatctagatttttaaaaaatccaactgcaatgtcttttcctttgattgagatgatttgtgtaaactcaccagtcttgctttggagtgagcagaagagaatgactattttacgtggagcatcattgtgtgactgttgacctggacagtcccaagggctatgcagatggactccattggcacagggaggtttgacctcttccctgctattatccctcctcccaactgtacagatttgtttgttgtagtttatgtacttcttgatactgtcaaaaaattatctggaaatggttttattttgtgaagtgaacaatactttgtaatttatgatagtgtaaatggaaggcaaagcatcacatgtattaaattcttctgtctatta

SEQ ID NO: 117269 - DNA, 1598 bp, Homo sapiens
  Payload ID: 2897
  Gene Symbol: CHIT1
  Gene Name: chitinase 1 (chitotriosidase)
  Uniprot ID: Q13231
  ENST ID: ENST00000255427
  CDS Start-End: 36-1379
tttgtatgggctgcagcctgccgctgagctgcatcatggtgcggtctgtggcctgggcaggtttcatggtcctgctgatgatcccatggggctctgctgcaaaactggtctgctacttcaccaactgggcccagtacagacagggggaggctcgcttcctgcccaaggacttggaccccagcctttgcacccacctcatctacgccttcgctggcatgaccaaccaccagctgagcaccactgagtggaatgacgagactctctaccaggagttcaatggcctgaagaagatgttcacagatatggtagccacggccaacaaccgtcagacctttgtcaactcggccatcaggtttctgcgcaaatacagctttgacggccttgaccttgactgggagtacccaggaagccaggggagccctgccgtagacaaggagcgcttcacaaccctggtacaggacttggccaatgccttccagcaggaagcccagacctcagggaaggaacgccttcttctgagtgcagcggttccagctgggcagacctatgtggatgctggatacgaggtggacaaaatcgcccagaacctggattttgtcaaccttatggcctacgacttccatggctcttgggagaaggtcacgggacataacagccccctctacaagaggcaagaagagagtggtgcagcagccagcctcaacgtggatgctgctgtgcaacagtggctgcagaaggggacccctgccagcaagctgatccttggcatgcctacctacggacgctccttcacactggcctcctcatcagacaccagagtgggggccccagccacagggtctggcactccaggccccttcaccaaggaaggagggatgctggcctactatgaagtctgctcctggaagggggccaccaaacagagaatccaggatcagaaggtgccctacatcttccgggacaaccagtgggtgggctttgatgatgtggagagcttcaaaaccaaggtcagctatctgaagcagaagggactgggcggggccatggtctgggcactggacttagatgactttgccggcttctcctgcaaccagggccgataccccctcatccagacgctacggcaggaactgagtcttccatacttgccttcaggcaccccagagcttgaagttccaaaaccaggtcagccctctgaacctgagcatggccccagccctggacaagacacgttctgccagggcaaagctgatgggctctatcccaatcctcgggaacggtccagcttctacagctgtgcagcggggcggctgttccagcaaagctgcccgacaggcctggtgttcagcaactcctgcaaatgctgcacctggaattgagtcgctaaagcccctccagtcccagctttgaggctgggcccaggatcactctacagcctgcctcctgggttttccctgggggccgcaatctggctcctgcaggcctttctgtggtcttcctttatccaggctttctgctctcagccttgccttccttttttctgggtctcctgggctgcccctttcacttgcaaaataaatctttggtttgtgcccctc

SEQ ID NO: 117270 - DNA, 2246 bp, Homo sapiens
  Payload ID: 2897
  Gene Symbol: CHIT1
  Gene Name: chitinase 1 (chitotriosidase)
  Uniprot ID: Q13231
  ENST ID: ENST00000367229
  CDS Start-End: 36-1436
tttgtatgggctgcagcctgccgctgagctgcatcatggtgcggtctgtggcctgggcaggtttcatggtcctgctgatgatcccatggggctctgctgcaaaactggtctgctacttcaccaactgggcccagtacagacagggggaggctcgcttcctgcccaaggacttggaccccagcctttgcacccacctcatctacgccttcgctggcatgaccaaccaccagctgagcaccactgagtggaatgacgagactctctaccaggagttcaatggcctgaagaagatgaatcccaagctgaagaccctgttagccatcggaggctggaatttcggcactcagaagttcacagatatggtagccacggccaacaaccgtcagacctttgtcaactcggccatcaggtttctgcgcaaatacagctttgacggccttgaccttgactgggagtacccaggaagccaggggagccctgccgtagacaaggagcgcttcacaaccctggtacaggacttggccaatgccttccagcaggaagcccagacctcagggaaggaacgccttcttctgagtgcagcggttccagctgggcagacctatgtggatgctggatacgaggtggacaaaatcgcccagaacctggattttgtcaaccttatggcctacgacttccatggctcttgggagaaggtcacgggacataacagccccctctacaagaggcaagaagagagtggtgcagcagccagcctcaacgtggatgctgctgtgcaacagtggctgcagaaggggacccctgccagcaagctgatccttggcatgcctacctacggacgctccttcacactggcctcctcatcagacaccagagtgggggccccagccacagggtctggcactccaggccccttcaccaaggaaggagggatgctggcctactatgaagtctgctcctggaagggggccaccaaacagagaatccaggatcagaaggtgccctacatcttccgggacaaccagtgggtgggctttgatgatgtggagagcttcaaaaccaaggtcagctatctgaagcagaagggactgggcggggccatggtctgggcactggacttagatgactttgccggcttctcctgcaaccagggccgataccccctcatccagacgctacggcaggaactgagtcttccatacttgccttcaggcaccccagagcttgaagttccaaaaccaggtcagccctctgaacctgagcatggccccagccctggacaagacacgttctgccagggcaaagctgatgggctctatcccaatcctcgggaacggtccagcttctacagctgtgcagcggggcggctgttccagcaaagctgcccgacaggcctggtgttcagcaactcctgcaaatgctgcacctggaattgagtcgctaaagcccctccagtcccagctttgaggctgggcccaggatcactctacagcctgcctcctgggttttccctgggggccgcaatctggctcctgcaggcctttctgtggtcttcctttatccaggctttctgctctcagccttgccttccttttttctgggtctcctgggctgcccctttcacttgcaaaataaatctttggtttgtgcccctcttcccaaagatgtggtgacttaagaggctctctaagcacactgttgactccaaaacatccgcaggtcagagccaggtgggaaggtggtccgtgcaggatgtgccaggccctgtggcaggtcttgccccatgagtccatatgccagtgggcagtttccagtacacaggtgatggcagccagagcgcggccccaagtgcaacacgttctttggttattggctcagaagcctggaaacaggagcttctgcggaccttcacgcacgtgttattcccaaaatgccactagatggcagcagagaagaacttttccctgatttaagcgctctgcgagcagccactcagcattacactaagaattcagacccctggtactcaggggtcttcgagataaatcctgtttgggccctttgcaggccctatctcacctactgcccccgttcaccagatgaagaaggaacaatgattattctcactttataggcatttaaactgaagactgattctaaccaattctgagtccagaaccaaggcctgaaatgggccagagagcatgcacacggtgtcctggttaaataaagtcatcccaacattc

SEQ ID NO: 117271 - DNA, 1605 bp, Homo sapiens
  Payload ID: 2897
  Gene Symbol: CHIT1
  Gene Name: chitinase 1 (chitotriosidase)
  ENST ID: ENST00000503786
  CDS Start-End: 36-1121
tttgtatgggctgcagcctgccgctgagctgcatcatggtgcggtctgtggcctgggcaggtttcatggtcctgctgatgatcccatggggctctgctgcaaaactggtctgctacttcaccaactgggcccagtacagacagggggaggctcgcttcctgcccaaggacttggaccccagcctttgcacccacctcatctacgccttcgctggcatgaccaaccaccagctgagcaccactgagtggaatgacgagactctctaccaggagttcaatggcctgaagaagatgaatcccaagctgaagaccctgttagccatcggaggctggaatttcggcactcagaagttcacagatatggtagccacggccaacaaccgtcagacctttgtcaactcggccatcaggtttctgcgcaaatacagctttgacggccttgaccttgactgggagtacccaggaagccaggggagccctgccgtagacaaggagcgcttcacaaccctggtacaggacttggccaatgccttccagcaggaagcccagacctcagggaaggaacgccttcttctgagtgcagcggttccagctgggcagacctatgtggatgctggatacgaggtggacaaaatcgcccagaacctggattttgtcaaccttatggcctacgacttccatggctcttgggagaaggtcacgggacataacagccccctctacaagaggcaagaagagagtggtgcagcagccagcctcaacgtggatgctgctgtgcaacagtggctgcagaaggggacccctgccagcaagctgatccttggcatgcctacctacggacgctccttcacactggcctcctcatcagacaccagagtgggggccccagccacagggtctggcactccaggccccttcaccaaggaaggagggatgctggcctactatgaagtctgctcctggaagggggccaccaaacagagaatccaggatcagaaggtgccctacatcttccgggacaaccagtgggtgggctttgatgatgtggagagcttcaaaaccaaggtcatgcttacgttaagacaaggagactgcaaaatgactgatgtccaagcagcatgaggactcagcatccaggctcccagcccaaggctgtctccagaatctacagccactcacaggcctgaggctgctggagcaaaaagggccctgtccagaagaggtcagctatctgaagcagaagggactgggcggggccatggtctgggcactggacttagatgactttgccggcttctcctgcaaccagggccgataccccctcatccagacgctacggcaggaactgaatgggtaaagccttaactgcctgtcacatgtgaggccaggtgttgcctgtggcactgtgcttcagctgtaggtcttccatacttgccttcaggcaccccagagcttgaagttccaaaaccaggtcagccctctgaacctgagcatggccccagccctggacaagacacgttctgccagggcaaagctgatgggctctatcccaatcctcgggaacggtccagcttctacagctgtgcagcggggcggctgttccagc

SEQ ID NO: 117272 - DNA, 1700 bp, Homo sapiens
  Payload ID: 2897
  Gene Symbol: CHIT1
  Gene Name: chitinase 1 (chitotriosidase)
  Uniprot ID: Q13231
  ENST ID: ENST00000491855
  CDS Start-End: 10-1173
agctgcatcatggtgcggtctgtggcctgggcaggtttcatggtcctgctgatgatcccatggggctctgctgcaaaactggtctgctacttcaccaactgggcccagtacagacagggggaggctcgcttcctgcccaaggacttggaccccagcctttgcacccacctcatctacgccttcgctggcatgaccaaccaccagctgagcaccactgagtggaatgacgagactctctaccaggagttcaatggcctgaagaagatgaatcccaagctgaagaccctgttagccatcggaggctggaatttcggcactcagaagttcacagatatggtagccacggccaacaaccgtcagacctttgtcaactcggccatcaggtttctgcgcaaatacagctttgacggccttgaccttgactgggagtacccaggaagccaggggagccctgccgtagacaaggagcgcttcacaaccctggtacaggacttggccaatgccttccagcaggaagcccagacctcagggaaggaacgccttcttctgagtgcagcggttccagctgggcagacctatgtggatgctggatacgaggtggacaaaatcgcccagaacctggattttgtcaaccttatggcctacgacttccatggctcttgggagaaggtcacgggacataacagccccctctacaagaggcaagaagagagtggtgcagcagccagcctcaacgtggatgctgctgtgcaacagtggctgcagaaggggacccctgccagcaagctgatccttggcatgcctacctacggacgctccttcacactggcctcctcatcagacaccagagtgggggccccagccacagggtctggcactccaggccccttcaccaaggaaggagggatgctggcctactatgaagtctgctcctggaagggggccaccaaacagagaatccaggatcagaaggtgccctacatcttccgggacaaccagtgggtgggctttgatgatgtggagagcttcaaaaccaaggtcagctatctgaagcagaagggactgggcggggccatggtctgggcactggacttagatgactttgccggcttctcctgcaaccagggccgataccccctcatccagacgctacggcaggaactgaatgggtaaagccttaactgcctgtcacatgtgaggccaggtgttgcctgtggcactgtgcttcagctgtaggtcttccatacttgccttcaggcaccccagagcttgaagttccaaaaccaggtcagccctctgaacctgagcatggccccagccctggacaagacacgttctgccagggcaaagctgatgggctctatcccaatcctcgggaacggtccagcttctacagctgtgcagcggggcggctgttccagcaaagctgcccgacaggcctggtgttcagcaactcctgcaaatgctgcacctggaattgagtcgctaaagcccctccagtcccagctttgaggctgggcccaggatcactctacagcctgcctcctgggttttccctgggggccgcaatctggctcctgcaggcctttctgtggtcttcctttatccaggctttctgctctcagccttgccttccttttttctgggtctcctgggctgcccctttcacttgcaaaataaatctttggtttgtgcccctc

SEQ ID NO: 117273 - DNA, 1792 bp, Homo sapiens
  Payload ID: 2898
  Gene Symbol: CHI3L1
  Gene Name: chitinase 3-like 1 (cartilage glycoprotein-39)
  Uniprot ID: P36222
  ENST ID: ENST00000255409
  CDS Start-End: 127-1278
agtggagtgggacaggtatataaaggaagtacagggcctggggaagaggccctgtctaggtagctggcaccaggagccgtgggcaagggaagaggccacaccctgccctgctctgctgcagccagaatgggtgtgaaggcgtctcaaacaggctttgtggtcctggtgctgctccagtgctgctctgcatacaaactggtctgctactacaccagctggtcccagtaccgggaaggcgatgggagctgcttcccagatgcccttgaccgcttcctctgtacccacatcatctacagctttgccaatataagcaacgatcacatcgacacctgggagtggaatgatgtgacgctctacggcatgctcaacacactcaagaacaggaaccccaacctgaagactctcttgtctgtcggaggatggaactttgggtctcaaagattttccaagatagcctccaacacccagagtcgccggactttcatcaagtcagtaccgccatttctgcgcacccatggctttgatgggctggaccttgcctggctctaccctggacggagagacaaacagcattttaccaccctaatcaaggaaatgaaggccgaatttataaaggaagcccagccagggaaaaagcagctcctgctcagcgcagcactgtctgcggggaaggtcaccattgacagcagctatgacattgccaagatatcccaacacctggatttcattagcatcatgacctacgattttcatggagcctggcgtgggaccacaggccatcacagtcccctgttccgaggtcaggaggatgcaagtcctgacagattcagcaacactgactatgctgtggggtacatgttgaggctgggggctcctgccagtaagctggtgatgggcatccccaccttcgggaggagcttcactctggcttcttctgagactggtgttggagccccaatctcaggaccgggaattccaggccggttcaccaaggaggcagggacccttgcctactatgagatctgtgacttcctccgcggagccacagtccatagaatcctcggccagcaggtcccctatgccaccaagggcaaccagtgggtaggatacgacgaccaggaaagcgtcaaaagcaaggtgcagtacctgaaggacaggcagctggcgggcgccatggtatgggccctggacctggatgacttccagggctccttctgtggccaggatctgcgcttccctctcaccaatgccatcaaggatgcactcgctgcaacgtagccctctgttctgcacacagcacgggggccaaggatgccccgtccccctctggctccagctggccgggagcctgatcacctgccctgctgagtcccaggctgagcctcagtctccctcccttggggcctatgcagaggtccacaacacacagatttgagctcagccctggtgggcagagaggtagggatggggctgtggggatagtgaggcatcgcaatgtaagactcgggattagtacacacttgttgattaatggaaatgtttacagatccccaagcctggcaagggaatttcttcaactccctgccccccagccctccttatcaaaggacaccattttggcaagctctatcaccaaggagccaaacatcctacaagacacagtgaccatactaattataccccctgcaaagcccagcttgaaaccttcacttaggaacgtaatcgtgtcccctatcctacttccccttcctaattccacagctgctcaataaagtacaagagcttaacagtg

SEQ ID NO: 117274 - DNA, 921 bp, Homo sapiens
  Payload ID: 2898
  Gene Symbol: CHI3L1
  Gene Name: chitinase 3-like 1 (cartilage glycoprotein-39)
  ENST ID: ENST00000404436
  CDS Start-End: 1-457
gctcctgctcagcgcagcactgtctgcggggaaggtcaccattgacagcagctatgacattgccaagatatcccaacacctggatttcattagcatcatgacctacgattttcatggagcctggcgtgggaccacaggccatcacagtcccctgttccgaggtcaggaggatgcaagtcctgacagattcagcaacactatctgtgacttcctccgcggagccacagtccatagaatcctcggccagcaggtcccctatgccaccaagggcaaccagtgggtaggatacgacgaccaggaaagcgtcaaaagcaaggtgcagtacctgaaggacaggcagctggcgggcgccatggtatgggccctggacctggatgacttccagggctccttctgtggccaggatctgcgcttccctctcaccaatgccatcaaggatgcactcgctgcaacgtagccctctgttctgcacacagcacgggggccaaggatgccccgtccccctctggctccagctggccgggagcctgatcacctgccctgctgagtcccaggctgagcctcagtctccctcccttggggcctatgcagaggtccacaacacacagatttgagctcagccctggtgggcagagaggtagggatggggctgtggggatagtgaggcatcgcaatgtaagactcgggattagtacacacttgttgattaatggaaatgtttacagatccccaagcctggcaagggaatttcttcaactccctgccccccagccctccttatcaaaggacaccattttggcaagctctatcaccaaggagccaaacatcctacaagacacagtgaccatactaattataccccctgcaaagcccagcttgaaaccttcacttaggaacgtaatcgtgtcccctatcctactt

SEQ ID NO: 117275 - DNA, 1489 bp, Homo sapiens
  Payload ID: 2899
  Gene Symbol: CHI3L2
  Gene Name: chitinase 3-like 2
  Uniprot ID: Q15782
  ENST ID: ENST00000369744
  CDS Start-End: 121-1263
cacaagtctgccaggggaagtccctggacttcttgcttctttcgtgtaggacaggctgtcgaaacctcagtggataaaagacctagagaatgtgtatcccagaagaagctggccaaggatatgggagcaaccaccatggaccagaagtctctctgggcaggatctgcctacaaactggtttgctactttaccaactggtcccaggaccggcaggaaccaggaaaattcacccctgagaatattgaccccttcctatgctctcatctcatctattcattcgccagcatcgaaaacaacaaggttatcatcaaggacaagagtgaagtgatgctctaccagaccatcaacagtctcaaaaccaagaatcccaaactgaaaattctcttgtccattggagggtacctgtttggttccaaagggttccaccctatggtggattcttctacatcacgcttggaattcattaactccataatcctgtttctgaggaaccataactttgatggactggatgtaagctggatctacccagatcagaaagaaaacactcatttcactgtgctgattcatgagttagcagaagcctttcagaaggacttcacaaaatccaccaaggaaaggcttctcttgactgcgggcgtatctgcagggaggcaaatgattgataacagctatcaagttgagaaactggcaaaagatctggatttcatcaacctcctgtcctttgacttccatgggtcttgggaaaagccccttatcactggccacaacagccctctgagcaaggggtggcaggacagagggccaagctcctactacaatgtggaatatgctgtggggtactggatacataagggaatgccatcagagaaggtggtcatgggcatccccacatatgggcactccttcacactggcctctgcagaaaccaccgtgggggcccctgcctctggccctggagctgctggacccatcacagagtcttcaggcttcctggcctattatgagatctgccagttcctgaaaggagccaagatcacgcggctccaggatcagcaggttccctacgcagtcaaggggaaccagtgggtgggctatgatgatgtgaagagtatggagaccaaggttcagttcttaaagaatttaaacctgggaggagccatgatctggtctattgacatggatgacttcactggcaaatcctgcaaccagggcccttaccctcttgtccaagcagtcaagagaagccttggctccctgtgaaggattaacttacagagaagcaggcaagatgaccttgctgcctggggcctgctctctcccaggaattctcatgtgggattccccttgccaggctggcctttggatctctcttccaagcctttcctgacttcctcttagatcatagattggacctggttttgttttcctgcagctgttgacttgttgccctgaagtacaataaaaaaaattcattttgctccagtaa

SEQ ID NO: 117276 - DNA, 1468 bp, Homo sapiens
  Payload ID: 2899
  Gene Symbol: CHI3L2
  Gene Name: chitinase 3-like 2
  Uniprot ID: Q15782
  ENST ID: ENST00000369748
  CDS Start-End: 72-1244
gacaggctgtcgaaacctcagtggataaaagacctagagaatgtgtatcccagaagaagctggccaaggatatgggagcaaccaccatggaccagaagtctctctgggcaggtgtagtggtcttgctgcttctccagggaggatctgcctacaaactggtttgctactttaccaactggtcccaggaccggcaggaaccaggaaaattcacccctgagaatattgaccccttcctatgctctcatctcatctattcattcgccagcatcgaaaacaacaaggttatcatcaaggacaagagtgaagtgatgctctaccagaccatcaacagtctcaaaaccaagaatcccaaactgaaaattctcttgtccattggagggtacctgtttggttccaaagggttccaccctatggtggattcttctacatcacgcttggaattcattaactccataatcctgtttctgaggaaccataactttgatggactggatgtaagctggatctacccagatcagaaagaaaacactcatttcactgtgctgattcatgagttagcagaagcctttcagaaggacttcacaaaatccaccaaggaaaggcttctcttgactgcgggcgtatctgcagggaggcaaatgattgataacagctatcaagttgagaaactggcaaaagatctggatttcatcaacctcctgtcctttgacttccatgggtcttgggaaaagccccttatcactggccacaacagccctctgagcaaggggtggcaggacagagggccaagctcctactacaatgtggaatatgctgtggggtactggatacataagggaatgccatcagagaaggtggtcatgggcatccccacatatgggcactccttcacactggcctctgcagaaaccaccgtgggggcccctgcctctggccctggagctgctggacccatcacagagtcttcaggcttcctggcctattatgagatctgccagttcctgaaaggagccaagatcacgcggctccaggatcagcaggttccctacgcagtcaaggggaaccagtgggtgggctatgatgatgtgaagagtatggagaccaaggttcagttcttaaagaatttaaacctgggaggagccatgatctggtctattgacatggatgacttcactggcaaatcctgcaaccagggcccttaccctcttgtccaagcagtcaagagaagccttggctccctgtgaaggattaacttacagagaagcaggcaagatgaccttgctgcctggggcctgctctctcccaggaattctcatgtgggattccccttgccaggctggcctttggatctctcttccaagcctttcctgacttcctcttagatcatagattggacctggttttgttttcctgcagctgttgacttgttgccctgaagtacaataaaaaaaattcattttgctccagt

SEQ ID NO: 117277 - DNA, 914 bp, Homo sapiens
  Payload ID: 2899
  Gene Symbol: CHI3L2
  Gene Name: chitinase 3-like 2
  ENST ID: ENST00000486561
  CDS Start-End: 310-914
tctcagcactttgggaggccaaggcaggaggggcgcttgagcccaggaattcaagaccagcctgggaccgggtcccttttaggtgagactagatgaaaagggctcttcagcagctgacttcacagcaactaatttctgacaggtcagagttggcattgctcaaatctgggcttcatttccaagaagtttcacaagtctgccaggggaagtccctggacttcttgcttctttcgtgtaggacaggctgtcgaaacctcagtggataaaagacctagagaatgtgtatcccagaagaagctggccaaggatatgggagcaaccaccatggaccagaagtctctctgggcaggtgtagtggtcttgctgcttctccagggaggatctgcctacaaactggtttgctactttaccaactggtcccaggaccggcaggaaccaggaaaattcacccctgagaatattgaccccttcctatgctctcatctcatctattcattcgccagcatcgaaaacaacaaggttatcatcaaggacaagagtgaagtgatgctctaccagaccatcaacagtctcaaaaccaagaatcccaaactgaaaattctcttgtccattggagggtacctgtttggttccaaagggttccaccctatggtggattcttctacatcacgcttggaattcattaactccataatcctgtttctgaggaaccataactttgatggactggatgtaagctggatctacccagatcagaaagaaaacactcatttcactgtgctgattcatgagttagcagaagcctttcagaaggacttcacaaaatccaccaaggaaaggcttctcttgactgcgggcgtatctgcagggaggcaaatgattgataacagctatcaagttgagaaactggcaaa

SEQ ID NO: 117278 - DNA, 732 bp, Homo sapiens
  Payload ID: 2899
  Gene Symbol: CHI3L2
  Gene Name: chitinase 3-like 2
  ENST ID: ENST00000467038
  CDS Start-End: 297-732
atcttgtatgtgagcacacccacattttcactgccattatctgggacagcagaaccaggtttggctcaacagatttctctttccacccatctattgcaggtgtagtggtcttgctgcttctccagggaggatctgcctacaaactggtttgctactttaccaactggtcccaggaccggcaggaaccaggaaaattcacccctgagaatattgaccccttcctatgctctcatctcatctattcattcgccagcatcgaaaacaacaaggttatcatcaaggacaagagtgaagtgatgctctaccagaccatcaacagtctcaaaaccaagttccaccctatggtggattcttctacatcacgcttggaattcattaactccataatcctgtttctgaggaaccataactttgatggactggatgtaagctggatctacccagatcagaaagaaaacactcatttcactgtgctgattcatgagttagcagaagcctttcagaaggacttcacaaaatccaccaaggaaaggcttctcttgactgcgggcgtatctgcagggaggcaaatgattgataacagctatcaagttgagaaactggcaaaagatctggatttcatcaacctcctgtcctttgacttccatgggtcttgggaaaagccccttatcactggccacaacagccctctgagcaaggggtggcaggacagagggccaagctcctactaca

SEQ ID NO: 117279 - DNA, 1435 bp, Homo sapiens
  Payload ID: 2899
  Gene Symbol: CHI3L2
  Gene Name: chitinase 3-like 2
  Uniprot ID: Q15782
  ENST ID: ENST00000524472
  CDS Start-End: 230-1165
aacagatttctctttccacccatctattgcaggtgtagtggtcttgctgcttctccagggaggatctgcctacaaactggtttgctactttaccaactggtcccaggaccggcaggaaccaggaaaattcacccctgagaatattgaccccttcctatgctctcatctcatctattcattcgccagcatcgaaaacaacaaggttatcatcaaggacaagagtgaagtgatgctctaccagaccatcaacagtctcaaaaccaagaatcccaaactgaaaattctcttgtccattggagggtacctgtttggttccaaagggttccaccctatggtggattcttctacatcacgcttggaattcattaactccataatcctgtttctgaggaaccataactttgatggactggatgtaagctggatctacccagatcagaaagaaaacactcatttcactgtgctgattcatgagttagcagaagcctttcagaaggacttcacaaaatccaccaaggaaaggcttctcttgactgcgggcgtatctgcagggaggcaaatgattgataacagctatcaagttgagaaactggcaaaagatctggatttcatcaacctcctgtcctttgacttccatgggtcttgggaaaagccccttatcactggccacaacagccctctgagcaaggggtggcaggacagagggccaagctcctactacaatgtggaatatgctgtggggtactggatacataagggaatgccatcagagaaggtggtcatgggcatccccacatatgggcactccttcacactggcctctgcagaaaccaccgtgggggcccctgcctctggccctggagctgctggacccatcacagagtcttcaggcttcctggcctattatgagatctgccagttcctgaaaggagccaagatcacgcggctccaggatcagcaggttccctacgcagtcaaggggaaccagtgggtgggctatgatgatgtgaagagtatggagaccaaggttcagttcttaaagaatttaaacctgggaggagccatgatctggtctattgacatggatgacttcactggcaaatcctgcaaccagggcccttaccctcttgtccaagcagtcaagagaagccttggctccctgtgaaggtaacagtccaggctggagctgggagtgggcagacagctgggcagaacagggcacaggagactgggggagatcatcttcacatatttggactaatcctttctcatgctcctttggctcttctgccatgttttcttagcaattaggctggttctgcccttttcataggcttcccatagacttttaaagtaataataataatattgataaattttggctaccatttattgagcatagtatgagctaaagactttcattacatatatatta

SEQ ID NO: 117280 - DNA, 482 bp, Homo sapiens
  Payload ID: 2899
  Gene Symbol: CHI3L2
  Gene Name: chitinase 3-like 2
  ENST ID: ENST00000533831
  CDS Start-End: 1-482
actttaccaactggtcccaggaccggcaggaaccaggaaaattcacccctgagaatattgaccccttcctatgctctcatctcatctattcattcgccagcatcgaaaacaacaaggttatcatcaaggacaagagtgaagtgatgctctaccagaccatcaacagtctcaaaaccaagaatcccaaactgaaaattctcttgtccattggagggtacctgtttggttccaaaggagatctggatttcatcaacctcctgtcctttgacttccatgggtcttgggaaaagccccttatcactggccacaacagccctctgagcaaggggtggcaggacagagggccaagctcctactacaatgtggaatatgctgtggggtactggatacataagggaatgccatcagagaaggtggtcatgggcatccccacatatgggcactccttcacactggcctctgcagaaaccaccgtgggggcc

SEQ ID NO: 117281 - DNA, 778 bp, Homo sapiens
  Payload ID: 2899
  Gene Symbol: CHI3L2
  Gene Name: chitinase 3-like 2
  ENST ID: ENST00000497220
  CDS Start-End: 1-552
ccagatcagaaagaaaacactcatttcactgtgctgattcatgagttagcagaagcctttcagaaggacttcacaaaatccaccaaggaaaggcttctcttgactgcgggcgtatctgcagggaggcaaatgattgataacagctatcaagttgagaaactggcaaaagatctggatttcatcaacctcctgtcctttgacttccatgggtcttgggaaaagccccttatcactggccacaacagccctctgagcaaggggtggcaggacagagggccaagctcctactacaatgtgatctgccagttcctgaaaggagccaagatcacgcggctccaggatcagcaggttccctacgcagtcaaggggaaccagtgggtgggctatgatgatgtgaagagtatggagaccaaggttcagttcttaaagaatttaaacctgggaggagccatgatctggtctattgacatggatgacttcactggcaaatcctgcaaccagggcccttaccctcttgtccaagcagtcaagagaagccttggctccctgtgaaggattaacttacagagaagcaggcaagatgaccttgctgcctggggcctgctctctcccaggaattctcatgtgggattccccttgccaggctggcctttggatctctcttccaagcctttcctgacttcctcttagatcatagattggacctggttttgttttcctgcagctgttgacttgttgccctgaagtacaataaaaaaaattcattttgctccagtaa

SEQ ID NO: 117282 - DNA, 339 bp, Homo sapiens
  Payload ID: 2899
  Gene Symbol: CHI3L2
  Gene Name: chitinase 3-like 2
  ENST ID: ENST00000472825
  CDS Start-End: 1-129
tatgagatctgccagttcctgaaaggagccaagatcacgcggctccaggatcagcaggttccctacgcagtcaaggggaaccagtgggtgggctatgatgatgtgaagagtatggagaccaaggattaacttacagagaagcaggcaagatgaccttgctgcctggggcctgctctctcccaggaattctcatgtgggattccccttgccaggctggcctttggatctctcttccaagcctttcctgacttcctcttagatcatagattggacctggttttgttttcctgcagctgttgacttgttgccctgaagtacaataaaaaaaattcattttgc

SEQ ID NO: 117283 - DNA, 589 bp, Homo sapiens
  Payload ID: 2899
  Gene Symbol: CHI3L2
  Gene Name: chitinase 3-like 2
  ENST ID: ENST00000497587
  CDS Start-End: 222-589
tgtatgtgagcacacccacattttcactgccattatctgggacagcagaaccaggatctgcctacaaactggtttgctactttaccaactggtcccaggaccggcaggaaccaggaaaattcacccctgagaatattgaccccttcctatgctctcatctcatctattcattcgccagcatcgaaaacaacaaggttatcatcaaggacaagagtgaagtgatgctctaccagaccatcaacagtctcaaaaccaagaatcccaaactgaaaattctcttgtccattggagggtacctgtttggttccaaagggttccaccctatggtggattcttctacatcacgcttggaattcattaactccataatcctgtttctgaggaaccataactttgatggactggatgtaagctggatctacccagatcagaaagaaaacactcatttcactgtgctgattcatgagttagcagaagcctttcagaaggacttcacaaaatccaccaaggaaaggcttctcttgactgcgggcgtatctgcagggaggcaaatgattgataacagctatcaagttgagaaactggcaaa

SEQ ID NO: 117284 - DNA, 946 bp, Homo sapiens
  Payload ID: 2899
  Gene Symbol: CHI3L2
  Gene Name: chitinase 3-like 2
  ENST ID: ENST00000528451
  CDS Start-End: 285-946
aggtgcctggtaaacaatagctgttgtcgggtgtggtggctcacacttgtaatctcagcactttgggaggccaaggcaggaggggcgcttgagcccaggaattcaagaccagcctgggtcagagttggcattgctcaaatctgggcttcatttccaagaagtttcacaagtctgccaggggaagtccctggacttcttgcttctttcgtgtaggacaggctgtcgaaacctcagtggataaaagacctagagaatgtgtatcccagaagaagctggccaaggatatgggagcaaccaccatggaccagaagtctctctgggcaggtgtagtggtcttgctgcttctccagggaggatctgcctacaaactggtttgctactttaccaactggtcccaggaccggcaggaaccaggaaaattcacccctgagaatattgaccccttcctatgctctcatctcatctattcattcgccagcatcgaaaacaacaaggttatcatcaaggacaagagtgaagtgatgctctaccagaccatcaacagtctcaaaaccaagaatcccaaactgaaaattctcttgtccattggagggtacctgtttggttccaaagggttccaccctatggtggattcttctacatcacgcttggaattcattaactccataatcctgtttctgaggaaccataactttgatggactggatgtaagctggatctacccagatcagaaagaaaacactcatttcactgtgctgattcatgagttagcagaagcctttcagaaggacttcacaaaatccaccaaggaaaggcttctcttgactgcgggcgtatctgcagggaggcaaatgattgataacagctatcaagttgagaaactggcaaaagatctggatttcatcaacctcctgtcctttgacttccatgggtcttgggaaaagcc

SEQ ID NO: 117285 - DNA, 757 bp, Homo sapiens
  Payload ID: 2899
  Gene Symbol: CHI3L2
  Gene Name: chitinase 3-like 2
  ENST ID: ENST00000477185
  CDS Start-End: 250-757
gaaaccacagcagctgtggctggggagcccagatgaagtgtggctctatcttgtgtagtggtcttgctgcttctccagggaggatctgcctacaaactggtttgctactttaccaactggtcccaggaccggcaggaaccaggaaaattcacccctgagaatattgaccccttcctatgctctcatctcatctattcattcgccagcatcgaaaacaacaaggttatcatcaaggacaagagtgaagtgatgctctaccagaccatcaacagtctcaaaaccaagaatcccaaactgaaaattctcttgtccattggagggtacctgtttggttccaaagggttccaccctatggtggattcttctacatcacgcttggaattcattaactccataatcctgtttctgaggaaccataactttgatggactggatgtaagctggatctacccagatcagaaagaaaacactcatttcactgtgctgattcatgagttagcagaagcctttcagaaggacttcacaaaatccaccaaggaaaggcttctcttgactgcgggcgtatctgcagggaggcaaatgattgataacagctatcaagttgagaaactggcaaaagatctggatttcatcaacctcctgtcctttgacttccatgggtcttgggaaaagccccttatcactggccacaacagccctctgagcaaggggtggcaggacagagggccaagctcctactacaatgtggaatatgctg

SEQ ID NO: 117286 - DNA, 600 bp, Homo sapiens
  Payload ID: 2899
  Gene Symbol: CHI3L2
  Gene Name: chitinase 3-like 2
  ENST ID: ENST00000474304
  CDS Start-End: 53-600
agtggataaaagacctagagaatgtgtatcccagaagaagctggccaaggatatgggagcaaccaccatggaccagaagtctctctgggcaggtgtagtggtcttgctgcttctccagggaggatctgcctacaaactggtttgctactttaccaactggtcccaggaccggcaggaaccaggaaaattcacccctgagaatattgaccccttcctatgctctcatctcatctattcattcgccagcatcgaaaacaacaaggttatcatcaaggacaagagtgaagtgatgctctaccagaccatcaacagtctcaaaaccaagaatcccaaactgaaaattctcttgtccattggagggtacctgtttggttccaaagggttccaccctatggtggattcttctacatcacgcttggaattcattaactccataatcctgtttctgaggaaccataactttgatggactggatgagttagcagaagcctttcagaaggacttcacaaaatccaccaaggaaaggcttctcttgactgcgggcgtatctgcagggaggcaaatgattgataacagctatcaagttgagaaactggcaaa

SEQ ID NO: 117287 - DNA, 2169 bp, Homo sapiens
  Payload ID: 2899
  Gene Symbol: CHI3L2
  Gene Name: chitinase 3-like 2
  Uniprot ID: Q15782
  ENST ID: ENST00000445067
  CDS Start-End: 772-1944
cctctggctgaaagtagccggaaaggcctggctacttatgggctaagggttttgaatctgggctgcagattgtgcagagagttaatttacaaccttagaacagtggacaatgcttgatagtgtcagactgtgggcactggaaaccggctggtctcaggatagggatcctatacctccaacacttggattgctgacctttcacttctcaacttggtcaacggaagtcaaaaaccccagcaaggccacctgctgaattctagaacttccaggacttcccgacctagagcacatggccaaacactttctgcagccaggatgtcactgccctcccctgattaagataaatagacttggcctaataattatccaaatagattaattcttccaacaaaagaaagagttctggaagtcaatacccaatagccttctttcctgatggtgcagtagagagcaaaatccatctctaagcccagagttcgtgatattttggaaatagctacaatggtgaatttcaccccctggagagttctgtcactggcacttgttccagggttccagcagagtccctcttctcaaataggaagcactggctcagaagactgtccccagcataagatggagtctcgctctgtcacccaggctggaccatgagtgcttttttaaacctcattttaaatctgaaagaagaatgaatacattggacaggctgtcgaaacctcagtggataaaagacctagagaatgtgtatcccagaagaagctggccaaggatatgggagcaaccaccatggaccagaagtctctctgggcaggtgtagtggtcttgctgcttctccagggaggatctgcctacaaactggtttgctactttaccaactggtcccaggaccggcaggaaccaggaaaattcacccctgagaatattgaccccttcctatgctctcatctcatctattcattcgccagcatcgaaaacaacaaggttatcatcaaggacaagagtgaagtgatgctctaccagaccatcaacagtctcaaaaccaagaatcccaaactgaaaattctcttgtccattggagggtacctgtttggttccaaagggttccaccctatggtggattcttctacatcacgcttggaattcattaactccataatcctgtttctgaggaaccataactttgatggactggatgtaagctggatctacccagatcagaaagaaaacactcatttcactgtgctgattcatgagttagcagaagcctttcagaaggacttcacaaaatccaccaaggaaaggcttctcttgactgcgggcgtatctgcagggaggcaaatgattgataacagctatcaagttgagaaactggcaaaagatctggatttcatcaacctcctgtcctttgacttccatgggtcttgggaaaagccccttatcactggccacaacagccctctgagcaaggggtggcaggacagagggccaagctcctactacaatgtggaatatgctgtggggtactggatacataagggaatgccatcagagaaggtggtcatgggcatccccacatatgggcactccttcacactggcctctgcagaaaccaccgtgggggcccctgcctctggccctggagctgctggacccatcacagagtcttcaggcttcctggcctattatgagatctgccagttcctgaaaggagccaagatcacgcggctccaggatcagcaggttccctacgcagtcaaggggaaccagtgggtgggctatgatgatgtgaagagtatggagaccaaggttcagttcttaaagaatttaaacctgggaggagccatgatctggtctattgacatggatgacttcactggcaaatcctgcaaccagggcccttaccctcttgtccaagcagtcaagagaagccttggctccctgtgaaggattaacttacagagaagcaggcaagatgaccttgctgcctggggcctgctctctcccaggaattctcatgtgggattccccttgccaggctggcctttggatctctcttccaagcctttcctgacttcctcttagatcatagattggacctggttttgttttcctgcagctgttgacttgttgccctgaagtacaataaaaaaaattcattttgctccagta

SEQ ID NO: 117288 - DNA, 1518 bp, Homo sapiens
  Payload ID: 2899
  Gene Symbol: CHI3L2
  Gene Name: chitinase 3-like 2
  Uniprot ID: Q15782
  ENST ID: ENST00000466741
  CDS Start-End: 358-1293
aaaaaaaaaaaaaagaaaccacagcagctgtggctggggagcccagatgaagtgtggctctatcttgtatgtgagcacacccacattttcactgccattatctgggacagcagaaccaggtttggctcaacagatttctctttccacccatctattgcaggtgtagtggtcttgctgcttctccagggaggatctgcctacaaactggtttgctactttaccaactggtcccaggaccggcaggaaccaggaaaattcacccctgagaatattgaccccttcctatgctctcatctcatctattcattcgccagcatcgaaaacaacaaggttatcatcaaggacaagagtgaagtgatgctctaccagaccatcaacagtctcaaaaccaagaatcccaaactgaaaattctcttgtccattggagggtacctgtttggttccaaagggttccaccctatggtggattcttctacatcacgcttggaattcattaactccataatcctgtttctgaggaaccataactttgatggactggatgtaagctggatctacccagatcagaaagaaaacactcatttcactgtgctgattcatgagttagcagaagcctttcagaaggacttcacaaaatccaccaaggaaaggcttctcttgactgcgggcgtatctgcagggaggcaaatgattgataacagctatcaagttgagaaactggcaaaagatctggatttcatcaacctcctgtcctttgacttccatgggtcttgggaaaagccccttatcactggccacaacagccctctgagcaaggggtggcaggacagagggccaagctcctactacaatgtggaatatgctgtggggtactggatacataagggaatgccatcagagaaggtggtcatgggcatccccacatatgggcactccttcacactggcctctgcagaaaccaccgtgggggcccctgcctctggccctggagctgctggacccatcacagagtcttcaggcttcctggcctattatgagatctgccagttcctgaaaggagccaagatcacgcggctccaggatcagcaggttccctacgcagtcaaggggaaccagtgggtgggctatgatgatgtgaagagtatggagaccaaggttcagttcttaaagaatttaaacctgggaggagccatgatctggtctattgacatggatgacttcactggcaaatcctgcaaccagggcccttaccctcttgtccaagcagtcaagagaagccttggctccctgtgaaggattaacttacagagaagcaggcaagatgaccttgctgcctggggcctgctctctcccaggaattctcatgtgggattccccttgccaggctggcctttggatctctcttccaagcctttcctgacttcctcttagatcatagattggacctggttttgttttcctgcagctgttgacttgttgccctgaagtacaataaaaaaaattcattttgctccagta

SEQ ID NO: 117289 - DNA, 3374 bp, Homo sapiens
  Payload ID: 2900
  Gene Symbol: CHID1
  Gene Name: chitinase domain containing 1
  Uniprot ID: Q9BWS9
  ENST ID: ENST00000323578
  CDS Start-End: 731-1912
gaatgcgcggtgactcaaaagtgctggccacgcgctcgttcatccaagcgcgaggggctgagttgggaacttggtttgcctcctggggctccggctcgtgcaatgtgcaaggcgggggtgcggaccgagagagcgcgcgtttcgggcagtccccgctggagacagcgcagtgggcgccatcggcctggggatggagatggtccactcaggcgggggtcggggggacgccaggagtggtgactccgggtccccgggggagcgtgccggggcggagcccaccgcgcggttctcccggcaccgccgagccgggcagaggccctggagcccaaggccccgcgcggccccacgccaagggcgccaggcctgcctaagagccgtggcgctgggaacccggctacccctgggccgggaacctgataaccagctccagcgcgagcaccaggggcgctcaaggtgaacgcgccgggcccggggtccgcccccggcgcggccccgccccggccccggccccggccccggccccgactttcgggcagccctgcccagtcccctgtcctggcccagcccctctccatcccagcgtgccgtgcgcggcggcggcgcgcgggcgcctggggcgggacttccggcgcgctggagcgttttccggccgtgcgtttgtggccgtccggcctccctgacatgcagccctctggaccccgaggttggaccctactgtgacacacctaccatgcggacactcttcaacctcctctggcttgccctggcctgcagccctgttcacactaccctgtcaaagtcagatgccaaaaaagccgcctcaaagacgctgctggagaagagtcagttttcagataagccggtgcaagaccggggtttggtggtgacggacctcaaagctgagagtgtggttcttgagcatcgcagctactgctcggcaaaggcccgggacagacactttgctggggatgtactgggctatgtcactccatggaacagccatggctacgatgtcaccaaggtctttgggagcaagttcacacagatctcacccgtctggctgcagctgaagagacgtggccgtgagatgtttgaggtcacgggcctccacgacgtggaccaagggtggatgcgagctgtcaggaagcatgccaagggcctgcacatagtgcctcggctcctgtttgaggactggacttacgatgatttccggaacgtcttagacagtgaggatgagatagaggagctgagcaagaccgtggtccaggtggcaaagaaccagcatttcgatggcttcgtggtggaggtctggaaccagctgctaagccagaagcgcgtgggcctcatccacatgctcacccacttggccgaggctctgcaccaggcccggctgctggccctcctggtcatcccgcctgccatcacccccgggaccgaccagctgggcatgttcacgcacaaggagtttgagcagctggcccccgtgctggatggtttcagcctcatgacctacgactactctacagcgcatcagcctggccctaatgcacccctgtcctgggttcgagcctgcgtccaggtcctggacccgaagtccaagtggcgaagcaaaatcctcctggggctcaacttctatggtatggactacgcgacctccaaggatgcccgtgagcctgttgtcggggccaggtacatccagacactgaaggaccacaggccccggatggtgtgggacagccaggcctcagagcacttcttcgagtacaagaagagccgcagtgggaggcacgtcgtcttctacccaaccctgaagtccctgcaggtgcggctggagctggcccgggagctgggcgttggggtctctatctgggagctgggccagggcctggactacttctacgacctgctctaggtgggcattgcggcctccgcggtggacgtgttcttttctaagccatggagtgagtgagcaggtgtgaaatacaggcctccactccgtttgctgtgacgggtctgctgcagtcctcagtcgggggtcctgggcaccatgtgactccccatcctcccatgaggggtccctgccctggatgagtcctagctgggggacaccctgagagctcgagcccctcccacccgggcatccgctggctgcctcctgtcagctgggcaggcggggcccacagtacctgccccaccaggacagcctggctcaggcctttctgggctgcttctcacatcctgggctggatgtgggtttggaagctctggaaccatcccggactcgcccactcctggattcgagggccctcgcagggacagctctgcccagcatcaccccagggcctggcagtgatagagctgagagctccacccccacatacctgccacccacctggccagccacagcacgtgtgtcacctgcagagagccacccagacgtccccaccgagtccagcacggcaagggtgcaggggctgccctagaaatgggctcagaggagcctggcccaccctcttgaaactggtcctggaccttggctcagctctgccgcctcaggtagcacgacccccaggccagcctggacacatcagggagcatggtgaggggcaacggcaggacccgtgggccatatcgggacaggcatttccagcgaggggtggggcagaggacatgtggctggcaggctacacccaccctgccatgcagcggtgtccaggctctggggaggccctggggaatttggaggcatcatgagccaaggcctggtggccctcgttcccctgcccctcgtcaccatcctgtccttggctggccgtgaggactcccctcctcaccactgggtcccacagggctgaggtgggcagtagagggcataggtgggtacatgtcccgggcaaggtctctcggggggacagaagtgagtccagggagtgggtgggcctgggcgtccctcactcagaatgccgtggggtgaggacggtgaggacagggtgggcactgggttctggtttagagtcagtaatgttagggcgcagtgggcagggggtcaggacatctccagccggtggtgaggaagcatggtggggtctcctccacaggacgggagctggggagggggtcctgggtcggacccaaggcacccacacttgagaaagcctccgcctggacgtcagggaggcctgcgagctgccacagtgcaggtgcagccgttcccaccgccctgctgctgcttgacacgggcataggagatacaagtggtgtgtgcggcggttcatgcctgtaatcccagtactttggaaagccgtggcgggaggaacgctgggcaacatggtgaaaccccgtctctaccccctaaaaatagaaaaattagcaag

SEQ ID NO: 117290 - DNA, 1477 bp, Homo sapiens
  Payload ID: 2900
  Gene Symbol: CHID1
  Gene Name: chitinase domain containing 1
  Uniprot ID: Q9BWS9
  ENST ID: ENST00000436108
  CDS Start-End: 205-1386
gcgctggagcgttttccggccgtgcgtttgtggccgtccggcctccctgacatgcagatttccacccagaagacagagaaggagccagtggtcatggaatgggctggggtcaaagactgggtgcctgggagctgaggcagccaccgtttcagcctggccagccctctggaccccgaggttggaccctactgtgacacacctaccatgcggacactcttcaacctcctctggcttgccctggcctgcagccctgttcacactaccctgtcaaagtcagatgccaaaaaagccgcctcaaagacgctgctggagaagagtcagttttcagataagccggtgcaagaccggggtttggtggtgacggacctcaaagctgagagtgtggttcttgagcatcgcagctactgctcggcaaaggcccgggacagacactttgctggggatgtactgggctatgtcactccatggaacagccatggctacgatgtcaccaaggtctttgggagcaagttcacacagatctcacccgtctggctgcagctgaagagacgtggccgtgagatgtttgaggtcacgggcctccacgacgtggaccaagggtggatgcgagctgtcaggaagcatgccaagggcctgcacatagtgcctcggctcctgtttgaggactggacttacgatgatttccggaacgtcttagacagtgaggatgagatagaggagctgagcaagaccgtggtccaggtggcaaagaaccagcatttcgatggcttcgtggtggaggtctggaaccagctgctaagccagaagcgcgtgggcctcatccacatgctcacccacttggccgaggctctgcaccaggcccggctgctggccctcctggtcatcccgcctgccatcacccccgggaccgaccagctgggcatgttcacgcacaaggagtttgagcagctggcccccgtgctggatggtttcagcctcatgacctacgactactctacagcgcatcagcctggccctaatgcacccctgtcctgggttcgagcctgcgtccaggtcctggacccgaagtccaagtggcgaagcaaaatcctcctggggctcaacttctatggtatggactacgcgacctccaaggatgcccgtgagcctgttgtcggggccaggtacatccagacactgaaggaccacaggccccggatggtgtgggacagccaggcctcagagcacttcttcgagtacaagaagagccgcagtgggaggcacgtcgtcttctacccaaccctgaagtccctgcaggtgcggctggagctggcccgggagctgggcgttggggtctctatctgggagctgggccagggcctggactacttctacgacctgctctaggtgggcattgcggcctccgcggtggacgtgttcttttctaagccatggagtgagtgagcaggtgtgaaatacaggcctccactccgtttgc

SEQ ID NO: 117291 - DNA, 3537 bp, Homo sapiens
  Payload ID: 2900
  Gene Symbol: CHID1
  Gene Name: chitinase domain containing 1
  Uniprot ID: Q9BWS9
  ENST ID: ENST00000449825
  CDS Start-End: 358-1539
ctggtgtgtgtccctctcttcctgggcttccggcctctgaactagaatgtttcaaggcctaggagtgacaggacgtggtcagcaatagtggcccaggtcctgcccttgggtgacccaggccaaggtctcctagttagaacaggacagagtcacgaggctgccactgttgggaagggccctgcctgtgctgactctgcaaatgaggagtcgcccagagccgccgcgaccccacccaggagcactggccagcctggggaagacacaaacccagccccaaaggccccacagccaccaggcacctccaacaaccaggtccctctggaccccgaggttggaccctactgtgacacacctaccatgcggacactcttcaacctcctctggcttgccctggcctgcagccctgttcacactaccctgtcaaagtcagatgccaaaaaagccgcctcaaagacgctgctggagaagagtcagttttcagataagccggtgcaagaccggggtttggtggtgacggacctcaaagctgagagtgtggttcttgagcatcgcagctactgctcggcaaaggcccgggacagacactttgctggggatgtactgggctatgtcactccatggaacagccatggctacgatgtcaccaaggtctttgggagcaagttcacacagatctcacccgtctggctgcagctgaagagacgtggccgtgagatgtttgaggtcacgggcctccacgacgtggaccaagggtggatgcgagctgtcaggaagcatgccaagggcctgcacatagtgcctcggctcctgtttgaggactggacttacgatgatttccggaacgtcttagacagtgaggatgagatagaggagctgagcaagaccgtggtccaggtggcaaagaaccagcatttcgatggcttcgtggtggaggtctggaaccagctgctaagccagaagcgcgtgggcctcatccacatgctcacccacttggccgaggctctgcaccaggcccggctgctggccctcctggtcatcccgcctgccatcacccccgggaccgaccagctgggcatgttcacgcacaaggagtttgagcagctggcccccgtgctggatggtttcagcctcatgacctacgactactctacagcgcatcagcctggccctaatgcacccctgtcctgggttcgagcctgcgtccaggtcctggacccgaagtccaagtggcgaagcaaaatcctcctggggctcaacttctatggtatggactacgcgacctccaaggatgcccgtgagcctgttgtcggggccaggtacatccagacactgaaggaccacaggccccggatggtgtgggacagccaggcctcagagcacttcttcgagtacaagaagagccgcagtgggaggcacgtcgtcttctacccaaccctgaagtccctgcaggtgcggctggagctggcccgggagctgggcgttggggtctctatctgggagctgggccagggcctggactacttctacgacctgctctaggtgggcattgcggcctccgcggtggacgtgttcttttctaagccatggagtgagtgagcaggtgtgaaatacaggcctccactccgtttgctgtgacgggtctgctgcagtcctcagtcgggggtcctgggcaccatgtgactccccatcctcccatgaggggtccctgccctggatgagtcctagctgggggacaccctgagagctcgagcccctcccacccgggcatccgctggctgcctcctgtcagctgggcaggcggggcccacagtacctgccccaccaggacagcctggctcaggcctttctgggctgcttctcacatcctgggctggatgtgggtttggaagctctggaaccatcccggactcgcccactcctggattcgagggccctcgcagggacagctctgcccagcatcaccccagggcctggcagtgatagagctgagagctccacccccacatacctgccacccacctggccagccacagcacgtgtgtcacctgcagagagccacccagacgtccccaccgagtccagcacggcaagggtgcaggggctgccctagaaatgggctcagaggagcctggcccaccctcttgaaactggtcctggaccttggctcagctctgccgcctcaggtagcacgacccccaggccagcctggacacatcagggagcatggtgaggggcaacggcaggacccgtgggccatatcgggacaggcatttccagcgaggggtggggcagaggacatgtggctggcaggctacacccaccctgccatgcagcggtgtccaggctctggggaggccctggggaatttggaggcatcatgagccaaggcctggtggccctcgttcccctgcccctcgtcaccatcctgtccttggctggccgtgaggactcccctcctcaccactgggtcccacagggctgaggtgggcagtagagggcataggtgggtacatgtcccgggcaaggtctctcggggggacagaagtgagtccagggagtgggtgggcctgggcgtccctcactcagaatgccgtggggtgaggacggtgaggacagggtgggcactgggttctggtttagagtcagtaatgttagggcgcagtgggcagggggtcaggacatctccagccggtggtgaggaagcatggtggggtctcctccacaggacgggagctggggagggggtcctgggtcggacccaaggcacccacacttgagaaagcctccgcctggacgtcagggaggcctgcgagctgccacagtgcaggtgcagccgttcccaccgccctgctgctgcttgacacgggcataggagatacaagtggtgtgtgcggcggttcatgcctgtaatcccagtactttggaaagccgtggcgggaggaacgctgggcaacatggtgaaaccccgtctctaccccctaaaaatagaaaaattagcaagacatggtggcatgtgcctgtactcctggctactcaggaggctgagatgggaggatcgcttgatgaggttgaggctgcagtgagctgtgaccgactgcactccaaaaaccttgtctaaaaaaacacaagctgccactggctttggggcactgaccttgtctccccagaggtgctgacgctaacattcaagttgttctcgggggtcctgtggcttctgttggagtgagggtgggggacacgcaggtctgggagggtggtgtgggcctggagctaggcattgccagatcagcattgggtggaggcaggggtggggatgccacacaggatgggatgtctagagcgggctgtgtctcccggggggatgggcagagggtggggcaggaattagctggaaatgagattgtggggtgcagtttggggatcagatgccccaacctgaactgaccgtcatccctgtggccagggtccccacacaaccctcacccctggctgtgagaatcctgaggcaccttgatgcattttttttcatgccctgtg

SEQ ID NO: 117292 - DNA, 3255 bp, Homo sapiens
  Payload ID: 2900
  Gene Symbol: CHID1
  Gene Name: chitinase domain containing 1
  Uniprot ID: Q9BWS9
  ENST ID: ENST00000454838
  CDS Start-End: 1-1257
atgcggacactcttcaacctcctctggcttgccctggcctgcagccctgttcacactaccctgtcaaagtcagatgccaaaaaagccgcctcaaagacgctgctggagaaggtgaagttttgctcttgttgcccaggctggagcgcaatggcgcgatcttggctcaccgcaacctctgccacccagagtcagttttcagataagccggtgcaagaccggggtttggtggtgacggacctcaaagctgagagtgtggttcttgagcatcgcagctactgctcggcaaaggcccgggacagacactttgctggggatgtactgggctatgtcactccatggaacagccatggctacgatgtcaccaaggtctttgggagcaagttcacacagatctcacccgtctggctgcagctgaagagacgtggccgtgagatgtttgaggtcacgggcctccacgacgtggaccaagggtggatgcgagctgtcaggaagcatgccaagggcctgcacatagtgcctcggctcctgtttgaggactggacttacgatgatttccggaacgtcttagacagtgaggatgagatagaggagctgagcaagaccgtggtccaggtggcaaagaaccagcatttcgatggcttcgtggtggaggtctggaaccagctgctaagccagaagcgcgtgggcctcatccacatgctcacccacttggccgaggctctgcaccaggcccggctgctggccctcctggtcatcccgcctgccatcacccccgggaccgaccagctgggcatgttcacgcacaaggagtttgagcagctggcccccgtgctggatggtttcagcctcatgacctacgactactctacagcgcatcagcctggccctaatgcacccctgtcctgggttcgagcctgcgtccaggtcctggacccgaagtccaagtggcgaagcaaaatcctcctggggctcaacttctatggtatggactacgcgacctccaaggatgcccgtgagcctgttgtcggggccaggtacatccagacactgaaggaccacaggccccggatggtgtgggacagccaggcctcagagcacttcttcgagtacaagaagagccgcagtgggaggcacgtcgtcttctacccaaccctgaagtccctgcaggtgcggctggagctggcccgggagctgggcgttggggtctctatctgggagctgggccagggcctggactacttctacgacctgctctaggtgggcattgcggcctccgcggtggacgtgttcttttctaagccatggagtgagtgagcaggtgtgaaatacaggcctccactccgtttgctgtgacgggtctgctgcagtcctcagtcgggggtcctgggcaccatgtgactccccatcctcccatgaggggtccctgccctggatgagtcctagctgggggacaccctgagagctcgagcccctcccacccgggcatccgctggctgcctcctgtcagctgggcaggcggggcccacagtacctgccccaccaggacagcctggctcaggcctttctgggctgcttctcacatcctgggctggatgtgggtttggaagctctggaaccatcccggactcgcccactcctggattcgagggccctcgcagggacagctctgcccagcatcaccccagggcctggcagtgatagagctgagagctccacccccacatacctgccacccacctggccagccacagcacgtgtgtcacctgcagagagccacccagacgtccccaccgagtccagcacggcaagggtgcaggggctgccctagaaatgggctcagaggagcctggcccaccctcttgaaactggtcctggaccttggctcagctctgccgcctcaggtagcacgacccccaggccagcctggacacatcagggagcatggtgaggggcaacggcaggacccgtgggccatatcgggacaggcatttccagcgaggggtggggcagaggacatgtggctggcaggctacacccaccctgccatgcagcggtgtccaggctctggggaggccctggggaatttggaggcatcatgagccaaggcctggtggccctcgttcccctgcccctcgtcaccatcctgtccttggctggccgtgaggactcccctcctcaccactgggtcccacagggctgaggtgggcagtagagggcataggtgggtacatgtcccgggcaaggtctctcggggggacagaagtgagtccagggagtgggtgggcctgggcgtccctcactcagaatgccgtggggtgaggacggtgaggacagggtgggcactgggttctggtttagagtcagtaatgttagggcgcagtgggcagggggtcaggacatctccagccggtggtgaggaagcatggtggggtctcctccacaggacgggagctggggagggggtcctgggtcggacccaaggcacccacacttgagaaagcctccgcctggacgtcagggaggcctgcgagctgccacagtgcaggtgcagccgttcccaccgccctgctgctgcttgacacgggcataggagatacaagtggtgtgtgcggcggttcatgcctgtaatcccagtactttggaaagccgtggcgggaggaacgctgggcaacatggtgaaaccccgtctctaccccctaaaaatagaaaaattagcaagacatggtggcatgtgcctgtactcctggctactcaggaggctgagatgggaggatcgcttgatgaggttgaggctgcagtgagctgtgaccgactgcactccaaaaaccttgtctaaaaaaacacaagctgccactggctttggggcactgaccttgtctccccagaggtgctgacgctaacattcaagttgttctcgggggtcctgtggcttctgttggagtgagggtgggggacacgcaggtctgggagggtggtgtgggcctggagctaggcattgccagatcagcattgggtggaggcaggggtggggatgccacacaggatgggatgtctagagcgggctgtgtctcccggggggatgggcagagggtggggcaggaattagctggaaatgagattgtggggtgcagtttggggatcagatgccccaacctgaactgaccgtcatccctgtggccagggtccccacacaaccctcacccctggctgtgagaatcctgaggcaccttgatgcattttttttcatgccctgtg

SEQ ID NO: 117293 - DNA, 1289 bp, Homo sapiens
  Payload ID: 2900
  Gene Symbol: CHID1
  Gene Name: chitinase domain containing 1
  Uniprot ID: Q9BWS9
  ENST ID: ENST00000429789
  CDS Start-End: 105-1193
cggcgcgctggagcgttttccggccgtgcgtttgtggccgtccggcctccctgacatgcagccctctggaccccgaggttggaccctactgtgacacacctaccatgcggacactcttcaacctcctctggcttgccctggcctgcagccctgttcacactaccctgtcaaagtcagatgccaaaaaagccgcctcaaagacgctgctggagaagagtcagttttcagataagccggtgcaagaccggggtttggtggtgacggacctcaaagctgagagtgtggttcttgagcatcgcagctactgctcggcaaaggcccgggacagacactttgctggggatgtactgggctatgtcactccatggaacagccatggctacgatgtcaccaaggtctttgggagcaagttcacacagatctcacccgtctggctgcagctgaagagacgtggccgtgagatgtttgaggtcacgggcctccacgacgtggaccaagggtggatgcgagctgtcaggaagcatgccaagggcctgcacatagtgcctcggctcctgtttgaggactggacttacgatgatttccggaacgtcttagacagtgaggatgagatagaggagctgagcaagaccgtggtccaggtggcaaagaaccagcatttcgatggcttcgtggtggaggtctggaaccagctgctaagccagaagcgcgtgaccgaccagctgggcatgttcacgcacaaggagtttgagcagctggcccccgtgctggatggtttcagcctcatgacctacgactactctacagcgcatcagcctggccctaatgcacccctgtcctgggttcgagcctgcgtccaggtcctggacccgaagtccaagtggcgaagcaaaatcctcctggggctcaacttctatggtatggactacgcgacctccaaggatgcccgtgagcctgttgtcggggccaggtacatccagacactgaaggaccacaggccccggatggtgtgggacagccaggcctcagagcacttcttcgagtacaagaagagccgcagtgggaggcacgtcgtcttctacccaaccctgaagtccctgcaggtgcggctggagctggcccgggagctgggcgttggggtctctatctgggagctgggccagggcctggactacttctacgacctgctctaggtgggcattgcggcctccgcggtggacgtgttcttttctaagccatggagtgagtgagcaggtgtgaaatacaggcctccactccgtttgctgtga

SEQ ID NO: 117294 - DNA, 602 bp, Homo sapiens
  Payload ID: 2900
  Gene Symbol: CHID1
  Gene Name: chitinase domain containing 1
  ENST ID: ENST00000529539
  CDS Start-End: 1-325
cccgaagtccaagtggcgaagcaaaatcctcctggggctcaacttctatggtatggactacgcgacctccaaggatgcccgtgagcctgttgtcggggccaggtacatccagacactgaaggaccacaggccccggatggtgtgggacagccaggcctcagagcacttcttcgagtacaagaagagccgcagtgggaggcacgtcgtcttctacccaaccctgaagtccctgcaggtgcggctggagctggcccgggagctgggcgttggggtctctatctgggagctgggccagggcctggactacttctacgacctgctctaggacgggagctggggagggggtcctgggtcggacccaaggcacccacacttgagaaagcctccgcctggacgtcagggaggcctgcgagctgccacagtgcaggtgcagccgttcccaccgccctgctgctgcttgacacgggcataggagatacaagtggtgtgtgcggcggttcatgcctgtaatcccagtactttggaaagccgtggcgggaggaacgctgggcaacatggtgaaaccccgtctctaccccctaaaaatagaaaaattagcaaga

SEQ ID NO: 117295 - DNA, 1171 bp, Homo sapiens
  Payload ID: 2900
  Gene Symbol: CHID1
  Gene Name: chitinase domain containing 1
  ENST ID: ENST00000534207
  CDS Start-End: 1-254
aggatgcccgtgagcctgttgtcggggccaggtacatccagacactgaaggaccacaggccccggatggtgtgggacagccaggcctcagagcacttcttcgagtacaagaagagccgcagtgggaggcacgtcgtcttctacccaaccctgaagtccctgcaggtgcggctggagctggcccgggagctgggcgttggggtctctatctgggagctgggccagggcctggactacttctacgacctgctctaggtgggcattgcggcctccgcggtggacgtgttcttttctaagccatggagtgagtgagcaggtgtgaaatacaggcctccactccgtttgctgtgacgggtctgctgcagtcctcagtcgggggtcctgggcaccatgtgactccccatcctcccatgaggggtccctgccctggatgagtcctagctgggggacaccctgagagctcgagcccctcccacccgggcatccgctggctgcctcctgtcagctgggcaggcggggcccacagtacctgccccaccaggacagcctggctcaggcctttctgggctgcttctcacatcctgggctggatgtgggtttggaagctctggaaccatcccggactcgcccactcctggattcgagggccctcgcagggacagctctgcccagcatcaccccagggcctggcagtgatagagctgagagctccacccccacatacctgccacccacctggccagccacagcacgtgtgtcacctgcagagagccacccagacgtccccaccgagtccagcacggcaagggtgcaggggctgccctagaaatgggctcagaggagcctggcccaccctcttgaaactggtcctggaccttggctcagctctgccgcctcaggacgggagctggggagggggtcctgggtcggacccaaggcacccacacttgagaaagcctccgcctggacgtcagggaggcctgcgagctgccacagtgcaggtgcagccgttcccaccgccctgctgctgcttgacacgggcataggagatacaagtggtgtgtgcggcggttcatgcctgtaatcccagtactttggaaagccgtggcgggaggaacgctgggcaacatggtgaaaccccgtctctaccccctaaaaatagaaaaattagc

SEQ ID NO: 117296 - DNA, 594 bp, Homo sapiens
  Payload ID: 2900
  Gene Symbol: CHID1
  Gene Name: chitinase domain containing 1
  ENST ID: ENST00000528154
  CDS Start-End: 515-594
acagccaccaggcacctccaacaaccaggtgtgagtaatttttttttttttttgagacagggtcctatctgtcgcccaggctggagtgcagcagtgcaatcacagctcactgcagccttgatgtcctgggctcaagtgatcagcctcccgaagtgctgggattacggcgtgagccaccactcccagccttcgagtgcttttgaggatgtctgtgagaggcatcctcaggctggggacccaggaatatcccaggtaaggcatggggtctcctaaagcagggatccagtcagcagcagaaacactcatctctgcaggcctcctcaccccaccggcctgcccctgccctactctgtcccccccatgcccacggcagacaggcagtgggcaagcaggagggcctcagggcaggtcagacctgggcctacagggcagagcctggacctccgccagggcactccacacccaccccggccctctggaccccgaggttggaccctactgtgacacacctaccatgcggacactcttcaacctcctctggcttgccctggcctgcagccctgttcacactaccctgtcaaagtcagatgccaa

SEQ ID NO: 117297 - DNA, 991 bp, Homo sapiens
  Payload ID: 2900
  Gene Symbol: CHID1
  Gene Name: chitinase domain containing 1
  ENST ID: ENST00000528426
  CDS Start-End: 299-553
gcctccctgacatgcaggtgagccccgcggcggccggcccctgctcctcctccttgcacggcctcagtttccctcccgcaaagtgggcgcgccgggcagcgaggctcggccccgggaggacgggcgtggggtcgcgggcgacgccgggcggatttccacccagaagacagagaaggagccagtggtcatggaatgggctggggtcaaagactgggtgcctgggagctgaggcagccaccgtttcagcctggccagccctctggaccccgaggttggaccctactgtgacacacctaccatgcggacactcttcaacctcctctggcttgccctggcctgcagccctgttcacactaccctgtcaaagtcagatgccaaaaaagccgcctcaaagacgctgctggagaaggctggagcgcaatggcgcgatcttggctcaccgcaacctctgccacccaggttcaagcgattctcctgcttcagcctcccgagtagctgggactacagagtcagttttcagataagccggtgcaagaccggggtttggtggtgacggacctcaaagctgagagtgtggttcttgagcatcgcagctactgctcggcaaaggcccgggacagacactttgctggggatgtactgggctatgtcactccatggaacagccatggctacgatgtcaccaaggtctttgggagcaagttcacacagatctcacccgtctggctgcagctgaagagacgtggccgtgagatgtttgaggtcacgggcctccacgacgtggaccaagggtggatgcgagctgtcaggaagcatgccaagggcctgcacatagtgcctcggctcctgtttgaggactggacttacgatgatttccggaacgtcttagacagtgaggatgagatagaggagctgagcaagaccgtggtccaggtggcaaagaaccagcatttcgatggcttcgtggtggaggtctggaaccagctgctaa

SEQ ID NO: 117298 - DNA, 1019 bp, Homo sapiens
  Payload ID: 2900
  Gene Symbol: CHID1
  Gene Name: chitinase domain containing 1
  ENST ID: ENST00000534254
  CDS Start-End: 167-655
tccttcctccctgacccagatttccacccagaagacagagaaggagccagtggtcatggaatgggctggggtcaaagactgggtgcctgggagctgaggcagccaccgtttcagcctggccagccctctggaccccgaggttggaccctactgtgacacacctaccatgcggacactcttcaacctcctctggcttgccctggcctgcagccctgttcacactaccctgtcaaagtcagatgccaaaaaagccgcctcaaagacgctgctggagaagagtcagttttcagataagccggtgcaagaccggggtttggtggtgacggacctcaaagctgagagtgtggttcttgagcatcgcagctactgctcggcaaaggcccgggacagacactttgctggggatgtactgggctatgtcactccatggaacagccatggctacgatgtcaccaaggtctttgggagcaagttcacacagatctcacccgtctggctgcagctgaagagacgtggccgtgagatgtttgaggtcacgggcctccacgacgtggaccaaggttctcatccttcctgcttgactgtgcttgccccacaggctgaaaagagtggtggatgcgagctgtcaggaagcatgccaagggcctgcacatagtgcctcggctcctgtttgaggactggacttacgatgatttccggaacgtcttagacagtgaggatgagatagaggagctgagcaagaccgtggtccaggtggcaaagaaccagcatttcgatggcttcgtggtggaggtctggaaccagctgctaagccagaagcgcgtgggcctcatccacatgctcacccacttggccgaggctctgcaccaggcccggctgctggccctcctggtcatcccgcctgccatcacccccgggaccgaccagctgggcatgttcacgcacaaggagtttgagcagctggcccccgtgctggatggtttcagcctcatgacctacgactactctacagcgcatca

SEQ ID NO: 117299 - DNA, 523 bp, Homo sapiens
  Payload ID: 2900
  Gene Symbol: CHID1
  Gene Name: chitinase domain containing 1
  ENST ID: ENST00000525225
  CDS Start-End: 272-523
ccggccgtgcgtttgtggccgtccggcctccctgacatgcagatttccacccagaagacagagaaggagccagtggtcatggaatgggctggggtcaaagactgggtgcctgggagctgaggcagccaccgtttcagcctggccagcctctcggaactgccgtggctgttcaagcactcactgcctttgcctgtggctccatgtactgggtgctgctgtgcttgccctccctctggaccccgaggttggaccctactgtgacacacctaccatgcggacactcttcaacctcctctggcttgccctggcctgcagccctgttcacactaccctgtcaaagtcagatgccaaaaaagccgcctcaaagacgctgctggagaagagtcagttttcagataagccggtgcaagaccggggtttggtggtgacggacctcaaagctgagagtgtggttcttgagcatcgcagctactgctcggcaaaggcccgggacagacactttgctggggatgtactgggctat

SEQ ID NO: 117300 - DNA, 619 bp, Homo sapiens
  Payload ID: 2900
  Gene Symbol: CHID1
  Gene Name: chitinase domain containing 1
  ENST ID: ENST00000532909
  CDS Start-End: 1-210
ctgaaggaccacaggccccggatggtgtgggacagccaggcctcagagcacttcttcgagtacaagaagagccgcagtgggaggcacgtcgtcttctacccaaccctgaagtccctgcaggtgcggctggagctggcccgggagctgggcgttggggtctctatctgggagctgggccagggcctggactacttctacgacctgctctagagagccacccagacgtccccaccgagtccagcacggcaagggtgcaggggctgccctagaaatgggctcagaggagcctggcccaccctcttgaaactggtcctggaccttggctcagctctgccgcctcaggacgggagctggggagggggtcctgggtcggacccaaggcacccacacttgagaaagcctccgcctggacgtcagggaggcctgcgagctgccacagtgcaggtgcagccgttcccaccgccctgctgctgcttgacacgggcataggagatacaagtggtgtgtgcggcggttcatgcctgtaatcccagtactttggaaagccgtggcgggaggaacgctgggcaacatggtgaaaccccgtctctaccccctaaaaatagaaaaattagcaaga

SEQ ID NO: 117301 - DNA, 834 bp, Homo sapiens
  Payload ID: 2900
  Gene Symbol: CHID1
  Gene Name: chitinase domain containing 1
  ENST ID: ENST00000531859
  CDS Start-End: 162-834
cctccctgacccagatttccacccagaagacagagaaggagccagtggtcatggaatgggctggggtcaaagactgggtgcctgggagctgaggcagccaccgtttcagcctggccagccctctggaccccgaggttggaccctactgtgacacacctaccatgcggacactcttcaacctcctctggcttgccctggcctgcagccctgttcacactaccctgtcaaagtcagatgccaaaaaagccgcctcaaagacgctgctggagaagagtcagttttcagataagccggtgcaagaccggggtttggtggtgacggacctcaaagctgagagtgtggttcttgagcatcgcagctactgctcggcaaaggcccgggacagacactttgctggggatgtactgggctatgtcactccatggaacagccatggctacgatgtcaccaaggtctttgggagcaagttcacacagatctcacccgtctggctgcagctgaagagacgtggccgtgagatgtttgaggcccggctgctggccctcctggtcatcccgcctgccatcacccccgggaccgaccagctgggcatgttcacgcacaaggagtttgagcagctggcccccgtgctggatggtttcagcctcatgacctacgactactctacagcgcatcagcctggccctaatgcacccctgtcctgggttcgagcctgcgtccaggtcctggacccgaagtccaagtggcgaagcaaaatcctcctggggctcaacttctatggtatggactacgcgacctccaaggatgcccgtgagcctgttgtcggggccaggt

SEQ ID NO: 117302 - DNA, 323 bp, Homo sapiens
  Payload ID: 2900
  Gene Symbol: CHID1
  Gene Name: chitinase domain containing 1
  ENST ID: ENST00000528521
  CDS Start-End: 1-217
ccagctgggcatgttcacgcacaaggagtttgagcagctggcccccgtgctggatggtttcagcctcatgacctacgactactctacagcgcatcagcctggccctaatgcacccctgtcctgggttcgagcctgcgtccaggtcctggacccgaagtccaagtggcgaagcaaaatcctcctggggctcaacttctatggtacatccagacactgaaggaccacaggccccggatggtgtgggacagccaggcctcagagcacttcttcgagtacaagaagagccgcagtgggaggcacgtcgtcttctacccaaccctgaa

SEQ ID NO: 117303 - DNA, 1431 bp, Homo sapiens
  Payload ID: 2900
  Gene Symbol: CHID1
  Gene Name: chitinase domain containing 1
  Uniprot ID: Q9BWS9
  ENST ID: ENST00000528581
  CDS Start-End: 80-1336
gtgcgtttgtggccgtccggcctccctgacatgcagccctctggaccccgaggttggaccctactgtgacacacctaccatgcggacactcttcaacctcctctggcttgccctggcctgcagccctgttcacactaccctgtcaaagtcagatgccaaaaaagccgcctcaaagacgctgctggagaaggtgaagttttgctcttgttgcccaggctggagcgcaatggcgcgatcttggctcaccgcaacctctgccacccagagtcagttttcagataagccggtgcaagaccggggtttggtggtgacggacctcaaagctgagagtgtggttcttgagcatcgcagctactgctcggcaaaggcccgggacagacactttgctggggatgtactgggctatgtcactccatggaacagccatggctacgatgtcaccaaggtctttgggagcaagttcacacagatctcacccgtctggctgcagctgaagagacgtggccgtgagatgtttgaggtcacgggcctccacgacgtggaccaagggtggatgcgagctgtcaggaagcatgccaagggcctgcacatagtgcctcggctcctgtttgaggactggacttacgatgatttccggaacgtcttagacagtgaggatgagatagaggagctgagcaagaccgtggtccaggtggcaaagaaccagcatttcgatggcttcgtggtggaggtctggaaccagctgctaagccagaagcgcgtgggcctcatccacatgctcacccacttggccgaggctctgcaccaggcccggctgctggccctcctggtcatcccgcctgccatcacccccgggaccgaccagctgggcatgttcacgcacaaggagtttgagcagctggcccccgtgctggatggtttcagcctcatgacctacgactactctacagcgcatcagcctggccctaatgcacccctgtcctgggttcgagcctgcgtccaggtcctggacccgaagtccaagtggcgaagcaaaatcctcctggggctcaacttctatggtatggactacgcgacctccaaggatgcccgtgagcctgttgtcggggccaggtacatccagacactgaaggaccacaggccccggatggtgtgggacagccaggcctcagagcacttcttcgagtacaagaagagccgcagtgggaggcacgtcgtcttctacccaaccctgaagtccctgcaggtgcggctggagctggcccgggagctgggcgttggggtctctatctgggagctgggccagggcctggactacttctacgacctgctctaggtgggcattgcggcctccgcggtggacgtgttcttttctaagccatggagtgagtgagcaggtgtgaaatacaggcctccactccgtttgctgtg

SEQ ID NO: 117304 - DNA, 438 bp, Homo sapiens
  Payload ID: 2900
  Gene Symbol: CHID1
  Gene Name: chitinase domain containing 1
  ENST ID: ENST00000525840
  CDS Start-End: 323-438
agacacaaacccagccccaaaggccccacagccaccaggcacctccaacaaccaggtgtgagtaatttttttttttttttgagacagggtcctatctgtcgcccaggctggagtgcagcagtgcaatcacagctcactgcagccttgatgtcctgggctcaagtgatcagcctcccgaagtgctgggattacggcgtgagccaccactcccagccttcgagtgcttttgaggatgtctgtgagaggcatcctcaggctggggacccaggaatatcccagccctctggaccccgaggttggaccctactgtgacacacctaccatgcggacactcttcaacctcctctggcttgccctggcctgcagccctgttcacactaccctgtcaaagtcagatgccaaaaaagccgcctcaaagacgctgctggagaaggtaag

SEQ ID NO: 117305 - DNA, 578 bp, Homo sapiens
  Payload ID: 2900
  Gene Symbol: CHID1
  Gene Name: chitinase domain containing 1
  ENST ID: ENST00000533059
  CDS Start-End: 222-578
gcactggccagcctggggaagacacaaacccagccccaaaggccccacagccaccaggcacctccaacaaccagatttccacccagaagacagagaaggagccagtggtcatggaatgggctggggtcaaagactgggtgcctgggagctgaggcagccaccgtttcagcctggccagccctctggaccccgaggttggaccctactgtgacacacctaccatgcggacactcttcaacctcctctggcttgccctggcctgcagccctgttcacactaccctgtcaaagtcagatgccaaaaaagccgcctcaaagacgctgctggagaagagtcagttttcagataagccggtgcaagaccggggtttggtggtgacggacctcaaagctgagagtgtggttcttgagcatcgcagctactgctcggcaaaggcccgggacagacactttgctggggatgtactgggctatgtcactccatggaacagccatggctacgatgtcaccaaggtctttgggagcaagttcacacagatctcacccgtctggctgcagctgaagagacgtggccgtgag

SEQ ID NO: 117306 - DNA, 752 bp, Homo sapiens
  Payload ID: 2900
  Gene Symbol: CHID1
  Gene Name: chitinase domain containing 1
  ENST ID: ENST00000533056
  CDS Start-End: 358-752
ctggtgtgtgtccctctcttcctgggcttccggcctctgaactagaatgtttcaaggcctaggagtgacaggacgtggtcagcaatagtggcccaggtcctgcccttgggtgacccaggccaaggtctcctagttagaacaggacagagtcacgaggctgccactgttgggaagggccctgcctgtgctgactctgcaaatgaggagtcgcccagagccgccgcgaccccacccaggagcactggccagcctggggaagacacaaacccagccccaaaggccccacagccaccaggcacctccaacaaccaggtccctctggaccccgaggttggaccctactgtgacacacctaccatgcggacactcttcaacctcctctggcttgccctggcctgcagccctgttcacactaccctgtcaaagtcagatgccaaaaaagccgcctcaaagacgctgctggagaagagtcagttttcagataagccggtgcaagaccggggtttggtggtgacggacctcaaagctgagagtgtggttcttgagcatcgcagctactgctcggcaaaggcccgggacagacactttgctggggatgtactgggctatgtcactccatggaacagccatggctacgatgtcaccaaggtctttgggagcaagttcacacagatctcacccgtctggctgcagctgaagagacgtggccgtgagatgtttgaggtcacgggcctccacgacgtggaccaagg

SEQ ID NO: 117307 - DNA, 571 bp, Homo sapiens
  Payload ID: 2900
  Gene Symbol: CHID1
  Gene Name: chitinase domain containing 1
  ENST ID: ENST00000530939
  CDS Start-End: 225-571
gttttccggccgtgcgtttgtggccgtccggcctccctgacatgcaggtgagccccgcggcggccggcccctgctcctcctccttgcacggcctcagtttccctcccgcaaagtgggcgcgccgggcagcgaggctcggccccgggaggacgggcgtggggtcgcgggcgacgccgggcggccctctggaccccgaggttggaccctactgtgacacacctaccatgcggacactcttcaacctcctctggcttgccctggcctgcagccctgttcacactaccctgtcaaagtcagatgccaaaaaagccgcctcaaagacgctgctggagaagagtcagttttcagataagccggtgcaagaccggggtttggtggtgacggacctcaaagctgagagtgtggttcttgagcatcgcagctactgctcggcaaaggcccgggacagacactttgctggggatgtactgggctatgtcactccatggaacagccatggctacgatgtcaccaaggtctttgggagcaagttcacacagatctcacccgtctggctgcagctgaagagacg

SEQ ID NO: 117308 - DNA, 1482 bp, Homo sapiens
  Payload ID: 2901
  Gene Symbol: CHIA
  Gene Name: chitinase, acidic
  ENST ID: ENST00000352594
  CDS Start-End: 146-451
cgggactggtgctgactgcaaccatgacaaagcttattctcctcacaggtcttgtccttatactgaatttgcagctcggaacagccagctgaaaactctcctggccattggaggctggaacttcgggactgcccctttcactgccatggtttctactcctgagaaccgccagactttcatcacctcagtcatcaaattcctgcgccagtatgagtttgacgggctggactttgactgggagtaccctggctctcgtgggagccctcctcaggacaagcatctcttcactgtcctggtgcagatgaggaaactaaagtacagagaggatttaagcaacttgcccaagatcacacaactagtaggaatcataacttcctctgcagtttggccacagagtccattgcttctaagcattacactaggctgcccgttattactgagaaatgcgtgaagcttttgagcaggaggccaagcagatcaacaagcccaggctgatggtcactgctgcagtagctgctggcatctccaatatccagtctggctatgagatcccccaactgtcacagtacctggactacatccatgtcatgacctacgacctccatggctcctgggagggctacactggagagaacagccccctctacaaatacccgactgacaccggcagcaacgcctacctcaatgtggattatgtcatgaactactggaaggacaatggagcaccagctgagaagctcatcgttggattccctacctatggacacaacttcatcctgagcaacccctccaacactggaattggtgcccccacctctggtgctggtcctgctgggccctatgccaaggagtctgggatctgggcttactacgagatctgtaccttcctgaaaaatggagccactcagggatgggatgcccctcaggaagtgccttatgcctatcagggcaatgtgtgggttggctatgacaacatcaagagcttcgatattaaggctcaatggcttaagcacaacaaatttggaggcgccatggtctgggccattgatctggatgacttcactggcactttctgcaaccagggcaagtttcccctaatctccaccctgaagaaggccctcggcctgcagagtgcaagttgcacggctccagctcagcccattgagccaataactgctgctcccagtggcagcgggaacgggagcgggagtagcagctctggaggcagctcgggaggcagtggattctgtgctgtcagagccaacggcctctaccccgtggcaaataacagaaatgccttctggcactgcgtgaatggagtcacgtaccagcagaactgccaggccgggcttgtcttcgacaccagctgtgattgctgcaactgggcataaacctgacctggtctatattccctagagttccagtctcttttgcttaggacatgttgcccctacctaaagtcctgcaataaaatcagcagtc

SEQ ID NO: 117309 - DNA, 1214 bp, Homo sapiens
  Payload ID: 2901
  Gene Symbol: CHIA
  Gene Name: chitinase, acidic
  Uniprot ID: Q9BZP6
  ENST ID: ENST00000353665
  CDS Start-End: 258-1205
accatgacaaagcttattctcctcacaggtcttgtccttatactgaatttgcagctcggaacagccagctgaaaactctcctggccattggaggctggaacttcgggactgccccatgaggaaactaaagtacagagaggatttaagcaacttgcccaagatcacacaactagtaggaatcataacttcctctgcagtttggccacagagtccattgcttctaagcattacactaggctgcccgttattactgagaaatgcgtgaagcttttgagcaggaggccaagcagatcaacaagcccaggctgatggtcactgctgcagtagctgctggcatctccaatatccagtctggctatgagatcccccaactgtcacagtacctggactacatccatgtcatgacctacgacctccatggctcctgggagggctacactggagagaacagccccctctacaaatacccgactgacaccggcagcaacgcctacctcaatgtggattatgtcatgaactactggaaggacaatggagcaccagctgagaagctcatcgttggattccctacctatggacacaacttcatcctgagcaacccctccaacactggaattggtgcccccacctctggtgctggtcctgctgggccctatgccaaggagtctgggatctgggcttactacgagatctgtaccttcctgaaaaatggagccactcagggatgggatgcccctcaggaagtgccttatgcctatcagggcaatgtgtgggttggctatgacaacatcaagagcttcgatattaaggctcaatggcttaagcacaacaaatttggaggcgccatggtctgggccattgatctggatgacttcactggcactttctgcaaccagggcaagtttcccctaatctccaccctgaagaaggccctcggcctgcagagtgcaagttgcacggctccagctcagcccattgagccaataactgctgctcccagtggcagcgggaacgggagcgggagtagcagctctggaggcagctcgggaggcagtggattctgtgctgtcagagccaacggcctctaccccgtggcaaataacagaaatgccttctggcactgcgtgaatggagtcacgtaccagcagaactgccaggccgggcttgtcttcgacaccagctgtgattgctgcaactgggcataaacctgacct

SEQ ID NO: 117310 - DNA, 1624 bp, Homo sapiens
  Payload ID: 2901
  Gene Symbol: CHIA
  Gene Name: chitinase, acidic
  Uniprot ID: Q9BZP6
  ENST ID: ENST00000343320
  CDS Start-End: 95-1525
tctgggtcaaattgttctctatttagaagcctttgtgataaccacagaatcagaacatataaaaagctctgcgggactggtgctgactgcaaccatgacaaagcttattctcctcacaggtcttgtccttatactgaatttgcagctcggctctgcctaccagctgacatgctacttcaccaactgggcccagtaccggccaggcctggggcgcttcatgcctgacaacatcgacccctgcctctgtacccacctgatctacgcctttgctgggaggcagaacaacgagatcaccaccatcgaatggaatgatgtgactctctaccaagctttcaatggcctgaaaaataagaacagccagctgaaaactctcctggccattggaggctggaacttcgggactgcccctttcactgccatggtttctactcctgagaaccgccagactttcatcacctcagtcatcaaattcctgcgccagtatgagtttgacgggctggactttgactgggagtaccctggctctcgtgggagccctcctcaggacaagcatctcttcactgtcctggtgcaggaaatgcgtgaagcttttgagcaggaggccaagcagatcaacaagcccaggctgatggtcactgctgcagtagctgctggcatctccaatatccagtctggctatgagatcccccaactgtcacagtacctggactacatccatgtcatgacctacgacctccatggctcctgggagggctacactggagagaacagccccctctacaaatacccgactgacaccggcagcaacgcctacctcaatgtggattatgtcatgaactactggaaggacaatggagcaccagctgagaagctcatcgttggattccctacctatggacacaacttcatcctgagcaacccctccaacactggaattggtgcccccacctctggtgctggtcctgctgggccctatgccaaggagtctgggatctgggcttactacgagatctgtaccttcctgaaaaatggagccactcagggatgggatgcccctcaggaagtgccttatgcctatcagggcaatgtgtgggttggctatgacaacatcaagagcttcgatattaaggctcaatggcttaagcacaacaaatttggaggcgccatggtctgggccattgatctggatgacttcactggcactttctgcaaccagggcaagtttcccctaatctccaccctgaagaaggccctcggcctgcagagtgcaagttgcacggctccagctcagcccattgagccaataactgctgctcccagtggcagcgggaacgggagcgggagtagcagctctggaggcagctcgggaggcagtggattctgtgctgtcagagccaacggcctctaccccgtggcaaataacagaaatgccttctggcactgcgtgaatggagtcacgtaccagcagaactgccaggccgggcttgtcttcgacaccagctgtgattgctgcaactgggcataaacctgacctggtctatattccctagagttccagtctcttttgcttaggacatgttgcccctacctaaagtcctgcaataaaatcagcagtcaaaacatg

SEQ ID NO: 117311 - DNA, 1625 bp, Homo sapiens
  Payload ID: 2901
  Gene Symbol: CHIA
  Gene Name: chitinase, acidic
  Uniprot ID: Q9BZP6
  ENST ID: ENST00000369740
  CDS Start-End: 104-1534
gctttccagtctggtggtgaatcctccatagtctgaagcctttgtgataaccacagaatcagaacatataaaaagctctgcgggactggtgctgactgcaaccatgacaaagcttattctcctcacaggtcttgtccttatactgaatttgcagctcggctctgcctaccagctgacatgctacttcaccaactgggcccagtaccggccaggcctggggcgcttcatgcctgacaacatcgacccctgcctctgtacccacctgatctacgcctttgctgggaggcagaacaacgagatcaccaccatcgaatggaatgatgtgactctctaccaagctttcaatggcctgaaaaataagaacagccagctgaaaactctcctggccattggaggctggaacttcgggactgcccctttcactgccatggtttctactcctgagaaccgccagactttcatcacctcagtcatcaaattcctgcgccagtatgagtttgacgggctggactttgactgggagtaccctggctctcgtgggagccctcctcaggacaagcatctcttcactgtcctggtgcaggaaatgcgtgaagcttttgagcaggaggccaagcagatcaacaagcccaggctgatggtcactgctgcagtagctgctggcatctccaatatccagtctggctatgagatcccccaactgtcacagtacctggactacatccatgtcatgacctacgacctccatggctcctgggagggctacactggagagaacagccccctctacaaatacccgactgacaccggcagcaacgcctacctcaatgtggattatgtcatgaactactggaaggacaatggagcaccagctgagaagctcatcgttggattccctacctatggacacaacttcatcctgagcaacccctccaacactggaattggtgcccccacctctggtgctggtcctgctgggccctatgccaaggagtctgggatctgggcttactacgagatctgtaccttcctgaaaaatggagccactcagggatgggatgcccctcaggaagtgccttatgcctatcagggcaatgtgtgggttggctatgacaacatcaagagcttcgatattaaggctcaatggcttaagcacaacaaatttggaggcgccatggtctgggccattgatctggatgacttcactggcactttctgcaaccagggcaagtttcccctaatctccaccctgaagaaggccctcggcctgcagagtgcaagttgcacggctccagctcagcccattgagccaataactgctgctcccagtggcagcgggaacgggagcgggagtagcagctctggaggcagctcgggaggcagtggattctgtgctgtcagagccaacggcctctaccccgtggcaaataacagaaatgccttctggcactgcgtgaatggagtcacgtaccagcagaactgccaggccgggcttgtcttcgacaccagctgtgattgctgcaactgggcataaacctgacctggtctatattccctagagttccagtctcttttgcttaggacatgttgcccctacctaaagtcctgcaataaaatcagcagtc

SEQ ID NO: 117312 - DNA, 1354 bp, Homo sapiens
  Payload ID: 2901
  Gene Symbol: CHIA
  Gene Name: chitinase, acidic
  ENST ID: ENST00000422815
  CDS Start-End: 1-1263
gaaacctcctcgtctgtgcacgaacaggtggccgactctggagcccaggctgttgctttccagtctggtggtgaatcctccatagtctggaacagccagctgaaaactctcctggccattggaggctggaacttcgggactgcccctttcactgccatggtttctactcctgagaaccgccagactttcatcacctcagtcatcaaattcctgcgccagtatgagtttgacgggctggactttgactgggagtaccctggctctcgtgggagccctcctcaggacaagcatctcttcactgtcctggtgcaggaaatgcgtgaagcttttgagcaggaggccaagcagatcaacaagcccaggctgatggtcactgctgcagtagctgctggcatctccaatatccagtctggctatgagatcccccaactgtcacagtacctggactacatccatgtcatgacctacgacctccatggctcctgggagggctacactggagagaacagccccctctacaaatacccgactgacaccggcagcaacgcctacctcaatgtggattatgtcatgaactactggaaggacaatggagcaccagctgagaagctcatcgttggattccctacctatggacacaacttcatcctgagcaacccctccaacactggaattggtgcccccacctctggtgctggtcctgctgggccctatgccaaggagtctgggatctgggcttactacgagatctgtaccttcctgaaaaatggagccactcagggatgggatgcccctcaggaagtgccttatgcctatcagggcaatgtgtgggttggctatgacaacatcaagagcttcgatattaaggctcaatggcttaagcacaacaaatttggaggcgccatggtctgggccattgatctggatgacttcactggcactttctgcaaccagggcaagtttcccctaatctccaccctgaagaaggccctcggcctgcagagtgcaagttgcacggctccagctcagcccattgagccaataactgctgctcccagtggcagcgggaacgggagcgggagtagcagctctggaggcagctcgggaggcagtggattctgtgctgtcagagccaacggcctctaccccgtggcaaataacagaaatgccttctggcactgcgtgaatggagtcacgtaccagcagaactgccaggccgggcttgtcttcgacaccagctgtgattgctgcaactgggcataaacctgacctggtctatattccctagagttccagtctcttttgcttaggacatgttgcccctacctaaagtcctgcaataaaatcagcagtc

SEQ ID NO: 117313 - DNA, 1256 bp, Homo sapiens
  Payload ID: 2901
  Gene Symbol: CHIA
  Gene Name: chitinase, acidic
  Uniprot ID: Q9BZP6
  ENST ID: ENST00000451398
  CDS Start-End: 210-1157
tctgggtcaaattgttctctatttagaagcctttgtgataaccacagaatcagaacatataaaaagctctgcgggactggtgctgactgcaaccatgacaaagcttattctcctcacaggtcttgtccttatactgaatttgcagctcggaacagccagctgaaaactctcctggccattggaggctggaacttcgggactgccccgaaatgcgtgaagcttttgagcaggaggccaagcagatcaacaagcccaggctgatggtcactgctgcagtagctgctggcatctccaatatccagtctggctatgagatcccccaactgtcacagtacctggactacatccatgtcatgacctacgacctccatggctcctgggagggctacactggagagaacagccccctctacaaatacccgactgacaccggcagcaacgcctacctcaatgtggattatgtcatgaactactggaaggacaatggagcaccagctgagaagctcatcgttggattccctacctatggacacaacttcatcctgagcaacccctccaacactggaattggtgcccccacctctggtgctggtcctgctgggccctatgccaaggagtctgggatctgggcttactacgagatctgtaccttcctgaaaaatggagccactcagggatgggatgcccctcaggaagtgccttatgcctatcagggcaatgtgtgggttggctatgacaacatcaagagcttcgatattaaggctcaatggcttaagcacaacaaatttggaggcgccatggtctgggccattgatctggatgacttcactggcactttctgcaaccagggcaagtttcccctaatctccaccctgaagaaggccctcggcctgcagagtgcaagttgcacggctccagctcagcccattgagccaataactgctgctcccagtggcagcgggaacgggagcgggagtagcagctctggaggcagctcgggaggcagtggattctgtgctgtcagagccaacggcctctaccccgtggcaaataacagaaatgccttctggcactgcgtgaatggagtcacgtaccagcagaactgccaggccgggcttgtcttcgacaccagctgtgattgctgcaactgggcataaacctgacctggtctatattccctagagttccagtctcttttgcttaggacatgttgcccctacctaaagtcctgcaataaaatcagcagtcaaaacatg

SEQ ID NO: 117314 - DNA, 1320 bp, Homo sapiens
  Payload ID: 2901
  Gene Symbol: CHIA
  Gene Name: chitinase, acidic
  Uniprot ID: Q9BZP6
  ENST ID: ENST00000430615
  CDS Start-End: 114-1220
cttattctcctcacaggtcttgtccttatactgaatttgcagctcggaacagccagctgaaaactctcctggccattggaggctggaacttcgggactgcccctttcactgccatggtttctactcctgagaaccgccagactttcatcacctcagtcatcaaattcctgcgccagtatgagtttgacgggctggactttgactgggagtaccctggctctcgtgggagccctcctcaggacaagcatctcttcactgtcctggtgcaggaaatgcgtgaagcttttgagcaggaggccaagcagatcaacaagcccaggctgatggtcactgctgcagtagctgctggcatctccaatatccagtctggctatgagatcccccaactgtcacagtacctggactacatccatgtcatgacctacgacctccatggctcctgggagggctacactggagagaacagccccctctacaaatacccgactgacaccggcagcaacgcctacctcaatgtggattatgtcatgaactactggaaggacaatggagcaccagctgagaagctcatcgttggattccctacctatggacacaacttcatcctgagcaacccctccaacactggaattggtgcccccacctctggtgctggtcctgctgggccctatgccaaggagtctgggatctgggcttactacgagatctgtaccttcctgaaaaatggagccactcagggatgggatgcccctcaggaagtgccttatgcctatcagggcaatgtgtgggttggctatgacaacatcaagagcttcgatattaaggctcaatggcttaagcacaacaaatttggaggcgccatggtctgggccattgatctggatgacttcactggcactttctgcaaccagggcaagtttcccctaatctccaccctgaagaaggccctcggcctgcagagtgcaagttgcacggctccagctcagcccattgagccaataactgctgctcccagtggcagcgggaacgggagcgggagtagcagctctggaggcagctcgggaggcagtggattctgtgctgtcagagccaacggcctctaccccgtggcaaataacagaaatgccttctggcactgcgtgaatggagtcacgtaccagcagaactgccaggccgggcttgtcttcgacaccagctgtgattgctgcaactgggcataaacctgacctggtctatattccctagagttccagtctcttttgcttaggacatgttgcccctacctaaagtcctgcaataaaatcagcagtcaaaacatga

SEQ ID NO: 117315 - DNA, 977 bp, Homo sapiens
  Payload ID: 2901
  Gene Symbol: CHIA
  Gene Name: chitinase, acidic
  ENST ID: ENST00000489524
  CDS Start-End: 116-977
atgacaaagcttattctcctcacaggtcttgtccttatactgaatttgcagctcggaacagccagctgaaaactctcctggccattggaggctggaacttcgggactgccccgaaatgcgtgaagcttttgagcaggaggccaagcagatcaacaagcccaggctgatggtcactgctgcagtagctgctggcatctccaatatccagtctggctatgagatcccccaactgtcacagtacctggactacatccatgtcatgacctacgacctccatggctcctgggagggctacactggagagaacagccccctctacaaatacccgactgacaccggcagcaacgcctacctcaatgtggattatgtcatgaactactggaaggacaatggagcaccagctgagaagctcatcgttggattccctacctatggacacaacttcatcctgagcaacccctccaacactggaattggtgcccccacctctggtgctggtcctgctgggccctatgccaaggagtctgggatctgggcttactacgagatctgtaccttcctgaaaaatggagccactcagggatgggatgcccctcaggaagtgccttatgcctatcagggcaatgtgtgggttggctatgacaacatcaagagcttcgatattaaggctcaatggcttaagcacaacaaatttggaggcgccatggtctgggccattgatctggatgacttcactggcactttctgcaaccagggcaagtttcccctaatctccaccctgaagaaggccctcggcctgcagagtgcaagttgcacggctccagctcagcccattgagccaataactgctgctcccagtggcagcgggaacgggagcgggagtagcagctctggaggcagctcgggaggcagtggattctgtgctgtcagagccaacggcctctaccccgtggcaaataacagaaatgccttctggc

SEQ ID NO: 117316 - DNA, 1188 bp, Homo sapiens
  Payload ID: 2901
  Gene Symbol: CHIA
  Gene Name: chitinase, acidic
  Uniprot ID: Q9BZP6
  ENST ID: ENST00000483391
  CDS Start-End: 150-1097
gaaacctcctcgtctgtgcacgaacaggtggccgactctggagcccaggctgttgctttccagtctggtggtgaatcctccatagtctggaacagccagctgaaaactctcctggccattggaggctggaacttcgggactgccccgaaatgcgtgaagcttttgagcaggaggccaagcagatcaacaagcccaggctgatggtcactgctgcagtagctgctggcatctccaatatccagtctggctatgagatcccccaactgtcacagtacctggactacatccatgtcatgacctacgacctccatggctcctgggagggctacactggagagaacagccccctctacaaatacccgactgacaccggcagcaacgcctacctcaatgtggattatgtcatgaactactggaaggacaatggagcaccagctgagaagctcatcgttggattccctacctatggacacaacttcatcctgagcaacccctccaacactggaattggtgcccccacctctggtgctggtcctgctgggccctatgccaaggagtctgggatctgggcttactacgagatctgtaccttcctgaaaaatggagccactcagggatgggatgcccctcaggaagtgccttatgcctatcagggcaatgtgtgggttggctatgacaacatcaagagcttcgatattaaggctcaatggcttaagcacaacaaatttggaggcgccatggtctgggccattgatctggatgacttcactggcactttctgcaaccagggcaagtttcccctaatctccaccctgaagaaggccctcggcctgcagagtgcaagttgcacggctccagctcagcccattgagccaataactgctgctcccagtggcagcgggaacgggagcgggagtagcagctctggaggcagctcgggaggcagtggattctgtgctgtcagagccaacggcctctaccccgtggcaaataacagaaatgccttctggcactgcgtgaatggagtcacgtaccagcagaactgccaggccgggcttgtcttcgacaccagctgtgattgctgcaactgggcataaacctgacctggtctatattccctagagttccagtctcttttgcttaggacatgttgcccctacctaaagtcctgcaataaaatcagcagtc

SEQ ID NO: 117317 - DNA, 1633 bp, Homo sapiens
  Payload ID: 2902
  Gene Symbol: CTBS
  Gene Name: chitobiase, di-N-acetyl-
  ENST ID: ENST00000370625
  CDS Start-End: 7-240
gctgctatgtcccggccgcagcttcgacgctggcgcctcgtctctagcccgccgagcggcgtcccgggtctagcgctgctggcgctgctggcgctgctggcgctgcggctcgcggccgggaccgactgcccatgcccggagcctgagctctgccgcccgattcgccaccatccagatttcgaggtcagcgccttcctctgctcctctaggtctgggcttcagggcacgaagagaagttagggtagaacggagccctaaggagaggtgccgtgggcgccgaaaccagctttgaccactcgatgagggccttcctgtttacggatccttcaatttatagatgaggaagctcgggctcagagaagttgagtaactcctcaggcctcacagcctgtaagtgcctgcgtaggcaggcgagagttcaaaccagatctgcctcctaaggcaagctcctttcattcccctgctgtgcctctgcggaagcactctgggtgtaaaaagcaaacaaggtctttgtgtttgatgttggacagaaaacttggaaatcttatgattggtcacagattacaactgtggcaacatttggaaaatatgactcagaacttatgtgctacgctcattcaaaaggagccagagtagtacttaaaggagatgtatccttaaaggatatcattgatcctgctttcagagcatcctggatagctcaaaaacttaatttggccaaaacacaatatatggatggaattaatatagatatagagcaagaagttaattgtttatcacctgaatatgatgcattaactgctttagtcaaagaaactacagactctttccatcgtgaaattgagggatcacaggtaacctttgatgtagcttggtctccaaagaacatagacagaagatgctataattatactggaatcgcagatgcttgtgacttcctctttgtgatgtcttatgatgaacaaagtcagatctggtcagaatgtattgcagcagccaatgctccctataatcagacattaactggatataatgactacatcaagatgagcattaatcctaagaaacttgtaatgggtgttccttggtatggttatgattatacctgcctgaatctgtctgaggatcatgtttgtaccattgcaaaagtccctttccggggggctccttgtagtgacgctgcaggacgtcaggtgccctacaaaacgatcatgaagcaaataaatagttctatttctggaaacctatgggataaagatcagcgggctccttattataactataaagatcctgctggccactttcatcaagtatggtatgataaccctcagagtatttctttaaaggcaacatatatacaaaactatcgcttacggggcattggcatgtggaatgcaaactgtcttgactactctggagatgctgtagccaaacagcaaactgaagaaatgtgggaagtcttaaagccaaagctgttacagagatgaacatcttttgtcaaaccattaagagttagaaagatgatctgtatcaacagatctagtttcttgcatttttattatgttgctatatacttttgttatccgtatactaaaaaaaaagaataaataaatgttttgattgtttgaatttg

SEQ ID NO: 117318 - DNA, 6600 bp, Homo sapiens
  Payload ID: 2902
  Gene Symbol: CTBS
  Gene Name: chitobiase, di-N-acetyl-
  Uniprot ID: Q01459
  ENST ID: ENST00000370630
  CDS Start-End: 50-1207
cgcccacccaggcggtaggaacccactccggcccgctagacctgctgctatgtcccggccgcagcttcgacgctggcgcctcgtctctagcccgccgagcggcgtcccgggtctagcgctgctggcgctgctggcgctgctggcgctgcggctcgcggccgggaccgactgcccatgcccggagcctgagctctgccgcccgattcgccaccatccagatttcgaggtctttgtgtttgatgttggacagaaaacttggaaatcttatgattggtcacagattacaactgtggcaacatttggaaaatatgactcagaacttatgtgctacgctcattcaaaaggagccagagtagtacttaaaggagatgtatccttaaaggatatcattgatcctgctttcagagcatcctggatagctcaaaaacttaatttggccaaaacacaatatatggatggaattaatatagatatagagcaagaagttaattgtttatcacctgaatatgatgcattaactgctttagtcaaagaaactacagactctttccatcgtgaaattgagggatcacaggtaacctttgatgtagcttggtctccaaagaacatagacagaagatgctataattatactggaatcgcagatgcttgtgacttcctctttgtgatgtcttatgatgaacaaagtcagatctggtcagaatgtattgcagcagccaatgctccctataatcagacattaactggatataatgactacatcaagatgagcattaatcctaagaaacttgtaatgggtgttccttggtatggttatgattatacctgcctgaatctgtctgaggatcatgtttgtaccattgcaaaagtccctttccggggggctccttgtagtgacgctgcaggacgtcaggtgccctacaaaacgatcatgaagcaaataaatagttctatttctggaaacctatgggataaagatcagcgggctccttattataactataaagatcctgctggccactttcatcaagtatggtatgataaccctcagagtatttctttaaaggcaacatatatacaaaactatcgcttacggggcattggcatgtggaatgcaaactgtcttgactactctggagatgctgtagccaaacagcaaactgaagaaatgtgggaagtcttaaagccaaagctgttacagagatgaacatcttttgtcaaaccattaagagttagaaagatgatctgtatcaacagatctagtttcttgcatttttattatgttgctatatacttttgttatccgtatactaaaaaaaaagaataaataaatgttttgattgtttgaatttgaaaaatacacacgaatgtcctcagtatccaggaacataaaggcaagaagcaagtcaacttacctattaaatattcctctattagatgtttcaacactataatttaattgggaaaaattgctttcagaattttattatgccatatttcccttcattatagtaaaatatatgctcacgaatcaatgctgatttttaaaatatgtataatctgaagtggaaattgtttgcttagagtttttaaaaacctagtctttgaaaagcagtttgtgctatacttttcccccaaccctccaataaatcttaaatttaaaacctacaatgtagtgtctcccctttaggttcatcaaactgatgaaaataatttttctgcttcctgactccatatagtatttatgttctctgaggtacttgaactaaatctttggacagtgagtgagaattaaaaagaatccagaagattaaatgtattcacaaaatagaagaatgtaacagtaatattttgaattggtaagttagaactacctaatattttccaactacattatttttatgaggctcatttgtaaaatttttaataataggaataacttgcagttgaacttgattctgttcactgtcacacttctaattattcatttcttcatttatggacatatataatttatttcttggctagcttgcttacatggttaaatttttctttctacatctgcaatgtatcttttttatttttattttttgtagagacagggtctcgctatgttgtccagatgggtctccaactcctgggctcaagcactcctcctgccttggcttcctaaagagctgggattacaggcatgagctgcattgtgcttttaatgatctaaagacactgattagcttctcaactagttctctttctaaaagatcaattttatacaaataagttttctaaatgtaataaagtctgttttctttctccagggaattaagaacaacattgtgctgcccttattagttcctaattacagattaaaaatctgtatctttgaactctagatttacataaatcctggcttccctgcacattttgcccctgtaaattggaatacatgatgattgaaccatctgttatgagaatattacatttcctatttacacaattgtttgtgacagagtaaaaaccattttcatagtatatgttggatcactgttgtcttcatatttctaaaataaatgaattaaaaaatttaaattcttagatgcttatctctatcatagctcagaatgcaacttcaatacccccattcttttatatttccagatttcttttaattaagatataatgaacaaattaagttaaatgaagtctgtattttcatgcaaatatattagtattcattaatatacatttattctttgcaaatagattttagttatattagctcttaaattgttaaataaattattattgaattttattattaaattattaaaatgaaaattataaaattagcactgtaaaataatatgtaaaggacttggaatgttaaaaataaccattcatcattttgctttatattacatctaatatttcctgaaacattttgtaatacccacatggaaagtggagaaagagaaaccttgtgctttttataaaacattgccaaggagaataatggttaaacaaatctgttcaaatacatatttaaatttttttacaaataaaagttttaaattaacatacctaattgagattgtagagatgtattattttttttttctgtgccagttcagttttcaatgttcgtaaatctgaaactgcttgttttctcatctataaaaagaattacttttcaaaaatgaacttcatcatacccttctaaaagtacatcatagttgtcatgtaaacagggtttttgtaaccgctttaactgtcttctctcatttggcttcagtgctttcaactcccactggattactacagtaaatgtgtagattatgaatgctgtttaataagcatgcttatctactggtgagatatgctataaggtaaccttgtttatgagtagatagggacaatacaattgaactgttctaaaaactagagtgagaaagaattttatgttttgcttaaacttcaaaacctgttgttctcaatgtgtaaagaaaatagtgaaaacaacaagaaaacaaaatacaaaaaaaacccttaattcctagcccttaggaacggaatagatatttcagaaatatagtgtttactctgtggcaagcactcttctaagtgtattagtctcttatttttttttcaaaaattttacagaatcagatactagtatttatccccattttacagttgaaatggagacctttagaggctaagtaacttgctcaagataaaaaactagtaagtgaagtgggtacagccaggattcaaattcaaaccacctggtaccagagcccttactattccaagtgttgtctgtggacagcagcattagcatcagttgggagcttgttaggtaggaagaatctcaggctgcacccagacctactgagtcagatcctgcatttttaaacaggatcctcagatgatatattaaactttgagaagcactacttatgctatactatcttgaataaatatggttgcaagagactcaggctgggttttttttgtcccttagttctgaatcttataggtagtgctgttttggggagatcattcagaaatcaataaaacttcttaaataatgtctgttatgtgtcaatcaggcactatggttaaatacaggattttttccccccagcctataagctgaaaactttgttctctttttttcctcttattccacttgtccttactgtttttgtatgaacaattctaatttgagttcaaaccatgagtgacatttgtaatgttaaaatatacaaagattacaagtaatgtgcatgctttccagaagaaaacagcatgaggggagtcataatccaagcctctgggggcatttttattactccttcctacctacccaattattaagtgtacaagtttacatattggctttatctccatatattgaatagacagttttccttcattgaacaaattattttttgagtgcatatttaactgatattttgttaaaaattatcctctgctcttttccttttctattttaagttttaagcttctcagtgccaaaccagggcttatttagcctcgagaatgctgcttgtaaaaagaatctagaactgcactgtccagtatagtagaagccagttgccatatgtaactactaaacttaaattaactaaaattaaataaaatttaaaattcagttcctcagtcacacaaactacatttcaagtgctcaatatcaataggtggctagtgggtaccaatctgacagtgcaggcatagaacatttctatcatcacataagttctgttggacagtgctaattctatttttttatttttaaattttatttatttttatttttatctgaaaccgaggacagtactgattttcttttttctttttaaaatttttttaaaaagagctaattctagaatgcagtcattattctgtgtcataaagctgtttctgataaagaaatgagagcattcatataattatcgttctcattttcctgccttgctgtgggtacttgtatgaaaatgtataatcttctgttttctgttcaacaaaaaagctttttaatacatatgtacttcacagataatttctatgatgtaattagttgtacacaattctcaccaaatagagcatgcccagaagcctctactaagcatctgctatacaaaaggtcccatgggagaaacaaagttaactaaggcatagtctctgccaggaaggaaacttaacatctagtagaagacacattattcatatttaaataatagaatacatatgaaaataaccagaaaaaatgaaacgattacccataaaaaattaaatgtcagttcagaggagagctcagtggtttatcagacttaataattctaatacaggaaaactacttaaaattttttttgagaatatattgactcacaggttccttttcctttaattcttcctagtaaaattttactaaattttactttggctttattatatcatgtatcttttcacaggtttagtttttcttcctgcattttttttttcacctatgctctttactgttaaggtaacaattttaatacagtcaatcctggctacccttatattattgacacccaaagttaaaacaccaaaatattttatttcaagataaatgttataataatctgattaggaaaaatgtaaattaccttaacttctactatgagtttcattttgtcagtatctagttttctcttaagctggtcaattgcatgctgtacctcagtgatctggattattaggtaattctgtgtggatagatagatatttatttagtataacatataaacatttttatttttaactgccttgtgaacataaactatgaaatgataaagatcaaaagagtaaatcatgaaaataacctattccgtaaagtaaactaaattgctttggagaaattactatttgtttctgttgatttcttgcattttagggaacactttctctaaagttaccattaaattagcatcgtaaaaaccaacaactattactatgaaaggaataatatcttagttattagcaagactttaaaattgtcataatgctttatcagctgaataagattagaattattttaaaatacttaataatatgatactatattttatatgcaaaaactaatttaatacaagaaaacctatttaaaataagaagactttttggtttttgtccagaaaagtttatgagttatagtggtcctcgctaaagaagttatttaagagttttaaactggctttgtgaaaaaattcttatattgaactgattaaacagtaagataaagtataagctatgctaaaaaaaaaagtaccaactactatggacaaaccattacttgagcctatttggactttatattaaatttatttaaaataataaacttttaatatttcatcttgtctaaagttaaatccttacttttaatcatagttaacatattttaaaattacttttggataagtgggattgatccaacccaaatcaaattgttaaatgccctcttgaatttttttgtctgttatttaattatatggtggaattaataataaaataaacttcatgtctctgattcaa

SEQ ID NO: 117319 - DNA, 1748 bp, Homo sapiens
  Payload ID: 2902
  Gene Symbol: CTBS
  Gene Name: chitobiase, di-N-acetyl-
  ENST ID: ENST00000465118
  CDS Start-End: 16-249
gctagacctgctgctatgtcccggccgcagcttcgacgctggcgcctcgtctctagcccgccgagcggcgtcccgggtctagcgctgctggcgctgctggcgctgctggcgctgcggctcgcggccgggaccgactgcccatgcccggagcctgagctctgccgcccgattcgccaccatccagatttcgaggtcagcgccttcctctgctcctctaggtctgggcttcagggcacgaagagaagttagggtagaacggagccctaaggagaggtgccgtgggcgccgaaaccagctttgaccactcgatgagggccttcctgtttacggatccttcaatttatagatgaggaagctcgggctcagagaagttgagtaactcctcaggcctcacagcctgtaagtgcctgcgtaggcaggcgagagttcaaaccagatctgcctcctaaggcaagctcctttcattcccctgctgtgcctctgcggaagcactctgggtgtaaaaagcaaacaaggtctttgtgtttgatgttggacagaaaacttggaaatcttatgattggtcacagattacaactgtggcaacatttggaaaatatgactcagaacttatgtgctacgctcattcaaaaggagccagagtagtacttaaaggtaacctttgatgtagcttggtctccaaagaacatagacagaagatgctataattatactggaatcgcagatgcttgtgacttcctctttgtgatgtcttatgatgaacaaagtcagatctggtcagaatgtattgcagcagccaatgctccctataatcagacattaactggatataatgactacatcaagatgagcattaatcctaagaaacttgtaatgggtgttccttggtatggttatgattatacctgcctgaatctgtctgaggatcatgtttgtaccattgcaaaagtccctttccggggggctccttgtagtgacgctgcaggacgtcaggtgccctacaaaacgatcatgaagcaaataaatagttctatttctggaaacctatgggataaagatcagcgggctccttattataactataaagatcctgctggccactttcatcaagtatggtatgataaccctcagagtatttctttaaaggcaacatatatacaaaactatcgcttacggggcattggcatgtggaatgcaaactgtcttgactactctggagatgctgtagccaaacagcaaactgaagaaatgtgggaagtcttaaagccaaagctgttacagagatgaacatcttttgtcaaaccattaagagttagaaagatgatctgtatcaacagatctagtttcttgcatttttattatgttgctatatacttttgttatccgtatactaaaaaaaaagaataaataaatgttttgattgtttgaatttgaaaaatacacacgaatgtcctcagtatccaggaacataaaggcaagaagcaagtcaacttacctattaaatattcctctattagatgtttcaacactataatttaattgggaaaaattgctttcagaattttattatgccatatttcccttcattatagtaaaatatatgctcacgaatcaatgctgatttttaaaatatgtataatctgaagtggaaattgtttgcttagagtttttaaaaacctagtctttgaaaagcagtttgtgctatacttttcccccaaccctccaataaatcttaaatttaaaaccta

SEQ ID NO: 117320 - DNA, 2816 bp, Homo sapiens
  Payload ID: 2903
  Gene Symbol: CHKB-CPT1B
  Gene Name: CHKB-CPT1B readthrough (NMD candidate)
  ENST ID: ENST00000453634
  CDS Start-End: 1-183
gaagatttgctggtagaagtcagtcggtatgctctggcatcccatttcttctggggtctgtggtccatcctccaggcatccatgtccaccatagaatttggttacttggactatgcccagtctcggttccagttctacttccagcagaaggggcagctgaccagtgtccactcctcatcctgactccaccctcccactccttggatttctcctggagcctccagggcaggaccttggagggaggaacaacgagcagaaggccctggcgactgggctgagcccccaagtgaaactgaggttcaggagaccggcctgttcctgagtttgactctaaagccaccatcctcacgagactctggggccccccaggctcccagacctttgagcaaccttcaccgcacagaaacccagccgcgccctgcaattcccaccgcggaaggtgccgaccaacccccaggatggcggaagctcaccaggccgtggccttccagttcacggtgaccccagacggggtcgacttccggctcagtcgggaggccctgaaacacgtctacctgtctgggatcaactcctggaagaaacgcctgatccgcatcaagaatggcatcctcaggggcgtgtaccctggcagccccaccagctggctggtcgtcatcatggcaacagtgggttcctccttctgcaacgtggacatctccttggggctggtcagttgcatccagagatgcctccctcaggggtgtggcccctaccagaccccgcagacccgggcacttctcagcatggccatcttctccacgggcgtctgggtgacgggcatcttcttcttccgccaaaccctgaagctgcttctctgctaccatgggtggatgtttgagatgcatggcaagaccagcaacttgaccaggatctgggctcttccagacatctctgcccaagcttcctgtgcccagggtgtcagccacaattcagcggtacctagagtctgtgcgccccttgttggatgatgaggaatattaccgcatggagttgctggccaaagaattccaggacaagactgcccccaggctgcagaaatacctggtgctcaagtcatggtgggcaagtaactatgtgagtgactggtgggaagagtacatctaccttcgaggcaggagccctctcatggtgaacagcaactattatgtcatggaccttgtgctcatcaagaatacagacgtgcaggcagcccgcctgggaaacatcatccacgccatgatcatgtatcgccgtaaactggaccgtgaagaaatcaagcctgtgatggcactgggcatagtgcctatgtgctcctaccagatggagaggatgttcaacaccactcggatcccgggcaaggacacagatgtgctacagcacctctcagacagccggcacgtggctgtctaccacaagggacgcttcttcaagctgtggctctatgagggcgcccgtctgctcaagcctcaggatctggagatgcagttccagaggatcctggacgacccctccccacctcagcctggggaggagaagctggcagccctcactgcaggaggaagggtggagtgggcgcaggcacgccaggccttctttagctctggaaagaataaggctgccttggaggccatcgagcgtgccgctttcttcgtggccctggatgaggaatcctactcctatgaccccgaagatgaggccagcctcagcctctatggcaaggccctgctacatggcaactgctacaacaggtggtttgacaaatccttcactctcatttccttcaagaatggccagttgggtctcaatgcagagcatgcgtgggcagatgctcccatcattgggcacctctgggagtttgtcctgggcacagacagcttccacctgggctacacggagaccgggcactgcctgggcaaaccgaaccctgcgctcgcacctcctacacggctgcagtgggacattccaaaacaggcggtcatcgagagttcctaccaggtggccaaggcgttggcagacgacgtggagttgtactgcttccagttcctgccctttggcaaaggcctcatcaagaagtgccggaccagccctgatgcctttgtgcagatcgcgctgcagctggctcacttccgggacaggggtaagttctgcctgacctatgaggcctcaatgaccagaatgttccgggagggacggactgagactgtgcgttcctgtaccagcgagtccacagcctttgtgcaggccatgatggaggggtcccacacaaaagcagacctgcgagatctcttccagaaggctgctaagaagcaccagaatatgtaccgcctggccatgaccggggcagggatcgacaggcacctcttctgcctttacttggtctccaagtacctaggagtcagctctcctttccttgctgaggtgctctcggaaccctggcgtctctccaccagccagatcccccaatcccagatccgcatgttcgacccagagcagcaccccaatcacctgggcgctggaggtggctttggccctgtagcagatgatggctatggagtttcctacatgattgcaggcgagaacacgatcttcttccacatctccagcaagttctcaagctcagagacgaacgcccagcgctttggaaaccacatccgcaaagccctgctggacattgctgatcttttccaagttcccaaggcctacagctgaagcccttaggtacctgtgttttgtttgggaactcggaggccctccccctcccccagctcagaccacagaggtggcaagagaagggctga

SEQ ID NO: 117321 - DNA, 3310 bp, Homo sapiens
  Payload ID: 2904
  Gene Symbol: CLCA1
  Gene Name: chloride channel accessory 1
  Uniprot ID: A8K7I4
  ENST ID: ENST00000234701
  CDS Start-End: 352-3096
tgctaatgcttttggtacaaatggatgtggaatataattgaatattttcttgtttaaggggagcatgaagaggtgttgaggttatgtcaagcatctggcacagctgaaggcagatggaaatatttacaagtacgcaatttgagactaagatattgttatcattctcctattgaagacaagagcaatagtaaaacacatcaggtcagggggttaaagacctgtgataaaccacttccgataagttggaaacgtgtgtctatattttcatatctgtatatatataatggtaaagaaagacaccttcgtaacccgcattttccaaagagagaaatcacagggagatgtacagcaatggggccatttaagagttctgtgttcatcttgattcttcaccttctagaaggggccctgagtaattcactcattcagctgaacaacaatggctatgaaggcattgtcgttgcaatcgaccccaatgtgccagaagatgaaacactcattcaacaaataaaggacatggtgacccaggcatctctgtatctgcttgaagctacaggaaagcgattttatttcaaaaatgttgccattttgattcctgaaacatggaagacaaaggctgactatgtgagaccaaaacttgagacctacaaaaatgctgatgttctggttgctgagtctactcctccaggtaatgatgaaccctacactgagcagatgggcaactgtggagagaagggtgaaaggatccacctcactcctgatttcattgcaggaaaaaagttagctgaatatggaccacaaggtagggcatttgtccatgagtgggctcatctacgatggggagtatttgacgagtacaataatgatgagaaattctacttatccaatggaagaatacaagcagtaagatgttcagcaggtattactggtacaaatgtagtaaagaagtgtcagggaggcagctgttacaccaaaagatgcacattcaataaagtaacaggactctatgaaaaaggatgtgagtttgttctccaatcccgccagacggagaaggcttctataatgtttgcacaacatgttgattctatagttgaattctgtacagaacaaaaccacaacaaagaagctccaaacaagcaaaatcaaaaatgcaatctccgaagcacatgggaagtgatccgtgattctgaggactttaagaaaaccactcctatgacaacacagccaccaaatcccaccttctcattgctgcagattggacaaagaattgtgtgtttagtccttgacaaatctggaagcatggcgactggtaaccgcctcaatcgactgaatcaagcaggccagcttttcctgctgcagacagttgagctggggtcctgggttgggatggtgacatttgacagtgctgcccatgtacaaaatgaactcatacagataaacagtggcagtgacagggacacactcgccaaaagattacctgcagcagcttcaggagggacgtccatctgcagcgggcttcgatcggcatttactgtgattaggaagaaatatccaactgatggatctgaaattgtgctgctgacggatggggaagacaacactataagtgggtgctttaacgaggtcaaacaaagtggtgccatcatccacacagtcgctttggggccctctgcagctcaagaactagaggagctgtccaaaatgacaggaggtttacagacatatgcttcagatcaagttcagaacaatggcctcattgatgcttttggggccctttcatcaggaaatggagctgtctctcagcgctccatccagcttgagagtaagggattaaccctccagaacagccagtggatgaatggcacagtgatcgtggacagcaccgtgggaaaggacactttgtttcttatcacctggacaatgcagcctccccaaatccttctctgggatcccagtggacagaagcaaggtggctttgtagtggacaaaaacaccaaaatggcctacctccaaatcccaggcattgctaaggttggcacttggaaatacagtctgcaagcaagctcacaaaccttgaccctgactgtcacgtcccgtgcgtccaatgctaccctgcctccaattacagtgacttccaaaacgaacaaggacaccagcaaattccccagccctctggtagtttatgcaaatattcgccaaggagcctccccaattctcagggccagtgtcacagccctgattgaatcagtgaatggaaaaacagttaccttggaactactggataatggagcaggtgctgatgctactaaggatgacggtgtctactcaaggtatttcacaacttatgacacgaatggtagatacagtgtaaaagtgcgggctctgggaggagttaacgcagccagacggagagtgataccccagcagagtggagcactgtacatacctggctggattgagaatgatgaaatacaatggaatccaccaagacctgaaattaataaggatgatgttcaacacaagcaagtgtgtttcagcagaacatcctcgggaggctcatttgtggcttctgatgtcccaaatgctcccatacctgatctcttcccacctggccaaatcaccgacctgaaggcggaaattcacgggggcagtctcattaatctgacttggacagctcctggggatgattatgaccatggaacagctcacaagtatatcattcgaataagtacaagtattcttgatctcagagacaagttcaatgaatctcttcaagtgaatactactgctctcatcccaaaggaagccaactctgaggaagtctttttgtttaaaccagaaaacattacttttgaaaatggcacagatcttttcattgctattcaggctgttgataaggtcgatctgaaatcagaaatatccaacattgcacgagtatctttgtttattcctccacagactccgccagagacacctagtcctgatgaaacgtctgctccttgtcctaatattcatatcaacagcaccattcctggcattcacattttaaaaattatgtggaagtggataggagaactgcagctgtcaatagcctagggctgaatttttgtcagataaataaaataaatcattcatccttttttttgattataaaattttctaaaatgtattttagacttcctgtagggggcgatatactaaatgtatatagtacatttatactaaatgtattcctgtagggggcgatatactaaatgtattttagacttcctgtagggggcgataaaataaaatgctaaacaactgggta

SEQ ID NO: 117322 - DNA, 3118 bp, Homo sapiens
  Payload ID: 2904
  Gene Symbol: CLCA1
  Gene Name: chloride channel accessory 1
  Uniprot ID: A8K7I4
  ENST ID: ENST00000394711
  CDS Start-End: 130-2874
gataaaccacttccgataagttggaaacgtgtgtctatattttcatatctgtatatatataatggtaaagaaagacaccttcgtaacccgcattttccaaagagagaaatcacagggagatgtacagcaatggggccatttaagagttctgtgttcatcttgattcttcaccttctagaaggggccctgagtaattcactcattcagctgaacaacaatggctatgaaggcattgtcgttgcaatcgaccccaatgtgccagaagatgaaacactcattcaacaaataaaggacatggtgacccaggcatctctgtatctgcttgaagctacaggaaagcgattttatttcaaaaatgttgccattttgattcctgaaacatggaagacaaaggctgactatgtgagaccaaaacttgagacctacaaaaatgctgatgttctggttgctgagtctactcctccaggtaatgatgaaccctacactgagcagatgggcaactgtggagagaagggtgaaaggatccacctcactcctgatttcattgcaggaaaaaagttagctgaatatggaccacaaggtagggcatttgtccatgagtgggctcatctacgatggggagtatttgacgagtacaataatgatgagaaattctacttatccaatggaagaatacaagcagtaagatgttcagcaggtattactggtacaaatgtagtaaagaagtgtcagggaggcagctgttacaccaaaagatgcacattcaataaagtaacaggactctatgaaaaaggatgtgagtttgttctccaatcccgccagacggagaaggcttctataatgtttgcacaacatgttgattctatagttgaattctgtacagaacaaaaccacaacaaagaagctccaaacaagcaaaatcaaaaatgcaatctccgaagcacatgggaagtgatccgtgattctgaggactttaagaaaaccactcctatgacaacacagccaccaaatcccaccttctcattgctgcagattggacaaagaattgtgtgtttagtccttgacaaatctggaagcatggcgactggtaaccgcctcaatcgactgaatcaagcaggccagcttttcctgctgcagacagttgagctggggtcctgggttgggatggtgacatttgacagtgctgcccatgtacaaaatgaactcatacagataaacagtggcagtgacagggacacactcgccaaaagattacctgcagcagcttcaggagggacgtccatctgcagcgggcttcgatcggcatttactgtgattaggaagaaatatccaactgatggatctgaaattgtgctgctgacggatggggaagacaacactataagtgggtgctttaacgaggtcaaacaaagtggtgccatcatccacacagtcgctttggggccctctgcagctcaagaactagaggagctgtccaaaatgacaggaggtttacagacatatgcttcagatcaagttcagaacaatggcctcattgatgcttttggggccctttcatcaggaaatggagctgtctctcagcgctccatccagcttgagagtaagggattaaccctccagaacagccagtggatgaatggcacagtgatcgtggacagcaccgtgggaaaggacactttgtttcttatcacctggacaatgcagcctccccaaatccttctctgggatcccagtggacagaagcaaggtggctttgtagtggacaaaaacaccaaaatggcctacctccaaatcccaggcattgctaaggttggcacttggaaatacagtctgcaagcaagctcacaaaccttgaccctgactgtcacgtcccgtgcgtccaatgctaccctgcctccaattacagtgacttccaaaacgaacaaggacaccagcaaattccccagccctctggtagtttatgcaaatattcgccaaggagcctccccaattctcagggccagtgtcacagccctgattgaatcagtgaatggaaaaacagttaccttggaactactggataatggagcaggtgctgatgctactaaggatgacggtgtctactcaaggtatttcacaacttatgacacgaatggtagatacagtgtaaaagtgcgggctctgggaggagttaacgcagccagacggagagtgataccccagcagagtggagcactgtacatacctggctggattgagaatgatgaaatacaatggaatccaccaagacctgaaattaataaggatgatgttcaacacaagcaagtgtgtttcagcagaacatcctcgggaggctcatttgtggcttctgatgtcccaaatgctcccatacctgatctcttcccacctggccaaatcaccgacctgaaggcggaaattcacgggggcagtctcattaatctgacttggacagctcctggggatgattatgaccatggaacagctcacaagtatatcattcgaataagtacaagtattcttgatctcagagacaagttcaatgaatctcttcaagtgaatactactgctctcatcccaaaggaagccaactctgaggaagtctttttgtttaaaccagaaaacattacttttgaaaatggcacagatcttttcattgctattcaggctgttgataaggtcgatctgaaatcagaaatatccaacattgcacgagtatctttgtttattcctccacagactccgccagagacacctagtcctgatgaaacgtctgctccttgtcctaatattcatatcaacagcaccattcctggcattcacattttaaaaattatgtggaagtggataggagaactgcagctgtcaatagcctagggctgaatttttgtcagataaataaaataaatcattcatccttttttttgattataaaattttctaaaatgtattttagacttcctgtagggggcgatatactaaatgtatatagtacatttatactaaatgtattcctgtagggggcgatatactaaatgtattttagacttcctgtagggggcgataaaataaaatgctaaacaactgggtatacatgcataaaaactatccattcaaaccc

SEQ ID NO: 117323 - DNA, 4025 bp, Homo sapiens
  Payload ID: 2905
  Gene Symbol: CLCA2
  Gene Name: chloride channel accessory 2
  Uniprot ID: Q9UQC9
  ENST ID: ENST00000370565
  CDS Start-End: 163-2994
tcccagatggatccaccccagacttttcaaagaagacacctccttcatcttgtgttctaaaaccttgcaagttcaggaagaaaccatctgcatccatattgaaaacctgacacaatgtatgcagcaggctcagtgtgagtgaactggaggcttctctacaacatgacccaaaggagcattgcaggtcctatttgcaacctgaagtttgtgactctcctggttgccttaagttcagaactcccattcctgggagctggagtacagcttcaagacaatgggtataatggattgctcattgcaattaatcctcaggtacctgagaatcagaacctcatctcaaacattaaggaaatgataactgaagcttcattttacctatttaatgctaccaagagaagagtatttttcagaaatataaagattttaatacctgccacatggaaagctaataataacagcaaaataaaacaagaatcatatgaaaaggcaaatgtcatagtgactgactggtatggggcacatggagatgatccatacaccctacaatacagagggtgtggaaaagagggaaaatacattcatttcacacctaatttcctactgaatgataacttaacagctggctacggatcacgaggccgagtgtttgtccatgaatgggcccacctccgttggggtgtgttcgatgagtataacaatgacaaacctttctacataaatgggcaaaatcaaattaaagtgacaaggtgttcatctgacatcacaggcatttttgtgtgtgaaaaaggtccttgcccccaagaaaactgtattattagtaagctttttaaagaaggatgcacctttatctacaatagcacccaaaatgcaactgcatcaataatgttcatgcaaagtttatcttctgtggttgaattttgtaatgcaagtacccacaaccaagaagcaccaaacctacagaaccagatgtgcagcctcagaagtgcatgggatgtaatcacagactctgctgactttcaccacagctttcccatgaatgggactgagcttccacctcctcccacattctcgcttgtacaggctggtgacaaagtggtctgtttagtgctggatgtgtccagcaagatggcagaggctgacagactccttcaactacaacaagccgcagaattttatttgatgcagattgttgaaattcataccttcgtgggcattgccagtttcgacagcaaaggagagatcagagcccagctacaccaaattaacagcaatgatgatcgaaagttgctggtttcatatctgcccaccactgtatcagctaaaacagacatcagcatttgttcagggcttaagaaaggatttgaggtggttgaaaaactgaatggaaaagcttatggctctgtgatgatattagtgaccagcggagatgataagcttcttggcaattgcttacccactgtgctcagcagtggttcaacaattcactccattgccctgggttcatctgcagccccaaatctggaggaattatcacgtcttacaggaggtttaaagttctttgttccagatatatcaaactccaatagcatgattgatgctttcagtagaatttcctctggaactggagacattttccagcaacatattcagcttgaaagtacaggtgaaaatgtcaaacctcaccatcaattgaaaaacacagtgactgtggataatactgtgggcaacgacactatgtttctagttacgtggcaggccagtggtcctcctgagattatattatttgatcctgatggacgaaaatactacacaaataattttatcaccaatctaacttttcggacagctagtctttggattccaggaacagctaagcctgggcactggacttacaccctgaacaatacccatcattctctgcaagccctgaaagtgacagtgacctctcgcgcctccaactcagctgtgcccccagccactgtggaagcctttgtggaaagagacagcctccattttcctcatcctgtgatgatttatgccaatgtgaaacagggattttatcccattcttaatgccactgtcactgccacagttgagccagagactggagatcctgttacgctgagactccttgatgatggagcaggtgctgatgttataaaaaatgatggaatttactcgaggtattttttctcctttgctgcaaatggtagatatagcttgaaagtgcatgtcaatcactctcccagcataagcaccccagcccactctattccagggagtcatgctatgtatgtaccaggttacacagcaaacggtaatattcagatgaatgctccaaggaaatcagtaggcagaaatgaggaggagcgaaagtggggctttagccgagtcagctcaggaggctccttttcagtgctgggagttccagctggcccccaccctgatgtgtttccaccatgcaaaattattgacctggaagctgtaaaagtagaagaggaattgaccctatcttggacagcacctggagaagactttgatcagggccaggctacaagctatgaaataagaatgagtaaaagtctacagaatatccaagatgactttaacaatgctattttagtaaatacatcaaagcgaaatcctcagcaagctggcatcagggagatatttacgttctcaccccaaatttccacgaatggacctgaacatcagccaaatggagaaacacatgaaagccacagaatttatgttgcaatacgagcaatggataggaactccttacagtctgctgtatctaacattgcccaggcgcctctgtttattccccccaattctgatcctgtacctgccagagattatcttatattgaaaggagttttaacagcaatgggtttgataggaatcatttgccttattatagttgtgacacatcatactttaagcaggaaaaagagagcagacaagaaagagaatggaacaaaattattataaataaatatccaaagtgtcttccttcttagatataagacccatggccttcgactacaaaaacatactaacaaagtcaaattaacatcaaaactgtattaaaatgcattgagtttttgtacaatacagataagatttttacatggtagatcaacaaattctttttgggggtagattagaaaacccttacactttggctatgaacaaataataaaaattattctttaaagtaatgtctttaaaggcaaagggaagggtaaagtcggaccagtgtcaaggaaagtttgttttattgaggtggaaaaatagccccaagcagagaaaaggagggtaggtctgcattataactgtctgtgtgaagcaatcatttagttactttgattaatttttcttttctccttatctgtgcagaacaggttgcttgtttacaactgaagatcatgctatattttatatatgaagcccctaatgcaaagctctttacctcttgctattttgttatatatattacagatgaaatctcactgctaatgctcagagatcttttttcactgtaagaggtaacctttaacaatatgggtattacctttgtctcttcataccggttttatgacaaaggtctattgaatttatttgtttgtaagtttctactcccatcaaagcagctttctaagttattgccttggttattatggatgatagttatagcccttataatgccttaactaaggaagaaaagatgttattctgagtttgttttaatacatatatgaacatatagttttattcaattaaaccaaagaagaggtcagcagggagatactaacctttggaaatgattagctggctctgttttttggttaaataagagtctttaatcctttctccatcaagagttacttaccaagggcaggggaagggggatatagaggtcacaaggaaataaaaatcatctttcatctttaattttactccttcctcttatttttttaaaagattatcgaacaataaaatcatttgcctttttaattaaa

SEQ ID NO: 117324 - DNA, 3211 bp, Homo sapiens
  Payload ID: 2906
  Gene Symbol: CLCA4
  Gene Name: chloride channel accessory 4
  Uniprot ID: Q14CN2
  ENST ID: ENST00000370563
  CDS Start-End: 43-2802
gaacaaaccaacatttgagccaggaataactagagaggaacaatggggttattcagaggttttgttttcctcttagttctgtgcctgctgcaccagtcaaatacttccttcattaagctgaataataatggctttgaagatattgtcattgttatagatcctagtgtgccagaagatgaaaaaataattgaacaaatagaggatatggtgactacagcttctacgtacctgtttgaagccacagaaaaaagattttttttcaaaaatgtatctatattaattcctgagaattggaaggaaaatcctcagtacaaaaggccaaaacatgaaaaccataaacatgctgatgttatagttgcaccacctacactcccaggtagagatgaaccatacaccaagcagttcacagaatgtggagagaaaggcgaatacattcacttcacccctgaccttctacttggaaaaaaacaaaatgaatatggaccaccaggcaaactgtttgtccatgagtgggctcacctccggtggggagtgtttgatgagtacaatgaagatcagcctttctaccgtgctaagtcaaaaaaaatcgaagcaacaaggtgttccgcaggtatctctggtagaaatagagtttataagtgtcaaggaggcagctgtcttagtagagcatgcagaattgattctacaacaaaactgtatggaaaagattgtcaattctttcctgataaagtacaaacagaaaaagcatccataatgtttatgcaaagtattgattctgttgttgaattttgtaacgaaaaaacccataatcaagaagctccaagcctacaaaacataaagtgcaattttagaagtacatgggaggtgattagcaattctgaggattttaaaaacaccatacccatggtgacaccacctcctccacctgtcttctcattgctgaagatcagtcaaagaattgtgtgcttagttcttgataagtctggaagcatggggggtaaggaccgcctaaatcgaatgaatcaagcagcaaaacatttcctgctgcagactgttgaaaatggatcctgggtggggatggttcactttgatagtactgccactattgtaaataagctaatccaaataaaaagcagtgatgaaagaaacacactcatggcaggattacctacatatcctctgggaggaacttccatctgctctggaattaaatatgcatttcaggtgattggagagctacattcccaactcgatggatccgaagtactgctgctgactgatggggaggataacactgcaagttcttgtattgatgaagtgaaacaaagtggggccattgttcattttattgctttgggaagagctgctgatgaagcagtaatagagatgagcaagataacaggaggaagtcatttttatgtttcagatgaagctcagaacaatggcctcattgatgcttttggggctcttacatcaggaaatactgatctctcccagaagtcccttcagctcgaaagtaagggattaacactgaatagtaatgcctggatgaacgacactgtcataattgatagtacagtgggaaaggacacgttctttctcatcacatggaacagtctgcctcccagtatttctctctgggatcccagtggaacaataatggaaaatttcacagtggatgcaacttccaaaatggcctatctcagtattccaggaactgcaaaggtgggcacttgggcatacaatcttcaagccaaagcgaacccagaaacattaactattacagtaacttctcgagcagcaaattcttctgtgcctccaatcacagtgaatgctaaaatgaataaggacgtaaacagtttccccagcccaatgattgtttacgcagaaattctacaaggatatgtacctgttcttggagccaatgtgactgctttcattgaatcacagaatggacatacagaagttttggaacttttggataatggtgcaggcgctgattctttcaagaatgatggagtctactccaggtattttacagcatatacagaaaatggcagatatagcttaaaagttcgggctcatggaggagcaaacactgccaggctaaaattacggcctccactgaatagagccgcgtacataccaggctgggtagtgaacggggaaattgaagcaaacccgccaagacctgaaattgatgaggatactcagaccaccttggaggatttcagccgaacagcatccggaggtgcatttgtggtatcacaagtcccaagccttcccttgcctgaccaatacccaccaagtcaaatcacagaccttgatgccacagttcatgaggataagattattcttacatggacagcaccaggagataattttgatgttggaaaagttcaacgttatatcataagaataagtgcaagtattcttgatctaagagacagttttgatgatgctcttcaagtaaatactactgatctgtcaccaaaggaggccaactccaaggaaagctttgcatttaaaccagaaaatatctcagaagaaaatgcaacccacatatttattgccattaaaagtatagataaaagcaatttgacatcaaaagtatccaacattgcacaagtaactttgtttatccctcaagcaaatcctgatgacattgatcctacacctactcctactcctactcctactcctgataaaagtcataattctggagttaatatttctacgctggtattgtctgtgattgggtctgttgtaattgttaactttattttaagtaccaccatttgaaccttaacgaagaaaaaaatcttcaagtagacctagaagagagttttaaaaaacaaaacaatgtaagtaaaggatatttctgaatcttaaaattcatcccatgtgtgatcataaactcataaaaataattttaagatgtcggaaaaggatactttgattaaataaaaacactcatggatatgtaaaaactgtcaagattaaaatttaatagtttcatttatttgttattttatttgtaagaaatagtgatgaacaaagatcctttttcatactgatacctggttgtatattatttgatgcaacagttttctgaaatgatatttcaaattgcatcaagaaattaaaatcatctatctgagtagtcaaaatacaagtaaaggagagcaaataaacaacatttggaaaaaaa

SEQ ID NO: 117325 - DNA, 1316 bp, Homo sapiens
  Payload ID: 2907
  Gene Symbol: CLCC1
  Gene Name: chloride channel CLIC-like 1
  Uniprot ID: Q96S66
  ENST ID: ENST00000302500
  CDS Start-End: 12-1304
ccttatacaggatgctgtgttctttgctcctttgtgaatgtctgttgctggtagctggttatgctcatgatgatgactggattgaccccacagacatgcttaactatgatgctgcttcaggaacaatgagaaaatctcaggcaaaatatggtatttcaggggaaaaggatgtcagtcctgacttgtcatgtgctgatgaaatatcagaatgttatcacaaacttgattctttaacttataagattgatgagtgtgaaaagaaaaagagggaagactatgaaagtcaaagcaatcctgtttttaggagatacttaaataagattttaattgaagctggaaagcttggacttctagcttttgcacagcatcaggctgaagtcgccaagatggagccattaaacaatgtgtgtgccaaaaagatggactggactggaagtatctgggaatggtttagaagttcatggacctataaggatgacccatgccaaaaatactatgagctcttactagtcaaccctatttggttggtcccaccaacaaaggcacttgcagttacattcaccacatttgtaacggagccattgaagcatattggaaaaggaactggggaatttattaaagcactcatgaaggaaattccagcgctgcttcatcttccagtgctgataattatggcattagccatcctgagtttctgctatggtgctggaaaatcagttcatgtgctgagacatataggcggtcctgagagcgaacctccccaggcacttcggccacgggatagaagacggcaggaggaaattgattatagacctgatggtggagcaggtgatgccgatttccattataggggccaaatgggccccactgagcaaggcccttatgccaaaacgtatgagggtagaagagagattttgagagagagagatgttgacttgagatttcagactggcaacaagagccctgaagtgctccgggcatttgatgtaccagacgcagaggcacgagagcatcccacggtggtacccagtcataaatcacctgttttggatacaaagcccaaggagacaggtggaatcctgggggaaggcacaccgaaagaaagcagtactgaaagcagccagtcggccaagcctgtctctggccaagacacatcagggaatacagaaggttcacccgcagcggaaaaggcccagctcaagtctgaagccgcaggcagcccagaccaaggcagcacatacagccccgcaagaggtgtggctggaccacgtggacaggatccggtcagcagcccctgtggctagaggaacaccagc

SEQ ID NO: 117326 - DNA, 1124 bp, Homo sapiens
  Payload ID: 2907
  Gene Symbol: CLCC1
  Gene Name: chloride channel CLIC-like 1
  Uniprot ID: Q96S66
  ENST ID: ENST00000348264
  CDS Start-End: 12-1112
ccttatacaggatgctgtgttctttgctcctttgtgaatgtctgttgctggtagctggttatgctcatgatgatgactggattgaccccacagacatgcttaactatgatgctgcttcaggaacaatgagaaaatctcaggcaaaatatggtatttcaggggaaaaggatgtcagtcctgacttgtcatgtgctgatgaaatatcagaatgttatcacaaacttgattctttaacttataagattgatgagtgtgaaaagaaaaagagggaagactatgaaagtcaaagcaatcctgtttttaggagatacttaaataagattttaattgaagctggaaagcttggacttgcacttgcagttacattcaccacatttgtaacggagccattgaagcatattggaaaaggaactggggaatttattaaagcactcatgaaggaaattccagcgctgcttcatcttccagtgctgataattatggcattagccatcctgagtttctgctatggtgctggaaaatcagttcatgtgctgagacatataggcggtcctgagagcgaacctccccaggcacttcggccacgggatagaagacggcaggaggaaattgattatagacctgatggtggagcaggtgatgccgatttccattataggggccaaatgggccccactgagcaaggcccttatgccaaaacgtatgagggtagaagagagattttgagagagagagatgttgacttgagatttcagactggcaacaagagccctgaagtgctccgggcatttgatgtaccagacgcagaggcacgagagcatcccacggtggtacccagtcataaatcacctgttttggatacaaagcccaaggagacaggtggaatcctgggggaaggcacaccgaaagaaagcagtactgaaagcagccagtcggccaagcctgtctctggccaagacacatcagggaatacagaaggttcacccgcagcggaaaaggcccagctcaagtctgaagccgcaggcagcccagaccaaggcagcacatacagccccgcaagaggtgtggctggaccacgtggacaggatccggtcagcagcccctgtggctagaggaacaccagc

SEQ ID NO: 117327 - DNA, 4803 bp, Homo sapiens
  Payload ID: 2907
  Gene Symbol: CLCC1
  Gene Name: chloride channel CLIC-like 1
  Uniprot ID: Q96S66
  ENST ID: ENST00000356970
  CDS Start-End: 109-1764
gcacgctgaaaccctgggcggcggcaagctgtgcgacctcttctgcggccggcctgggcaggtgtcttcctcgagaggcaggcaggggatcccggacccttatacaggatgctgtgttctttgctcctttgtgaatgtctgttgctggtagctggttatgctcatgatgatgactggattgaccccacagacatgcttaactatgatgctgcttcaggaacaatgagaaaatctcaggcaaaatatggtatttcaggggaaaaggatgtcagtcctgacttgtcatgtgctgatgaaatatcagaatgttatcacaaacttgattctttaacttataagattgatgagtgtgaaaagaaaaagagggaagactatgaaagtcaaagcaatcctgtttttaggagatacttaaataagattttaattgaagctggaaagcttggacttcctgatgaaaacaaaggcgatatgcattatgatgctgagattatccttaaaagagaaactttgttagaaatacagaagtttctcaatggagaagactggaaaccaggtgccttggatgatgcactaagtgatattttaattaattttaagtttcatgattttgaaacatggaagtggcgattcgaagattcctttggagtggatccatataatgtgttaatggtacttctttgtctgctctgcatcgtggttttagtggctactgagctgtggacatatgtacgttggtacactcagttgagacgtgttttaatcatcagctttctgttcagtttgggatggaattggatgtatttatataagctagcttttgcacagcatcaggctgaagtcgccaagatggagccattaaacaatgtgtgtgccaaaaagatggactggactggaagtatctgggaatggtttagaagttcatggacctataaggatgacccatgccaaaaatactatgagctcttactagtcaaccctatttggttggtcccaccaacaaaggcacttgcagttacattcaccacatttgtaacggagccattgaagcatattggaaaaggaactggggaatttattaaagcactcatgaaggaaattccagcgctgcttcatcttccagtgctgataattatggcattagccatcctgagtttctgctatggtgctggaaaatcagttcatgtgctgagacatataggcggtcctgagagcgaacctccccaggcacttcggccacgggatagaagacggcaggaggaaattgattatagacctgatggtggagcaggtgatgccgatttccattataggggccaaatgggccccactgagcaaggcccttatgccaaaacgtatgagggtagaagagagattttgagagagagagatgttgacttgagatttcagactggcaacaagagccctgaagtgctccgggcatttgatgtaccagacgcagaggcacgagagcatcccacggtggtacccagtcataaatcacctgttttggatacaaagcccaaggagacaggtggaatcctgggggaaggcacaccgaaagaaagcagtactgaaagcagccagtcggccaagcctgtctctggccaagacacatcagggaatacagaaggttcacccgcagcggaaaaggcccagctcaagtctgaagccgcaggcagcccagaccaaggcagcacatacagccccgcaagaggtgtggctggaccacgtggacaggatccggtcagcagcccctgtggctagaggaacaccagcacaaacgacagcctcaagtctccttcgagctttatatccatttggggatgaagtctactttgacagctagcaaggcgacatgcaactgttgttgaatgatgacagcaattcaggaaagacttaaatatgaaagcaaattgaacacatcgggtgtttgttatcagaaaagagatgagatgagataagacttgtttattgactagccaatatgtcattaaaattaaggtttatattgtgaagcttttttgaaattttacttttttttgagagttttgctctgtcacccaggctggagtgaggtggtacaatctcggctcactgcaacctccacctcccaggttcaagagattctcctgcctcagtctcccgagtagctaggattacagatgtgcatcaccatgcctggctaatttttgtattttttagtagagatggggtttcaccatgttggtcaggctggtctcgaactcctgacctcaagtgacccgcccttgtcggcctcccaaagtgctgggattacaggcatgagccattgtgcccagcctatatagtgtgaagcttttaggaaaatcagaacagggtagacagctgttaaaaacaatgtttaaatggaataatgttgaatgtttacaggctgtaagaactattgtatacacaaaataatacacaaagtttgtactttgtgtacaaatacaaatttgtactttgtgtacaaataatacaaaaagtttgtatacacaaactttttacgttgtggtttggtatattgtcttaactgaattttcttataagaaccccatgaaacttacctgagtttttaaaatgctatccaggacatcataccttatagtatacatgaaacataatgtaatccaggttgtaatttagaactttttttttttttttagctgagcacttaatgtaattaattccaggttatgactcttaaaaaacattggccattagagaaatagttctatttgcccatccaaatcacctgaatgactttttgaaagaataggggtccacatccccagatcccatcccagctgtgcacagtctgaagcaagcagagtgaaacaagttggcaacttgttccaagcgtgggcctttgcagtctgtgatccagtgttactccaggtcccagtctgtcccatacttgtcttttgctacagttagttagttactttgttatcatccccttgtaaactgccttcaatatctgggataaggaagacaaagcttaatgacaactaaggttctagctgacatctttctttcatatttaatttttgtgagttttcatctgttttctgtttgtttatgtgtcctaggttcttgacctaaccacatgggttttgttttttgtttttatattagaacttagaaaagtttgttttacagcagtattatggaacagaagagaccattttaaataatttttttaaacagcccaaaacacacaaaagatacttgttttctagagacagggtcttgctctgtcacccaggctggagtgcagtggcacgatcatagctcagtgcagcctccacctcctgggctcaagtggtcctcctgcctcagcctcttaagcagttgggactacaggtgtgtgccagcatgcttgctgttttttttttttttgagacagagtcttgctctgtcactcaggctggagtccagtggcttggtctcagctcactgcaatctctgcctcccaggggttcaagtgattctcctgcctcagcctcccaagtagctgaaactacaggcgcatgccaccatgcccagctaatttttgtatttttagtagagacagggtttcactatgttggccaggctggtctcaaactcccgacctcaagtgatccgcccgcttcggcctcccaaagtgctgggattacaggtgtgagccactgcgcctggctgctgatttatttttcatagacacgggggtctatgttgcccaggttggtcttgaactcctagcctcaagcgatcctcctgcctcagcctcccaatgtgctgggattacaggaatgagccaccatgcccagcccaagaagtagagtttcttttatactgactttggcctaaaaaaacagattttcatggaggaaaaaaaaacctagatttttagtaagactattttatatacttttttacattgatcaagtacattatttttaccaaacaacattgtttcccactacatccatggttatgtataaaaaaacgccattgtcaattaagatgttaaaaaattatttccataagagtattaaattctaatctatgattcacttaacttcctactttataaacactaggtaaagtaatctcacaagctgccaaagaacacatcccaagcagtaatcacagacgatgaagcaccttacaggacccctccaccctcaaacgcgcatgtccagagaagtattaatgccttaatagactactgaaggttaactatttacatcattctaaaaatattttaagctgtattacagtgctataaattctccttttaaggaaaaaagtaatagattgtttccttaccgtgtttgaaaggaaaaaaaataaatccatagtaactaatggtctgccgattttttccctgaatttttaaactccaacaaagcattattttgcaaaaagtcctttagcccaaagtcagtgtctctgttttgatctctttgtaaaagaactctctgttcatccattctctttccctgggaccgtaaaataaggctgaaaaagtcttcatctggtactgtcggaccctttgtggtagcaggtggtggagcacatctttgatcatctaatctggatccctagaagtttatgagagagattaaaagacatactgtgggaaagaaagcaccaagctatgttaaatctctcagtcacaacaagaaaacgcagttgtaaacttttatttggggcttctcagaaattaatctttgtttttatattgttctctttagttcccagcctgatttctgaaagaaataatctttaaacctg

SEQ ID NO: 117328 - DNA, 4151 bp, Homo sapiens
  Payload ID: 2907
  Gene Symbol: CLCC1
  Gene Name: chloride channel CLIC-like 1
  Uniprot ID: Q96S66
  ENST ID: ENST00000369968
  CDS Start-End: 12-1112
ccttatacaggatgctgtgttctttgctcctttgtgaatgtctgttgctggtagctggttatgctcatgatgatgactggattgaccccacagacatgcttaactatgatgctgcttcaggaacaatgagaaaatctcaggcaaaatatggtatttcaggggaaaaggatgtcagtcctgacttgtcatgtgctgatgaaatatcagaatgttatcacaaacttgattctttaacttataagattgatgagtgtgaaaagaaaaagagggaagactatgaaagtcaaagcaatcctgtttttaggagatacttaaataagattttaattgaagctggaaagcttggacttgcacttgcagttacattcaccacatttgtaacggagccattgaagcatattggaaaaggaactggggaatttattaaagcactcatgaaggaaattccagcgctgcttcatcttccagtgctgataattatggcattagccatcctgagtttctgctatggtgctggaaaatcagttcatgtgctgagacatataggcggtcctgagagcgaacctccccaggcacttcggccacgggatagaagacggcaggaggaaattgattatagacctgatggtggagcaggtgatgccgatttccattataggggccaaatgggccccactgagcaaggcccttatgccaaaacgtatgagggtagaagagagattttgagagagagagatgttgacttgagatttcagactggcaacaagagccctgaagtgctccgggcatttgatgtaccagacgcagaggcacgagagcatcccacggtggtacccagtcataaatcacctgttttggatacaaagcccaaggagacaggtggaatcctgggggaaggcacaccgaaagaaagcagtactgaaagcagccagtcggccaagcctgtctctggccaagacacatcagggaatacagaaggttcacccgcagcggaaaaggcccagctcaagtctgaagccgcaggcagcccagaccaaggcagcacatacagccccgcaagaggtgtggctggaccacgtggacaggatccggtcagcagcccctgtggctagaggaacaccagcacaaacgacagcctcaagtctccttcgagctttatatccatttggggatgaagtctactttgacagctagcaaggcgacatgcaactgttgttgaatgatgacagcaattcaggaaagacttaaatatgaaagcaaattgaacacatcgggtgtttgttatcagaaaagagatgagatgagataagacttgtttattgactagccaatatgtcattaaaattaaggtttatattgtgaagcttttttgaaattttacttttttttgagagttttgctctgtcacccaggctggagtgaggtggtacaatctcggctcactgcaacctccacctcccaggttcaagagattctcctgcctcagtctcccgagtagctaggattacagatgtgcatcaccatgcctggctaatttttgtattttttagtagagatggggtttcaccatgttggtcaggctggtctcgaactcctgacctcaagtgacccgcccttgtcggcctcccaaagtgctgggattacaggcatgagccattgtgcccagcctatatagtgtgaagcttttaggaaaatcagaacagggtagacagctgttaaaaacaatgtttaaatggaataatgttgaatgtttacaggctgtaagaactattgtatacacaaaataatacacaaagtttgtactttgtgtacaaatacaaatttgtactttgtgtacaaataatacaaaaagtttgtatacacaaactttttacgttgtggtttggtatattgtcttaactgaattttcttataagaaccccatgaaacttacctgagtttttaaaatgctatccaggacatcataccttatagtatacatgaaacataatgtaatccaggttgtaatttagaactttttttttttttttagctgagcacttaatgtaattaattccaggttatgactcttaaaaaacattggccattagagaaatagttctatttgcccatccaaatcacctgaatgactttttgaaagaataggggtccacatccccagatcccatcccagctgtgcacagtctgaagcaagcagagtgaaacaagttggcaacttgttccaagcgtgggcctttgcagtctgtgatccagtgttactccaggtcccagtctgtcccatacttgtcttttgctacagttagttagttactttgttatcatccccttgtaaactgccttcaatatctgggataaggaagacaaagcttaatgacaactaaggttctagctgacatctttctttcatatttaatttttgtgagttttcatctgttttctgtttgtttatgtgtcctaggttcttgacctaaccacatgggttttgttttttgtttttatattagaacttagaaaagtttgttttacagcagtattatggaacagaagagaccattttaaataatttttttaaacagcccaaaacacacaaaagatacttgttttctagagacagggtcttgctctgtcacccaggctggagtgcagtggcacgatcatagctcagtgcagcctccacctcctgggctcaagtggtcctcctgcctcagcctcttaagcagttgggactacaggtgtgtgccagcatgcttgctgttttttttttttttgagacagagtcttgctctgtcactcaggctggagtccagtggcttggtctcagctcactgcaatctctgcctcccaggggttcaagtgattctcctgcctcagcctcccaagtagctgaaactacaggcgcatgccaccatgcccagctaatttttgtatttttagtagagacagggtttcactatgttggccaggctggtctcaaactcccgacctcaagtgatccgcccgcttcggcctcccaaagtgctgggattacaggtgtgagccactgcgcctggctgctgatttatttttcatagacacgggggtctatgttgcccaggttggtcttgaactcctagcctcaagcgatcctcctgcctcagcctcccaatgtgctgggattacaggaatgagccaccatgcccagcccaagaagtagagtttcttttatactgactttggcctaaaaaaacagattttcatggaggaaaaaaaaacctagatttttagtaagactattttatatacttttttacattgatcaagtacattatttttaccaaacaacattgtttcccactacatccatggttatgtataaaaaaacgccattgtcaattaagatgttaaaaaattatttccataagagtattaaattctaatctatgattcacttaacttcctactttataaacactaggtaaagtaatctcacaagctgccaaagaacacatcccaagcagtaatcacagacgatgaagcaccttacaggacccctccaccctcaaacgcgcatgtccagagaagtattaatgccttaatagactactgaaggttaactatttacatcattctaaaaatattttaagctgtattacagtgctataaattctccttttaaggaaaaaagtaatagattgtttccttaccgtgtttgaaaggaaaaaaaataaatccatagtaactaatggtctgccgattttttccctgaatttttaaactccaacaaagcattattttgcaaaaagtcctttagcccaaagtcagtgtctctgttttgatctctttgtaaaagaactctctgttcatccattctctttccctgggaccgtaaaataaggctgaaaaagtcttcatctggtactgtcggaccctttgtggtagcaggtggtggagcacatctttgatcatctaatctggatccctagaagtttatgagagagattaaaagacatactgtgggaaagaaagcaccaagctatgttaaatctctcagtcacaacaagaaaacgcagttgtaaacttttatttggggcttctcagaaattaatctttgtttttatattgttctctttagttcccagcctgatttctgaaagaaataatctttaaacctg

SEQ ID NO: 117329 - DNA, 4343 bp, Homo sapiens
  Payload ID: 2907
  Gene Symbol: CLCC1
  Gene Name: chloride channel CLIC-like 1
  Uniprot ID: Q96S66
  ENST ID: ENST00000369969
  CDS Start-End: 12-1304
ccttatacaggatgctgtgttctttgctcctttgtgaatgtctgttgctggtagctggttatgctcatgatgatgactggattgaccccacagacatgcttaactatgatgctgcttcaggaacaatgagaaaatctcaggcaaaatatggtatttcaggggaaaaggatgtcagtcctgacttgtcatgtgctgatgaaatatcagaatgttatcacaaacttgattctttaacttataagattgatgagtgtgaaaagaaaaagagggaagactatgaaagtcaaagcaatcctgtttttaggagatacttaaataagattttaattgaagctggaaagcttggacttctagcttttgcacagcatcaggctgaagtcgccaagatggagccattaaacaatgtgtgtgccaaaaagatggactggactggaagtatctgggaatggtttagaagttcatggacctataaggatgacccatgccaaaaatactatgagctcttactagtcaaccctatttggttggtcccaccaacaaaggcacttgcagttacattcaccacatttgtaacggagccattgaagcatattggaaaaggaactggggaatttattaaagcactcatgaaggaaattccagcgctgcttcatcttccagtgctgataattatggcattagccatcctgagtttctgctatggtgctggaaaatcagttcatgtgctgagacatataggcggtcctgagagcgaacctccccaggcacttcggccacgggatagaagacggcaggaggaaattgattatagacctgatggtggagcaggtgatgccgatttccattataggggccaaatgggccccactgagcaaggcccttatgccaaaacgtatgagggtagaagagagattttgagagagagagatgttgacttgagatttcagactggcaacaagagccctgaagtgctccgggcatttgatgtaccagacgcagaggcacgagagcatcccacggtggtacccagtcataaatcacctgttttggatacaaagcccaaggagacaggtggaatcctgggggaaggcacaccgaaagaaagcagtactgaaagcagccagtcggccaagcctgtctctggccaagacacatcagggaatacagaaggttcacccgcagcggaaaaggcccagctcaagtctgaagccgcaggcagcccagaccaaggcagcacatacagccccgcaagaggtgtggctggaccacgtggacaggatccggtcagcagcccctgtggctagaggaacaccagcacaaacgacagcctcaagtctccttcgagctttatatccatttggggatgaagtctactttgacagctagcaaggcgacatgcaactgttgttgaatgatgacagcaattcaggaaagacttaaatatgaaagcaaattgaacacatcgggtgtttgttatcagaaaagagatgagatgagataagacttgtttattgactagccaatatgtcattaaaattaaggtttatattgtgaagcttttttgaaattttacttttttttgagagttttgctctgtcacccaggctggagtgaggtggtacaatctcggctcactgcaacctccacctcccaggttcaagagattctcctgcctcagtctcccgagtagctaggattacagatgtgcatcaccatgcctggctaatttttgtattttttagtagagatggggtttcaccatgttggtcaggctggtctcgaactcctgacctcaagtgacccgcccttgtcggcctcccaaagtgctgggattacaggcatgagccattgtgcccagcctatatagtgtgaagcttttaggaaaatcagaacagggtagacagctgttaaaaacaatgtttaaatggaataatgttgaatgtttacaggctgtaagaactattgtatacacaaaataatacacaaagtttgtactttgtgtacaaatacaaatttgtactttgtgtacaaataatacaaaaagtttgtatacacaaactttttacgttgtggtttggtatattgtcttaactgaattttcttataagaaccccatgaaacttacctgagtttttaaaatgctatccaggacatcataccttatagtatacatgaaacataatgtaatccaggttgtaatttagaactttttttttttttttagctgagcacttaatgtaattaattccaggttatgactcttaaaaaacattggccattagagaaatagttctatttgcccatccaaatcacctgaatgactttttgaaagaataggggtccacatccccagatcccatcccagctgtgcacagtctgaagcaagcagagtgaaacaagttggcaacttgttccaagcgtgggcctttgcagtctgtgatccagtgttactccaggtcccagtctgtcccatacttgtcttttgctacagttagttagttactttgttatcatccccttgtaaactgccttcaatatctgggataaggaagacaaagcttaatgacaactaaggttctagctgacatctttctttcatatttaatttttgtgagttttcatctgttttctgtttgtttatgtgtcctaggttcttgacctaaccacatgggttttgttttttgtttttatattagaacttagaaaagtttgttttacagcagtattatggaacagaagagaccattttaaataatttttttaaacagcccaaaacacacaaaagatacttgttttctagagacagggtcttgctctgtcacccaggctggagtgcagtggcacgatcatagctcagtgcagcctccacctcctgggctcaagtggtcctcctgcctcagcctcttaagcagttgggactacaggtgtgtgccagcatgcttgctgttttttttttttttgagacagagtcttgctctgtcactcaggctggagtccagtggcttggtctcagctcactgcaatctctgcctcccaggggttcaagtgattctcctgcctcagcctcccaagtagctgaaactacaggcgcatgccaccatgcccagctaatttttgtatttttagtagagacagggtttcactatgttggccaggctggtctcaaactcccgacctcaagtgatccgcccgcttcggcctcccaaagtgctgggattacaggtgtgagccactgcgcctggctgctgatttatttttcatagacacgggggtctatgttgcccaggttggtcttgaactcctagcctcaagcgatcctcctgcctcagcctcccaatgtgctgggattacaggaatgagccaccatgcccagcccaagaagtagagtttcttttatactgactttggcctaaaaaaacagattttcatggaggaaaaaaaaacctagatttttagtaagactattttatatacttttttacattgatcaagtacattatttttaccaaacaacattgtttcccactacatccatggttatgtataaaaaaacgccattgtcaattaagatgttaaaaaattatttccataagagtattaaattctaatctatgattcacttaacttcctactttataaacactaggtaaagtaatctcacaagctgccaaagaacacatcccaagcagtaatcacagacgatgaagcaccttacaggacccctccaccctcaaacgcgcatgtccagagaagtattaatgccttaatagactactgaaggttaactatttacatcattctaaaaatattttaagctgtattacagtgctataaattctccttttaaggaaaaaagtaatagattgtttccttaccgtgtttgaaaggaaaaaaaataaatccatagtaactaatggtctgccgattttttccctgaatttttaaactccaacaaagcattattttgcaaaaagtcctttagcccaaagtcagtgtctctgttttgatctctttgtaaaagaactctctgttcatccattctctttccctgggaccgtaaaataaggctgaaaaagtcttcatctggtactgtcggaccctttgtggtagcaggtggtggagcacatctttgatcatctaatctggatccctagaagtttatgagagagattaaaagacatactgtgggaaagaaagcaccaagctatgttaaatctctcagtcacaacaagaaaacgcagttgtaaacttttatttggggcttctcagaaattaatctttgtttttatattgttctctttagttcccagcctgatttctgaaagaaataatctttaaacctg

SEQ ID NO: 117330 - DNA, 2078 bp, Homo sapiens
  Payload ID: 2907
  Gene Symbol: CLCC1
  Gene Name: chloride channel CLIC-like 1
  Uniprot ID: Q96S66
  ENST ID: ENST00000369970
  CDS Start-End: 12-1517
ccttatacaggatgctgtgttctttgctcctttgtgaatgtctgttgctggtagctggttatgctcatgatgatgactggattgaccccacagacatgcttaactatgatgctgcttcaggaacaatgagaaaatctcaggcaaaatatggtatttcaggggaaaaggatgtcagtcctgacttgtcatgtgctgatgaaatatcagaatgttatcacaaacttgattctttaacttataagattgatgagtgtgaaaagaaaaagagggaagactatgaaagtcaaagcaatcctgtttttaggagatacttaaataagattttaattgaagctggaaagcttggactttttcatgattttgaaacatggaagtggcgattcgaagattcctttggagtggatccatataatgtgttaatggtacttctttgtctgctctgcatcgtggttttagtggctactgagctgtggacatatgtacgttggtacactcagttgagacgtgttttaatcatcagctttctgttcagtttgggatggaattggatgtatttatataagctagcttttgcacagcatcaggctgaagtcgccaagatggagccattaaacaatgtgtgtgccaaaaagatggactggactggaagtatctgggaatggtttagaagttcatggacctataaggatgacccatgccaaaaatactatgagctcttactagtcaaccctatttggttggtcccaccaacaaaggcacttgcagttacattcaccacatttgtaacggagccattgaagcatattggaaaaggaactggggaatttattaaagcactcatgaaggaaattccagcgctgcttcatcttccagtgctgataattatggcattagccatcctgagtttctgctatggtgctggaaaatcagttcatgtgctgagacatataggcggtcctgagagcgaacctccccaggcacttcggccacgggatagaagacggcaggaggaaattgattatagacctgatggtggagcaggtgatgccgatttccattataggggccaaatgggccccactgagcaaggcccttatgccaaaacgtatgagggtagaagagagattttgagagagagagatgttgacttgagatttcagactggcaacaagagccctgaagtgctccgggcatttgatgtaccagacgcagaggcacgagagcatcccacggtggtacccagtcataaatcacctgttttggatacaaagcccaaggagacaggtggaatcctgggggaaggcacaccgaaagaaagcagtactgaaagcagccagtcggccaagcctgtctctggccaagacacatcagggaatacagaaggttcacccgcagcggaaaaggcccagctcaagtctgaagccgcaggcagcccagaccaaggcagcacatacagccccgcaagaggtgtggctggaccacgtggacaggatccggtcagcagcccctgtggctagaggaacaccagcacaaacgacagcctcaagtctccttcgagctttatatccatttggggatgaagtctactttgacagctagcaaggcgacatgcaactgttgttgaatgatgacagcaattcaggaaagacttaaatatgaaagcaaattgaacacatcgggtgtttgttatcagaaaagagatgagatgagataagacttgtttattgactagccaatatgtcattaaaattaaggtttatattgtgaagcttttttgaaattttacttttttttgagagttttgctctgtcacccaggctggagtgaggtggtacaatctcggctcactgcaacctccacctcccaggttcaagagattctcctgcctcagtctcccgagtagctaggattacagatgtgcatcaccatgcctggctaatttttgtattttttagtagagatggggtttcaccatgttggtcaggctggtctcgaactcctgacctcaagtgacccgcccttgtcggcctcccaaagtgctgggattacaggcatgagccattgtgcccagcctatat

SEQ ID NO: 117331 - DNA, 2468 bp, Homo sapiens
  Payload ID: 2907
  Gene Symbol: CLCC1
  Gene Name: chloride channel CLIC-like 1
  ENST ID: ENST00000369976
  CDS Start-End: 263-1051
gaaaccctgggcggcggcaagctgtgcgacctcttctgcggccggcctgggcaggtgtcttcctcgagaggcaggcaggggatcccggacactagctttatcgtcatctgggaaattgttaaaaatgcaaattcgcaagtttgagagccatggttccaagaaactgcataagcatacgaaataagttgcagcctcccgacttataccctggtacttctagtctaaaacaggatttgactctactaatccagccttatacaggatgctgtgttctttgctcctttgtgaatgtctgttgctggtagctggttatgctcatgatgatgactggattgaccccacagacatgcttaactatgatgctgcttcaggaacaatgagaaaatctcaggcaaaatatggtatttcaggggaaaaggatgtcagtcctgacttgtcatgtgctgatgaaatatcagaatgttatcacaaacttgattctttaacttataagattgatgagtgtgaaaagaaaaagagggaagactatgaaagtcaaagcaatcctgtttttaggagatacttaaataagattttaattgaagctggaaagcttggacttcctgatgaaaacaaaggcgatatgcattatgatgctgagattatccttaaaagagaaactttgttagaaatacagaagtttctcaatggagaagactggaaaccaggtgccttggatgatgcactaagtgatattttaattaattttaagtttcatgattttgaaacatggaagtggcgattcgaagattcctttggagtggatccatataatgtgttaatggtacttctttgtctgctctgcatcgtggttttagtggctactgagctgtggacatatgtacgttggtacactcagttgagacgtgttttaatcatcagctgtgcacagtctgaagcaagcagagtgaaacaagttggcaacttgttccaagcgtgggcctttgcagtctgtgatccagtgttactccaggtcccagtctgtcccatacttgtcttttgctacagttagttagttactttgttatcatccccttgtaaactgccttcaatatctgggataaggaagacaaagcttaatgacaactaaggttctagctgacatctttctttcatatttaatttttgtgagttttcatctgttttctgtttgtttatgtgtcctaggttcttgacctaaccacatgggttttgttttttgtttttatattagaacttagaaaagtttgttttacagcagtattatggaacagaagagaccattttaaataatttttttaaacagcccaaaacacacaaaagatacttgttttctagagacagggtcttgctctgtcacccaggctggagtgcagtggcacgatcatagctcagtgcagcctccacctcctgggctcaagtggtcctcctgcctcagcctcttaagcagttgggactacaggtgtgtgccagcatgcttgctgttttttttttttttgagacagagtcttgctctgtcactcaggctggagtccagtggcttggtctcagctcactgcaatctctgcctcccaggggttcaagtgattctcctgcctcagcctcccaagtagctgaaactacaggcgcatgccaccatgcccagctaatttttgtatttttagtagagacagggtttcactatgttggccaggctggtctcaaactcccgacctcaagtgatccgcccgcttcggcctcccaaagtgctgggattacaggtgtgagccactgcgcctggctgctgatttatttttcatagacacgggggtctatgttgcccaggttggtcttgaactcctagcctcaagcgatcctcctgcctcagcctcccaatgtgctgggattacaggaatgagccaccatgcccagcccaagaagtagagtttcttttatactgactttggcctaaaaaaacagattttcatggaggaaaaaaaaacctagatttttagtaagactattttatatacttttttacattgatcaagtacattatttttaccaaacaacattgtttcccactacatccatggttatgtataaaaaaacgccattgtcaattaagatgttaaaaaattatttccataagagtattaaattctaatctatgattcacttaacttcctactttataaacactaggtaaagtaatctcacaagctgccaaagaacacatcccaagcagtaatcacagacgatgaagcaccttacaggacccctccaccctcaaacgcgcatgtccagagaagtattaatgccttaatagactactgaaggttaactatttacatcattctaaaaatattttaagctgtattacagtgctataaattctccttttaaggaaaaaagtaatagattgtttccttaccgtgtttgaaaggaaaaaaaataaatccatagtaact

SEQ ID NO: 117332 - DNA, 1172 bp, Homo sapiens
  Payload ID: 2908
  Gene Symbol: CLNS1A
  Gene Name: chloride channel, nucleotide -sensitive, 1A
  ENST ID: ENST00000263309
  CDS Start-End: 38-649
aactccctcagggcctgtgttgccgcactctgctgctatgagcttcctcaaaagtttcccgccgcctgggccagcggaggggctcctgcggcagcagccagacactgaggctgtgctgaacgggaagggcctcggcactggtaccctttacatcgctgagagccgcctgtcttggttagatggctctggattaggattctcactggaataccccaccattagtttacatgcattatccagggaccgaagtgactgtctaggagagcatttgtatgttatggtgaatgccaaatttgaagtggaggcaatgttcactgcaatgtgcgaatgccaggccttgcatccagatcctgaggatgaggattcagatgactacgatggagaagaatatgatgtggaagcacatgaacaaggacagggggacatccctacattttacacctatgaagaaggattatcccatctaacagcagaaggccaagccacactggagagattagaaggaatgctttctcagtctgtgagcagccagtataatatggctggggtcaggacagaagattcaataagagattatgaagatgggatggaggtggataccacaccaacagttgctggacagtttgaggatgcagatgttgatcactgaaaatgatttatgcaagtttaagattctgctcctaagtgtaggagagaacttggtgcctcttccactctggagtgaagttaatgaaagtctttttccttttccaaaacccaacctgaaccagttctttcttgagacagactatactgagacaacaagttgtcaccagcagaagatagataatatgacctttattaacttgatgaattaacttaaccaagagggtatttgtagtttactatttaccctaaaactttctgtgtctgggtaccctctgagtaggcctataattcctaccttgactgtgtgcatcatttgtaagctagcagatctatgtggtgaaaatgcacaggagcttggtagactgcgggggaaagagagagctcctttcgccatgttttaccagtctgctgttataacctcttaggttgtatcctttaatttccagccttttaggttagtttctgtaacagaacaagtgagtctgggatgaagtcctcaaagtacttcaaatggtaattgtttt

SEQ ID NO: 117333 - DNA, 667 bp, Homo sapiens
  Payload ID: 2908
  Gene Symbol: CLNS1A
  Gene Name: chloride channel, nucleotide -sensitive, 1A
  ENST ID: ENST00000527133
  CDS Start-End: 69-218
gggcggtgtggtgcacgcattgctgtgctccaactccctcagggcctgtgttgccgcactctgctgctatgagcttcctcaaaagtttcccgccgcctgggccagcggaggggctcctgcggcagcagccagacactgaggctgtgctgaacgggaagggcctcggcactggtaccctttacatcgctgagagaagaatcaaaagaacctgttgctgatgaagaagaggaagacagtgatgatgatgttgaacctattactgaatttagatttgtgcctagtgataaatcagcgttggaggcaatgttcactgcaatgtgcgaatgccaggccttgcatccagatcctgaggatgaggattcagatgactacgatggagaagaatatgatgtggaagcacatgaacaaggacagggggacatccctacattttacacctatgaagaaggattatcccatctaacagcagaaggccaagccacactggagagattagaaggaatgctttctcagtctgtgagcagccagtataatatggctggggtcaggacagaagattcaataagagattatgaagatgggatggaggtggataccacaccaacagttgctggacagtttgaggatgcagatgttgatcactgaaaatgatttatgcaagtttaag

SEQ ID NO: 117334 - DNA, 1121 bp, Homo sapiens
  Payload ID: 2908
  Gene Symbol: CLNS1A
  Gene Name: chloride channel, nucleotide -sensitive, 1A
  ENST ID: ENST00000525064
  CDS Start-End: 59-598
gtgcacgcattgctgtgctccaactccctcagggcctgtgttgccgcactctgctgctatgagcttcctcaaaagtttcccgccgcctgggccagcggaggggctcctgcggcagcagccagacactgaggctgtgctgaacgggaagggcctcggcactggtaccctttacatcgctgagagccgcctgtcttggttagatggctctggattaggattctcactggaataccccaccattagtttacatgcattatccagggaccgaagtgactgtctaggagagcatttgtatgttatggtgaatgccaaatttgaagaagaatcaaaagaacctgttgctgatgaagaagaggaagacagtgatgatgatgttgaacctattactgaatttagatttgtgcctagtgataaatcagcgttggaggcaatgttcactgcaatgtgcgaatgccaggccttgcatccagatcctgaggatgaggattcagatgactacgatggagaagaatatgatgtggaagcacatgatgggatggaggtggataccacaccaacagttgctggacagtttgaggatgcagatgttgatcactgaaaatgatttatgcaagtttaagattctgctcctaagtgtaggagagaacttggtgcctcttccactctggagtgaagttaatgaaagtctttttccttttccaaaacccaacctgaaccagttctttcttgagacagactatactgagacaacaagttgtcaccagcagaagatagataatatgacctttattaacttgatgaattaacttaaccaagagggtatttgtagtttactatttaccctaaaactttctgtgtctgggtaccctctgagtaggcctataattcctaccttgactgtgtgcatcatttgtaagctagcagatctatgtggtgaaaatgcacaggagcttggtagactgcgggggaaagagagagctcctttcgccatgttttaccagtctgctgttataacctcttaggttgtatcctttaatttccagccttttaggttagtttctgtaacagaacaagtgagtctgggatgaagtcctcaaagtacttcaaatggtaattgtttt

SEQ ID NO: 117335 - DNA, 2993 bp, Homo sapiens
  Payload ID: 2908
  Gene Symbol: CLNS1A
  Gene Name: chloride channel, nucleotide -sensitive, 1A
  Uniprot ID: P54105
  ENST ID: ENST00000525428
  CDS Start-End: 92-805
ggggtgactgcctcttccagggcgggcggtgtggtgcacgcattgctgtgctccaactccctcagggcctgtgttgccgcactctgctgctatgagcttcctcaaaagtttcccgccgcctgggccagcggaggggctcctgcggcagcagccagacactgaggctgtgctgaacgggaagggcctcggcactggtaccctttacatcgctgagagccgcctgtcttggttagatggctctggattaggattctcactggaataccccaccattagtttacatgcattatccagggaccgaagtgactgtctaggagagcatttgtatgttatggtgaatgccaaatttgaagaagaatcaaaagaacctgttgctgatgaagaagaggaagacagtgatgatgatgttgaacctattactgaatttagatttgtgcctagtgataaatcagcgttggaggcaatgttcactgcaatgtgcgaatgccaggccttgcatccagatcctgaggatgaggattcagatgactacgatggagaagaatatgatgtggaagcacatgaacaaggacagggggacatccctacattttacacctatgaagaaggattatcccatctaacagcagaaggccaagccacactggagagattagaaggaatgctttctcagtctgtgagcagccagtataatatggctggggtcaggacagaagattcaataagagattatgaagatgggatggaggtggataccacaccaacagttgctggacagtttgaggatgcagatgttgatcactgaaaatgatttatgcaagtttaagattctgctcctaagtgtaggagagaacttggtgcctcttccactctggagtgaagttaatgaaagtctttttccttttccaaaacccaacctgaaccagttctttcttgagacagactatactgagacaacaagttgtcaccagcagaagatagataatatgacctttattaacttgatgaattaacttaaccaagagggtatttgtagtttactatttaccctaaaactttctgtgtctgggtaccctctgagtaggcctataattcctaccttgactgtgtgcatcatttgtaagctagcagatctatgtggtgaaaatgcacaggagcttggtagactgcgggggaaagagagagctcctttcgccatgttttaccagtctgctgttataacctcttaggttgtatcctttaatttccagccttttaggttagtttctgtaacagaacaagtgagtctgggatgaagtcctcaaagtacttcaaatggtaattgttttgtttttgtaatagcttaacaaataaacctaggttttctatattactttgctctcattcttgactaaaaccattaatgagaaatgttttttaaaaaataatgctggcaaatatgagaattttgttggctttatttttgtttacttgttgagaagatgaacatgaaattaataagaaaatatagttatagcttctggcaagtatttagtaaggcaaagatttaacacatttcaggggatttctgccacttccttttagatcagcagtaatttcttatatttatcaactctcaatttttagttttcatagatacctgggtattataaggctgatttgtaattactgatttatacttggacttttgaaatcattatgtgtccttaaaaataaggttatacaagctaaccttcttaacaggatcacatggctaattagtgactaaactgatgtttggtaccactcagcccagtgttcatttcagcactgtcacttggtttcccttatcttgcaaggtagactgaaaaaaaacgaattttcctttttctaaccagactctcagaatttctgagtctgttaacaataggcaagtaaaacagccacttgaaatggaaactaaaatttactgagacctctgtactagccactgtcctgagttctttattatgtattataatattcttaattatcttatgagatacgcttttatcccactttatagttgaggaaactgagttatagagagaggtaaaataacttgcttaaggtcatgtagatagtgaattgtgatttttgagcctgtgctttaaaacatcatacagccttaccacctaccagcagcagaaagcatgcacactctccccactgctgcagggtttcagtgttaacatttcaatggccagtacaagagcttccccagtttctctgctacccatctgagcaacacccataattctatcctagaagtttgtccattcttcagtaatcagtcaggacattctcacaggctaatattagaaattccatttgagttccttttaaaaggaacaaatttataattgtgactttccatgaacataaattgctctgatagcaaaatgtcgagaagattcagagtgtacttggtttcttgttggtgttgctgtggtcaatgcaatatgcaaaaaggcaggagaccaaagcatgtgggcacctctctgggcttatttcctcattagactaagtgactttcaaagattgagctgtaacattcactagatagttagaaccgtagcattgagaaaatagaagctgagaaaaaagagcaggtcaggcttttaaaagataaaatttataatgatcagccagacaatatttattgatttcatttgagcctaattttagggttgctggaattgttttctttgtgtgttcctgatgtagagacactttaaaggtacatagacatttcccctccaaaatgtaagtcatctaaatgttcctaaaagctagggttaatggttctctgttctaggttcttcatttaaaaaatgtattcattaagatatggtcccagccggacgtggtggctcacacctgtaatcccagcactttgggaggctcaggtgggcagatcacttgaggtcaggagtttgagaccagcctggccaatacggtgaaaacccatctct

SEQ ID NO: 117336 - DNA, 953 bp, Homo sapiens
  Payload ID: 2908
  Gene Symbol: CLNS1A
  Gene Name: chloride channel, nucleotide -sensitive, 1A
  Uniprot ID: P54105
  ENST ID: ENST00000528364
  CDS Start-End: 63-776
tgtggtgcacgcattgctgtgctccaactccctcagggcctgtgttgccgcactctgctgctatgagcttcctcaaaagtttcccgccgcctgggccagcggaggggctcctgcggcagcagccagacactgaggctgtgctgaacgggaagggcctcggcactggtaccctttacatcgctgagagccgcctgtcttggttagatggctctggattaggattctcactggaataccccaccattagtttacatgcattatccagggaccgaagtgactgtctaggagagcatttgtatgttatggtgaatgccaaatttgaagaagaatcaaaagaacctgttgctgatgaagaagaggaagacagtgatgatgatgttgaacctattactgaatttagatttgtgcctagtgataaatcagcgttggaggcaatgttcactgcaatgtgcgaatgccaggccttgcatccagatcctgaggatgaggattcagatgactacgatggagaagaatatgatgtggaagcacatgaacaaggacagggggacatccctacattttacacctatgaagaaggattatcccatctaacagcagaaggccaagccacactggagagattagaaggaatgctttctcagtctgtgagcagccagtataatatggctggggtcaggacagaagattcaataagagattatgaagatgggatggaggtggataccacaccaacagttgctggacagtttgaggatgcagatgttgatcactgaaaatgatttatgcaagtttaagaaaccagccttttaaagttccagttagcttccaagttactgctattgtgaaaactgtataacattgcttcttatactgaccatgaattgtgatactggacctgtgctttcttctcacatcctgccagtggaactatcagaaaataacctcttaga

SEQ ID NO: 117337 - DNA, 898 bp, Homo sapiens
  Payload ID: 2908
  Gene Symbol: CLNS1A
  Gene Name: chloride channel, nucleotide -sensitive, 1A
  ENST ID: ENST00000532069
  CDS Start-End: 81-584
ctcttccagggcgggcggtgtggtgcacgcattgctgtgctccaactccctcagggcctgtgttgccgcactctgctgctatgagcttcctcaaaagtttcccgccgcctgggccagcggaggggctcctgcggcagcagccagacactgaggctgtgctgaacgggaagggcctcggcactggtaccctttacatcgctgagagccgcctgtcttggttagatggctctggattaggattctcactggaataccccaccattagtttacatgcattatccagggaccgaagtgactgtctaggagagcatttgtatgttatggtgaatgccaaatttgaagaacaaggacagggggacatccctacattttacacctatgaagaaggattatcccatctaacagcagaaggccaagccacactggagagattagaaggaatgctttctcagtctgtgagcagccagtataatatggctggggtcaggacagaagattcaataagagattatgaagatgggatggaggtggataccacaccaacagttgctggacagtttgaggatgcagatgttgatcactgaaaatgatttatgcaagtttaagattctgctcctaagtgtaggagagaacttggtgcctcttccactctggagtgaagttaatgaaagtctttttccttttccaaaacccaacctgaaccagttctttcttgagacagactatactgagacaacaagttgtcaccagcagaagatagataatatgacctttattaacttgatgaattaacttaaccaagagggtatttgtagtttactatttaccctaaaactttctgtgtctgggtaccctctgagtaggcctataattcctaccttgactgtgtgcatcattt

SEQ ID NO: 117338 - DNA, 747 bp, Homo sapiens
  Payload ID: 2908
  Gene Symbol: CLNS1A
  Gene Name: chloride channel, nucleotide -sensitive, 1A
  ENST ID: ENST00000526009
  CDS Start-End: 1-70
caggacagaagattcaataagagattatgaaggtatacacacacccaccaaagcaagagagagattttaagaaattggcccacgtgactgaaggctggcaagtccaaaatctgcatggtaagccggcagactggagacccagagaagagtttatgttgcattctgctgcctcagaagttctgctggcagaatttcttcttgctcaggggagatgggatggaggtggataccacaccaacagttgctggacagtttgaggatgcagatgttgatcactgaaaatgatttatgcaagtttaagattctgctcctaagtgtaggagagaacttggtgcctcttccactctggagtgaagttaatgaaagtctttttccttttccaaaacccaacctgaaccagttctttcttgagacagactatactgagacaacaagttgtcaccagcagaagatagataatatgacctttattaacttgatgaattaacttaaccaagagggtatttgtagtttactatttaccctaaaactttctgtgtctgggtaccctctgagtaggcctataattcctaccttgactgtgtgcatcatttgtaagctagcagatctatgtggtgaaaatgcacaggagcttggtagactgcgggggaaagagagagctcctttcgccatgttttaccagtctgctgttataacctcttaggttgtatcctttaatttccagccttttaggttagtttctgtaac

SEQ ID NO: 117339 - DNA, 415 bp, Homo sapiens
  Payload ID: 2908
  Gene Symbol: CLNS1A
  Gene Name: chloride channel, nucleotide -sensitive, 1A
  ENST ID: ENST00000526761
  CDS Start-End: 1-68
atgggatggaggtggataccacaccaacagttgctggacagtttgaggatgcagatgttgatcactgaaaatgatttatgcaagtttaagaaggagtatctgggcctttcagcttctacagtggaaggacgctgccgctgtgcagatgctcacagtaccccagaagtcctcatgctagagatgtaaaaaggcatattcctataagaaaaacagccatgaaacagaagtcatgagacatcaatcaatatatgtaagaagaacgttggttcagtctggaaaggcatgacatcttgaagcaggaagggggcttccaggtcataggaaaaaggaggaaaaaaatgtactggggaacaagacaagatcaatcagactctgccactcttctgctgatccagctcaactatgatcttttttg

SEQ ID NO: 117340 - DNA, 3172 bp, Homo sapiens
  Payload ID: 2909
  Gene Symbol: CLCN1
  Gene Name: chloride channel, voltage-sensitive 1
  Uniprot ID: P35523
  ENST ID: ENST00000343257
  CDS Start-End: 88-3054
agcaagagcagaggcttaaggagctacactgggggaaggacaggggcaagcaggccaaggcctggccggggctcggggggagggaatatggagcaatcccggtcacagcagcgtgggggtgaacaaagctggtggggtagtgacccccagtaccagtatatgccctttgaacactgcaccagctacggactgccctctgagaatgggggcctccagcacaggctccggaaggatgcaggcccccgccacaacgtccaccccacacagatttatggccatcacaaagaacaattctcagacagggagcaggacatagggatgcccaagaagacaggctccagttctaccgtggacagcaaggatgaggatcactattctaaatgtcaagattgtatccaccgcctgggacaggtggtgagaagaaaattaggggaagacgggatctttctggtgcttctgggactgctgatggctctggtcagctggagcatggactacgtcagtgccaaaagccttcaggcctacaagtggtcctacgcgcagatgcagcccagccttcctctgcagttcctggtctgggtcaccttcccactagtcctcatcctcttcagcgccctcttctgccacctcatctctccccaggctgttggctctggaatccccgaaatgaagacaatacttcgtggggttgtcctgaaggaatacctcacaatgaaagcctttgtggccaaggttgtcgccctgactgcgggcctgggcagtggcatccccgtggggaaagagggccccttcgtccacattgccagcatctgtgctgctgtcctcagcaaattcatgtctgtgttctgcggggtatatgagcagccatactactactctgatatcctgacggtgggctgtgctgtgggagtcggctgttgttttgggacaccacttggaggagtgctatttagcatcgaggtcacctccacctactttgctgttcggaactactggagaggattctttgcagccacgttcagcgcctttgtgtttcgagtgctggcagtgtggaacaaggatgctgtcaccatcactgctctgttcagaaccaatttccgaatggatttcccctttgacctgaaggaactaccagcttttgctgccatcgggatttgctgtgggctcctgggagctgtatttgtgtatctgcatcgccaagtcatgctcggtgtccgaaagcacaaggccctcagccagtttcttgctaagcaccgcctgctgtatcctggaattgttacctttgtcattgcctcattcaccttcccaccaggaatgggtcaattcatggctggagagttgatgccccgcgaagccatcagtactttgtttgacaacaatacatgggtgaaacacgcgggtgatcctgagagcctgggccagtcagctgtgtggattcacccccgggtcaacgttgtcatcatcatctttctcttcttcgtcatgaagttctggatgtccatcgtggccaccactatgcccataccctgcggaggcttcatgcctgtgtttgtgctaggagctgcatttggaaggctggtaggagaaatcatggccatgctctttcctgatggtattttgtttgatgacatcatctacaagatcctacctgggggctatgcagtaattggagcagcagcgctgactggtgccgtttcccacacagtctccacagctgtgatttgcttcgaattaacgggtcagattgctcacatcctgcccatgatggtggctgttatcttggccaacatggtggcccagagcctgcagccctctctctatgacagcatcatccaggtcaagaagctaccctacttgcctgaccttggctggaaccagctcagcaaatataccatctttgttgaggacatcatggtacgtgatgtgaagtttgtttcagcttcttacacatatggggagttgcgaaccctgctccagaccaccacagtcaagactttaccactggttgactcaaaagattcaatgatcctgctgggctcggtggagcggtcggaactgcaggccctcctgcagcgccacctgtgtcctgagcgcaggctgcgcgcagcccaagagatggcgcggaagttgtcggagctgccttacgacgggaaggcgcggctggctggggaggggctccccggcgcgcctccaggccggcccgagtccttcgcctttgtggatgaggatgaggacgaagacctctctggcaagagcgagcttcctccttcccttgctctccacccctctactactgcccctctgtccccagaagagcccaatgggcctctgcctggccacaaacagcagccggaagcaccagagcctgcaggtcaaagaccctccatcttccagtccctgcttcactgcttgctgggcagagctcgccccacaaagaagaaaacaacccaggattccacagatttagtggataacatgtcacctgaagagattgaggcctgggagcaggagcagctgagccagcctgtctgttttgattcctgctgtattgaccagtctcccttccagctggtggagcagacaaccctgcacaagactcataccctgttttcactccttggcctccacctcgcttacgtgaccagcatggggaagctcaggggcgtcctggccctggaggagctacagaaggccattgaggggcacaccaagtctggggtgcagctccgccctccccttgccagcttccggaacacgacttcaactcgaaagagtaccggggcacctccatcttctgcagagaactggaacctgcctgaggacaggcctggggccactggaacaggggatgtgattgctgcctccccagagacccctgtgccatctccttccccagagccccctctctccctggccccaggcaaggtagagggcgagttggaggagctggagctggtggagagtccagggctggaagaggagctggccgacatcttgcagggccccagcctgcgatccacagacgaggaggatgaggatgaactgatcctttgaccccctcccacgacctcctcataaagaccgtggagaggcccagcctgagggtgaacttgtgtggggcagggtgcgtcctgaatgtggcgaggtcatgccaatgtcgtggcctcttcca

SEQ ID NO: 117341 - DNA, 491 bp, Homo sapiens
  Payload ID: 2909
  Gene Symbol: CLCN1
  Gene Name: chloride channel, voltage-sensitive 1
  ENST ID: ENST00000432192
  CDS Start-End: 1-229
catctctccccaggctgttggctctggaatccccgaaatgaagacaatacttcgtggggttgtcctgaaggaatacctcacaatgaaagcctttgtggccaaggttgtcgccctgactgcgggcctgggcagtggcatccccgtggggaaagagcctgtgcctgtcctccaaatgtccacccctctttcacctgtggccccacatggagaccgtgcctgggcagcttgacctcctggtgtcggcctgtgcagtgggcgtgggatgctgctttgcagcccctgtcggagcagccatactactactctgatatcctgacggtgggctgtgctgtgggagtcggctgttgttttgggacaccacttggaggagtgctatttagcatcgaggtcacctccacctactttgctgttcggaactactggagaggattctttgcagccacgttcagcgcctttgtgtttcgagtgctggcagtgtggaacaaggatgc

SEQ ID NO: 117342 - DNA, 569 bp, Homo sapiens
  Payload ID: 2909
  Gene Symbol: CLCN1
  Gene Name: chloride channel, voltage-sensitive 1
  ENST ID: ENST00000455478
  CDS Start-End: 1-307
catctctccccaggctgttggctctggaatccccgaaatgaagacaatacttcgtggggttgtcctgaaggaatacctcacaatgaaagcctttgtggccaaggttgtcgccctgactgcgggcctgggcagtggcatccccgtggggaaagagggccccttcgtccacattgccagcatctgtgctgctgtcctcagcaaattcatgtctgtgttctgcggggtatatgagcctgtgcctgtcctccaaatgtccacccctctttcacctgtggccccacatggagaccgtgcctgggcagcttgacctcctggtgtcggcctgtgcagtgggcgtgggatgctgctttgcagcccctgtcggagcagccatactactactctgatatcctgacggtgggctgtgctgtgggagtcggctgttgttttgggacaccacttggaggagtgctatttagcatcgaggtcacctccacctactttgctgttcggaactactggagaggattctttgcagccacgttcagcgcctttgtgtttcgagtgctggcagtgtggaacaaggatgc

SEQ ID NO: 117343 - DNA, 3290 bp, Homo sapiens
  Payload ID: 2910
  Gene Symbol: CLCN2
  Gene Name: chloride channel, voltage-sensitive 2
  Uniprot ID: P51788
  ENST ID: ENST00000265593
  CDS Start-End: 173-2869
gacgcgagcgggaggctgcgccagcggcgcccgccgggggcccgccgcactctgctctcggcctcccgggctgcggggacgggacggctgccggcgcggactttgcgggccgggagccgagtccaggacagagccggaaccgccgagggaggcgagagggcagtgcgcggagatggcggccgcggcggcggaggaagggatggagccacgggcgctgcagtacgagcagaccctgatgtatggccggtacactcaggaccttggggcctttgccaaagaggaagctgctcggattcgcctgggagggcctgaaccctggaaaggtcccccttcctctcgggctgccccagagctcttggaatatggacggagccgttgcgcccgatgccgcgtctgttctgtccgctgccacaagttcctagtatccagggttggtgaagattggatcttcctggtcctgctggggcttctcatggcattggtcagctgggtcatggactatgccattgctgcctgtctgcaagcccagcagtggatgtcccggggcttgaacaccagcatcttgctccagtacctggcctgggtcacctaccctgttgtcctcatcactttctcagccggattcacacagatcctggcccctcaggctgtcggctctggcatccctgagatgaagaccatcttgcggggagtggtgctgaaagaatacctcacactcaagacctttatagctaaggtcattgggctgacctgcgccctaggcagcgggatgccgcttggcaaagagggcccttttgtgcatatcgcaagcatgtgtgctgcccttctcagcaagttcctctccctctttgggggtatctatgagaatgaatcccggaacacagagatgctggctgccgcctgtgccgtgggggtgggctgctgcttcgcggcacctattggaggcgtcctcttcagcatcgaggtcacctccaccttctttgcagtgcggaactactggcggggcttcttcgctgccaccttcagtgccttcatcttccgggtcttggcagtctggaaccgggatgaagagactattacagccctcttcaaaacccgattccggctcgacttcccctttgacctgcaggagctgccagcctttgctgtcattggtattgctagtggcttcggtggagccctctttgtctacctgaaccggaagattgtccaggtgatgcggaagcagaaaaccatcaatcgcttcctcatgaggaaacgcctgctcttcccggctctggtgaccctgctcatctccacgctgaccttcccccctggctttggacagttcatggctggacagctctcacagaaagagacgctggtcaccctgtttgacaatcggacgtgggtccgccagggcctggtggaggagctagaaccacccagcacctcacaggcctggaacccaccacgtgccaacgtcttcctcaccctggtcatcttcattctcatgaagttctggatgtctgcactggccaccaccatcccagttccctgtggggccttcatgcctgtctttgtcattggagcagcatttgggcgtctggtgggtgaaagcatggctgcctggttcccagatggaattcatacggacagcagcacctaccggattgtgcctgggggctacgctgtggtcggggcagctgcgctggcaggagcggtgacacacacagtgtccacggctgtgatcgtgttcgagctcacaggccagattgcccacatcctgcctgtcatgatcgccgtcatcctggccaacgctgtcgcccagagtctgcagccctccctctatgacagcatcatccgaatcaagaaactgccctacctgcctgagctcggctggggccgccaccagcagtaccgggtgcgtgtggaggacatcatggtgcgggatgttccccatgtggccctcagctgcaccttccgggacctgcgtttggcactgcacaggaccaagggccgaatgctggccctagtggagtcccctgagtccatgattctgctgggctccatcgagcgttcacaggtggtggcattgttgggggcccagctgagcccagcccgccggcggcagcacatgcaggagcgcagagccacccagacctctccactatctgatcaggagggtccccctacccctgaggcttctgtctgcttccaggtgaacacagaagactcagccttcccagcagcccggggggagacccacaagcccctaaagcctgcactcaagagggggcccagtgtcaccaggaacctcggagagagtcccacagggagcgcagagtcggcaggcatcgccctccggagcctcttctgtggcagtccaccccctgaggctgcttcggagaagttggaatcctgtgagaagcgcaagctgaagcgtgtccgaatctccctggcaagtgacgcggacctggaaggcgagatgagccctgaagagattctggagtgggaggagcagcaactagatgaacctgtcaacttcagtgactgcaaaattgatcctgctcccttccagctggtggagcggacctctttgcacaagactcacactatcttctcactgctgggagtggaccatgcttatgtcaccagtattggcagactcattggaatcgttactctaaaggagctccggaaggccatcgagggctctgtcacagcacagggtgtgaaagtccggccgcccctcgccagcttccgagacagtgccaccagcagcagtgacacggagaccactgaggtgcatgcactctgggggccccactcccgtcatggcctcccccgggagggcagcccttccgacagcgacgacaaatgccaatgagcccctcgtgggtggcctaggatggtgctagccatgcccgtcagcccagaatgtgcatctttcattccttctgccttcggaaggcaggaggcagctacagctggaggctgcaccccagccccctccagacctggggtgccagcttctcccagttcatcctacctggaatctgacccactacccacctgcaacaagtcttccagaggcaggaagataggccctgccctggcaggatgggttggggtcacttgacccctgctccccctttgaggggaaaggggtggaactaagatgggtttataactggaacctccaatgaccagatgtatatagagatttacaaagatttttatattaatttaataaaacaaattcttaaatagaacaaaataaacacctaatgagccacttatatatagaa

SEQ ID NO: 117344 - DNA, 3187 bp, Homo sapiens
  Payload ID: 2910
  Gene Symbol: CLCN2
  Gene Name: chloride channel, voltage-sensitive 2
  Uniprot ID: P51788
  ENST ID: ENST00000344937
  CDS Start-End: 124-2769
ctctgctctcggcctcccgggctgcggggacgggacggctgccggcgcggactttgcgggccgggagccgagtccaggacagagccggaaccgccgagggaggcgagagggcagtgcgcggagatggcggccgcggcggcggaggaagggatggagccacgggcgctgcagtacgagcagaccctgatgtatggccggtacactcaggaccttggggcctttgccaaagaggaagctgctcggattcgcctgggagggcctgaaccctggaaaggtcccccttcctctcgggctgccccagagctcttggaatatggacggagccgttgcgcccgatgccgcgtctgttctgtccgctgccacaagttcctagtatccagggttggtgaagattggatcttcctggtcctgctggggcttctcatggcattggtcagctgggtcatggactatgccattgctgcctgtctgcaagcccagcagtggatgtcccggggcttgaacaccagcatcttgctccagtacctggcctgggtcacctaccctgttgtcctcatcactttctcagccggattcacacagatcctggcccctcaggctgtcggctctggcatccctgagatgaagaccatcttgcggggagtggtgctgaaagaatacctcacactcaagacctttatagctaaggtcattgggctgacctgcgccctaggcagcgggatgccgcttggcaaagagggcccttttgtgcatatcgcaagcatgtgtgctgcccttctcagcaagttcctctccctctttgggggtatctatgagaatgaatcccggaacacagagatgctggctgccgcctgtgccgtgggggtgggctgctgcttcgcggcacctattggaggcgtcctcttcagcatcgaggtcacctccaccttctttgcagtgcggaactactggcggggcttcttcgctgccaccttcagtgccttcatcttccgggtcttggcagtctggaaccgggatgaagagactattacagccctcttcaaaacccgattccggctcgacttcccctttgacctgcaggagctgccagcctttgctgtcattggtattgctagtggcttcggtggagccctctttgtctacctgaaccggaagattgtccaggtgatgcggaagcagaaaaccatcaatcgcttcctcatgaggaaacgcctgctcttcccggctctggtgaccctgctcatctccacgctgaccttcccccctggctttggacagttcatggctggacagctctcacagaaagagacgctggtcaccctgtttgacaatcggacgtgggtccgccagggcctggtggaggagctagaaccacccagcacctcacaggcctggaacccaccacgtgccaacgtcttcctcaccctggtcatcttcattctcatgaagttctggatgtctgcactggccaccaccatcccagttccctgtggggccttcatgcctgtctttgtcattgatggaattcatacggacagcagcacctaccggattgtgcctgggggctacgctgtggtcggggcagctgcgctggcaggagcggtgacacacacagtgtccacggctgtgatcgtgttcgagctcacaggccagattgcccacatcctgcctgtcatgatcgccgtcatcctggccaacgctgtcgcccagagtctgcagccctccctctatgacagcatcatccgaatcaagaaactgccctacctgcctgagctcggctggggccgccaccagcagtaccgggtgcgtgtggaggacatcatggtgcgggatgttccccatgtggccctcagctgcaccttccgggacctgcgtttggcactgcacaggaccaagggccgaatgctggccctagtggagtcccctgagtccatgattctgctgggctccatcgagcgttcacaggtggtggcattgttgggggcccagctgagcccagcccgccggcggcagcacatgcaggagcgcagagccacccagacctctccactatctgatcaggagggtccccctacccctgaggcttctgtctgcttccaggtgaacacagaagactcagccttcccagcagcccggggggagacccacaagcccctaaagcctgcactcaagagggggcccagtgtcaccaggaacctcggagagagtcccacagggagcgcagagtcggcaggcatcgccctccggagcctcttctgtggcagtccaccccctgaggctgcttcggagaagttggaatcctgtgagaagcgcaagctgaagcgtgtccgaatctccctggcaagtgacgcggacctggaaggcgagatgagccctgaagagattctggagtgggaggagcagcaactagatgaacctgtcaacttcagtgactgcaaaattgatcctgctcccttccagctggtggagcggacctctttgcacaagactcacactatcttctcactgctgggagtggaccatgcttatgtcaccagtattggcagactcattggaatcgttactctaaaggagctccggaaggccatcgagggctctgtcacagcacagggtgtgaaagtccggccgcccctcgccagcttccgagacagtgccaccagcagcagtgacacggagaccactgaggtgcatgcactctgggggccccactcccgtcatggcctcccccgggagggcagcccttccgacagcgacgacaaatgccaatgagcccctcgtgggtggcctaggatggtgctagccatgcccgtcagcccagaatgtgcatctttcattccttctgccttcggaaggcaggaggcagctacagctggaggctgcaccccagccccctccagacctggggtgccagcttctcccagttcatcctacctggaatctgacccactacccacctgcaacaagtcttccagaggcaggaagataggccctgccctggcaggatgggttggggtcacttgacccctgctccccctttgaggggaaaggggtggaactaagatgggtttataactggaacctccaatgaccagatgtatatagagatttacaaagatttttatattaatttaataaaacaaattcttaaatagaacaaaataaacacctaatgagccacttatatata

SEQ ID NO: 117345 - DNA, 2820 bp, Homo sapiens
  Payload ID: 2910
  Gene Symbol: CLCN2
  Gene Name: chloride channel, voltage-sensitive 2
  Uniprot ID: P51788
  ENST ID: ENST00000457512
  CDS Start-End: 125-2734
actctgctctcggcctcccgggctgcggggacgggacggctgccggcgcggactttgcgggccgggagccgagtccaggacagagccggaaccgccgagggaggcgagagggcagtgcgcggagatggcggccgcggcggcggaggaagggatggagccacgggcgctgcagtacgagcagaccctgatgtatggccggtacactcaggaccttggggcctttgccaaagaggaagctgctcggattcgcctgggagggcctgaaccctggaaaggtcccccttcctctcgggctgccccagagctcttggaatatggacggagccgttgcgcccgatgccgcgtctgttctgtccgctgccacaagttcctagtatccagggttggtgaagattggatcttcctggtcctgctggggcttctcatggcattggtcagctgggtcatggactatgccattgctgcctgtctgcaagcccagcagtggatgtcccggggcttgaacaccagcatcttgctccagtacctggcctgggtcacctaccctgttgtcctcatcactttctcagccggattcacacagatcctggcccctcaggctgtcggctctggcatccctgagatgaagaccatcttgcggggagtggtgctgaaagaatacctcacactcaagacctttatagctaaggtcattgggctgacctgcgccctaggcagcgggatgccgcttggcaaagagggcccttttgtgcatatcgcaagcatgtgtgctgcccttctcagcaagttcctctccctctttgggggtatctatgagaatgaatcccggaacacagagatgctggctgccgcctgtgccgtgggggtgggctgctgcttcgcggcacctattggaggcgtcctcttcagcatcgaggtcacctccaccttctttgcagtgcggaactactggcggggcttcttcgctgccaccttcagtgccttcatcttccgggtcttggcagtctggaaccgggatgaagagactattacagccctcttcaaaacccgattccggctcgacttcccctttgacctgcaggagctgccagcctttgctgtcattggtattgctagtggcttcggtggagccctctttgtctacctgaaccggaagattgtccaggtgatgcggaagcagaaaaccatcaatcgcttcctcatgaggaaacgcctgctcttcccggctctggtgaccctgctcatctccacgctgaccttcccccctggctttggacagttcatggctggacagctctcacagaaagagacgctggtcaccctgtttgacaatcggacgtgggtccgccagggcctggtggaggagctagaaccacccagcacctcacaggcctggaacccaccacgtgccaacgtcttcctcaccctggtcatcttcattctcatgaagttctggatgtctgcactggccaccaccatcccagttccctgtggggccttcatgcctgtctttgtcattggagcagcatttgggcgtctggtgggtgaaagcatggctgcctggttcccagatggaattcatacggacagcagcacctaccggattgtgcctgggggctacgctgtggtcggggcagctgcgctggcaggagcggtgacacacacagtgtccacggctgtgatcgtgttcgagctcacaggccagattgcccacatcctgcctgtcatgatcgccgtcatcctggccaacgctgtcgcccagagtctgcagccctccctctatgacagcatcatccgaatcaagaaactgccctacctgcctgagctcggctggggccgccaccagcagtaccgggtgcgtgtggaggacatcatggtgcgggatgttccccatgtggccctcagctgcaccttccgggacctgcgtttggcactgcacaggaccaagggccgaatgctggccctagtggagtcccctgagtccatgattctgctgggctccatcgagcgttcacaggtggtggcattgttgggggcccagctgagcccagcccgccggcggcagcacatgcaggagcgcagagccacccagacctctccactatctgatcaggagggtccccctacccctgaggcttctgtctgcttccaggtgaacacagaagactcagccttcccagcagcccggggggagacccacaagcccctaaagcctgcactcaagagggggcccagtgtcaccaggaacctcggagagagtcccacagggagcgcagagtcggcaggcatcgccctccggagcctcttctgtggcagtccaccccctgaggctgcttcggagaagttggaatcctgtgagaagcgcaagctgaagcgtgtccgaatctccctggcaagtgacgcggacctggaaggcgagatgagccctgaagagattctggagtgggaggagcagcaactagatgaacctgtcaacttcagtgactgcaaaattgatcctgctcccttccagctggtggagcggacctctttgcacaagctccggaaggccatcgagggctctgtcacagcacagggtgtgaaagtccggccgcccctcgccagcttccgagacagtgccaccagcagcagtgacacggagaccactgaggtgcatgcactctgggggccccactcccgtcatggcctcccccgggagggcagcccttccgacagcgacgacaaatgccaatgagcccctcgtgggtggcctaggatggtgctagccatgcccgtcagcccagaatgtgcatctttcattccttctgccttcggaaggca

SEQ ID NO: 117346 - DNA, 1844 bp, Homo sapiens
  Payload ID: 2910
  Gene Symbol: CLCN2
  Gene Name: chloride channel, voltage-sensitive 2
  ENST ID: ENST00000430397
  CDS Start-End: 1-401
aaaccatcaatcgcttcctcatgaggaaacgcctgctcttcccggctctggtgaccctgctcatctccacgctgaccttcccccctggctttggacagttcatggctggacagctctcacagaaagagacgctggtcaccctgtttgacaatcggacgtgggtccgccagggcctggtggaggagctagaaccacccagcacctcacaggcctggaacccaccacgtgccaacgtcttcctcaccctggtcatcttcattctcatgaagcatttgggcgtctggtgggtgaaagcatggctgcctggttcccagatggaattcatacggacagcagcacctaccggattgtgcctgggggctacgctgtggtcggggcagctgcgctggcaggagcggtgacacacacagtgtccacggctgtgatcgtgttcgagctcacaggccagattgcccacatcctgcctgtcatgatcgccgtcatcctggccaacgctgtcgcccagagtctgcagccctccctctatgacagcatcatccgaatcaagaaactgccctacctgcctgagctcggctggggccgccaccagcagtaccgggtgcgtgtggaggacatcatggtgcgggatgttccccatgtggccctcagctgcaccttccgggacctgcgtttggcactgcacaggaccaagggccgaatgctggccctagtggagtcccctgagtccatgattctgctgggctccatcgagcgttcacaggtggtggcattgttgggggcccagctgagcccagcccgccggcggcagcacatgcaggagcgcagagccacccagacctctccactatctgatcaggagggtccccctacccctgaggcttctgtctgcttccaggtgaacacagaagactcagccttcccagcagcccggggggagacccacaagcccctaaagcctgcactcaagagggggcccagtgtcaccaggaacctcggagagagtcccacagggagcgcagagtcggcaggcatcgccctccggagcctcttctgtggcagtccaccccctgaggctgcttcggagaagttggaatcctgtgagaagcgcaagctgaagcgtgtccgaatctccctggcaagtgacgcggacctggaaggcgagatgagccctgaagagactcacactatcttctcactgctgggagtggaccatgcttatgtcaccagtattggcagactcattggaatcgttactctaaaggagctccggaaggccatcgagggctctgtcacagcacagggtgtgaaagtccggccgcccctcgccagcttccgagacagtgccaccagcagcagtgacacggagaccactgaggtgcatgcactctgggggccccactcccgtcatggcctcccccgggagggcagcccttccgacagcgacgacaaatgccaatgagcccctcgtgggtggcctaggatggtgctagccatgcccgtcagcccagaatgtgcatctttcattccttctgccttcggaaggcaggaggcagctacagctggaggctgcaccccagccccctccagacctggggtgccagcttctcccagttcatcctacctggaatctgacccactacccacctgcaacaagtcttccagaggcaggaagataggccctgccctggcaggatgggttggggtcacttgacccctgctccccctttgaggggaaaggggtggaactaagatgggtttataactggaacctccaatgaccagatgtatatagagatttacaaagatttttatattaatttaataaaacaaattcttaaatagaa

SEQ ID NO: 117347 - DNA, 2897 bp, Homo sapiens
  Payload ID: 2910
  Gene Symbol: CLCN2
  Gene Name: chloride channel, voltage-sensitive 2
  Uniprot ID: P51788
  ENST ID: ENST00000434054
  CDS Start-End: 125-2689
actctgctctcggcctcccgggctgcggggacgggacggctgccggcgcggactttgcgggccgggagccgagtccaggacagagccggaaccgccgagggaggcgagagggcagtgcgcggagatggcggccgcggcggcggaggaagggatggagccacgggcgctgcagtacgagcagaccctgatgtatggccggtacactcaggaccttggggcctttgccaaagaggaagctgctcggattcgcctgggagggcctgaaccctggaaaggtcccccttcctctcgggctgccccagagctcttggaatatggacggagccgttgcgcccgatgccgcgcccagcagtggatgtcccggggcttgaacaccagcatcttgctccagtacctggcctgggtcacctaccctgttgtcctcatcactttctcagccggattcacacagatcctggcccctcaggctgtcggctctggcatccctgagatgaagaccatcttgcggggagtggtgctgaaagaatacctcacactcaagacctttatagctaaggtcattgggctgacctgcgccctaggcagcgggatgccgcttggcaaagagggcccttttgtgcatatcgcaagcatgtgtgctgcccttctcagcaagttcctctccctctttgggggtatctatgagaatgaatcccggaacacagagatgctggctgccgcctgtgccgtgggggtgggctgctgcttcgcggcacctattggaggcgtcctcttcagcatcgaggtcacctccaccttctttgcagtgcggaactactggcggggcttcttcgctgccaccttcagtgccttcatcttccgggtcttggcagtctggaaccgggatgaagagactattacagccctcttcaaaacccgattccggctcgacttcccctttgacctgcaggagctgccagcctttgctgtcattggtattgctagtggcttcggtggagccctctttgtctacctgaaccggaagattgtccaggtgatgcggaagcagaaaaccatcaatcgcttcctcatgaggaaacgcctgctcttcccggctctggtgaccctgctcatctccacgctgaccttcccccctggctttggacagttcatggctggacagctctcacagaaagagacgctggtcaccctgtttgacaatcggacgtgggtccgccagggcctggtggaggagctagaaccacccagcacctcacaggcctggaacccaccacgtgccaacgtcttcctcaccctggtcatcttcattctcatgaagttctggatgtctgcactggccaccaccatcccagttccctgtggggccttcatgcctgtctttgtcattggagcagcatttgggcgtctggtgggtgaaagcatggctgcctggttcccagatggaattcatacggacagcagcacctaccggattgtgcctgggggctacgctgtggtcggggcagctgcgctggcaggagcggtgacacacacagtgtccacggctgtgatcgtgttcgagctcacaggccagattgcccacatcctgcctgtcatgatcgccgtcatcctggccaacgctgtcgcccagagtctgcagccctccctctatgacagcatcatccgaatcaagaaactgccctacctgcctgagctcggctggggccgccaccagcagtaccgggtgcgtgtggaggacatcatggtgcgggatgttccccatgtggccctcagctgcaccttccgggacctgcgtttggcactgcacaggaccaagggccgaatgctggccctagtggagtcccctgagtccatgattctgctgggctccatcgagcgttcacaggtggtggcattgttgggggcccagctgagcccagcccgccggcggcagcacatgcaggagcgcagagccacccagacctctccactatctgatcaggagggtccccctacccctgaggcttctgtctgcttccaggtgaacacagaagactcagccttcccagcagcccggggggagacccacaagcccctaaagcctgcactcaagagggggcccagtgtcaccaggaacctcggagagagtcccacagggagcgcagagtcggcaggcatcgccctccggagcctcttctgtggcagtccaccccctgaggctgcttcggagaagttggaatcctgtgagaagcgcaagctgaagcgtgtccgaatctccctggcaagtgacgcggacctggaaggcgagatgagccctgaagagattctggagtgggaggagcagcaactagatgaacctgtcaacttcagtgactgcaaaattgatcctgctcccttccagctggtggagcggacctctttgcacaagactcacactatcttctcactgctgggagtggaccatgcttatgtcaccagtattggcagactcattggaatcgttactctaaaggagctccggaaggccatcgagggctctgtcacagcacagggtgtgaaagtccggccgcccctcgccagcttccgagacagtgccaccagcagcagtgacacggagaccactgaggtgcatgcactctgggggccccactcccgtcatggcctcccccgggagggcagcccttccgacagcgacgacaaatgccaatgagcccctcgtgggtggcctaggatggtgctagccatgcccgtcagcccagaatgtgcatctttcattccttctgccttcggaaggcaggaggcagctacagctggaggctgcaccccagccccctccagacctggggtgccagcttctcccagttcatcctacctggaatctgacccactacccacctgcaacaagtcttccagaggca

SEQ ID NO: 117348 - DNA, 3635 bp, Homo sapiens
  Payload ID: 2911
  Gene Symbol: CLCN3
  Gene Name: chloride channel, voltage-sensitive 3
  Uniprot ID: P51790
  ENST ID: ENST00000347613
  CDS Start-End: 555-3155
gtcacgcgtcgacgctggggcgtacctttcgggctcctgactcctgccgcttctcttccccttccgtgggtcagggccggtccggtccggaacctgcagcccctttcccagtgttctagttcgcccgtgacccggaataatgagcaaggagggtgtggtgggttgaaagccatcctactttactcccgagttagagcatggattcagttttagtcttaagggggaagtgagattggagatttttatttttaattttgggcagaagcaggttgactctagggatctccagagcgagaggatttaacttcatgttgctcccgtgtttgaaggaggacaataaaagtcccaccgggcaaaattttcgtaacctctgcggtagaaaacgtcaggtatcttttaaatcgcgatagttttcgctgtgtcaggctttcttcggtggagctccgagggtagctaggttctaggtttgaaacagatgcagaatccaaaggcagcgcaaaaaacagccaccgattttgctatgtctctgagctgcgagataatcagacagctaaatggagtctgagcagctgttccatagaggctactatagaaacagctacaacagtataacaagtgcaagtagtgatgaggaacttttagatggagcaggtgttattatggactttcaaacatctgaagatgacaatttattagatggtgacactgcagttggaactcattatacaatgacaaatggaggcagcattaacagttctacacatttactggatcttttggatgaaccaattccaggtgttggtacatatgatgatttccatactattgattgggtgcgagaaaaatgtaaagacagagaaaggcatagacggatcaacagcaaaaagaaagaatcagcatgggaaatgacaaaaagtttgtatgatgcgtggtcaggatggctagtagtaacactaacaggattggcatcaggggcactggccggattaatagacattgctgccgattggatgactgacctaaaggagggcatttgccttagtgcgttgtggtacaaccacgaacagtgctgttggggatctaatgaaacaacatttgaagagagggataaatgtccacagtggaaaacatgggcagaattaatcataggtcaagcagagggtcctggttcttatatcatgaactacataatgtacatcttctgggccttgagttttgcctttcttgcagtttccctggtaaaggtatttgctccatatgcctgtggctctggaattccagagattaaaactattttaagtggattcatcatcagaggttacttgggaaaatggactttaatgattaaaaccatcacattagtcctggctgtggcatcaggtttgagtttaggaaaagaaggtcccctggtacatgttgcctgttgctgcggaaatatcttttcctacctctttccaaagtatagcacaaacgaagctaaaaaaagggaggtgctatcagctgcctcagctgcaggggtttctgtagcttttggtgcaccaattggaggagttctttttagcctggaagaggttagctattattttcctctcaaaactttatggagatcattttttgctgctttagtggctgcatttgttttgaggtccatcaatccatttggtaacagccgtctggtccttttttatgtggagtatcatacaccatggtacctttttgaactgtttccttttattcttctaggggtatttggagggctttggggagcctttttcattagggcaaatattgcctggtgtcgtcgacgcaagtccacgaaatttggaaagtatcccgttctggaagtcattattgttgcagccattactgctgtgatagccttccctaatccatacactaggctaaacaccagtgaactgatcaaagagctttttacagactgtggtcccctggaatcctcttctctttgtgactacagaaatgacatgaatgccagtaaaattgtcgatgacattcctgatcgtccagcaggcattggagtatattcagctatatggcagttatgcctggcactcatatttaaaatcataatgacagtattcacttttggcatcaaggttccatcaggcttgttcatccccagcatggccattggagcgatcgcaggaaggattgtggggattgcggtggagcagcttgcctactatcaccacgactggtttatctttaaggagtggtgtgaggtcggggctgattgcattacacctggcctttatgccatggttggtgctgctgcatgcttaggtggtgtgacaagaatgactgtctccctggtggttattgtttttgagcttactggaggcttggaatatattgttccccttatggctgcagtcatgaccagtaaatgggttggagatgcctttggcagggaaggcatttatgaagcacacatccgattaaatggataccctttcttggatgcaaaagaagaattcactcataccaccctggctgctgacgttatgagacctcgaaggaatgatcctcccttagctgtcctgacacaggacaatatgacagtggatgatatagaaaacatgattaatgaaaccagctacaatggatttcctgtcataatgtcaaaagaatctcagagattagtgggatttgccctcagaagagacctgacaattgcaatagaaagtgccaggaaaaaacaagaaggtatcgttggcagttctcgggtgtgttttgcacagcacaccccatctcttccagcagaaagtcctcggccattgaagcttcgaagcattcttgacatgagcccttttacagtgacagaccacaccccaatggagatcgtggtggatattttccgaaagctgggactgaggcagtgccttgtaactcacaatgggattgtcttggggatcatcacaaagaagaacatattagagcatctcgagcaactaaagcagcacgtcgaacccttggcgcctccttggcattataacaaaaaaagatatcctccggcatatggcccagacggcaaaccaagaccccgcttcaataatgttcaactgaatctcacagatgaggagagagaagaaacggaagaggaagtttatttgttgaatagcacaactctttaacctgagggagtcatctacttttttttcctcctttacaaaaaaagaaaggaaatataaaagccgggtttttgcaacatggtttgcaaataatgctggtggaatggaggagttgtttggggagggaaaggagagagaaggaaaggagtgaggtatttcccgtctaacagaaagcagcgtatcaactcctattgttctgcactggatgcattcagctgaggatgtgcctgatagtgcaggcttgcgcctcaacagagatgacagcagagtcctcgagcacctggcctgttgctccaacattgcaaagacacattatcagtccctatttctagagggattactttgaattgagccatctataaaactgcaaggtcttgcccttttttttaatcaaaactgttctgtttaattcatgaattgtatagttaagcattacctttctacattccagaagagcctttatttctctctctctctctctct

SEQ ID NO: 117349 - DNA, 3208 bp, Homo sapiens
  Payload ID: 2911
  Gene Symbol: CLCN3
  Gene Name: chloride channel, voltage-sensitive 3
  Uniprot ID: P51790
  ENST ID: ENST00000360642
  CDS Start-End: 552-2927
acgcgtcgacgctggggcgtacctttcgggctcctgactcctgccgcttctcttccccttccgtgggtcagggccggtccggtccggaacctgcagcccctttcccagtgttctagttcgcccgtgacccggaataatgagcaaggagggtgtggtgggttgaaagccatcctactttactcccgagttagagcatggattcagttttagtcttaagggggaagtgagattggagatttttatttttaattttgggcagaagcaggttgactctagggatctccagagcgagaggatttaacttcatgttgctcccgtgtttgaaggaggacaataaaagtcccaccgggcaaaattttcgtaacctctgcggtagaaaacgtcaggtatcttttaaatcgcgatagttttcgctgtgtcaggctttcttcggtggagctccgagggtagctaggttctaggtttgaaacagatgcagaatccaaaggcagcgcaaaaaacagccaccgattttgctatgtctctgagctgcgagataatcagacagctaaatggagtctgagcagctgttccatagaggctactatagaaacagctacaacagtataacaagtgcaagtagtgatgaggaacttttagatggagcaggtgttattatggactttcaaacatctgaagatgacaatttattagatggtgacactgcagttggaactcattatacaatgacaaatggaggcagcattaacagttctacacatttactggatcttttggatgaaccaattccaggtgttggtacatatgatgatttccatactattgattgggtgcgagaaaaatgtaaagacagagaaaggcatagacggatcaacagcaaaaagaaagaatcagcatgggaaatgacaaaaagtttgtatgatgcgtggtcaggatggctagtagtaacactaacaggattggcatcaggggcactggccggattaatagacattgctgccgattggatgactgacctaaaggagggcatttgccttagtgcgttgtggtacaaccacgaacagtgctgttggggatctaatgaaacaacatttgaagagagggataaatgtccacagtggaaaacatgggcagaattaatcataggtcaagcagagggtcctggttcttatatcatgaactacataatgtacatcttctgggccttgagttttgcctttcttgcagtttccctggtaaaggtatttgctccatatgcctgtggctctggaattccagagattaaaactattttaagtggattcatcatcagaggttacttgggaaaatggactttaatgattaaaaccatcacattagtcctggctgtggcatcaggtttgagtttaggaaaagaaggtcccctggtacatgttgcctgttgctgcggaaatatcttttcctacctctttccaaagtatagcacaaacgaagctaaaaaaagggaggttagctattattttcctctcaaaactttatggagatcattttttgctgctttagtggctgcatttgttttgaggtccatcaatccatttggtaacagccgtctggtccttttttatgtggagtatcatacaccatggtacctttttgaactgtttccttttattcttctaggggtatttggagggctttggggagcctttttcattagggcaaatattgcctggtgtcgtcgacgcaagtccacgaaatttggaaagtatcccgttctggaagtcattattgttgcagccattactgctgtgatagccttccctaatccatacactaggctaaacaccagtgaactgatcaaagagctttttacagactgtggtcccctggaatcctcttctctttgtgactacagaaatgacatgaatgccagtaaaattgtcgatgacattcctgatcgtccagcaggcattggagtatattcagctatatggcagttatgcctggcactcatatttaaaatcataatgacagtattcacttttggcatcaaggttccatcaggcttgttcatccccagcatggccattggagcgatcgcaggaaggattgtggggattgcggtggagcagcttgcctactatcaccacgactggtttatctttaaggagtggtgtgaggtcggggctgattgcattacacctggcctttatgccatggttggtgctgctgcatgcttaggtggtgtgacaagaatgactgtctccctggtggttattgtttttgagcttactggaggcttggaatatattgttccccttatggctgcagtcatgaccagtaaatgggttggagatgcctttggcagggaaggcatttatgaagcacacatccgattaaatggataccctttcttggatgcaaaagaagaattcactcataccaccctggctgctgacgttatgagacctcgaaggaatgatcctcccttagctgtcctgacacaggacaatatgacagtggatgatatagaaaacatgattaatgaaaccagctacaatggatttcctgtcataatgtcaaaagaatctcagagattagtgggatttgccctcagaagagacctgacaattgcaatagaaagtgccaggaaaaaacaagaaggtatcgttggcagttctcgggtgtgttttgcacagcacaccccatctcttccagcagaaagtcctcggccattgaagcttcgaagcattcttgacatgagcccttttacagtgacagaccacaccccaatggagatcgtggtggatattttccgaaagctgggactgaggcagtgccttgtaactcacaatgggcgcctccttggcattataacaaaaaaagatatcctccggcatatggcccagacggcaaaccaagaccccgcttcaataatgttcaactgaatctcacagatgaggagagagaagaaacggaagaggaagtttatttgttgaatagcacaactctttaacctgagggagtcatctacttttttttcctcctttacaaaaaaagaaaggaaatataaaagccgggtttttgcaacatggtttgcaaataatgctggtggaatggaggagttgtttggggagggaaaggagagagaaggaaaggagtgaggtatttcccgtctaacagaaagcagcgtatcaactcctattgttctgcactggatgcattcagc

SEQ ID NO: 117350 - DNA, 735 bp, Homo sapiens
  Payload ID: 2911
  Gene Symbol: CLCN3
  Gene Name: chloride channel, voltage-sensitive 3
  ENST ID: ENST00000515420
  CDS Start-End: 1-735
ctgcaggggtttctgtagcttttggtgcaccaattggaggagttctttttagcctggaagaggttagctattattttcctctcaaaactttatggagatcattttttgctgctttagtggctgcatttgttttgaggtccatcaatccatttggggtatttggagggctttggggagcctttttcattagggcaaatattgcctggtgtcgtcgacgcaagtccacgaaatttggaaagtatcccgttctggaagtcattattgttgcagccattactgctgtgatagccttccctaatccatacactaggctaaacaccagtgaactgatcaaagagctttttacagactgtggtcccctggaatcctcttctctttgtgactacagaaatgacatgaatgccagtaaaattgtcgatgacattcctgatcgtccagcaggcattggagtatattcagctatatggcagttatgcctggcactcatatttaaaatcataatgacagtattcacttttggcatcaaggttccatcaggcttgttcatccccagcatggccattggagcgatcgcaggaaggattgtggggattgcggtggagcagcttgcctactatcaccacgactggtttatctttaaggagtggtgtgaggtcggggctgattgcattacacctggcctttatgccatggttggtgctgctgcatgcttaggtggtgtgacaagaatgactg

SEQ ID NO: 117351 - DNA, 5592 bp, Homo sapiens
  Payload ID: 2911
  Gene Symbol: CLCN3
  Gene Name: chloride channel, voltage-sensitive 3
  ENST ID: ENST00000504131
  CDS Start-End: 1-2406
atggtgaagcttcctataggagagtctcactatgttgtccaggctggtctccaactcctgggctcaagcaaccctcctgccttggcctcccaagtagctgagattacaggaactcattatacaatgacaaatggaggcagcattaacagttctacacatttactggatcttttggatgaaccaattccaggtgttggtacatatgatgatttccatactattgattgggtgcgagaaaaatgtaaagacagagaaaggcatagacggatcaacagcaaaaagaaagaatcagcatgggaaatgacaaaaagtttgtatgatgcgtggtcaggatggctagtagtaacactaacaggattggcatcaggggcactggccggattaatagacattgctgccgattggatgactgacctaaaggagggcatttgccttagtgcgttgtggtacaaccacgaacagtgctgttggggatctaatgaaacaacatttgaagagagggataaatgtccacagtggaaaacatgggcagaattaatcataggtcaagcagagggtcctggttcttatatcatgaactacataatgtacatcttctgggccttgagttttgcctttcttgcagtttccctggtaaaggtatttgctccatatgcctgtggctctggaattccagagattaaaactattttaagtggattcatcatcagaggttacttgggaaaatggactttaatgattaaaaccatcacattagtcctggctgtggcatcaggtttgagtttaggaaaagaaggtcccctggtacatgttgcctgttgctgcggaaatatcttttcctacctctttccaaagtatagcacaaacgaagctaaaaaaagggaggtgctatcagctgcctcagctgcaggggtttctgtagcttttggtgcaccaattggaggagttctttttagcctggaagaggttagctattattttcctctcaaaactttatggagatcattttttgctgctttagtggctgcatttgttttgaggtccatcaatccatttggtaacagccgtctggtccttttttatgtggagtatcatacaccatggtacctttttgaactgtttccttttattcttctaggggtatttggagggctttggggagcctttttcattagggcaaatattgcctggtgtcgtcgacgcaagtccacgaaatttggaaagtatcccgttctggaagtcattattgttgcagccattactgctgtgatagccttccctaatccatacactaggctaaacaccagtgaactgatcaaagagctttttacagactgtggtcccctggaatcctcttctctttgtgactacagaaatgacatgaatgccagtaaaattgtcgatgacattcctgatcgtccagcaggcattggagtatattcagctatatggcagttatgcctggcactcatatttaaaatcataatgacagtattcacttttggcatcaaggttccatcaggcttgttcatccccagcatggccattggagcgatcgcaggaaggattgtggggattgcggtggagcagcttgcctactatcaccacgactggtttatctttaaggagtggtgtgaggtcggggctgattgcattacacctggcctttatgccatggttggtgctgctgcatgcttaggtggtgtgacaagaatgactgtctccctggtggttattgtttttgagcttactggaggcttggaatatattgttccccttatggctgcagtcatgaccagtaaatgggttggagatgcctttggcagggaaggcatttatgaagcacacatccgattaaatggataccctttcttggatgcaaaagaagaattcactcataccaccctggctgctgacgttatgagacctcgaaggaatgatcctcccttagctgtcctgacacaggacaatatgacagtggatgatatagaaaacatgattaatgaaaccagctacaatggatttcctgtcataatgtcaaaagaatctcagagattagtgggatttgccctcagaagagacctgacaattgcaatagaaagtgccaggaaaaaacaagaaggtatcgttggcagttctcgggtgtgttttgcacagcacaccccatctcttccagcagaaagtcctcggccattgaagcttcgaagcattcttgacatgagcccttttacagtgacagaccacaccccaatggagatcgtggtggatattttccgaaagctgggactgaggcagtgccttgtaactcacaatgggcgcctccttggcattataacaaaaaaagatatcctccggcatatggcccagacggcaaaccaagaccccgcttcaataatgttcaactgaatctcacagatgaggagagagaagaaacggaagaggaagtttatttgttgaatagcacaactctttaacctgagggagtcatctacttttttttcctcctttacaaaaaaagaaaggaaatataaaagccgggtttttgcaacatggtttgcaaataatgctggtggaatggaggagttgtttggggagggaaaggagagagaaggaaaggagtgaggtatttcccgtctaacagaaagcagcgtatcaactcctattgttctgcactggatgcattcagctgaggatgtgcctgatagtgcaggcttgcgcctcaacagagatgacagcagagtcctcgagcacctggcctgttgctccaacattgcaaagacacattatcagtccctatttctagagggattactttgaattgagccatctataaaactgcaaggtcttgcccttttttttaatcaaaactgttctgtttaattcatgaattgtatagttaagcattacctttctacattccagaagagcctttatttctctctctctctctctctctctctctctctctactgagctgtaacaaagcctctttaaatcggtgtatccttttgaagcagtcctttctcatattgagatgtactgtgattttactgaggtttcatcacaagaagggagtgtttcttgtgccattaaccatgtagtttgtaccatcactaaatgcttggaacagtacacatgcaccacaacaaaggctcatcaaacaggtaaagtctcgaaggaagcgagaacgaaatctctcattgtgtgccgtgtggctcaaaaccgaaaacaatgaagcttggttttaaaggataaagttttcttttttgttttcctctcagactttatggataatgtgaccgggtcttatgcaaattttctatttctaaaactactactatgatatacaagtgctgttgagcataattaaataaaatgctgctgctttgacagtaaagagaaggaagtattctgattagctgtatctggtattaattgcatgttaaaacactggaatttttaaaattgaaattagatcagtcattcttttcttttctcaagatatctcatggctgacactgaagaagaaatgtaattcataacttgcactaaatgtatattttttttcttaaaaatttaccattcttatttatatttttatggattaaaatttataaaatacagatcagttaatattgcacttaagtaattttacctttttaatgtgatttttatagaataattcagacttacaaatacagagatatgaacaaagtttacagtgggaacaaaggtttaaaaaaaggttgtggttctctctctgtgatccagtgtgcacataaacctttctctgatctttcactgccatcctctggattatgtcttctgacctgtccattttgacccattaactggaaagttgaaaaactacattaactggaaagttgaaaaactacattactttggagaataaaaccgaaagttcgtgtataccttcttaaaaaaaaaatcaaaccaaaaatgtgaaaacaatagaattgcaaagatagcagttaaaattttaatctgaaaataacctttgaatctcgggctaggttacgtccatatttgaagtggtcagtgatggtttgaacattttttgcaggatgagtgaaaatgcactggattatatttgggatttttgtttttggaattgtctgttttaatcacagccttaattcacaattggcaaaggcagtttactcaaaggactgggctaaatattctgtaattatgcatttttgataggaaaatgaaatttttgcaaacagacattttctttttttttggctggagtgcagtggggcatggtcttggctcactgcagcgttgaccacctgggctcaagtgatactcccgcctcagccacccaagtagctggcactacgggcacacgccaccatgcccagctaatttttttgtatttttagtagagatggggttttgccatgctgcccaggctggtctcaactcctcagctcaagcaatctgcctgcgtgagcctcccaaagtggtggaattacaggcgtgggccactgcgcctggcccagacagacattttctgaaacacaactggcaatgagctgtttttacattttgaaagtgattcttcacttcctagttcttaattatagtatacctattaagatctgtaagatcctgaagacataagatcatgaagccatataagaatgaggattgaaagttgagcaaaattttcgggattttgggaaacattcttagctgtgctatctgcctaaaattattccttattacttctctcctttgacagacttcaagttttcttcatagccctttcaaagttttttgagccatccagagtaaaatcatttctaaatgatagttctgtatatctccaactcgtcttaagtgtatttgcctgtgtgcaacgtattgctagactatgaactcctcagcatggctgctggataacttaattgtcctgagttaatagccttcaaaggacaaatcggtttctttgcagatagcttcgtaaaacttcacatggagtttattttatcatatttcccttttttatttctgctcctcctttaattgcccatcttgcttcagagactgacatttcagggtggatattaattaaagcattaattttgttttttggtatatttctatccctagtatttctatcttactgctaaaatacaggaaaagtgccgtatttttaatgcatttagtggttttctttggtgttatctgttccatttttctttttcatacattgaagtgtgtctccttttcaaccaaaataatgaaatagtggagaccatgaaattgttgtgcctggctaattggcaaattaatttaccaatataataagtgtagcgccttgtttgaataccctttttgagaaggtatgatgagaatgggcaagggtgtcagcatctcttcttcttaataattaattgttttcagttttggttcacgaagaatgcttagttaatctgtaatgttgcctagagctgtatttatctgtttttatttatactagtgtagtaaagctgcatatcattacagtaaaaacgactactgtgatgagttaatcagaaaatctattaaaatctatatgac

SEQ ID NO: 117352 - DNA, 6692 bp, Homo sapiens
  Payload ID: 2911
  Gene Symbol: CLCN3
  Gene Name: chloride channel, voltage-sensitive 3
  Uniprot ID: P51790
  ENST ID: ENST00000513761
  CDS Start-End: 560-3016
gtgacgtcacgcgtcgacgctggggcgtacctttcgggctcctgactcctgccgcttctcttccccttccgtgggtcagggccggtccggtccggaacctgcagcccctttcccagtgttctagttcgcccgtgacccggaataatgagcaaggagggtgtggtgggttgaaagccatcctactttactcccgagttagagcatggattcagttttagtcttaagggggaagtgagattggagatttttatttttaattttgggcagaagcaggttgactctagggatctccagagcgagaggatttaacttcatgttgctcccgtgtttgaaggaggacaataaaagtcccaccgggcaaaattttcgtaacctctgcggtagaaaacgtcaggtatcttttaaatcgcgatagttttcgctgtgtcaggctttcttcggtggagctccgagggtagctaggttctaggtttgaaacagatgcagaatccaaaggcagcgcaaaaaacagccaccgattttgctatgtctctgagctgcgagataatcagacagctaaatggagtctgagcagctgttccatagaggctactatagaaacagctacaacagtataacaagtgcaagtagtgatgaggaacttttagatggagcaggtgttattatggactttcaaacatctgaagatgacaatttattagatggtgacactgcagttggaactcattatacaatgacaaatggaggcagcattaacagttctacacatttactggatcttttggatgaaccaattccaggtgttggtacatatgatgatttccatactattgattgggtgcgagaaaaatgtaaagacagagaaaggcatagacggatcaacagcaaaaagaaagaatcagcatgggaaatgacaaaaagtttgtatgatgcgtggtcaggatggctagtagtaacactaacaggattggcatcaggggcactggccggattaatagacattgctgccgattggatgactgacctaaaggagggcatttgccttagtgcgttgtggtacaaccacgaacagtgctgttggggatctaatgaaacaacatttgaagagagggataaatgtccacagtggaaaacatgggcagaattaatcataggtcaagcagagggtcctggttcttatatcatgaactacataatgtacatcttctgggccttgagttttgcctttcttgcagtttccctggtaaaggtatttgctccatatgcctgtggctctggaattccagagattaaaactattttaagtggattcatcatcagaggttacttgggaaaatggactttaatgattaaaaccatcacattagtcctggctgtggcatcaggtttgagtttaggaaaagaaggtcccctggtacatgttgcctgttgctgcggaaatatcttttcctacctctttccaaagtatagcacaaacgaagctaaaaaaagggaggtgctatcagctgcctcagctgcaggggtttctgtagcttttggtgcaccaattggaggagttctttttagcctggaagaggttagctattattttcctctcaaaactttatggagatcattttttgctgctttagtggctgcatttgttttgaggtccatcaatccatttggtaacagccgtctggtccttttttatgtggagtatcatacaccatggtacctttttgaactgtttccttttattcttctaggggtatttggagggctttggggagcctttttcattagggcaaatattgcctggtgtcgtcgacgcaagtccacgaaatttggaaagtatcccgttctggaagtcattattgttgcagccattactgctgtgatagccttccctaatccatacactaggctaaacaccagtgaactgatcaaagagctttttacagactgtggtcccctggaatcctcttctctttgtgactacagaaatgacatgaatgccagtaaaattgtcgatgacattcctgatcgtccagcaggcattggagtatattcagctatatggcagttatgcctggcactcatatttaaaatcataatgacagtattcacttttggcatcaaggttccatcaggcttgttcatccccagcatggccattggagcgatcgcaggaaggattgtggggattgcggtggagcagcttgcctactatcaccacgactggtttatctttaaggagtggtgtgaggtcggggctgattgcattacacctggcctttatgccatggttggtgctgctgcatgcttaggtggtgtgacaagaatgactgtctccctggtggttattgtttttgagcttactggaggcttggaatatattgttccccttatggctgcagtcatgaccagtaaatgggttggagatgcctttggcagggaaggcatttatgaagcacacatccgattaaatggataccctttcttggatgcaaaagaagaattcactcataccaccctggctgctgacgttatgagacctcgaaggaatgatcctcccttagctgtcctgacacaggacaatatgacagtggatgatatagaaaacatgattaatgaaaccagctacaatggatttcctgtcataatgtcaaaagaatctcagagattagtgggatttgccctcagaagagacctgacaattgcaatagaaagtgccaggaaaaaacaagaaggtatcgttggcagttctcgggtgtgttttgcacagcacaccccatctcttccagcagaaagtcctcggccattgaagcttcgaagcattcttgacatgagcccttttacagtgacagaccacaccccaatggagatcgtggtggatattttccgaaagctgggactgaggcagtgccttgtaactcacaatgggcgcctccttggcattataacaaaaaaagatatcctccggcatatggcccagacggcaaaccaagaccccgcttcaataatgttcaactgaatctcacagatgaggagagagaagaaacggaagaggaagtttatttgttgaatagcacaactctttaacctgagggagtcatctacttttttttcctcctttacaaaaaaagaaaggaaatataaaagccgggtttttgcaacatggtttgcaaataatgctggtggaatggaggagttgtttggggagggaaaggagagagaaggaaaggagtgaggtatttcccgtctaacagaaagcagcgtatcaactcctattgttctgcactggatgcattcagctgaggatgtgcctgatagtgcaggcttgcgcctcaacagagatgacagcagagtcctcgagcacctggcctgttgctccaacattgcaaagacacattatcagtccctatttctagagggattactttgaattgagccatctataaaactgcaaggtcttgcccttttttttaatcaaaactgttctgtttaattcatgaattgtatagttaagcattacctttctacattccagaagagcctttatttctctctctctctctctctctctctctctctctactgagctgtaacaaagcctctttaaatcggtgtatccttttgaagcagtcctttctcatattgagatgtactgtgattttactgaggtttcatcacaagaagggagtgtttcttgtgccattaaccatgtagtttgtaccatcactaaatgcttggaacagtacacatgcaccacaacaaaggctcatcaaacaggtaaagtctcgaaggaagcgagaacgaaatctctcattgtgtgccgtgtggctcaaaaccgaaaacaatgaagcttggttttaaaggataaagttttcttttttgttttcctctcagactttatggataatgtgaccgggtcttatgcaaattttctatttctaaaactactactatgatatacaagtgctgttgagcataattaaataaaatgctgctgctttgacagtaaagagaaggaagtattctgattagctgtatctggtattaattgcatgttaaaacactggaatttttaaaattgaaattagatcagtcattcttttcttttctcaagatatctcatggctgacactgaagaagaaatgtaattcataacttgcactaaatgtatattttttttcttaaaaatttaccattcttatttatatttttatggattaaaatttataaaatacagatcagttaatattgcacttaagtaattttacctttttaatgtgatttttatagaataattcagacttacaaatacagagatatgaacaaagtttacagtgggaacaaaggtttaaaaaaaggttgtggttctctctctgtgatccagtgtgcacataaacctttctctgatctttcactgccatcctctggattatgtcttctgacctgtccattttgacccattaactggaaagttgaaaaactacattaactggaaagttgaaaaactacattactttggagaataaaaccgaaagttcgtgtataccttcttaaaaaaaaaatcaaaccaaaaatgtgaaaacaatagaattgcaaagatagcagttaaaattttaatctgaaaataacctttgaatctcgggctaggttacgtccatatttgaagtggtcagtgatggtttgaacattttttgcaggatgagtgaaaatgcactggattatatttgggatttttgtttttggaattgtctgttttaatcacagccttaattcacaattggcaaaggcagtttactcaaaggactgggctaaatattctgtaattatgcatttttgataggaaaatgaaatttttgcaaacagacattttctttttttttggctggagtgcagtggggcatggtcttggctcactgcagcgttgaccacctgggctcaagtgatactcccgcctcagccacccaagtagctggcactacgggcacacgccaccatgcccagctaatttttttgtatttttagtagagatggggttttgccatgctgcccaggctggtctcaactcctcagctcaagcaatctgcctgcgtgagcctcccaaagtggtggaattacaggcgtgggccactgcgcctggcccagacagacattttctgaaacacaactggcaatgagctgtttttacattttgaaagtgattcttcacttcctagttcttaattatagtatacctattaagatctgtaagatcctgaagacataagatcatgaagccatataagaatgaggattgaaagttgagcaaaattttcgggattttgggaaacattcttagctgtgctatctgcctaaaattattccttattacttctctcctttgacagacttcaagttttcttcatagccctttcaaagttttttgagccatccagagtaaaatcatttctaaatgatagttctgtatatctccaactcgtcttaagtgtatttgcctgtgtgcaacgtattgctagactatgaactcctcagcatggctgctggataacttaattgtcctgagttaatagccttcaaaggacaaatcggtttctttgcagatagcttcgtaaaacttcacatggagtttattttatcatatttcccttttttatttctgctcctcctttaattgcccatcttgcttcagagactgacatttcagggtggatattaattaaagcattaattttgttttttggtatatttctatccctagtatttctatcttactgctaaaatacaggaaaagtgccgtatttttaatgcatttagtggttttctttggtgttatctgttccatttttctttttcatacattgaagtgtgtctccttttcaaccaaaataatgaaatagtggagaccatgaaattgttgtgcctggctaattggcaaattaatttaccaatataataagtgtagcgccttgtttgaataccctttttgagaaggtatgatgagaatgggcaagggtgtcagcatctcttcttcttaataattaattgttttcagttttggttcacgaagaatgcttagttaatctgtaatgttgcctagagctgtatttatctgtttttatttatactagtgtagtaaagctgcatatcattacagtaaaaacgactactgtgatgagttaatcagaaaatctattaaaatctatatgacaatgtgtggtttggcctttaattatatctgtaacagtcctccctcttcactgctgccctacgcagtgtaggccgatatgcctggcacagggagccccaaaaaggtaataattataatgcttctctcaggttacaaagcatttctacactttgcaagcaaggagcaatagaagagtagatagatgctggattgacagcaggatgttcataccaccagcaatggtttagcgcccccatttgtcagtgaaagctgcaggtccacagaaaactgatttcatttcagctcactttcaaaagtgatttttttttttttcgcaagaaaaattacgctatttgcatgaaaagaggtaaaacgatttatttacatgtctttaaaaaatcaccttggacatttgctaatagaactgccaaaagagggtggtaagtaacaacctttgattaagatgtggtcttttactattaagcttttagtaaaaaggaacacactaaaa

SEQ ID NO: 117353 - DNA, 582 bp, Homo sapiens
  Payload ID: 2911
  Gene Symbol: CLCN3
  Gene Name: chloride channel, voltage-sensitive 3
  ENST ID: ENST00000511092
  CDS Start-End: 62-582
agcgcgtggaaggcggcacgcagcggaggcggctgggaaggagcaataatcagacagctaaatggagtctgagcagctgttccatagaggctactatagaaacagctacaacagtataacaagtgcaagtagtgatgaggaacttttagatggagcaggtgttattatggactttcaaacatctgaagatgacaatttattagatggtgacactgcagttggaactcattatacaatgacaaatggaggcagcattaacagttctacacatttactggatcttttggatgaaccaattccaggtgttggtacatatgatgatttccatactattgattgggtgcgagaaaaatgtaaagacagagaaaggcatagacggatcaacagcaaaaagaaagaatcagcatgggaaatgacaaaaagtttgtatgatgcgtggtcaggatggctagtagtaacactaacaggattggcatcaggggcactggccggattaatagacattgctgccgattggatgactgacctaaaggagggcatttgccttagtgcgttgtggtacaaccacgaacagtgctgttg

SEQ ID NO: 117354 - DNA, 2485 bp, Homo sapiens
  Payload ID: 2911
  Gene Symbol: CLCN3
  Gene Name: chloride channel, voltage-sensitive 3
  ENST ID: ENST00000507875
  CDS Start-End: 309-2485
agttttgtgtgttgtacttggagcttagtcattgtcatacgtagcaggacctgattaagaaggctgtgccgcctctaagccttgctagattgtagccactagcaaccaggctgcaataatttccctttgatgacatcatccactgtggaagaacccagttgcttcagcgagtcgaactacagttttaacctcatcaaatatggcatctcccttgcttgctgcagcagggatggaagaaatgtcactttctttttaagctagcaagctttttctttttctttttcttcttctatttaaaaattctaatcatggatgcttcttccgacccttatttgccttatgacgggggaggagacagtattcccctgagggaattacataaaagaggaactcattatacaatgacaaatggaggcagcattaacagttctacacatttactggatcttttggatgaaccaattccaggtgttggtacatatgatgatttccatactattgattgggtgcgagaaaaatgtaaagacagagaaaggcatagacggatcaacagcaaaaagaaagaatcagcatgggaaatgacaaaaagtttgtatgatgcgtggtcaggatggctagtagtaacactaacaggattggcatcaggggcactggccggattaatagacattgctgccgattggatgactgacctaaaggagggcatttgccttagtgcgttgtggtacaaccacgaacagtgctgttggggatctaatgaaacaacatttgaagagagggataaatgtccacagtggaaaacatgggcagaattaatcataggtcaagcagagggtcctggttcttatatcatgaactacataatgtacatcttctgggccttgagttttgcctttcttgcagtttccctggtaaaggtatttgctccatatgcctgtggctctggaattccagagattaaaactattttaagtggattcatcatcagaggttacttgggaaaatggactttaatgattaaaaccatcacattagtcctggctgtggcatcaggtttgagtttaggaaaagaaggtcccctggtacatgttgcctgttgctgcggaaatatcttttcctacctctttccaaagtatagcacaaacgaagctaaaaaaagggaggtgctatcagctgcctcagctgcaggggtttctgtagcttttggtgcaccaattggaggagttctttttagcctggaagaggttagctattattttcctctcaaaactttatggagatcattttttgctgctttagtggctgcatttgttttgaggtccatcaatccatttggtaacagccgtctggtccttttttatgtggagtatcatacaccatggtacctttttgaactgtttccttttattcttctaggggtatttggagggctttggggagcctttttcattagggcaaatattgcctggtgtcgtcgacgcaagtccacgaaatttggaaagtatcccgttctggaagtcattattgttgcagccattactgctgtgatagccttccctaatccatacactaggctaaacaccagtgaactgatcaaagagctttttacagactgtggtcccctggaatcctcttctctttgtgactacagaaatgacatgaatgccagtaaaattgtcgatgacattcctgatcgtccagcaggcattggagtatattcagctatatggcagttatgcctggcactcatatttaaaatcataatgacagtattcacttttggcatcaaggttccatcaggcttgttcatccccagcatggccattggagcgatcgcaggaaggattgtggggattgcggtggagcagcttgcctactatcaccacgactggtttatctttaaggagtggtgtgaggtcggggctgattgcattacacctggcctttatgccatggttggtgctgctgcatgcttaggtggtgtgacaagaatgactgtctccctggtggttattgtttttgagcttactggaggcttggaatatattgttccccttatggctgcagtcatgaccagtaaatgggttggagatgcctttggcagggaaggcatttatgaagcacacatccgattaaatggataccctttcttggatgcaaaagaagaattcactcataccaccctggctgctgacgttatgagacctcgaaggaatgatcctcccttagctgtcctgacacaggacaatatgacagtggatgatatagaaaacatgattaatgaaaccagctacaatggatttcctgtcataatgtcaaaagaatctcagagattagtgggatttgccctcagaagagacctgacaattgcaatagaaagtgccaggaaaaaacaagaaggtatcgttggcagttctcgggtgtgttttgcacagcacaccccatctcttccagcagaaagtcctcggccattgaagcttcgaag

SEQ ID NO: 117355 - DNA, 563 bp, Homo sapiens
  Payload ID: 2911
  Gene Symbol: CLCN3
  Gene Name: chloride channel, voltage-sensitive 3
  ENST ID: ENST00000512813
  CDS Start-End: 148-563
tttcgggctcctgactcctgccgcttctcttccccttccgtgggtcagggccggtccggtccggaacctgcagcccctttcccagtgttctagttcgcccgtgacccggaataatgagcaaggagggtgtgataatcagacagctaaatggagtctgagcagctgttccatagaggctactatagaaacagctacaacagtataacaagtgcaagtagtgatgaggaacttttagatggagcaggtgttattatggactttcaaacatctgaagatgacaatttattagatggtgacactgcagttggaactcattatacaatgacaaatggaggcagcattaacagttctacacatttactggatcttttggatgaaccaattccaggtgttggtacatatgatgatttccatactattgattgggtgcgagaaaaatgtaaagacagagaaaggcatagacggatcaacagcaaaaagaaagaatcagcatgggaaatgacaaaaagtttgtatgatgcgtggtcaggatggctagtagtaacactaacaggattggcatc

SEQ ID NO: 117356 - DNA, 5874 bp, Homo sapiens
  Payload ID: 2911
  Gene Symbol: CLCN3
  Gene Name: chloride channel, voltage-sensitive 3
  ENST ID: ENST00000613795
  CDS Start-End: 309-2684
agttttgtgtgttgtacttggagcttagtcattgtcatacgtagcaggacctgattaagaaggctgtgccgcctctaagccttgctagattgtagccactagcaaccaggctgcaataatttccctttgatgacatcatccactgtggaagaacccagttgcttcagcgagtcgaactacagttttaacctcatcaaatatggcatctcccttgcttgctgcagcagggatggaagaaatgtcactttctttttaagctagcaagctttttctttttctttttcttcttctatttaaaaattctaatcatggatgcttcttccgacccttatttgccttatgacgggggaggagacagtattcccctgagggaattacataaaagaggaactcattatacaatgacaaatggaggcagcattaacagttctacacatttactggatcttttggatgaaccaattccaggtgttggtacatatgatgatttccatactattgattgggtgcgagaaaaatgtaaagacagagaaaggcatagacggatcaacagcaaaaagaaagaatcagcatgggaaatgacaaaaagtttgtatgatgcgtggtcaggatggctagtagtaacactaacaggattggcatcaggggcactggccggattaatagacattgctgccgattggatgactgacctaaaggagggcatttgccttagtgcgttgtggtacaaccacgaacagtgctgttggggatctaatgaaacaacatttgaagagagggataaatgtccacagtggaaaacatgggcagaattaatcataggtcaagcagagggtcctggttcttatatcatgaactacataatgtacatcttctgggccttgagttttgcctttcttgcagtttccctggtaaaggtatttgctccatatgcctgtggctctggaattccagagattaaaactattttaagtggattcatcatcagaggttacttgggaaaatggactttaatgattaaaaccatcacattagtcctggctgtggcatcaggtttgagtttaggaaaagaaggtcccctggtacatgttgcctgttgctgcggaaatatcttttcctacctctttccaaagtatagcacaaacgaagctaaaaaaagggaggtgctatcagctgcctcagctgcaggggtttctgtagcttttggtgcaccaattggaggagttctttttagcctggaagaggttagctattattttcctctcaaaactttatggagatcattttttgctgctttagtggctgcatttgttttgaggtccatcaatccatttggtaacagccgtctggtccttttttatgtggagtatcatacaccatggtacctttttgaactgtttccttttattcttctaggggtatttggagggctttggggagcctttttcattagggcaaatattgcctggtgtcgtcgacgcaagtccacgaaatttggaaagtatcccgttctggaagtcattattgttgcagccattactgctgtgatagccttccctaatccatacactaggctaaacaccagtgaactgatcaaagagctttttacagactgtggtcccctggaatcctcttctctttgtgactacagaaatgacatgaatgccagtaaaattgtcgatgacattcctgatcgtccagcaggcattggagtatattcagctatatggcagttatgcctggcactcatatttaaaatcataatgacagtattcacttttggcatcaaggttccatcaggcttgttcatccccagcatggccattggagcgatcgcaggaaggattgtggggattgcggtggagcagcttgcctactatcaccacgactggtttatctttaaggagtggtgtgaggtcggggctgattgcattacacctggcctttatgccatggttggtgctgctgcatgcttaggtggtgtgacaagaatgactgtctccctggtggttattgtttttgagcttactggaggcttggaatatattgttccccttatggctgcagtcatgaccagtaaatgggttggagatgcctttggcagggaaggcatttatgaagcacacatccgattaaatggataccctttcttggatgcaaaagaagaattcactcataccaccctggctgctgacgttatgagacctcgaaggaatgatcctcccttagctgtcctgacacaggacaatatgacagtggatgatatagaaaacatgattaatgaaaccagctacaatggatttcctgtcataatgtcaaaagaatctcagagattagtgggatttgccctcagaagagacctgacaattgcaatagaaagtgccaggaaaaaacaagaaggtatcgttggcagttctcgggtgtgttttgcacagcacaccccatctcttccagcagaaagtcctcggccattgaagcttcgaagcattcttgacatgagcccttttacagtgacagaccacaccccaatggagatcgtggtggatattttccgaaagctgggactgaggcagtgccttgtaactcacaatgggcgcctccttggcattataacaaaaaaagatatcctccggcatatggcccagacggcaaaccaagaccccgcttcaataatgttcaactgaatctcacagatgaggagagagaagaaacggaagaggaagtttatttgttgaatagcacaactctttaacctgagggagtcatctacttttttttcctcctttacaaaaaaagaaaggaaatataaaagccgggtttttgcaacatggtttgcaaataatgctggtggaatggaggagttgtttggggagggaaaggagagagaaggaaaggagtgaggtatttcccgtctaacagaaagcagcgtatcaactcctattgttctgcactggatgcattcagctgaggatgtgcctgatagtgcaggcttgcgcctcaacagagatgacagcagagtcctcgagcacctggcctgttgctccaacattgcaaagacacattatcagtccctatttctagagggattactttgaattgagccatctataaaactgcaaggtcttgcccttttttttaatcaaaactgttctgtttaattcatgaattgtatagttaagcattacctttctacattccagaagagcctttatttctctctctctctctctctctctctctctctctactgagctgtaacaaagcctctttaaatcggtgtatccttttgaagcagtcctttctcatattgagatgtactgtgattttactgaggtttcatcacaagaagggagtgtttcttgtgccattaaccatgtagtttgtaccatcactaaatgcttggaacagtacacatgcaccacaacaaaggctcatcaaacaggtaaagtctcgaaggaagcgagaacgaaatctctcattgtgtgccgtgtggctcaaaaccgaaaacaatgaagcttggttttaaaggataaagttttcttttttgttttcctctcagactttatggataatgtgaccgggtcttatgcaaattttctatttctaaaactactactatgatatacaagtgctgttgagcataattaaataaaatgctgctgctttgacagtaaagagaaggaagtattctgattagctgtatctggtattaattgcatgttaaaacactggaatttttaaaattgaaattagatcagtcattcttttcttttctcaagatatctcatggctgacactgaagaagaaatgtaattcataacttgcactaaatgtatattttttttcttaaaaatttaccattcttatttatatttttatggattaaaatttataaaatacagatcagttaatattgcacttaagtaattttacctttttaatgtgatttttatagaataattcagacttacaaatacagagatatgaacaaagtttacagtgggaacaaaggtttaaaaaaaggttgtggttctctctctgtgatccagtgtgcacataaacctttctctgatctttcactgccatcctctggattatgtcttctgacctgtccattttgacccattaactggaaagttgaaaaactacattaactggaaagttgaaaaactacattactttggagaataaaaccgaaagttcgtgtataccttcttaaaaaaaaaatcaaaccaaaaatgtgaaaacaatagaattgcaaagatagcagttaaaattttaatctgaaaataacctttgaatctcgggctaggttacgtccatatttgaagtggtcagtgatggtttgaacattttttgcaggatgagtgaaaatgcactggattatatttgggatttttgtttttggaattgtctgttttaatcacagccttaattcacaattggcaaaggcagtttactcaaaggactgggctaaatattctgtaattatgcatttttgataggaaaatgaaatttttgcaaacagacattttctttttttttggctggagtgcagtggggcatggtcttggctcactgcagcgttgaccacctgggctcaagtgatactcccgcctcagccacccaagtagctggcactacgggcacacgccaccatgcccagctaatttttttgtatttttagtagagatggggttttgccatgctgcccaggctggtctcaactcctcagctcaagcaatctgcctgcgtgagcctcccaaagtggtggaattacaggcgtgggccactgcgcctggcccagacagacattttctgaaacacaactggcaatgagctgtttttacattttgaaagtgattcttcacttcctagttcttaattatagtatacctattaagatctgtaagatcctgaagacataagatcatgaagccatataagaatgaggattgaaagttgagcaaaattttcgggattttgggaaacattcttagctgtgctatctgcctaaaattattccttattacttctctcctttgacagacttcaagttttcttcatagccctttcaaagttttttgagccatccagagtaaaatcatttctaaatgatagttctgtatatctccaactcgtcttaagtgtatttgcctgtgtgcaacgtattgctagactatgaactcctcagcatggctgctggataacttaattgtcctgagttaatagccttcaaaggacaaatcggtttctttgcagatagcttcgtaaaacttcacatggagtttattttatcatatttcccttttttatttctgctcctcctttaattgcccatcttgcttcagagactgacatttcagggtggatattaattaaagcattaattttgttttttggtatatttctatccctagtatttctatcttactgctaaaatacaggaaaagtgccgtatttttaatgcatttagtggttttctttggtgttatctgttccatttttctttttcatacattgaagtgtgtctccttttcaaccaaaataatgaaatagtggagaccatgaaattgttgtgcctggctaattggcaaattaatttaccaatataataagtgtagcgccttgtttgaataccctttttgagaaggtatgatgagaatgggcaagggtgtcagcatctcttcttcttaataattaattgttttcagttttggttcacgaagaatgcttagttaatctgtaatgttgcctagagctgtatttatctgtttttatttatactagtgtagtaaagctgcatatcattacagtaaaaacgactactgtgatgagttaatcagaaaatctattaaaatctatatgacaatg

SEQ ID NO: 117357 - DNA, 2418 bp, Homo sapiens
  Payload ID: 2912
  Gene Symbol: CLCN4
  Gene Name: chloride channel, voltage-sensitive 4
  ENST ID: ENST00000380829
  CDS Start-End: 116-2305
ccgcctcctggtgatgtcacggcgctcgcagccgtcgcgctgaagaaaggatgctcgaggatgctgtccaggtgggcggccgcgggcgcgatgcggcactgcaggtgtaattagcatggtcaatgcgggagcgatgagtggctctggaaacctgatggatttcctcgatgagccgttccctgatgtggggacgtatgaggacttccacaccatcgactggctaagggaaaagtcacgggacaccgacagacacaggaagatcaccagcaagagcaaggagtccatatgggagttcatcaagagcctgctggatgcctggtcgggatgggtggtgatgctgctcatcggcctgctggcgggcaccttggctggggtcatcgatctcgccgtggactggatgacggacctgaaggagggggtctgcctgtctgccttctggtatagccatgagcagtgttgctggacttctaacgagaccacttttgaggacagagacaagtgtcccctgtggcagaaatggtcggagctgctggtgaatcagtcagagggtgccagtgcttacattctgaattacttaatgtacatcctatgggcgctgctgtttgcatttttggctgtctccctggtgcgtgtatttgcaccatatgcctgtggctctggcataccagagataaagaccattttgagcggctttatcatcaggggctacttggggaagtggaccctgctaatcaagacagtcacgctggtgctggtagtgtcctccggtctgagccttgggaaggaagggccgctagtgcacgtggcttgttgctgtggcaacttcttcagcagccttttctccaagtacagcaagaatgagggcaagaggcgggaggtgctttcagctgcagcggctgctggagtctctgttgcctttggtgcaccaattggaggcgtgcttttcagtctagaagaggtcagttactactttcccctgaagaccttgtggaggtcatttttcgcagccctggtggcggcctttacgctgagatccatcaatccctttgggaatagccgtctcgttctcttttatgtggaataccacacgccctggaggcgcaagaccaccaggctggggaagtacccggtgctggaggtcattgtggtgactgccatcactgccatcattgcctaccccaatccctacacacgccagagcaccagcgagctcatttctgagctgttcaatgactgtggagcccttgagtcttcccagctctgtgactacatcaatgaccccaacatgactcggcctgtggatgacattccagaccggccggctggtgtcggtgtttacacggccatgtggcagctggccctggcactgatcttcaaaatcgtcgttaccatatttacctttggcatgaagatcccgtcgggcctcttcatccccagcatggctgtgggcgcgatagcgggcaggatggtgggaattggcgtggagcagctggcctaccatcaccatgactggatcatcttcaggaactggtgcagacccggtgcagactgtgtcacgccagggctgtacgcaatggtgggagctgcggcctgcctcggtggagttaccaggatgacggtgtcattggtggtcatcatgtttgaattaaccgggggtctggagtacatcgtgcccctgatggcggcggctgtgaccagcaagtgggtagctgatgcatttgggaaagaaggcatctacgaggcccacatccacttaaatgggtaccctttccttgacgtgaaggacgagtttactcaccgcacactggccaccgacgtcatgcggccccggcggggagagccgccactgtcggtgctcacccaggacagcatgactgtcgaggacgtggagacgctcatcaaggagaccgactacaacggcttccccgtggtggtctccagagactccgagcgcctcattggatttgcccagaggagggaactgattctcgcaataaagaacgccagacagaggcaggagggcattgtgagcaattccatcatgtacttcacggaggaaccccccgagctgccggccaacagcccacatcccctgaagctgcggcgcatcctgaacctcagcccgtttacagtgacagaccacactccgatggaaacggtggtggatatcttccggaaactggggcttcggcagtgcctggtgacgcggagcgggagacttcttggcatcatcacaaaaaaggatgttctgagacatatggcccagatggcaaaccaggaccccgaatccatcatgtttaattagcaacaaggtggcaattattttcagaaaaacactgactgtgtcatttaaaaagaaataaatgatatgttattatcccaatgaaagatcatgcattggggacagcagaaacaaaa

SEQ ID NO: 117358 - DNA, 6750 bp, Homo sapiens
  Payload ID: 2912
  Gene Symbol: CLCN4
  Gene Name: chloride channel, voltage-sensitive 4
  Uniprot ID: P51793
  ENST ID: ENST00000380833
  CDS Start-End: 392-2674
atttgcctctggcaggaaaatgagcttgtcagtttctgcctccattagaccctcaacccaaaggagcaggagatttcggtagcgttttaactttatctcagaatctgaaagcggaaggccaggcaagctgcacacatcaagcgaaacgcctgaggggcggccagcgcgagggtttctggccatcgaccctcacctcccgggacttccagggtcttccccccaccccgcgcacacctccctgcctcgccccgagggcgtcacgtggcagcgtggggcccgcctcctggtgatgtcacggcgctcgcagccgtcgcgctgaagaaaggatgctcgaggatgctgtccaggtgggcggccgcgggcgcgatgcggcactgcaggtgtaattagcatggtcaatgcgggagcgatgagtggctctggaaacctgatggatttcctcgatgagccgttccctgatgtggggacgtatgaggacttccacaccatcgactggctaagggaaaagtcacgggacaccgacagacacaggaagatcaccagcaagagcaaggagtccatatgggagttcatcaagagcctgctggatgcctggtcgggatgggtggtgatgctgctcatcggcctgctggcgggcaccttggctggggtcatcgatctcgccgtggactggatgacggacctgaaggagggggtctgcctgtctgccttctggtatagccatgagcagtgttgctggacttctaacgagaccacttttgaggacagagacaagtgtcccctgtggcagaaatggtcggagctgctggtgaatcagtcagagggtgccagtgcttacattctgaattacttaatgtacatcctatgggcgctgctgtttgcatttttggctgtctccctggtgcgtgtatttgcaccatatgcctgtggctctggcataccagagataaagaccattttgagcggctttatcatcaggggctacttggggaagtggaccctgctaatcaagacagtcacgctggtgctggtagtgtcctccggtctgagccttgggaaggaagggccgctagtgcacgtggcttgttgctgtggcaacttcttcagcagccttttctccaagtacagcaagaatgagggcaagaggcgggaggtgctttcagctgcagcggctgctggagtctctgttgcctttggtgcaccaattggaggcgtgcttttcagtctagaagaggtcagttactactttcccctgaagaccttgtggaggtcatttttcgcagccctggtggcggcctttacgctgagatccatcaatccctttgggaatagccgtctcgttctcttttatgtggaataccacacgccctggtacatggctgaactcttccccttcatcctgcttggggtcttcgggggcttgtggggaaccctcttcatccgctgcaacatcgcctggtgcaggaggcgcaagaccaccaggctggggaagtacccggtgctggaggtcattgtggtgactgccatcactgccatcattgcctaccccaatccctacacacgccagagcaccagcgagctcatttctgagctgttcaatgactgtggagcccttgagtcttcccagctctgtgactacatcaatgaccccaacatgactcggcctgtggatgacattccagaccggccggctggtgtcggtgtttacacggccatgtggcagctggccctggcactgatcttcaaaatcgtcgttaccatatttacctttggcatgaagatcccgtcgggcctcttcatccccagcatggctgtgggcgcgatagcgggcaggatggtgggaattggcgtggagcagctggcctaccatcaccatgactggatcatcttcaggaactggtgcagacccggtgcagactgtgtcacgccagggctgtacgcaatggtgggagctgcggcctgcctcggtggagttaccaggatgacggtgtcattggtggtcatcatgtttgaattaaccgggggtctggagtacatcgtgcccctgatggcggcggctgtgaccagcaagtgggtagctgatgcatttgggaaagaaggcatctacgaggcccacatccacttaaatgggtaccctttccttgacgtgaaggacgagtttactcaccgcacactggccaccgacgtcatgcggccccggcggggagagccgccactgtcggtgctcacccaggacagcatgactgtcgaggacgtggagacgctcatcaaggagaccgactacaacggcttccccgtggtggtctccagagactccgagcgcctcattggatttgcccagaggagggaactgattctcgcaataaagaacgccagacagaggcaggagggcattgtgagcaattccatcatgtacttcacggaggaaccccccgagctgccggccaacagcccacatcccctgaagctgcggcgcatcctgaacctcagcccgtttacagtgacagaccacactccgatggaaacggtggtggatatcttccggaaactggggcttcggcagtgcctggtgacgcggagcgggagacttcttggcatcatcacaaaaaaggatgttctgagacatatggcccagatggcaaaccaggaccccgaatccatcatgtttaattagcaacaaggtggcaattattttcagaaaaacactgactgtgtcatttaaaaagaaataaatgatatgttattatcccaatgaaagatcatgcattggggacagcagaaacaaaagcttttttggaaaggcggggaagaaggatgaaacctttaaaaacaaaaacaaaaacatcaatgagtaggcattttatagctttaaccccgtatgagtttcaagctgtgtttcctaatgagtttgctactgctgtgggggcatgtgggtgggtaaatgatgtaaatgatgtgatctgtacaagtatgtggagcatgaatgctgactcaagaaacttttactccttctgctcaaggctgatgtttgtaacttatgaacacacgtgaagtgttgagtccaaaagacaaaggggcatcggcatgtcagcgtccttatttattggttcttgaagttttgctgctatgttactgaatcatactaaagacatttgcgcttactttgttgaaaaagaaaaagaaattaaatttgaacacagtgaaagctgcaagtatgccagtgggtccgctcacgaccgtcctgtttcttgctcctgttctcagcctgttatctggcttatccatcagtttctgaaccaacatcaggggcacctgccatgatgagtgtgaagaaatcatttctctatgcaagactggcatcctgggactgcacgatgaactattggagcatacagtactgcggtgtgtctcctcccatacaaagggacacatccttattttgagggtatactcacccgatcattgatttgcatccccatggcatttgcttcatttatttattgcttttgcccatgcattcaatattgatcagctcagcacttccatgggccatagccggtatgcccccagcctgccataagcgtgctttcattttcaagtagcatatgcaagagtccaaacaggctacccaatgttactacttatttttcctctcaggtcttatcagatacggctgtggagaggatgaggcatatgcgttgtcagttggaatccctccaaatggattgcaagagaaatactaaattgattctaaatctgttccattatcttctctgtaggatgcaaaacatccagttgtaatgtataagcatgcacttcatactagcaatcacagcacaggaggacagcattaaattttatatagccaatttgggcactgggcatctttgtatttgaacttaacgacacatttactcttttagtcaggatttcggtcttttctgcgggaaggaattaagctatgtattaggtccaccatacgatctgtgtaagtaagattatcccacttgccctttctctttagtctttgtcccttccttttcactaagtgcccctcatccttttcaatctcattgtcactggatagtgctgtatcacttaggtgtgcattcggctgcaaataacagaaaacccagcaaacactgaagggctggataagaaccctgagagggggtactccaggactgtctccataacatcattgggatccccatcccgttgctatttctttttcaccgtttttaccttttgtcctctggcttattgcctcagagttgcaagatggttcctgaactgtcaggtatcatgtctgctttctaagtgggaagaggaagggagaggcaagcaactaggtacaatgtctatcaggaaagcaaagcttccccagagacgctcagcttgtatccattgactggaagtctgtcacgtggctccccctagccgcacactagtgtgggaaggaaaatattgagctaggcacattactctctgaacgaaattcatattatcttattaaggaagagtgttggtcttcaggaggggaagtttgctgtattggatgccatcatcgtgtccttgtcattgcccttccggttttcattcttgctaaacccctgtgaatgttcttctaaccttcctgttccccaccccttttctcagatttgacctagaattcccagcccaaatccataatttcttagctctaatacgaattttcatgttggacaaaaacctagctacaaatgggtttctatggaacttctaattaatgtgcaaaatacatattttctccaggttaagaaattttaagtcagatcatgctgacacaataagaaaatttgtttgtgtaattcattgacctcttccttccaaaataacatcaagtagccacctcagtgtgacaatatccagtcaatagtagagaatttaatccttggtcctataaaagaataaaattcattgtcgtatttatagcacgtaagccttgagtaacaggtcttaatgttagtgttggtgttgtggtttctgcggaacgtttacaagtgaagttggattctcctgggctttaaatccaaaaagtcttaatgaccgcttcatgtagttcccctcttattcccctgtggtctcctcagagccagcgtgtgctgggaaagagtattagtcatagcctggctttatagaatccaggaggtccttttagctgaaacaagtggcttcaaaagggaacatgaaacagtgaaaagatagccaaaggtcagtgaaaccacagcatttctttctaatctggctgaggccatgggggggaatgaggggaaattatgcttccgggccaaggtcaccgagggggaccttgggatttgtgtcctccccagtgcttagagtagagatacctgcaaattcatggcaaacagttggaagagttacttgactgaaacaacccaatcttactttctttcgtaagttgaacctctgatttattgtggggttcaggctctcctcaatagaaggccagagttggacaggtggactaaggtcaaggatgaggagtctgcagtggggactaccacagcaaactgccttccttccgtggagtcctaactcagccatgtggtccactcacccaggggcccgggggctcagacaaaccccatggggaacatgctgccatgctctgtctttcttgtaaacgtagttgggtagggatcccaagggtatttgctctctccaaatgcagaacttccatccactttatctggtgatctgatgaacagcatggggacgtggaggtgaaataagcatctttcagaataaggtttttttttttttcctcttccagaaccaaaggctttagacatttgtagaactttctggattccttctgaatcgggttttaacataaaaaaccatcaacacatcatgggaaaggagctctttcatgatatacatcacatgtttcttgctctcactgaggaaatgtgttgtacaaaagcaccaaataagggcaccctggaagtgacatgtgtgtttcttctaagtcgtttttagtgcatcccctgcgattgcatgatgctcatgtggcttttagggaaaggcagaatgtgctagaagtcgaagtcattcaatattcagtgcttactgttactttgaaccaggtaatctcagttctttattcagtccttcccaaagaccttacaaaggagatgtgtaaactgatagattttgagcctaataagtcacagaaatggaaaattttagagcagtttgtttcacttaggtgagaactgattactttaaattaccaacatgtgcaaattctacttagtattcattattagatgctaagctggaaaagatgagaaacccaaggagaactattgaattaccacataattgtaatattatgctttaattttgtatgggcagtgttctatcagactaagcttctagcctttgaaatgatttacatgaggagagagcctgtatatctgacttgggaaacattaagcagaccctattttcactggcgcggtaataactatttatttgctatcctagaggtgctgggaatgagcctacgtgcgactttgatgagatatattcacatttggtgttggaacgaccacatagcaacgtgttggtttttttttattgtaacactctgtgtaaacgttgacaccttattaaatattaaatgtctgaactctatttttaaaaataaaacaagcacagagtctgcaacaaacatgtaaa

SEQ ID NO: 117359 - DNA, 487 bp, Homo sapiens
  Payload ID: 2912
  Gene Symbol: CLCN4
  Gene Name: chloride channel, voltage-sensitive 4
  ENST ID: ENST00000454850
  CDS Start-End: 32-487
ggcgcgatgcggcactgcaggtgtaattagcatggtcaatgcgggagcgatgagtggctctggaaacctgatggatttcctcgatgagccgttccctgatgtggggacgtatgaggacttccacaccatcgactggctaagggaaaagtcacgggacaccgacagacacaggaagatcaccagcaagagcaaggagtccatatgggagttcatcaagagcctgctggatgcctggtcgggatgggtggtgatgctgctcatcggcctgctggcgggcaccttggctggggtcatcgatctcgccgtggactggatgacggacctgaaggagggggtctgcctgtctgccttctggtatagccatgagcagtgttgctggacttctaacgagaccacttttgaggacagagacaagtgtcccctgtggcagaaatggtcggagctgctggtgaatcagtcagaggtgctttcagctgcagcggctgct

SEQ ID NO: 117360 - DNA, 6534 bp, Homo sapiens
  Payload ID: 2912
  Gene Symbol: CLCN4
  Gene Name: chloride channel, voltage-sensitive 4
  Uniprot ID: P51793
  ENST ID: ENST00000421085
  CDS Start-End: 458-2458
tcccagccggcctccggggccctccgggctgaaatcgacatttgcctctggcaggaaaatgagcttgtcagtttctgcctccattagaccctcaacccaaaggagcaggagatttcggtagcgttttaactttatctcagaatctgaaagcggaaggccaggcaagctgcacacatcaagcgaaacgcctgaggggcggccagcgcgagggtttctggccatcgaccctcacctcccgggacttccagggtcttccccccaccccgcgcacacctccctgcctcgccccgagggcgtcacgtggcagcgtggggcccgcctcctggtgatgtcacggcgctcgcagccgtcgcgctgaagaaaggatgctcgaggatgctgtccaggtgggcggccgcgggcgcgatgcggcactgcaggcaccttggctggggtcatcgatctcgccgtggactggatgacggacctgaaggagggggtctgcctgtctgccttctggtatagccatgagcagtgttgctggacttctaacgagaccacttttgaggacagagacaagtgtcccctgtggcagaaatggtcggagctgctggtgaatcagtcagagggtgccagtgcttacattctgaattacttaatgtacatcctatgggcgctgctgtttgcatttttggctgtctccctggtgcgtgtatttgcaccatatgcctgtggctctggcataccagagataaagaccattttgagcggctttatcatcaggggctacttggggaagtggaccctgctaatcaagacagtcacgctggtgctggtagtgtcctccggtctgagccttgggaaggaagggccgctagtgcacgtggcttgttgctgtggcaacttcttcagcagccttttctccaagtacagcaagaatgagggcaagaggcgggaggtgctttcagctgcagcggctgctggagtctctgttgcctttggtgcaccaattggaggcgtgcttttcagtctagaagaggtcagttactactttcccctgaagaccttgtggaggtcatttttcgcagccctggtggcggcctttacgctgagatccatcaatccctttgggaatagccgtctcgttctcttttatgtggaataccacacgccctggtacatggctgaactcttccccttcatcctgcttggggtcttcgggggcttgtggggaaccctcttcatccgctgcaacatcgcctggtgcaggaggcgcaagaccaccaggctggggaagtacccggtgctggaggtcattgtggtgactgccatcactgccatcattgcctaccccaatccctacacacgccagagcaccagcgagctcatttctgagctgttcaatgactgtggagcccttgagtcttcccagctctgtgactacatcaatgaccccaacatgactcggcctgtggatgacattccagaccggccggctggtgtcggtgtttacacggccatgtggcagctggccctggcactgatcttcaaaatcgtcgttaccatatttacctttggcatgaagatcccgtcgggcctcttcatccccagcatggctgtgggcgcgatagcgggcaggatggtgggaattggcgtggagcagctggcctaccatcaccatgactggatcatcttcaggaactggtgcagacccggtgcagactgtgtcacgccagggctgtacgcaatggtgggagctgcggcctgcctcggtggagttaccaggatgacggtgtcattggtggtcatcatgtttgaattaaccgggggtctggagtacatcgtgcccctgatggcggcggctgtgaccagcaagtgggtagctgatgcatttgggaaagaaggcatctacgaggcccacatccacttaaatgggtaccctttccttgacgtgaaggacgagtttactcaccgcacactggccaccgacgtcatgcggccccggcggggagagccgccactgtcggtgctcacccaggacagcatgactgtcgaggacgtggagacgctcatcaaggagaccgactacaacggcttccccgtggtggtctccagagactccgagcgcctcattggatttgcccagaggagggaactgattctcgcaataaagaacgccagacagaggcaggagggcattgtgagcaattccatcatgtacttcacggaggaaccccccgagctgccggccaacagcccacatcccctgaagctgcggcgcatcctgaacctcagcccgtttacagtgacagaccacactccgatggaaacggtggtggatatcttccggaaactggggcttcggcagtgcctggtgacgcggagcgggagacttcttggcatcatcacaaaaaaggatgttctgagacatatggcccagatggcaaaccaggaccccgaatccatcatgtttaattagcaacaaggtggcaattattttcagaaaaacactgactgtgtcatttaaaaagaaataaatgatatgttattatcccaatgaaagatcatgcattggggacagcagaaacaaaagcttttttggaaaggcggggaagaaggatgaaacctttaaaaacaaaaacaaaaacatcaatgagtaggcattttatagctttaaccccgtatgagtttcaagctgtgtttcctaatgagtttgctactgctgtgggggcatgtgggtgggtaaatgatgtaaatgatgtgatctgtacaagtatgtggagcatgaatgctgactcaagaaacttttactccttctgctcaaggctgatgtttgtaacttatgaacacacgtgaagtgttgagtccaaaagacaaaggggcatcggcatgtcagcgtccttatttattggttcttgaagttttgctgctatgttactgaatcatactaaagacatttgcgcttactttgttgaaaaagaaaaagaaattaaatttgaacacagtgaaagctgcaagtatgccagtgggtccgctcacgaccgtcctgtttcttgctcctgttctcagcctgttatctggcttatccatcagtttctgaaccaacatcaggggcacctgccatgatgagtgtgaagaaatcatttctctatgcaagactggcatcctgggactgcacgatgaactattggagcatacagtactgcggtgtgtctcctcccatacaaagggacacatccttattttgagggtatactcacccgatcattgatttgcatccccatggcatttgcttcatttatttattgcttttgcccatgcattcaatattgatcagctcagcacttccatgggccatagccggtatgcccccagcctgccataagcgtgctttcattttcaagtagcatatgcaagagtccaaacaggctacccaatgttactacttatttttcctctcaggtcttatcagatacggctgtggagaggatgaggcatatgcgttgtcagttggaatccctccaaatggattgcaagagaaatactaaattgattctaaatctgttccattatcttctctgtaggatgcaaaacatccagttgtaatgtataagcatgcacttcatactagcaatcacagcacaggaggacagcattaaattttatatagccaatttgggcactgggcatctttgtatttgaacttaacgacacatttactcttttagtcaggatttcggtcttttctgcgggaaggaattaagctatgtattaggtccaccatacgatctgtgtaagtaagattatcccacttgccctttctctttagtctttgtcccttccttttcactaagtgcccctcatccttttcaatctcattgtcactggatagtgctgtatcacttaggtgtgcattcggctgcaaataacagaaaacccagcaaacactgaagggctggataagaaccctgagagggggtactccaggactgtctccataacatcattgggatccccatcccgttgctatttctttttcaccgtttttaccttttgtcctctggcttattgcctcagagttgcaagatggttcctgaactgtcaggtatcatgtctgctttctaagtgggaagaggaagggagaggcaagcaactaggtacaatgtctatcaggaaagcaaagcttccccagagacgctcagcttgtatccattgactggaagtctgtcacgtggctccccctagccgcacactagtgtgggaaggaaaatattgagctaggcacattactctctgaacgaaattcatattatcttattaaggaagagtgttggtcttcaggaggggaagtttgctgtattggatgccatcatcgtgtccttgtcattgcccttccggttttcattcttgctaaacccctgtgaatgttcttctaaccttcctgttccccaccccttttctcagatttgacctagaattcccagcccaaatccataatttcttagctctaatacgaattttcatgttggacaaaaacctagctacaaatgggtttctatggaacttctaattaatgtgcaaaatacatattttctccaggttaagaaattttaagtcagatcatgctgacacaataagaaaatttgtttgtgtaattcattgacctcttccttccaaaataacatcaagtagccacctcagtgtgacaatatccagtcaatagtagagaatttaatccttggtcctataaaagaataaaattcattgtcgtatttatagcacgtaagccttgagtaacaggtcttaatgttagtgttggtgttgtggtttctgcggaacgtttacaagtgaagttggattctcctgggctttaaatccaaaaagtcttaatgaccgcttcatgtagttcccctcttattcccctgtggtctcctcagagccagcgtgtgctgggaaagagtattagtcatagcctggctttatagaatccaggaggtccttttagctgaaacaagtggcttcaaaagggaacatgaaacagtgaaaagatagccaaaggtcagtgaaaccacagcatttctttctaatctggctgaggccatgggggggaatgaggggaaattatgcttccgggccaaggtcaccgagggggaccttgggatttgtgtcctccccagtgcttagagtagagatacctgcaaattcatggcaaacagttggaagagttacttgactgaaacaacccaatcttactttctttcgtaagttgaacctctgatttattgtggggttcaggctctcctcaatagaaggccagagttggacaggtggactaaggtcaaggatgaggagtctgcagtggggactaccacagcaaactgccttccttccgtggagtcctaactcagccatgtggtccactcacccaggggcccgggggctcagacaaaccccatggggaacatgctgccatgctctgtctttcttgtaaacgtagttgggtagggatcccaagggtatttgctctctccaaatgcagaacttccatccactttatctggtgatctgatgaacagcatggggacgtggaggtgaaataagcatctttcagaataaggtttttttttttttcctcttccagaaccaaaggctttagacatttgtagaactttctggattccttctgaatcgggttttaacataaaaaaccatcaacacatcatgggaaaggagctctttcatgatatacatcacatgtttcttgctctcactgaggaaatgtgttgtacaaaagcaccaaataagggcaccctggaagtgacatgtgtgtttcttctaagtcgtttttagtgcatcccctgcgattgcatgatgctcatgtggcttttagggaaaggcagaatgtgctagaagtcgaagtcattcaatattcagtgcttactgttactttgaaccaggtaatctcagttctttattcagtccttcccaaagaccttacaaaggagatgtgtaaactgatagattttgagcctaataagtcacagaaatggaaaattttagagcagtttgtttcacttaggtgagaactgattactttaaattaccaacatgtgcaaattctacttagtattcattattagatgctaagctggaaaagatgagaaacccaaggagaactattgaattaccacataattgtaatattatgctttaattttgtatgggcagtgttctatcagactaagcttctagcctttgaaatgatttacatgaggagagagcctgtatatctgacttgggaaacattaagcagaccctattttcactggcgcggtaataactatttatttgctatcctagaggtgctgggaatgagcctacgtgcgactttgatgagatatattcacatttggtgttggaacgaccacatagcaacgtgttggtttttttttattgtaacactctgtgtaaacgttgacaccttattaaatattaaatgtctgaactctatttttaaaaataaaacaagcacagagtctgcaacaaacatgtaaa

SEQ ID NO: 117361 - DNA, 3177 bp, Homo sapiens
  Payload ID: 2913
  Gene Symbol: CLCN5
  Gene Name: chloride channel, voltage-sensitive 5
  Uniprot ID: P51795
  ENST ID: ENST00000307367
  CDS Start-End: 292-2532
tgatgtgatatggctgcaagtgcctttgacccttttgtctcccttccataaactgaaatacctaagctgctccaacctcctttttgtcttttgtttcataaatcctttcccattgcacatcaactcctgtctctctttgtactgtcactctcatctgttgctttccattcacactgcctttagccactcatcattttgtgcctacaccacagaaacctctgaatgtaatggatgttcctaccagaggacaagtcgtacaatggtggaggaataggttcttcaaataggatcatggacttcttggaggagccaatccctggtgtagggacctatgatgatttcaatacaattgattgggtgagagagaagtctcgagaccgggataggcaccgagagattaccaataaaagcaaagagtcaacatgggccttaattcacagtgtgagtgatgctttttccggctggttgttgatgctccttattgggcttttatcaggttcgttagctggtttgatagacatctctgctcattggatgacagacttaaaagaaggtatatgcacagggggattctggtttaaccatgaacattgttgctggaactctgagcatgtcacctttgaagagagagacaaatgtccagagtggaatagttggtcccagcttatcatcagcacagatgagggagcctttgcctacatagtcaattatttcatgtacgtcctctgggctctcctatttgccttccttgccgtatctcttgtcaaggtgtttgcgccttatgcctgtggctctggaatccctgagataaaaactatcttgagtggtttcattattaggggctatttgggtaagtggactctggttatcaaaaccatcaccttggtgctggcagtgtcatctggcttgagcctgggcaaagagggccctctagtgcacgtggcttgctgctgtgggaacatcctgtgccactgcttcaacaaatacaggaagaatgaagccaagcgcagagaggtcttgtcggctgcagcagcagctggtgtatctgtagcctttggagcacctataggtggagtattattcagccttgaagaggtcagctactattttcccctcaaaacattgtggcgttcattctttgctgccttggtggcagcattcactctacgctccatcaatccatttgggaacagccgcctggtactattttatgtggagtttcacaccccatggcatctctttgagctcgtgccattcattctgctgggcatatttggtggtctgtggggagcactgtttatccgcacaaacattgcctggtgtcggaagcgaaagaccacccagttgggcaagtatcctgttatagaggtactcgtcgtgacagccatcactgccatcctggctttccccaatgaatacactcggatgagcacaagtgagctcatttctgagctgtttaatgactgtggccttctggactcctccaagctctgtgattatgagaaccgtttcaacacaagcaaagggggtgaactgcctgacagaccggctggcgtgggagtctacagtgcaatgtggcagctggctttaacactcatactgaaaattgtcattactatattcacctttggcatgaagatcccttctggcctctttatccctagcatggctgttggtgctatagcaggtcgacttctaggagtaggaatggaacagctggcttattaccaccaggaatggaccgtcttcaatagctggtgtagtcagggagctgattgcatcacccccggcctttatgcaatggttggggctgcagcctgcttaggtggggtgactcggatgactgtttctcttgttgtcataatgtttgaactgactggtggcttagaatacatcgtgcctctgatggctgcagccatgacaagcaagtgggtggcagatgctcttgggcgggagggcatctatgatgcccacatccgtctcaatggatacccctttcttgaagccaaagaagagtttgctcataagaccctggcaatggatgtgatgaaaccccggagaaatgatcctttgttgactgtccttactcaggacagtatgactgtggaagatgtagagaccataatcagtgaaaccacttacagtggcttcccagtggtggtatcccgggagtcccaaagacttgtgggctttgtcctccgaagagatctcattatttcaattgaaaatgctcgaaagaaacaggatggggttgttagcacttccatcatttatttcacggagcattctcctccattgccaccatacactccacccactctaaagcttcggaacatcctcgatctcagccccttcactgtgactgaccttacacccatggagatcgtagtggatattttccgaaagctgggactgcggcagtgcctggttacacacaacgggcgattgcttggaatcattaccaaaaaggatgtgttaaagcatatagcacagatggcgaaccaagatcctgattccattctcttcaactagaatcatagagttctggatgtaaagcgggaaggacattacagaccatggatatgttgtattaactgggtacccaaaacacattttccatatttggatggtgaagtcacattagtgtgttgtctctttcctacaagttaaccagttgcactacataatctctggaaattaattttctctttaggagaaattatagttaggcttccatgatgttacattaggaagatatcatgaaagaataaataagattgctatggtttaattatatttgctttttaaaagatttttttaacttaaaaagtagttagccaatatgcaatcactgaaaactatgcaagagaaattccaaccgtcctgacctataacctgtaggaaaccgacgaaaaagtcactcttttgggatctaactgttgttactggaagacgaagtgtaaactaaggggctttgcttttcaaaccagagaaaggaaagccagaaggaaaagagtaatggtattttctagactgtgaagattcagttcaaatgttatccttgttcctgttacaatatttagcattattagtttgttatgtgtgtatgtttatgttaattttaatttctgattataagacaatgctgctttggttaatctcttctaaatgaattta

SEQ ID NO: 117362 - DNA, 10108 bp, Homo sapiens
  Payload ID: 2913
  Gene Symbol: CLCN5
  Gene Name: chloride channel, voltage-sensitive 5
  Uniprot ID: P51795
  ENST ID: ENST00000376088
  CDS Start-End: 642-3092
gtcacatgagccgcgcgcccgcttcgctccccctcctccccggctgggctgtgtgaatgaagctctgccggctacgtggggcgctcactcaacttggtgtcctggacgccagagccgaccgagcgcgctgcccaccggcggcggacacgggctccgccgctccggacctcggcgacagagcaaatcagttgcctggagttcccagtgaagttgtacctgtgcccgtgcgataacgtcagtggaagctgccccgagtaagtgagggaaatctagaagtttggagcataaaaaaccagcacgaatcaactttacataaacttcatacatttattagcaactgctcgggtttaacttcagggatgttaaatttcgcctagtcccacgggacgatgatcattacttcttaactgcacgcgaaataggagaagaaaaaaggcaaatcaaaacagactgtcccaggtctcagagaagtcatcggagcgctttttcctgctgaattcaccctaggagtttgtttggggctttagccccttggagaaaacagggccacatagctgcctttctatcaagtctccctacaaaactgagaggctctgggaaactcagcctgtgaccccagcgtgggtgaagataggatcaagatggccatgtggcagggtgccatggataacagaggctttcagcaggggagttttagtagcttccagaacagctccagtgatgaagacctgatggacattccagcaaccgctatggatttctccatgagagatgatgttcctcccttagaccgagaagtaggagaggacaagtcgtacaatggtggaggaataggttcttcaaataggatcatggacttcttggaggagccaatccctggtgtagggacctatgatgatttcaatacaattgattgggtgagagagaagtctcgagaccgggataggcaccgagagattaccaataaaagcaaagagtcaacatgggccttaattcacagtgtgagtgatgctttttccggctggttgttgatgctccttattgggcttttatcaggttcgttagctggtttgatagacatctctgctcattggatgacagacttaaaagaaggtatatgcacagggggattctggtttaaccatgaacattgttgctggaactctgagcatgtcacctttgaagagagagacaaatgtccagagtggaatagttggtcccagcttatcatcagcacagatgagggagcctttgcctacatagtcaattatttcatgtacgtcctctgggctctcctatttgccttccttgccgtatctcttgtcaaggtgtttgcgccttatgcctgtggctctggaatccctgagataaaaactatcttgagtggtttcattattaggggctatttgggtaagtggactctggttatcaaaaccatcaccttggtgctggcagtgtcatctggcttgagcctgggcaaagagggccctctagtgcacgtggcttgctgctgtgggaacatcctgtgccactgcttcaacaaatacaggaagaatgaagccaagcgcagagaggtcttgtcggctgcagcagcagctggtgtatctgtagcctttggagcacctataggtggagtattattcagccttgaagaggtcagctactattttcccctcaaaacattgtggcgttcattctttgctgccttggtggcagcattcactctacgctccatcaatccatttgggaacagccgcctggtactattttatgtggagtttcacaccccatggcatctctttgagctcgtgccattcattctgctgggcatatttggtggtctgtggggagcactgtttatccgcacaaacattgcctggtgtcggaagcgaaagaccacccagttgggcaagtatcctgttatagaggtactcgtcgtgacagccatcactgccatcctggctttccccaatgaatacactcggatgagcacaagtgagctcatttctgagctgtttaatgactgtggccttctggactcctccaagctctgtgattatgagaaccgtttcaacacaagcaaagggggtgaactgcctgacagaccggctggcgtgggagtctacagtgcaatgtggcagctggctttaacactcatactgaaaattgtcattactatattcacctttggcatgaagatcccttctggcctctttatccctagcatggctgttggtgctatagcaggtcgacttctaggagtaggaatggaacagctggcttattaccaccaggaatggaccgtcttcaatagctggtgtagtcagggagctgattgcatcacccccggcctttatgcaatggttggggctgcagcctgcttaggtggggtgactcggatgactgtttctcttgttgtcataatgtttgaactgactggtggcttagaatacatcgtgcctctgatggctgcagccatgacaagcaagtgggtggcagatgctcttgggcgggagggcatctatgatgcccacatccgtctcaatggatacccctttcttgaagccaaagaagagtttgctcataagaccctggcaatggatgtgatgaaaccccggagaaatgatcctttgttgactgtccttactcaggacagtatgactgtggaagatgtagagaccataatcagtgaaaccacttacagtggcttcccagtggtggtatcccgggagtcccaaagacttgtgggctttgtcctccgaagagatctcattatttcaattgaaaatgctcgaaagaaacaggatggggttgttagcacttccatcatttatttcacggagcattctcctccattgccaccatacactccacccactctaaagcttcggaacatcctcgatctcagccccttcactgtgactgaccttacacccatggagatcgtagtggatattttccgaaagctgggactgcggcagtgcctggttacacacaacgggcgattgcttggaatcattaccaaaaaggatgtgttaaagcatatagcacagatggcgaaccaagatcctgattccattctcttcaactagaatcatagagttctggatgtaaagcgggaaggacattacagaccatggatatgttgtattaactgggtacccaaaacacattttccatatttggatggtgaagtcacattagtgtgttgtctctttcctacaagttaaccagttgcactacataatctctggaaattaattttctctttaggagaaattatagttaggcttccatgatgttacattaggaagatatcatgaaagaataaataagattgctatggtttaattatatttgctttttaaaagatttttttaacttaaaaagtagttagccaatatgcaatcactgaaaactatgcaagagaaattccaaccgtcctgacctataacctgtaggaaaccgacgaaaaagtcactcttttgggatctaactgttgttactggaagacgaagtgtaaactaaggggctttgcttttcaaaccagagaaaggaaagccagaaggaaaagagtaatggtattttctagactgtgaagattcagttcaaatgttatccttgttcctgttacaatatttagcattattagtttgttatgtgtgtatgtttatgttaattttaatttctgattataagacaatgctgctttggttaatctcttctaaatgaatttagagagattgacttttatagcttgcttgttgctggtactcttttgaagtgcacaaagataagttatagagctttctccttgtctgcaaaaacggtaattttccaggtggcatttgttagctggtagacaaggactttgccgtgaatttgttagtagcaaggaatgatttcttccagcttccttgaaatgaataattagtaaacttctaagcaaagtcaatgactaggagtttcacatgtttgtgaggtcctaactaattctcttacccagatgccacctccatgaatgatggtgctttaggcttctggaatatgtaaaaacagcaaagggaaccaagtctagactgcatactggtaaaccagggaagactcagaactgcatatgcatcctcatgcattcctttgtaaagaccaccagtactaaaataactggacactcattgtacctcccagcgataagtatgtgtaacaggccagtgtgttgtccccatgatcatgaattaggcttgggatgcttccaaatatattcaaggtgttggaacaggataggcagctgtgactccctcaagagtccttagaattctaaataaaatgcagagccatcctaagacacaggggtatggacaaggcctggtgacaccaaaggtgcttgtatccaattgaaaaggtgcctgtctcaatttcataccacctttattgcagttaaaaaaaaatcacactctggggacacttggtggaattacagagccaccatcatcattccaaccactatttcattttctgtagttttacctgtgtgcaattactccccctccattctgttccacttcttactccttagtaccaaatcctctgtttgggattgagcgctgctcctggttaatcattcctactacaaaaaaaaataactcccagggctagttaaattgtaaaccaaggctcagcagtctcacaacacatggaccagaggtgacacacagccatttcctttgccatgtggcccagttgctgctgccatgcctccatttccacactggatgcctacggcagtgagatttcactgccggggtaagagttcagcctggatgattttatagctctgttcctagcacttctcatcatccttccagcccagaatcagcggtcattctgcatattcccaccaaccctctacccccaaacacttcagtgtacctcattttaagagttgctgatccctgattctaggacgtttttacccatagttcttgtctttccaaaatctgaaattcttttttttgctcagaactgggtagccaagggttattttatttttatctttaaaataatcaaggcagtcgctagagtttctccttgtgaatagatcactctagcattttaatgaaaaagaaaaaaatctttctggggtatgttgtatcatagtaatggctcagtaaccacatattttgtcctttccatgtcactgattccttcatatgagactatttggcttgactaccctgtatattgtgtagaaatcaaagttcttatctgtacatttctggtccaatacctgtcttattagttgtccttccccactaaagtttgcaaaacagaaaatgttactatttctggtatttaatgacaatgaaaggtttggtcatatttcatagtgcagtagcgataaggagggtgtctcaagtttgcttttgtgtttcttctaggctttgttcttgattttagacagatgagccagtgttaaggtgctacttcagagaataaattagagaaatcagataacactgtgccaaggtatactttgtagatgctaagcaccgattggccctccagagaatgacaatatccctttgatacctcactcctgatcaatctcattcattaacctcagcttctcaggaatccttgtagcttgtatgctagaagtagctatggtatatggtatccactatatgtccagtcctatggtttggctcaaaggttggctaattgcagctagagctctcaactgctagctcagcaccttgacatttgaagtttcttgtcttgaggagaaggaaaatgttctttctgccattgccactttaacagttggacatgcttaagcaacaaatacagccagtatagggaggactgtcagtagcatcaaatggccacatacctcaatggcaaaagactagatggtttgtgatttaaaaattaatgagtcgagatgagactattttggtattaaatgagaaaattgcctaacacaagggaagggtttacaaaagaatgccaattagtgtttcaacagagttaggattttccaagtaagagtagctggtagccatccagccataaaaggaacgagagtctatagatttgtaaaagtaaaactgctatattttgtatcttcaaatcttcaatataaagaatttaaagaacctgaaacagttaatgcatgattcgttatattggagggaaaaagcaggggactgataatacaaaataatggcaactttaaagatcatttctacgtggatgtttggttagaaacatattccaatgctctcctctttctctggccacagcatcctggctcagcccagctgtggagtagaggtggtaagatccacagaacagatatcctctggtagataagctgacattgatgatactttgaatttaccagctggtgaagcaaacgattaatttgtgattgaactgaaaagcagttgaattgttttgacaccagaggctgaatctaaaccctttacaggaagagcagagcatactatacatttcttagcagatcttcaattctgtttgaacatgatgaagtaaccagggtttagtgagatctaaggccgtgaagtaattcacaaccaagatcttatgaacgcattcagatgtgaggggggcaaatatgttttcaaaaacttagtgtgcaatagagtccattatagaaattaaccactgctatatgttttaagtagttcaatcacctgttgtggttcagtcttgattattgtttattttgttaggtgataagtaggaagatgcacttgttatcccacactatctcttgttttgttttgttttgtttttaaataatgaacagtgcaatctttgaacttgagtttttaataatgatagcaaagacaatggtgagaacttgaaacagccagcatattttatattgccaaagtacttactgatgactgaccacactgtcttgtgaggaactgggtcccctgcactggatcagagccaaatgcaagccacccatcagttcagaggaagcaggaaaacatcttttgggtggtgcatagaacattgagctcttaaaaacccggagaaaaattaggaatttagaaagtaagtgggaggtagaatattgagtccttttttaaaaaaaagaattgatgtctaaatatgtagtctgaacttaagtgtcctaaaaccttgttttttgtttttttgttttttgaggagtcgtcttgctctatcaccaggtgggagtgcagtggcacaatctcggctcactgtaacctctgcctcctgcctcccgggtccaagcaattcccctgcctcagtctcccaagtaggtgggactacaggcgcacaccaccatgcccagctaacttttgtatttttagtagagacggggtttcaccatgttggccaggatggtctcgatctcttgacctcgtgatccacccatctcggcctcccaaagtgctgggattataggtgtgagccaccgcacccagccaaaccttgatttttttagccacctctgggattgcctgggttccctttggagaagaaactaaaagttatggccatagaaaaagccctggtaagaaaatatttgaatggtgtaagatggtggaaggaaagccatcccacacccctacaacatatgttctggcatttataaactgcttgattgtgtgcctcaaggggagaaaaagtcaagcaatgcttcaaaggccaggctttctaagcaaatgagtggttcaaagcagtgtttggctcaagggcagtctggttttatggatagggccgacccaagacatctgctcatgaagaaatgtggcatctgttgccatttcctaaactataaggtttagatagattgtcttgaattttgatagcaaatttttttaaatttatatttctgcctcctcgtacatccttatatatggaaaaaaaagtaagagttcctcagatcagagctcagtagctgtgtcaatttgaagttcaatcagtgtagttgtcctggggtgatcgctgactctgctctgtttcatatttcagttgcttgctccaaggagagaatttctgagaacaatgggtgttagcaactttaagttactccccaaacgtttgctggccacattctcatttctaaacatctggatctgggtaaaggtttgaatagatgtagggaacaaaattggtttttccatggtgtagtctaattttgccaaatcacccaagaaagaaagtatatgacgtgtggagtttgcatttcttggatgggacctatcgggtcacccagcccagtcttacagtcataaattcctacctcttagttcctgccaaagggccttcagcctctgtgtgcacacttattgaatgaatgctttgcctaaagtttggccttttgaagaaaaacagcatgtgataatataaaaatatgagagtttaaaaaaaaaaaagatctctgcctctcttctctctgcctcgtcccaccttgctgtctgtctcattgtctttctctcccctcaccatgcgctgaattcagatttctctttcttttattataggcatgttgttttgaatgtggactttgtgggagggagaggattgttctgagaacagaaactggaagatacgtctgagttgatgggaccaacagggctttgctcctctgtgagggccaaagccattgatacttgtcgggggtgatgagggctttagcatctcaaggcagacatatgaagtatttactgctaaactatattacttactagtacaaatctgttggaattcaggggcagtctaagatttggtgagtgaaatgccatctggcaaaatcgagaagagagtgtggcctgagaggggaatgttcagcctcactgtcacattaagggtacctcaaaatacatggtccttccagtgtgttccttttccttcctccatttcactttgtcccctcttcttcctttctctcccattttcctggctttttagcactcagcttttttttataagtatgtatttactttttattatatatttggtcctttgggactttgtgatgattaagaatttattccattcaggattttaaaatgatgtgtttaatattttgttctcttaaactcttttgaagctatgctgctaaccaggtataggccagaaaggaggtggcccagtcagtaccttgctcacgtcagctaagggggacagtgatgtcatgtgggtgactcttcttcatttgaccaaggccagcctcctgttcttacctctgcccattcatttctggctatgggaaaactaccacctgttgagtgagccaatgaggccaggaagatcagaggggctgggttccggcccatgggccactatttgaatttctctgtagtaagctctttgtagggctggctccaactgcagtagccaaagaaaacctgtctgactcgacattttaatgcctgagagttggtgaaagttcagctgaagctaatgtctagacatcagcagtaactaggcatccagaaagtagcttcaaccaaagctaatagagcccaagtttccgcaggaagtttggtgctgagctgtccagagcagttgtttatctgagtgttgctagcccttagccatgctttcttagctttattctcgcctgttcctaggcatagcctgaaccagagctatggctcactgctcgctttattctactccctagtcatgcggaacaacatagtctaaaaaggaagatgtggactggggagttaggagacctgatttctattccctatgcttctactaactagcctcgagatcttaaccgctctgtgcctcagtgttcccatctgcaaaatggggatagtgttaattgccctacctacctcacagggttgttgtgaggataaactgagacaatgaattcaaagcaagttgacaagtaagtgctatgcaaattgtaagaaatggaaacaatcatgttaaaagcaatggaatggacattggcagaagggttaatggattgtccagccctttctctgtgtggcttaaacccaggtcgccattgctttatacattttcacttagcacagatttgtaattatgcatgtaataaagcacagccttatccaccctg

SEQ ID NO: 117363 - DNA, 3046 bp, Homo sapiens
  Payload ID: 2913
  Gene Symbol: CLCN5
  Gene Name: chloride channel, voltage-sensitive 5
  Uniprot ID: P51795
  ENST ID: ENST00000376091
  CDS Start-End: 333-2783
gtgtgaatgaagctctgccggctacgtggggcgctcactcaacttggtgtcctggacgccagagccgaccgagcgcgctgcccaccggcggcggacacgggctccgccgctccggacctcggcgacagagcaaatcagttgcctggagttcccagtgaagttgtacctgtgcccgtgcgataacgtcagtggaagctgccccgagtttggggctttagccccttggagaaaacagggccacatagctgcctttctatcaagtctccctacaaaactgagaggctctgggaaactcagcctgtgaccccagcgtgggtgaagataggatcaagatggccatgtggcagggtgccatggataacagaggctttcagcaggggagttttagtagcttccagaacagctccagtgatgaagacctgatggacattccagcaaccgctatggatttctccatgagagatgatgttcctcccttagaccgagaagtaggagaggacaagtcgtacaatggtggaggaataggttcttcaaataggatcatggacttcttggaggagccaatccctggtgtagggacctatgatgatttcaatacaattgattgggtgagagagaagtctcgagaccgggataggcaccgagagattaccaataaaagcaaagagtcaacatgggccttaattcacagtgtgagtgatgctttttccggctggttgttgatgctccttattgggcttttatcaggttcgttagctggtttgatagacatctctgctcattggatgacagacttaaaagaaggtatatgcacagggggattctggtttaaccatgaacattgttgctggaactctgagcatgtcacctttgaagagagagacaaatgtccagagtggaatagttggtcccagcttatcatcagcacagatgagggagcctttgcctacatagtcaattatttcatgtacgtcctctgggctctcctatttgccttccttgccgtatctcttgtcaaggtgtttgcgccttatgcctgtggctctggaatccctgagataaaaactatcttgagtggtttcattattaggggctatttgggtaagtggactctggttatcaaaaccatcaccttggtgctggcagtgtcatctggcttgagcctgggcaaagagggccctctagtgcacgtggcttgctgctgtgggaacatcctgtgccactgcttcaacaaatacaggaagaatgaagccaagcgcagagaggtcttgtcggctgcagcagcagctggtgtatctgtagcctttggagcacctataggtggagtattattcagccttgaagaggtcagctactattttcccctcaaaacattgtggcgttcattctttgctgccttggtggcagcattcactctacgctccatcaatccatttgggaacagccgcctggtactattttatgtggagtttcacaccccatggcatctctttgagctcgtgccattcattctgctgggcatatttggtggtctgtggggagcactgtttatccgcacaaacattgcctggtgtcggaagcgaaagaccacccagttgggcaagtatcctgttatagaggtactcgtcgtgacagccatcactgccatcctggctttccccaatgaatacactcggatgagcacaagtgagctcatttctgagctgtttaatgactgtggccttctggactcctccaagctctgtgattatgagaaccgtttcaacacaagcaaagggggtgaactgcctgacagaccggctggcgtgggagtctacagtgcaatgtggcagctggctttaacactcatactgaaaattgtcattactatattcacctttggcatgaagatcccttctggcctctttatccctagcatggctgttggtgctatagcaggtcgacttctaggagtaggaatggaacagctggcttattaccaccaggaatggaccgtcttcaatagctggtgtagtcagggagctgattgcatcacccccggcctttatgcaatggttggggctgcagcctgcttaggtggggtgactcggatgactgtttctcttgttgtcataatgtttgaactgactggtggcttagaatacatcgtgcctctgatggctgcagccatgacaagcaagtgggtggcagatgctcttgggcgggagggcatctatgatgcccacatccgtctcaatggatacccctttcttgaagccaaagaagagtttgctcataagaccctggcaatggatgtgatgaaaccccggagaaatgatcctttgttgactgtccttactcaggacagtatgactgtggaagatgtagagaccataatcagtgaaaccacttacagtggcttcccagtggtggtatcccgggagtcccaaagacttgtgggctttgtcctccgaagagatctcattatttcaattgaaaatgctcgaaagaaacaggatggggttgttagcacttccatcatttatttcacggagcattctcctccattgccaccatacactccacccactctaaagcttcggaacatcctcgatctcagccccttcactgtgactgaccttacacccatggagatcgtagtggatattttccgaaagctgggactgcggcagtgcctggttacacacaacgggcgattgcttggaatcattaccaaaaaggatgtgttaaagcatatagcacagatggcgaaccaagatcctgattccattctcttcaactagaatcatagagttctggatgtaaagcgggaaggacattacagaccatggatatgttgtattaactgggtacccaaaacacattttccatatttggatggtgaagtcacattagtgtgttgtctctttcctacaagttaaccagttgcactacataatctctggaaattaattttctctttaggagaaattatagttaggcttccatgatgttacattaggaagatatcatgaaagaataaataagattgctatggtttaattat

SEQ ID NO: 117364 - DNA, 2660 bp, Homo sapiens
  Payload ID: 2913
  Gene Symbol: CLCN5
  Gene Name: chloride channel, voltage-sensitive 5
  Uniprot ID: P51795
  ENST ID: ENST00000376108
  CDS Start-End: 233-2473
gggaacactggtagttctttaggtggcgtttgttgctgtgaaaggcagagaatgcagcaagtgcccttctaaagcacttcagactggggcttcttttgtaaaagctccccaacctgaatgaccaaatgcgggctgccaaggttatttcttccttgaggcagaaaaaaagaaaactgtgattgaagaggacaagtcgtacaatggtggaggaataggttcttcaaataggatcatggacttcttggaggagccaatccctggtgtagggacctatgatgatttcaatacaattgattgggtgagagagaagtctcgagaccgggataggcaccgagagattaccaataaaagcaaagagtcaacatgggccttaattcacagtgtgagtgatgctttttccggctggttgttgatgctccttattgggcttttatcaggttcgttagctggtttgatagacatctctgctcattggatgacagacttaaaagaaggtatatgcacagggggattctggtttaaccatgaacattgttgctggaactctgagcatgtcacctttgaagagagagacaaatgtccagagtggaatagttggtcccagcttatcatcagcacagatgagggagcctttgcctacatagtcaattatttcatgtacgtcctctgggctctcctatttgccttccttgccgtatctcttgtcaaggtgtttgcgccttatgcctgtggctctggaatccctgagataaaaactatcttgagtggtttcattattaggggctatttgggtaagtggactctggttatcaaaaccatcaccttggtgctggcagtgtcatctggcttgagcctgggcaaagagggccctctagtgcacgtggcttgctgctgtgggaacatcctgtgccactgcttcaacaaatacaggaagaatgaagccaagcgcagagaggtcttgtcggctgcagcagcagctggtgtatctgtagcctttggagcacctataggtggagtattattcagccttgaagaggtcagctactattttcccctcaaaacattgtggcgttcattctttgctgccttggtggcagcattcactctacgctccatcaatccatttgggaacagccgcctggtactattttatgtggagtttcacaccccatggcatctctttgagctcgtgccattcattctgctgggcatatttggtggtctgtggggagcactgtttatccgcacaaacattgcctggtgtcggaagcgaaagaccacccagttgggcaagtatcctgttatagaggtactcgtcgtgacagccatcactgccatcctggctttccccaatgaatacactcggatgagcacaagtgagctcatttctgagctgtttaatgactgtggccttctggactcctccaagctctgtgattatgagaaccgtttcaacacaagcaaagggggtgaactgcctgacagaccggctggcgtgggagtctacagtgcaatgtggcagctggctttaacactcatactgaaaattgtcattactatattcacctttggcatgaagatcccttctggcctctttatccctagcatggctgttggtgctatagcaggtcgacttctaggagtaggaatggaacagctggcttattaccaccaggaatggaccgtcttcaatagctggtgtagtcagggagctgattgcatcacccccggcctttatgcaatggttggggctgcagcctgcttaggtggggtgactcggatgactgtttctcttgttgtcataatgtttgaactgactggtggcttagaatacatcgtgcctctgatggctgcagccatgacaagcaagtgggtggcagatgctcttgggcgggagggcatctatgatgcccacatccgtctcaatggatacccctttcttgaagccaaagaagagtttgctcataagaccctggcaatggatgtgatgaaaccccggagaaatgatcctttgttgactgtccttactcaggacagtatgactgtggaagatgtagagaccataatcagtgaaaccacttacagtggcttcccagtggtggtatcccgggagtcccaaagacttgtgggctttgtcctccgaagagatctcattatttcaattgaaaatgctcgaaagaaacaggatggggttgttagcacttccatcatttatttcacggagcattctcctccattgccaccatacactccacccactctaaagcttcggaacatcctcgatctcagccccttcactgtgactgaccttacacccatggagatcgtagtggatattttccgaaagctgggactgcggcagtgcctggttacacacaacgggcgattgcttggaatcattaccaaaaaggatgtgttaaagcatatagcacagatggcgaaccaagatcctgattccattctcttcaactagaatcatagagttctggatgtaaagcgggaaggacattacagaccatggatatgttgtattaactgggtacccaaaacacattttccatatttggatggtgaagtcacattagtgtgttgtctctttcctacaagttaaccagttgcactacataatctctggaaattaattttctctttaggagaaa

SEQ ID NO: 117365 - DNA, 449 bp, Homo sapiens
  Payload ID: 2913
  Gene Symbol: CLCN5
  Gene Name: chloride channel, voltage-sensitive 5
  ENST ID: ENST00000482218
  CDS Start-End: 208-402
cagagcaaatcagttgcctggagttcccagtgaagttgtacctgtgcccgtgcgataacgtcagtggaagctgccccgagtttggggctttagccccttggagaaaacagggccacatagctgcctttctatcaagtctccctacaaaactgagaggctctgggaaactcagcctgtgaccccagcgtgggtgaagataggatcaagatggccatgtggcagggtgccatggataacagaggctttcagcaggggagttttagtagcttccagaacagctccagtgatgaagacctgatggacattccagcaaccgctatggatttctccatgagagatgatgttcctcccttagaccgagaagtaggaggtatcattattggtgatgataatttatcttaattttttaaaatttatgtacaataaaattttatttttttttaatttta

SEQ ID NO: 117366 - DNA, 5583 bp, Homo sapiens
  Payload ID: 2914
  Gene Symbol: CLCN6
  Gene Name: chloride channel, voltage-sensitive 6
  Uniprot ID: P51797
  ENST ID: ENST00000346436
  CDS Start-End: 53-2662
ctggctgggagggggttggtagaggggtccagagtggcagtaaaggaggaagatggcggggtgcagggggtctctgtgctgctgctgcaggtggtgctgctgctgcggtgagcgtgagacccgcacccccgaggagctgaccatccttggagaaacacaggaggaggaggatgagattcttccaaggaaagactatgagagtttggattatgatcgctgtatcaatgacccttacctggaagttttggagaccatggataataagaaaggtcgaagatatgaggcggtgaagtggatggtggtgtttgccattggagtctgcactggcctggtgggtctctttgtggacttttttgtgcgactcttcacccaactcaagttcggagtggtacagacatcggtggaggagtgcagccagaaaggctgcctcgctctgtctctccttgaactcctgggttttaacctcacctttgtcttcctggcaagcctccttgttctcattgagccggtggcagcaggttccgggatacccgaggtcaaatgctatctgaatggcgtaaaggtgccaggaatcgtccgtctccggaccctgctctgcaaggtccttggagtgctgttcagtgtggctggagggctcttcgtggagaaggaaggccccatgatccacagtggttcggtggtgggagctggcctccctcagtttcagagcatctccttacggaagatccagtttaacttcccctatttccgaagcgacagagacaagagagactttgtatcagcaggagcggctgctggagttgctgcagctttcggggcgccaatcgggggtaccttgttcagtctagaggagggttcgtccttctggaaccaagggctcacgtggaaagtgctcttttgttccatgtctgccaccttcaccctcaacttcttccgttctgggattcagtttggaagctggggttccttccagctccctggattgctgaactttggcgagtttaagtgctctgactctgataaaaaatgtcatctctggacagctatggatttgggtttcttcgtcgtgatgggggtcattgggggcctcctgggagccacattcaactgtctgaacaagaggcttgcaaagtaccgtatgcgaaacgtgcacccgaaacctaagctcgtcagagtcttagagagcctccttgtgtctctggtaaccaccgtggtggtgtttgtggcctcgatggtgttaggagaatgccgacagatgtcctcttcgagtcaaatcggtaatgactcattccagctccaggtcacagaagatgtgaattcaagtatcaagacatttttttgtcccaatgatacctacaatgacatggccacactcttcttcaacccgcaggagtctgccatcctccagctcttccaccaggatggtactttcagccccgtcactctggccttgttcttcgttctctatttcttgcttgcatgttggacttacggcatttctgttccaagtggcctttttgtgccttctctgctgtgtggagctgcttttggacgtttagttgccaatgtcctaaaaagctacattggattgggccacatctattcggggacctttgccctgattggtgcagcggctttcttgggcggggtggtccgcatgaccatcagcctcacggtcatcctgatcgagtccaccaatgagatcacctacgggctccccatcatggtcacactgatggtggccaaatggacaggggactttttcaataagggcatttatgatatccacgtgggcctgcgaggcgtgccgcttctggaatgggagacagaggtggaaatggacaagctgagagccagcgacatcatggagcccaacctgacctacgtctacccgcacacccgcatccagtctctggtgagcatcctgcgcaccacggtccaccatgccttcccggtggtcacagagaaccgcggtaacgagaaggagttcatgaagggcaaccagctcatcagcaacaacatcaagttcaagaaatccagcatcctcacccgggctggcgagcagcgcaaacggagccagtccatgaagtcctacccatccagcgagctacggaacatgtgtgatgagcacatcgcctctgaggagccagccgagaaggaggacctcctgcagcagatgctggaaaggagatacactccctaccccaacctataccctgaccagtccccaagtgaagactggaccatggaggagcggttccgccctctgaccttccacggcctgatccttcggtcgcagcttgtcaccctgcttgtccgaggagtttgttactctgaaagccagtcgagcgccagccagccgcgcctctcctatgccgagatggccgaggactacccgcggtaccccgacatccacgacctggacctgacgctgctcaacccgcgcatgatcgtggatgtcaccccatacatgaacccttcgcctttcaccgtctcgcccaacacccacgtctcccaagtcttcaacctgttcagaacgatgggcctgcgccacctgcccgtggtgaacgctgtgggagagatcgtggggatcatcacacggcacaacctcacctatgaatttctgcaggcccggctgaggcagcactaccagaccatctgacagcccagcccaccctctcctggtgctgcctggggaggcaaatcatgctcactccggcgggcacagctggctggggctgttccggggcatggaagattcccagtcacccactcactcagaaagccgggagtcatcggacaccttgctggtcagaggtcctgggggtggttttgaaccatcagagcttggacttttctgacttccccagcaaggatcttcccacttcctgctccctgtgttcccaccctccagtgttggcacaggcccacccctggctccaccagagccagaagcagaggtagaatcaggcgggccccgggctgcactccgagcagtgttcctggccatctttgctactttcctagagaacccggctgttgccttaaatgtgtgagagggacttggccaaggcaaaagctggggagatgccagtgacaacatacagttcatgactaggtttaggaattgggcactgagaaaattctcaatatttcagagagtccttcccttatttgggactcttaacacggtatcctcgctagttggttttaagggaaacactctgctcctgggtgtgagcagaggctctggtcttgccctgtggtttgactctccttagaaccaccgcccaccagaaacataaaggattaaaatcacactaataacccctggatggtcaatctgataataggatcagatttacgtctaccctaattcttaacattgcagctttctctccatctgcagattattcccagtctcccagtaacacgtttctacccagatcctttttcatttccttaagttttgatctccgtcttcctgatgaagcaggcagagctcagaggatcttggcatcacccaccaaagttagctgaaagcagggcactcctggataaagcagcttcactcaactctggggaatgctaccattttttttccaaagtagaaaggaagcacttctgagccagtgaccactgaaaggtatgtgctatgataaagcagatggcctatttgaggaagagggtgtctgcccttcacaaacacctctctctcccctgcactagctgtcccaagcttacatacagaggcccttcaggagggcctcctgtgccgcagggagggtgcgtggggaagatgcttcctgccagcacgtgcctgaaggtttcacatgaagcatgggaagcgcaccctgtcgttcagtgacgtcattcttctccaggctggcccgccccctctgactaggcacccaaagtgagcatctgggcattgggcattcatgcttatcttcccccaccttctacatggtattagtcccagcaggcatccctggggcagacgtgctttggctcaagatggccttcatttacgtttagttttttttaaaaccgtggaggttgcccacgggcctcggcacctggccctggcagcacagctctcaggcccagccctgggcgacctccttggccaagtctgcctttcaccctggggtgagcatcagtcctggctctgctggtccagatcttgcgctcagcacactctagggaataattccactccagagatggggctgcttcaaggtcttttctagctgattgtggcccctccattttccccattttcttatctccctgaccaaaattgctttgacttctaaatgtttctgcttcccagaatgcacctgacttatgaaatggggataatactcccaggaaatagcgcaggacatcacaaggaccaaaaaggcaattcttatttaaatgttactatttggccagctgctgctgtgttttatggcagtgttcagagcttgatcacgttatttcttccttttattaagaaggaagccaattgtccaagtcaggagaatggtgtgatcacctgtcacagacactttgtcccctctccccgccccttcctggagctggcagagctaacgccctgcaggaggaccccggcctctcgagggctggatcagcagccgcctgccctgaggctgccccggtgaatgttattggaattcatccctcgtgcacatcctgttgtgtttaagtcaccagatattttgttcccatcagtttagcccagagatagacagtagaatgcaaatacctccctcccctaaactgactggacggctgccaaggaggccccaaacccaggccccatgcaaaggcacgtggtttccttttctcctctctctgcatctgcgctttccagataagcccaaagacagcaacttctccactcatgacaaatcaactgtgaccctcgctccttccatttctgtccattagaaaccagccttttcagcatctcacccattagcagccccatcacccagtgatcagtcgcctcagtaaagcagatctgtggatggggagcctacgggtggtaagaagtggtgttttgtgtttcatctccagcttggtgttccatggcccctaggcgaggtgatcagggagtggggccaatgggcccccggccctggctttgggaccttgtgctgagggatgatttgctcctgaccttgattaacttaacagttcccagctggaagggacactttcaggacccagtccactgtatggcatttgtgatgcagaattatgcactgacatgaccctgggtgacaggaaagcctttcgagaggcccaaggtggcctcgccagccctgcagtattgatgtgcagtattgcaccacagctctgcggaccttggccattgccgcagtcgcagcttccttttttctgtttgcactgtttgtttgtatgatgttagctaattccactgtgtatataaattgtattttttttaatttgtaaaatgctatttttatttgaacctttggaacttgggagttctcattgtaaccctaacatgtgagaataaaatgtcttctgtctcctctgtctccttta

SEQ ID NO: 117367 - DNA, 5631 bp, Homo sapiens
  Payload ID: 2914
  Gene Symbol: CLCN6
  Gene Name: chloride channel, voltage-sensitive 6
  Uniprot ID: P51797
  ENST ID: ENST00000312413
  CDS Start-End: 168-2711
atcgtcatgtgacgcgagtcctcgccccacccgtctgcagccactcctggtctcagtcccagagctcgagagggccacgtgaccgtcccggggccagtcacgtgaggcgcagatcctggctgggagggggttggtagaggggtccagagtggcagtaaaggaggaagatggcggggtgcagggggtctctgtgctgctgctgcaggtggtgctgctgctgcggtgagcgtgagacccgcacccccgaggagctgaccatccttggagaaacacaggaggaggaggatgagattcttccaaggaaagactatgagaaaggtcgaagatatgaggcggtgaagtggatggtggtgtttgccattggagtctgcactggcctggtgggtctctttgtggacttttttgtgcgactcttcacccaactcaagttcggagtggtacagacatcggtggaggagtgcagccagaaaggctgcctcgctctgtctctccttgaactcctgggttttaacctcacctttgtcttcctggcaagcctccttgttctcattgagccggtggcagcaggttccgggatacccgaggtcaaatgctatctgaatggcgtaaaggtgccaggaatcgtccgtctccggaccctgctctgcaaggtccttggagtgctgttcagtgtggctggagggctcttcgtggagaaggaaggccccatgatccacagtggttcggtggtgggagctggcctccctcagtttcagagcatctccttacggaagatccagtttaacttcccctatttccgaagcgacagagacaagagagactttgtatcagcaggagcggctgctggagttgctgcagctttcggggcgccaatcgggggtaccttgttcagtctagaggagggttcgtccttctggaaccaagggctcacgtggaaagtgctcttttgttccatgtctgccaccttcaccctcaacttcttccgttctgggattcagtttggaagctggggttccttccagctccctggattgctgaactttggcgagtttaagtgctctgactctgataaaaaatgtcatctctggacagctatggatttgggtttcttcgtcgtgatgggggtcattgggggcctcctgggagccacattcaactgtctgaacaagaggcttgcaaagtaccgtatgcgaaacgtgcacccgaaacctaagctcgtcagagtcttagagagcctccttgtgtctctggtaaccaccgtggtggtgtttgtggcctcgatggtgttaggagaatgccgacagatgtcctcttcgagtcaaatcggtaatgactcattccagctccaggtcacagaagatgtgaattcaagtatcaagacatttttttgtcccaatgatacctacaatgacatggccacactcttcttcaacccgcaggagtctgccatcctccagctcttccaccaggatggtactttcagccccgtcactctggccttgttcttcgttctctatttcttgcttgcatgttggacttacggcatttctgttccaagtggcctttttgtgccttctctgctgtgtggagctgcttttggacgtttagttgccaatgtcctaaaaagctacattggattgggccacatctattcggggacctttgccctgattggtgcagcggctttcttgggcggggtggtccgcatgaccatcagcctcacggtcatcctgatcgagtccaccaatgagatcacctacgggctccccatcatggtcacactgatggtggccaaatggacaggggactttttcaataagggcatttatgatatccacgtgggcctgcgaggcgtgccgcttctggaatgggagacagaggtggaaatggacaagctgagagccagcgacatcatggagcccaacctgacctacgtctacccgcacacccgcatccagtctctggtgagcatcctgcgcaccacggtccaccatgccttcccggtggtcacagagaaccgcggtaacgagaaggagttcatgaagggcaaccagctcatcagcaacaacatcaagttcaagaaatccagcatcctcacccgggctggcgagcagcgcaaacggagccagtccatgaagtcctacccatccagcgagctacggaacatgtgtgatgagcacatcgcctctgaggagccagccgagaaggaggacctcctgcagcagatgctggaaaggagatacactccctaccccaacctataccctgaccagtccccaagtgaagactggaccatggaggagcggttccgccctctgaccttccacggcctgatccttcggtcgcagcttgtcaccctgcttgtccgaggagtttgttactctgaaagccagtcgagcgccagccagccgcgcctctcctatgccgagatggccgaggactacccgcggtaccccgacatccacgacctggacctgacgctgctcaacccgcgcatgatcgtggatgtcaccccatacatgaacccttcgcctttcaccgtctcgcccaacacccacgtctcccaagtcttcaacctgttcagaacgatgggcctgcgccacctgcccgtggtgaacgctgtgggagagatcgtggggatcatcacacggcacaacctcacctatgaatttctgcaggcccggctgaggcagcactaccagaccatctgacagcccagcccaccctctcctggtgctgcctggggaggcaaatcatgctcactccggcgggcacagctggctggggctgttccggggcatggaagattcccagtcacccactcactcagaaagccgggagtcatcggacaccttgctggtcagaggtcctgggggtggttttgaaccatcagagcttggacttttctgacttccccagcaaggatcttcccacttcctgctccctgtgttcccaccctccagtgttggcacaggcccacccctggctccaccagagccagaagcagaggtagaatcaggcgggccccgggctgcactccgagcagtgttcctggccatctttgctactttcctagagaacccggctgttgccttaaatgtgtgagagggacttggccaaggcaaaagctggggagatgccagtgacaacatacagttcatgactaggtttaggaattgggcactgagaaaattctcaatatttcagagagtccttcccttatttgggactcttaacacggtatcctcgctagttggttttaagggaaacactctgctcctgggtgtgagcagaggctctggtcttgccctgtggtttgactctccttagaaccaccgcccaccagaaacataaaggattaaaatcacactaataacccctggatggtcaatctgataataggatcagatttacgtctaccctaattcttaacattgcagctttctctccatctgcagattattcccagtctcccagtaacacgtttctacccagatcctttttcatttccttaagttttgatctccgtcttcctgatgaagcaggcagagctcagaggatcttggcatcacccaccaaagttagctgaaagcagggcactcctggataaagcagcttcactcaactctggggaatgctaccattttttttccaaagtagaaaggaagcacttctgagccagtgaccactgaaaggtatgtgctatgataaagcagatggcctatttgaggaagagggtgtctgcccttcacaaacacctctctctcccctgcactagctgtcccaagcttacatacagaggcccttcaggagggcctcctgtgccgcagggagggtgcgtggggaagatgcttcctgccagcacgtgcctgaaggtttcacatgaagcatgggaagcgcaccctgtcgttcagtgacgtcattcttctccaggctggcccgccccctctgactaggcacccaaagtgagcatctgggcattgggcattcatgcttatcttcccccaccttctacatggtattagtcccagcaggcatccctggggcagacgtgctttggctcaagatggccttcatttacgtttagttttttttaaaaccgtggaggttgcccacgggcctcggcacctggccctggcagcacagctctcaggcccagccctgggcgacctccttggccaagtctgcctttcaccctggggtgagcatcagtcctggctctgctggtccagatcttgcgctcagcacactctagggaataattccactccagagatggggctgcttcaaggtcttttctagctgattgtggcccctccattttccccattttcttatctccctgaccaaaattgctttgacttctaaatgtttctgcttcccagaatgcacctgacttatgaaatggggataatactcccaggaaatagcgcaggacatcacaaggaccaaaaaggcaattcttatttaaatgttactatttggccagctgctgctgtgttttatggcagtgttcagagcttgatcacgttatttcttccttttattaagaaggaagccaattgtccaagtcaggagaatggtgtgatcacctgtcacagacactttgtcccctctccccgccccttcctggagctggcagagctaacgccctgcaggaggaccccggcctctcgagggctggatcagcagccgcctgccctgaggctgccccggtgaatgttattggaattcatccctcgtgcacatcctgttgtgtttaagtcaccagatattttgttcccatcagtttagcccagagatagacagtagaatgcaaatacctccctcccctaaactgactggacggctgccaaggaggccccaaacccaggccccatgcaaaggcacgtggtttccttttctcctctctctgcatctgcgctttccagataagcccaaagacagcaacttctccactcatgacaaatcaactgtgaccctcgctccttccatttctgtccattagaaaccagccttttcagcatctcacccattagcagccccatcacccagtgatcagtcgcctcagtaaagcagatctgtggatggggagcctacgggtggtaagaagtggtgttttgtgtttcatctccagcttggtgttccatggcccctaggcgaggtgatcagggagtggggccaatgggcccccggccctggctttgggaccttgtgctgagggatgatttgctcctgaccttgattaacttaacagttcccagctggaagggacactttcaggacccagtccactgtatggcatttgtgatgcagaattatgcactgacatgaccctgggtgacaggaaagcctttcgagaggcccaaggtggcctcgccagccctgcagtattgatgtgcagtattgcaccacagctctgcggaccttggccattgccgcagtcgcagcttccttttttctgtttgcactgtttgtttgtatgatgttagctaattccactgtgtatataaattgtattttttttaatttgtaaaatgctatttttatttgaacctttggaacttgggagttctcattgtaaccctaacatgtgagaataaaatgtcttctgtctcctctgtctccttt

SEQ ID NO: 117368 - DNA, 2922 bp, Homo sapiens
  Payload ID: 2914
  Gene Symbol: CLCN6
  Gene Name: chloride channel, voltage-sensitive 6
  Uniprot ID: P51797
  ENST ID: ENST00000376496
  CDS Start-End: 4-2865
aagatggcggggtgcagggggtctctgtgctgctgctgcaggtggtgctgctgctgcggtgagcgtgagacccgcacccccgaggagctgaccatccttggagaaacacaggaggaggaggatgagattcttccaaggaaagactatgagagtttggattatgatcgctgtatcaatgacccttacctggaagttttggagaccatggataataagaaaggtcgaagatatgaggcggtgaagtggatggtggtgtttgccattggagtctgcactggcctggtgggtctctttgtggacttttttgtgcgactcttcacccaactcaagttcggagtggtacagacatcggtggaggagtgcagccagaaaggctgcctcgctctgtctctccttgaactcctgggttttaacctcacctttgtcttcctggcaagcctccttgttctcattgagccggtggcagcaggttccgggatacccgaggtcaaatgctatctgaatggcgtaaaggtgccaggaatcgtccgtctccggaccctgctctgcaaggtccttggagtgctgttcagtgtggctggagggctcttcgtggagaaggaaggccccatgatccacagtggttcggtggtgggagctggcctccctcagtttcagagcatctccttacggaagatccagtttaacttcccctatttccgaagcgacagagacaagagagactttgtatcagcaggagcggctgctggagttgctgcagctttcggggcgccaatcgggggtaccttgttcagtctagaggagggttcgtccttctggaaccaagggctcacgtggaaagtgctcttttgttccatgtctgccaccttcaccctcaacttcttccgttctgggattcagtttggaagctggggttccttccagctccctggattgctgaactttggcgagtttaagtgctctgactctgataaaaaatgtcatctctggacagctatggatttgggtttcttcgtcgtgatgggggtcattgggggcctcctgggagccacattcaactgtctgaacaagaggcttgcaaagtaccgtatgcgaaacgtgcacccgaaacctaagctcgtcagagtcttagagagcctccttgtgtctctggtaaccaccgtggtggtgtttgtggcctcgatggtgttaggagaatgccgacagatgtcctcttcgagtcaaatcggtaatgactcattccagctccaggtcacagaagatgtgaattcaagtatcaagacatttttttgtcccaatgatacctacaatgacatggccacactcttcttcaacccgcaggagtctgccatcctccagctcttccaccaggatggtactttcagccccgtcactctggccttgttcttcgttctctatttcttgcttgcatgttggacttacggcatttctgttccaagtggcctttttgtgccttctctgctgtgtggagctgcttttggacgtttagttgccaatgtcctaaaaagctacattggattgggccacatctattcggggacctttgccctgattggtgcagcggctttcttgggcggggtggtccgcatgaccatcagcctcacggtcatcctgatcgagtccaccaatgagatcacctacgggctccccatcatggtcacactgatggtggccaaatggacaggggactttttcaataagggcatttatgatatccacgtgggcctgcgaggcgtgccgcttctggaatgggagacagaggtggaaatggacaagctgagagccagcgacatcatggagcccaacctgacctacgtctacccgcacacccgcatccagtctctggtgagcatcctgcgcaccacggtccaccatgccttcccggtggtcacagagaaccgcggtaacgagaaggagttcatgaagggcaaccagctcatcagcaacaacatcaagttcaagaaatccagcatcctcacccgggctggcgagcagcgcaaacggagccagtccatgaagtcctacccatccagcgagctacggaacatgtgtgatgagcacatcgcctctgaggagccagccgagaaggaggacctcctgcagcagatgctggaaaggagatacactccctaccccaacctataccctgaccagtccccaagtgaagactggaccatggaggagcggttccgccctctgaccttccacggcctgatccttcggtcgcagcttgtcaccctgcttgtccgaggagtttgttactctgaaagccagtcgagcgccagccagccgcgcctctcctatgccgagatggccgaggactacccgcggtaccccgacatccacgacctggacctgacgctgctcaacccgcgcatgatcgtggatgtcaccccatacatgaacccttcgcctttcaccgtctcgcccaacacccacgtctcccaagtcttcaacctgttcagaacgatgggcctgcgccacctgcccgtggtgaacgctgtgggagaggtgagcgaggccccggccctgcccccacctttgagagaggatcccctagccaggtgctgtttgtgcacccaggcttctcaccagaaacgtaggcatcccaccaggaggggagagtgtggcccaacactagctttgaaccctgctcggcttccgtgcactcgggaccctttcccctgcctgccagcagatggcaccagcgtcccactggccgtcctttccagccagagccgcgcctctaccaggctgtgtcttcctcctgaaatgttgctcttcactccgtaccactggtgttccttggttctccacctgcgtagggatttgcgcattagatgagagaatttcaagcaaaatactttgagttttacaaagatataaaacacctagtaatta

SEQ ID NO: 117369 - DNA, 814 bp, Homo sapiens
  Payload ID: 2914
  Gene Symbol: CLCN6
  Gene Name: chloride channel, voltage-sensitive 6
  ENST ID: ENST00000376497
  CDS Start-End: 51-419
ggctgggagggggttggtagaggggtccagagtggcagtaaaggaggaagatggcggggtgcagggggtctctgtgctgctgctgcaggtggtgctgctgctgcggtgagcgtgagacccgcacccccgaggagctgaccatccttggagaaacacaggaggaggaggatgagattcttccaaggaaagactatgagagtttggattatgatcgctgtatcaatgacccttacctggaagttttggagaccatggataataagaaaggtcgaagatatgaggcggtgaagtggatggtggtgtttgccattggagtctgcactggcctggtgggtctctttgtggacttttttgtgcgactcttcacccaactcaagttcggagtggtacagacatataaattccagatgaagatgtaaatatgcagaacaaaacttcgggagactatatgttgtcaagagtggggaataatttcttaaaactccagaaggcacagactataagaaaaaacatcaatggggccggacacagtggctcacgcctgtaatcccagcattttgggaggcagaggcaggcggatcacaaggtcaggagattgagaccatcctggctaacacggtgaaaccccgtctctactaaaaatacaaaaaaattagctgggcgtggcggtgtgcgcctgtagtcccagatgctggggaggctgaggcaggagaatggcatgaacctgggaggcggagcttgcagtaagccaagatcacgccactgcactccagcctgggtgacagagcaagactccgtctcaaaaacaaacaaa

SEQ ID NO: 117370 - DNA, 3717 bp, Homo sapiens
  Payload ID: 2915
  Gene Symbol: CLCN7
  Gene Name: chloride channel, voltage-sensitive 7
  ENST ID: ENST00000262318
  CDS Start-End: 84-2789
gtcacgtggccgccggcgcgggtcacgagaacaaacacgggggcagccggcgcttcccggccggtgtcgctccgcggcgggccatggccaacgtctctaagaaggtgtcctggtccggccgggaccgggacgacgaggaggcggcgccgctgctgcggaggacggcgcggcccggcggggggacgccgctgctgaacggggctgggcctggggctgcgcgccaggatatggaccctccacatcccttccccaaggagatcccacacaacgagaagctcctgtccctcaagtatgagagcttggactatgacaacagtgagaaccagctgttcctggaggaggagcggcggatcaatcacacggccttccggacggtggagatcaagcgctgggtcatctgcgccctcattgggatcctcacgggcctcgtggcctgcttcattgacatcgtggtggaaaacctggctggcctcaagtacagggtcatcaagggcaatatcgacaagttcacagagaagggcggactgtccttctccctgttgctgtgggccacgctgaacgccgccttcgtgctcgtgggctctgtgattgtggctttcatagagccggtggctgctggcagcggaatcccccagatcaagtgcttcctcaacggggtgaagatcccccacgtggtgcggctcaagacgttggtgatcaaagtgtccggtgtgatcctgtccgtggtcgggggcctggccgtgggaaaggaagggccgatgatccactcaggttcagtgattgccgccgggatctctcagggaaggtcaacgtcactgaaacgagatttcaagatcttcgagtacttccgcagagacacagagaagcgggacttcgtctccgcaggggctgcggccggagtgtcagcggcgtttggagcccccgtgggtggggtcctgttcagcttggaggagggtgcgtccttctggaaccagttcctgacctggaggatcttctttgcttccatgatctccacgttcaccctgaattttgttctgagcatttaccacgggaacatgtgggacctgtccagcccaggcctcatcaacttcggaaggtttgactcggagaaaatggcctacacgatccacgagatcccggtcttcatcgccatgggcgtggtgggcggtgtgcttggagcagtgttcaatgccttgaactactggctgaccatgtttcgaatcaggtacatccaccggccctgcctgcaggtgattgaggccgtgctggtggccgccgtcacggccacagttgccttcgtgctgatctactcgtcgcgggattgccagcccctgcaggggggctccatgtcctacccgctgcagctcttttgtgcagatggcgagtacaactccatggctgcggccttcttcaacaccccggagaagagcgtggtgagcctcttccacgacccgccaggctcctacaaccccctgaccctcggcctgttcacgctggtctacttcttcctggcctgctggacctacgggctcacggtgtctgccggggtcttcatcccgtccctgctcatcggggctgcctggggccggctctttgggatctccctgtcctacctcacgggggcggcgatctgggcggaccccggcaaatacgccctgatgggagctgctgcccagctgggcgggattgtgcggatgacactgagcctgaccgtcatcatgatggaggccaccagcaacgtgacctacggcttccccatcatgctggtgctcatgaccgccaagatcgtgggcgacgtcttcattgagggcctgtacgacatgcacattcagctgcagagtgtgcccttcctgcactgggaggccccggtcacctcacactcactcactgccagggaggtgatgagcacaccagtgacctgcctgaggcggcgtgagaaggtcggcgtcattgtggacgtgctgagcgacacggcgtccaatcacaacggcttccccgtggtggagcatgccgatgacacccagcctgcccggctccagggcctgatcctgcgctcccagctcatcgttctcctaaagcacaaggtgtttgtggagcggtccaacctgggcctggtacagcggcgcctgaggctgaaggacttccgagacgcctacccgcgcttcccacccatccagtccatccacgtgtcccaggacgagcgggagtgcaccatggacctctccgagttcatgaacccctccccctacacggtgccccaggcatgcgtcgctcccacgggtgttcaagctgttccgggccctgggcctgcggcacctggtggtggtggacaaccgcaatcaggttgtcgggttggtgaccaggaaggacctcgccaggtaccgcctgggaaagagaggcttggaggagctctcgctggcccagacgtgaggcccagccctgcccataatgggcactggcgctggcaccccggcccttctgcatttcctcccggagtcactggtttctcggcccaaaccatgctccccagcagtggcaatggcgagcaccctgcagctgggcgggcaggcggcaggcgcggaactgaccctctcgcgggactgaccctgttgtgggcagtggtctccccccttggcgcctccttgcgcaggcccagcctccactctcctcgtctaggtttctttacctccagggatcagctgtgtgtgtgtgacctccctaccgggctatcggcctcttgggagccagcggcagggccggcacctgcgtgcctgtgcccgtgtgcgtgagacagagcccttgcccctgctgctgccccgagggctgccctgccctggaagggcccctctgcctccacaccagtggagtcttcgagacttgggagctgcttggcctcattttcagccatgagcagacggcctgtggtccctgggcctgaggcacggactcgtagcaccagggtttggaggctgcgaccgccccggagagcagcttcacactggcgccacagaggagccccacgtgcactccccggcctgcatccggcttgggtacacaggcccagaggactggggtgactcacgggccctgtgctgtgatgttgagagctgagaaaaacctccaaggccctgagccccatgcccagccctgccttggtcccccaacccccagagcttggagtctgggccccacacccagccctgccttggtccctgagcctcagagcgtggaattgctgccctgtggacactggctgggaaggcaggtcttcccctagcacatggggaccccggcctcgagggtgacctccctaccccgcccctgccagccaccaagcgcaggtgcagcgggggccagactcctgccggcctcagaggacacctggcccagcacaggcagctagaagggccggtgggcaccggggccgggaagcccccacctcaccacctgagggcccctgggaggctcctctggcctggctgggctgggtctggggccgccacaggcccctcacggggcggcagaggcaacttcagtgtccctgttagagcaacacgggtccctccgtggggggctgggtgcggccccctgccgtgtatttcctccccagggagtggggcctccccgggagctgacgccaccaccctgcttagccctcacagggccccaaggtgtccgagtgtgttgggtctgaacgcgaaataaagaaatcctctc

SEQ ID NO: 117371 - DNA, 4720 bp, Homo sapiens
  Payload ID: 2915
  Gene Symbol: CLCN7
  Gene Name: chloride channel, voltage-sensitive 7
  Uniprot ID: P51798
  ENST ID: ENST00000382745
  CDS Start-End: 607-3024
attaggcgggaggaccctctggggctgcctggaggaagcctccactccgaccctcgcccgagtgcctactgcgagggcggatgcatgcttcgggacttctaatttcatccttcacgtctttagccgccgcctatggcaaggaaaggcctgccctcgcccctgcctccctcctcccttccccaccgcggctccgtcacgatcggcgcgggcgaccgggcctgggggagcccctccagccggctcctgccctcaggccccgggcgcttccctcgccccgactcccgggcccgaggtcccgggggcggccattcgcctcccaagcactcggcgctcagcccaacggggccgcctttgcagtcgcgtgggcagaacggggtcctcagggccgcggcgattctctagggcgggcggcgccacgacccgccgggagcgcggctcccaggagcccccgcgcgaccgggcctcggtggttgccgttgcaggtcacatggtcgccgtcgctcatcacgtggccccgtcgcgcgtcacgtggccgccggcgcgggtcacgagaacaaacacgggggcagccggcgcttcccggccggtgtcgctccgcggcgggccatggccaacgtctctaagaaggtgtcctggtccggccgggaccgggacgacgaggaggcggcgccgctgctgcggaggacggcgcggcccggcggggggacgccgctgctgaacggggctgggcctggggctgcgcgccagtcaccacgttctgcgcttttccgagtcggacatatgagcagcgtggagctggatgatgaacttttggacccggatatggaccctccacatcccttccccaaggagatcccacacaacgagaagctcctgtccctcaagtatgagagcttggactatgacaacagtgagaaccagctgttcctggaggaggagcggcggatcaatcacacggccttccggacggtggagatcaagcgctgggtcatctgcgccctcattgggatcctcacgggcctcgtggcctgcttcattgacatcgtggtggaaaacctggctggcctcaagtacagggtcatcaagggcaatatcgacaagttcacagagaagggcggactgtccttctccctgttgctgtgggccacgctgaacgccgccttcgtgctcgtgggctctgtgattgtggctttcatagagccggtggctgctggcagcggaatcccccagatcaagtgcttcctcaacggggtgaagatcccccacgtggtgcggctcaagacgttggtgatcaaagtgtccggtgtgatcctgtccgtggtcgggggcctggccgtgggaaaggaagggccgatgatccactcaggttcagtgattgccgccgggatctctcagggaaggtcaacgtcactgaaacgagatttcaagatcttcgagtacttccgcagagacacagagaagcgggacttcgtctccgcaggggctgcggccggagtgtcagcggcgtttggagcccccgtgggtggggtcctgttcagcttggaggagggtgcgtccttctggaaccagttcctgacctggaggatcttctttgcttccatgatctccacgttcaccctgaattttgttctgagcatttaccacgggaacatgtgggacctgtccagcccaggcctcatcaacttcggaaggtttgactcggagaaaatggcctacacgatccacgagatcccggtcttcatcgccatgggcgtggtgggcggtgtgcttggagcagtgttcaatgccttgaactactggctgaccatgtttcgaatcaggtacatccaccggccctgcctgcaggtgattgaggccgtgctggtggccgccgtcacggccacagttgccttcgtgctgatctactcgtcgcgggattgccagcccctgcaggggggctccatgtcctacccgctgcagctcttttgtgcagatggcgagtacaactccatggctgcggccttcttcaacaccccggagaagagcgtggtgagcctcttccacgacccgccaggctcctacaaccccctgaccctcggcctgttcacgctggtctacttcttcctggcctgctggacctacgggctcacggtgtctgccggggtcttcatcccgtccctgctcatcggggctgcctggggccggctctttgggatctccctgtcctacctcacgggggcggcgatctgggcggaccccggcaaatacgccctgatgggagctgctgcccagctgggcgggattgtgcggatgacactgagcctgaccgtcatcatgatggaggccaccagcaacgtgacctacggcttccccatcatgctggtgctcatgaccgccaagatcgtgggcgacgtcttcattgagggcctgtacgacatgcacattcagctgcagagtgtgcccttcctgcactgggaggccccggtcacctcacactcactcactgccagggaggtgatgagcacaccagtgacctgcctgaggcggcgtgagaaggtcggcgtcattgtggacgtgctgagcgacacggcgtccaatcacaacggcttccccgtggtggagcatgccgatgacacccagcctgcccggctccagggcctgatcctgcgctcccagctcatcgttctcctaaagcacaaggtgtttgtggagcggtccaacctgggcctggtacagcggcgcctgaggctgaaggacttccgagacgcctacccgcgcttcccacccatccagtccatccacgtgtcccaggacgagcgggagtgcaccatggacctctccgagttcatgaacccctccccctacacggtgccccaggaggcgtcgctcccacgggtgttcaagctgttccgggccctgggcctgcggcacctggtggtggtggacaaccgcaatcaggttgtcgggttggtgaccaggaaggacctcgccaggtaccgcctgggaaagagaggcttggaggagctctcgctggcccagacgtgaggcccagccctgcccataatgggcactggcgctggcaccccggcccttctgcatttcctcccggagtcactggtttctcggcccaaaccatgctccccagcagtggcaatggcgagcaccctgcagctgggcgggcaggcggcaggcgcggaactgaccctctcgcgggactgaccctgttgtgggcagtggtctccccccttggcgcctccttgcgcaggcccagcctccactctcctcgtctaggtttctttacctccagggatcagctgtgtgtgtgtgacctccctaccgggctatcggcctcttgggagccagcggcagggccggcacctgcgtgcctgtgcccgtgtgcgtgagacagagcccttgcccctgctgctgccccgagggctgccctgccctggaagggcccctctgcctccacaccagtggagtcttcgagacttgggagctgcttggcctcattttcagccatgagcagacggcctgtggtccctgggcctgaggcacggactcgtagcaccagggtttggaggctgcgaccgccccggagagcagcttcacactggcgccacagaggagccccacgtgcactccccggcctgcatccggcttgggtacacaggcccagaggactggggtgactcacgggccctgtgctgtgatgttgagagctgagaaaaacctccaaggccctgagccccatgcccagccctgccttggtcccccaacccccagagcttggagtctgggccccacacccagccctgccttggtccctgagcctcagagcgtggaattgctgccctgtggacactggctgggaaggcaggtcttcccctagcacatggggaccccggcctcgagggtgacctccctaccccgcccctgccagccaccaagcgcaggtgcagcgggggccagactcctgccggcctcagaggacacctggcccagcacaggcagctagaagggccggtgggcaccggggccgggaagcccccacctcaccacctgagggcccctgggaggctcctctggcctggctgggctgggtctggggccgccacaggcccctcacggggcggcagaggcaacttcagtgtccctgttagagcaacacgggtccctccgtggggggctgggtgcggccccctgccgtgtatttcctccccagggagtggggcctccccgggagctgacgccaccaccctgcttagccctcacagggccccaaggtgtccgagtgtgttgggtctgaacgcgaaataaagaaatcctctcagcccgcctttgccagcgtcgtccctcccaccccacccagaccacgtccaacagcctgggactttcgggaccctggggtcggggcaccgtgtggagtgagaaaggcgtgaaagacagcggctgcggccacccagggcaccagccacatcctcttcctcgtccccgcccctcagcctccctcctctggctcctggctggtgggtctgggggcaaggcagaggcgctccaggtggaggggggcgggccggggtgcccacgctggggtgacgcaagaagaaaactcccgggcctcagagtcggcgccggaaacctaggtctgggtttccctcgtggtggttgtgtactgaggacctggaagtgatcatattttggatatattcggttaaataaaatcagcggttaggattca

SEQ ID NO: 117372 - DNA, 4151 bp, Homo sapiens
  Payload ID: 2915
  Gene Symbol: CLCN7
  Gene Name: chloride channel, voltage-sensitive 7
  Uniprot ID: P51798
  ENST ID: ENST00000448525
  CDS Start-End: 111-2456
gtcgctcatcacgtggccccgtcgcgcgtcacgtggccgccggcgcgggtcacgagaacaaacacgggggcagccggcgcttcccggccggtgtcgctccgcggcgggccatggccaacgtctctaagaaggtgtcctggtccggccgggaccgggacgacgaggaggcggcgccgctgctgcggaggacggcgcggcccggcggggggacgccgctgctgaacggggctgggcctggggctgcgcgccaggatatggaccctccacatcccttccccaaggagatcccacacaacgagaagctcctgtccctcaagtatgagagcttggactatgacaacagtgagaaccagctgttcctggaggaggagcggcggatcaatcacacggccttccggacggtggagatcaagcgctgggtcatctgcgccctcattgggatcctcacgggcctcgtggcctgcttcattgacatcgtggtggaaaacctggctggcctcaagtacagggtcatcaagggcaatatcgacaagttcacagagaagggcggactgtccttctccctgttgctgtgggccacgctgaacgccgccttcgtgctcgtgggctctgtgattgtggctttcatagagccggtggctgctggcagcggaatcccccagatcaagtgcttcctcaacggggtgaagatcccccacgtggtgcggctcaagacgttggtgatcaaagtgtccggtgtgatcctgtccgtggtcgggggcctggccgtgggaaaggaagggccgatgatccactcaggttcagtgattgccgccgggatctctcagggaaggtcaacgtcactgaaacgagatttcaagatcttcgagtacttccgcagagacacagagaagcgggacttcgtctccgcaggggctgcggccggagtgtcagcggcgtttggagcccccgtgggtggggtcctgttcagcttggaggagggtgcgtccttctggaaccagttcctgacctggaggatcttctttgcttccatgatctccacgttcaccctgaattttgttctgagcatttaccacgggaacatgtgggacctgtccagcccaggcctcatcaacttcggaaggtttgactcggagaaaatggcctacacgatccacgagatcccggtcttcatcgccatgggcgtggtgggcggtgtgcttggagcagtgttcaatgccttgaactactggctgaccatgtttcgaatcaggtacatccaccggccctgcctgcaggtgattgaggccgtgctggtggccgccgtcacggccacagttgccttcgtgctgatctactcgtcgcgggattgccagcccctgcaggggggctccatgtcctacccgctgcagctcttttgtgcagatggcgagtacaactccatggctgcggccttcttcaacaccccggagaagagcgtggtgagcctcttccacgacccgccaggctcctacaaccccctgaccctcggcctgttcacgctggtctacttcttcctggcctgctggacctacgggctcacggtgtctgccggggtcttcatcccgtccctgctcatcggggctgcctggggccggctctttgggatctccctgtcctacctcacgggggcggcgatctgggcggaccccggcaaatacgccctgatgggagctgctgcccagctgggcgggattgtgcggatgacactgagcctgaccgtcatcatgatggaggccaccagcaacgtgacctacggcttccccatcatgctggtgctcatgaccgccaagatcgtgggcgacgtcttcattgagggcctgtacgacatgcacattcagctgcagagtgtgcccttcctgcactgggaggccccggtcacctcacactcactcactgccagggaggtgatgagcacaccagtgacctgcctgaggcggcgtgagaaggtcggcgtcattgtggacgtgctgagcgacacggcgtccaatcacaacggcttccccgtggtggagcatgccgatgacacccagcctgcccggctccagggcctgatcctgcgctcccagctcatcgttctcctaaagcacaaggtgtttgtggagcggtccaacctgggcctggtacagcggcgcctgaggctgaaggacttccgagacgcctacccgcgcttcccacccatccagtccatccacgtgtcccaggacgagcgggagtgcaccatggacctctccgagttcatgaacccctccccctacacggtgccccaggaggcgtcgctcccacgggtgttcaagctgttccgggccctgggcctgcggcacctggtggtggtggacaaccgcaatcaggttgtcgggttggtgaccaggaaggacctcgccaggtaccgcctgggaaagagaggcttggaggagctctcgctggcccagacgtgaggcccagccctgcccataatgggcactggcgctggcaccccggcccttctgcatttcctcccggagtcactggtttctcggcccaaaccatgctccccagcagtggcaatggcgagcaccctgcagctgggcgggcaggcggcaggcgcggaactgaccctctcgcgggactgaccctgttgtgggcagtggtctccccccttggcgcctccttgcgcaggcccagcctccactctcctcgtctaggtttctttacctccagggatcagctgtgtgtgtgtgacctccctaccgggctatcggcctcttgggagccagcggcagggccggcacctgcgtgcctgtgcccgtgtgcgtgagacagagcccttgcccctgctgctgccccgagggctgccctgccctggaagggcccctctgcctccacaccagtggagtcttcgagacttgggagctgcttggcctcattttcagccatgagcagacggcctgtggtccctgggcctgaggcacggactcgtagcaccagggtttggaggctgcgaccgccccggagagcagcttcacactggcgccacagaggagccccacgtgcactccccggcctgcatccggcttgggtacacaggcccagaggactggggtgactcacgggccctgtgctgtgatgttgagagctgagaaaaacctccaaggccctgagccccatgcccagccctgccttggtcccccaacccccagagcttggagtctgggccccacacccagccctgccttggtccctgagcctcagagcgtggaattgctgccctgtggacactggctgggaaggcaggtcttcccctagcacatggggaccccggcctcgagggtgacctccctaccccgcccctgccagccaccaagcgcaggtgcagcgggggccagactcctgccggcctcagaggacacctggcccagcacaggcagctagaagggccggtgggcaccggggccgggaagcccccacctcaccacctgagggcccctgggaggctcctctggcctggctgggctgggtctggggccgccacaggcccctcacggggcggcagaggcaacttcagtgtccctgttagagcaacacgggtccctccgtggggggctgggtgcggccccctgccgtgtatttcctccccagggagtggggcctccccgggagctgacgccaccaccctgcttagccctcacagggccccaaggtgtccgagtgtgttgggtctgaacgcgaaataaagaaatcctctcagcccgcctttgccagcgtcgtccctcccaccccacccagaccacgtccaacagcctgggactttcgggaccctggggtcggggcaccgtgtggagtgagaaaggcgtgaaagacagcggctgcggccacccagggcaccagccacatcctcttcctcgtccccgcccctcagcctccctcctctggctcctggctggtgggtctgggggcaaggcagaggcgctccaggtggaggggggcgggccggggtgcccacgctggggtgacgcaagaagaaaactcccgggcctcagagtcggcgccggaaacctaggtctgggtttccctcgtggtggttgtgtactgaggacctggaagtgatcatattttggatatattcggttaaataaaatcagcggttaggattc

SEQ ID NO: 117373 - DNA, 533 bp, Homo sapiens
  Payload ID: 2915
  Gene Symbol: CLCN7
  Gene Name: chloride channel, voltage-sensitive 7
  ENST ID: ENST00000564568
  CDS Start-End: 178-533
agtgagaatgactgagcgcctttatctgccatctttctgtgtggggatcagtcccgactttcaggtgatcttgggagtgacgagtatttgtactcagtctcccttcgcaccgagttgaatttgcaatgtgcaggcaaacacaataagcagcaagtcagaggttggaatgcgttccgcatgtcaccctgcagcgtgcgtctgagcagtgttaagtcaccacgttctgcgcttttccgagtcggacatatgagcagcgtggagctggatgatgaacttttggacccggatatggaccctccacatcccttccccaaggagatcccacacaacgagaagctcctgtccctcaagtatgagagcttggactatgacaacagtgagaaccagctgttcctggaggaggagcggcggatcaatcacacggccttccggacggtggagatcaagcgctgggtcatctgcgccctcattgggatcctcacgggcctcgtggcctgcttcattgacatcgtggtggaaaacctggctggcct

SEQ ID NO: 117374 - DNA, 1014 bp, Homo sapiens
  Payload ID: 2915
  Gene Symbol: CLCN7
  Gene Name: chloride channel, voltage-sensitive 7
  ENST ID: ENST00000569851
  CDS Start-End: 367-1014
gtgtttgggatgcgctgtggagcctggaggtcagccctgctgcgcacatgaacaggctttgaatttggctcatctctaggggagcccatgggaagctaggaccccattcctgaagggccccagccttcccctgcagacagactggagaggcggagtctagaggccaagacaccacctcttaggccaggcgtttgtgctctgagcatcggactcgccgatggcctcctgcaaggcctgtagcctccctgttgcccagttttcccgtctgcgaaaaagttaacgcatgcatagcgctgagcacggtgcctgtcacaaactacgctctgaagaaactcaccacgttctgcgcttttccgagtcggacatatgagcagcgtggagctggatgatgaacttttggacccggatatggaccctccacatcccttccccaaggagatcccacacaacgagaagctcctgtccctcaagtatgagagcttggactatgacaacagtgagaaccagctgttcctggaggaggagcggcggatcaatcacacggccttccggacggtggagatcaagcgctgggtcatctgcgccctcattgggatcctcacgggcctcgtggcctgcttcattgacatcgtggtggaaaacctggctggcctcaagtacagggtcatcaagggcaatatcgacaagttcacagagaagggcggactgtccttctccctgttgctgtgggccacgctgaacgccgccttcgtgctcgtgggctctgtgattgtggctttcatagagccggtggctgctggcagcggaatcccccagatcaagtgcttcctcaacggggtgaagatcccccacgtggtgcggctcaagacgttggtgatcaaagtgtccggtgtgatcctgtccgtggtcgggggcctggccgtgggaaaggaagggccgatgatccactcaggttcagtgattgccgccgggatctctcagggaaggtcaacgtcactgaaacgagatttcaag

SEQ ID NO: 117375 - DNA, 2475 bp, Homo sapiens
  Payload ID: 2916
  Gene Symbol: CLCNKA
  Gene Name: chloride channel, voltage-sensitive Ka
  Uniprot ID: P51800
  ENST ID: ENST00000331433
  CDS Start-End: 20-2083
gaggactgacaggggcctgatggaggagttggtggggctgcgtgagggcttctcaggggaccctgtgactctgcaggagctgtggggcccctgtccccacatccgccgagccatccaaggtggcctggagtggctaaagcagaaggtgttccgcctgggagaagactggtacttcctgatgaccctcggggtgctcatggccctggtcagctatgccatgaactttgccatcgggtgtgtggtccgagcacaccagtggctgtacagggagattggggacagccacctgctccggtatctttcctggactgtgtaccctgtggccctcgtctctttctcctcaggcttctcccagagcatcacgccctcctctggaggttctggaatcccggagctgaagaccatgttggcgggtgtgatcttggaggactacctggatatcaagaactttggggccaaggtggtgggcctctcctgcaccctggccaccggcagcaccctgttcctgggcaaagtgggccctttcgtgcacctgtctgtaatgatcgctgcctacctgggccgtgtgcgcaccacgaccatcggggagcctgagaacaagagcaagcaaaacgaaatgctggtggcagcggcggcagtgggcgtggccacagtctttgcagctcccttcagcggcgtcctgttcagcatcgaggtcatgtcttcccacttctctgtccgggattactggaggggcttctttgcggccacctgcggggccttcatattccggctcctggcagtcttcaacagcgagcaggagaccatcacctccctctacaagaccagtttccgggtggacgttcccttcgacctgcctgagatcttcttttttgtggcgctgggtggcatctgcggcgtcctgagctgtgcttacctcttctgtcagcgaaccttcctcagcttcatcaagaccaatcggtacagctccaaactgctggctactagcaagcctgtgtactccgctctggccaccttgcttctcgcctccatcacctacccgcctggtgtgggccacttcctagcttctcggctgtccatgaagcagcatctggactcgctgttcgacaaccactcctgggcgctgatgacccagaactccagcccaccctggcccgaggagctcgacccccagcacctttggtgggaatggtaccacccgcggttcaccatctttgggacccttgccttcttcctggttatgaagttctggatgctgattctggccaccaccatccccatgcctgccgggtacttcatgcccatctttatccttggagctgccatcgggcgcctcttgggagaggctcttgccgtcgccttccctgagggcattgtgactggaggggttaccaatcccatcatgcccggggggtatgctctggcaggggctgcagccttctcaggggctgtgacccacaccatctccacggcgctgctggcctttgagctgaccggccagatagtgcatgcactgcccgtgctgatggcggtgctggcagccaacgccattgcacagagctgccagccctccttctatgatggcaccatcattgtcaagaagctgccatacctgccacggattctgggccgcaacatcggctcccaccatgtgagggtggagcacttcatgaaccacagcatcaccacactggccaaggacacgccgctggaggaggtggtcaaggttgtgacctccacagacgtgaccgagtatcccctggtggagagcacagagtcccagatcctggtaggcatcgtgcagagggcccagctggtgcaggccctccaggctgagcctccttccagggctccaggacaccagcagtgtctccaggacatcttggccaggggctgccccacggaaccagtgaccctgacgctattctcagagaccaccttgcaccaggcacaaaacctctttaagctgttgaaccttcagtccctcttcgtgacatcgcggggcagagctgtgggctgcgtgtcctgggtggagatgaagaaagcaatttccaacctgacaaatccgccagctccaaagtgagccggcccagcaagatgaaacagggcaccccagctgacctggtactgaggttgggctgagaccctgcttctcttcccccatcaccacctgcccctccctccagcccagctccattctttggcataacaggcaactctaacctagcccagaagaggatggctcatcctgggtgggacgatggctcctgccttgaaagacaaaaatcccaccttgggcagagctgagtgtgagaagatggaaaaccagtatctgccaggtgctcagtgactggccatcacattaatgaatgacgagattggagtacactgtcaccaagggcaggcaaagatgccctctggggttgtctggttcccagtgagaggctcctgagaaaaataaagctggttcccaga

SEQ ID NO: 117376 - DNA, 2581 bp, Homo sapiens
  Payload ID: 2916
  Gene Symbol: CLCNKA
  Gene Name: chloride channel, voltage-sensitive Ka
  Uniprot ID: P51800
  ENST ID: ENST00000375692
  CDS Start-End: 129-2189
gcctccacagttctggttggtttgtcaaggacgtttttaatctccatggtgcactggagctgggagcaaaggaggctctgtgagaggagggccagttcagccgcagcaggaggactgacaggggcctgatggaggagttggtggggctgcgtgagggcttctcaggggaccctgtgactctgcaggagctgtggggcccctgtccccacatccgccgagccatccaaggtggcctggagtggctaaagcagaaggtgttccgcctgggagaagactggtacttcctgatgaccctcggggtgctcatggccctggtcagctatgccatgaactttgccatcgggtgtgtggtccgagcacaccagtggctgtacagggagattggggacagccacctgctccggtatctttcctggactgtgtaccctgtggccctcgtctctttctcctcaggcttctcccagagcatcacgccctcctctggaggttctggaatcccggagctgaagaccatgttggcgggtgtgatcttggaggactacctggatatcaagaactttggggccaaggtggtgggcctctcctgcaccctggccaccggcagcaccctgttcctgggcaaagtgggccctttcgtgcacctgtctgtaatgatcgctgcctacctgggccgtgtgcgcaccacgaccatcggggagcctgagaacaagagcaagcaaaacgaaatgctggtggcagcggcggcagtgggcgtggccacagtctttgcagctcccttcagcggcgtcctgttcagcatcgaggtcatgtcttcccacttctctgtccgggattactggaggggcttctttgcggccacctgcggggccttcatattccggctcctggcagtcttcaacagcgagcaggagaccatcacctccctctacaagaccagtttccgggtggacgttcccttcgacctgcctgagatcttcttttttgtggcgctgggtggcatctgcggcgtcctgagctgtgcttacctcttctgtcagcgaaccttcctcagcttcatcaagaccaatcggtacagctccaaactgctggctactagcaagcctgtgtactccgctctggccaccttgcttctcgcctccatcacctacccgcctggtgtgggccacttcctagcttctcggctgtccatgaagcagcatctggactcgctgttcgacaaccactcctgggcgctgatgacccagaactccagcccaccctggcccgaggagctcgacccccagcacctttggtgggaatggtaccacccgcggttcaccatctttgggacccttgccttcttcctggttatgaagttctggatgctgattctggccaccaccatccccatgcctgccgggtacttcatgcccatctttatccttggagctgccatcgggcgcctcttgggagaggctcttgccgtcgccttccctgagggcattgtgactggaggggttaccaatcccatcatgcccggggggtatgctctggcaggggctgcagccttctcaggggctgtgacccacaccatctccacggcgctgctggcctttgagctgaccggccagatagtgcatgcactgcccgtgctgatggcggtgctggcagccaacgccattgcacagagctgccagccctccttctatgatggcaccatcattgtcaagaagctgccatacctgccacggattctgggccgcaacatcggctcccaccatgtgagggtggagcacttcatgaaccacagcatcaccacactggccaaggacacgccgctggaggaggtggtcaaggttgtgacctccacagacgtgaccgagtatcccctggtggagagcacagagtcccagatcctggtaggcatcgtgcagagggcccagctggtgcaggccctccaggctgagcctccttccagggctccaggacaccagtgtctccaggacatcttggccaggggctgccccacggaaccagtgaccctgacgctattctcagagaccaccttgcaccaggcacaaaacctctttaagctgttgaaccttcagtccctcttcgtgacatcgcggggcagagctgtgggctgcgtgtcctgggtggagatgaagaaagcaatttccaacctgacaaatccgccagctccaaagtgagccggcccagcaagatgaaacagggcaccccagctgacctggtactgaggttgggctgagaccctgcttctcttcccccatcaccacctgcccctccctccagcccagctccattctttggcataacaggcaactctaacctagcccagaagaggatggctcatcctgggtgggacgatggctcctgccttgaaagacaaaaatcccaccttgggcagagctgagtgtgagaagatggaaaaccagtatctgccaggtgctcagtgactggccatcacattaatgaatgacgagattggagtacactgtcaccaagggcaggcaaagatgccctctggggttgtctggttcccagtgagaggctcctgagaaaaataaagctggttcccaga

SEQ ID NO: 117377 - DNA, 1997 bp, Homo sapiens
  Payload ID: 2916
  Gene Symbol: CLCNKA
  Gene Name: chloride channel, voltage-sensitive Ka
  Uniprot ID: P51800
  ENST ID: ENST00000439316
  CDS Start-End: 58-1992
gaggctctgtgagaggagggccagttcagccgcagcaggaggactgacaggggcctgatggaggagttggtggggctgcgtgagggcttctcaggggaccctgtgactctgcaggagctgtggggcccctgtccccacatccgccgagccatccaaggtggcctggagtggctaaagcagaaggtgttccgcctgggagaagactggtacttcctgatgaccctcggggtgctcatggccctggtcagctatgccatgaactttgccatcgggtgtgtggtccgaggttctggaatcccggagctgaagaccatgttggcgggtgtgatcttggaggactacctggatatcaagaactttggggccaaggtggtgggcctctcctgcaccctggccaccggcagcaccctgttcctgggcaaagtgggccctttcgtgcacctgtctgtaatgatcgctgcctacctgggccgtgtgcgcaccacgaccatcggggagcctgagaacaagagcaagcaaaacgaaatgctggtggcagcggcggcagtgggcgtggccacagtctttgcagctcccttcagcggcgtcctgttcagcatcgaggtcatgtcttcccacttctctgtccgggattactggaggggcttctttgcggccacctgcggggccttcatattccggctcctggcagtcttcaacagcgagcaggagaccatcacctccctctacaagaccagtttccgggtggacgttcccttcgacctgcctgagatcttcttttttgtggcgctgggtggcatctgcggcgtcctgagctgtgcttacctcttctgtcagcgaaccttcctcagcttcatcaagaccaatcggtacagctccaaactgctggctactagcaagcctgtgtactccgctctggccaccttgcttctcgcctccatcacctacccgcctggtgtgggccacttcctagcttctcggctgtccatgaagcagcatctggactcgctgttcgacaaccactcctgggcgctgatgacccagaactccagcccaccctggcccgaggagctcgacccccagcacctttggtgggaatggtaccacccgcggttcaccatctttgggacccttgccttcttcctggttatgaagttctggatgctgattctggccaccaccatccccatgcctgccgggtacttcatgcccatctttatccttggagctgccatcgggcgcctcttgggagaggctcttgccgtcgccttccctgagggcattgtgactggaggggttaccaatcccatcatgcccggggggtatgctctggcaggggctgcagccttctcaggggctgtgacccacaccatctccacggcgctgctggcctttgagctgaccggccagatagtgcatgcactgcccgtgctgatggcggtgctggcagccaacgccattgcacagagctgccagccctccttctatgatggcaccatcattgtcaagaagctgccatacctgccacggattctgggccgcaacatcggctcccaccatgtgagggtggagcacttcatgaaccacagcatcaccacactggccaaggacacgccgctggaggaggtggtcaaggttgtgacctccacagacgtgaccgagtatcccctggtggagagcacagagtcccagatcctggtaggcatcgtgcagagggcccagctggtgcaggccctccaggctgagcctccttccagggctccaggacaccagcagtgtctccaggacatcttggccaggggctgccccacggaaccagtgaccctgacgctattctcagagaccaccttgcaccaggcacaaaacctctttaagctgttgaaccttcagtccctcttcgtgacatcgcggggcagagctgtgggctgcgtgtcctgggtggagatgaagaaagcaatttccaacctgacaaatccgccagctccaaagtgagccgg

SEQ ID NO: 117378 - DNA, 2129 bp, Homo sapiens
  Payload ID: 2917
  Gene Symbol: CLCNKB
  Gene Name: chloride channel, voltage-sensitive Kb
  Uniprot ID: P51801
  ENST ID: ENST00000375667
  CDS Start-End: 184-1737
aacattatacagacttgggtttgaaatccacgtatgaccctggcccgttggcctctctgagcccggcttcctcctctacaaaatggagatcgcaaccgtccccacccgatagcgagagggcgcacacccgcattccaggctggacgggtctctgggcagcgggctcctccccgcccagggcgcatgccctgccctcccctcctgtctgtccctgtccgggctgcaggagagcaggacagatgggtcagggaggaggtgacatggggagggggtcctacagtcacaggtgggtgggggtggagggcccacctgagatcagtgtcgcccccaggcgtcctgttcagcatcgaggtcatgtcttcccacttctctgtctgggattactggaggggcttctttgcggccacctgcggggccttcatgttccggctcctggcggtcttcaacagcgagcaggagaccatcacctccctctacaagaccagtttccgggtggacgttcccttcgacctgcctgagatcttcttttttgtggcgctggggggtctctgtggcatcctgggcagcgcttacctcttctgtcagcgaatcttctttggcttcatcaggaacaataggttcagctccaaactgctggccaccagcaagcctgtgtactccgctctggccaccttggttctcgcctccatcacctacccacccagcgccggccgcttcctagcttctcggctgtccatgaagcagcatctggactcgctgttcgacaaccactcctgggcgctgatgacccagaactccagcccaccctggcccgaggagctcgacccccagcacctgtggtgggaatggtaccacccgcggttcaccatctttgggacccttgccttcttcctggttatgaagttctggatgctgattctggccaccaccatccccatgcctgccgggtacttcatgcccatctttgtctatggagctgctatcgggcgcctctttggggagactctctcttttatcttccctgagggcatcgtggctggagggatcaccaatcccatcatgccaggggggtatgctctggcaggggctgcagccttctcaggggctgtgacccacaccatctccacggcgctgctggccttcgaggtgaccggccagatagtgcatgcactgcccgtgctgatggcggtgctggcagccaacgccattgcacagagctgccagccctccttctatgatggcaccgtcattgtcaagaagctgccatacctgccacggattctgggccgcaacatcggttcccaccgcgtgagggtggagcacttcatgaaccacagcatcaccacactggccaaggacatgccactggaggaggtggtcaaggttgtgacctccacagacgtggccaagtatcccctggtggagagcacagagtcccagatcctggtgggcatagtgcgaagggcccagctggtgcaggccctgaaggctgagcctccttcctgggctcctggacaccagtgtctccaggacatcttggctgcaggctgccccacagaaccagtgaccctgaagctgtccccagagacttccctgcatgaggcacacaacctctttgagctgttgaaccttcattccctctttgtgacgtcgcggggcagagctgtgggctgcgtgtcctgggtggagatgaagaaagcaatttccaacctgacaaatccgccagccccaaagtgagccggcccagcaagatgaaacagggcaccccagctgacctggtactgaggttgggctgagaccctgcttctcttcccccatcaccacctgcccctccctccagcccagctccattctttggcataacaggcaactttaacctagcccagaagaggatggctcatcctgggtgggacgatggctcctgccttgaaagacaaaaatcccaccttgggcagagctgagtgtgagaagatggaaaaccagtatctgccagttgctcagtgactggccatcacattaatgaatgatgagattggagtacactgtcaccaagggcaggcacagatgccttctggggttgtctggttcccagtgagaggctcctgagaaaaataaagctggttcccaga

SEQ ID NO: 117379 - DNA, 2567 bp, Homo sapiens
  Payload ID: 2917
  Gene Symbol: CLCNKB
  Gene Name: chloride channel, voltage-sensitive Kb
  Uniprot ID: P51801
  ENST ID: ENST00000375679
  CDS Start-End: 112-2175
ggggggaggatgttgattgttggaacacacacctgtccaggtgcaggggagctggaggctctgtgagaggagggccagctcagccacagcaggaggactgacaggggcctgatggaggagtttgtggggctgcgtgaaggctcctcagggaaccctgtgactctgcaggagctgtggggcccctgtccccgcatccgccgaggcatccgaggtggcctggagtggctgaagcagaagctcttccgcctgggcgaggactggtacttcctgatgaccctcggggtgctcatggccctggtcagctgtgccatggacttggctgttgagagtgtggtccgagcgcaccagtggctgtacagggagattggggacagccacctgctccggtatctctcctggactgtgtaccctgtggccctcgtctctttctcttcaggcttctctcagagcatcacaccctcctctggaggttctggaatcccggaggtgaagaccatgttggcgggtgtggtcttggaggactacctggatatcaagaactttggggccaaagtggtgggcctctcctgcaccctggcctgtggcagcaccctcttcctcgggaaagtgggccctttcgtgcacctgtctgtgatgatggctgcctacctgggccgtgtgcgcaccacgaccatcggggagcctgagaacaagagcaagcaaaacgaaatgctggtggcagcggcggcagtgggcgtggccacagtctttgcagctcccttcagcggcgtcctgttcagcatcgaggtcatgtcttcccacttctctgtctgggattactggaggggcttctttgcggccacctgcggggccttcatgttccggctcctggcggtcttcaacagcgagcaggagaccatcacctccctctacaagaccagtttccgggtggacgttcccttcgacctgcctgagatcttcttttttgtggcgctggggggtctctgtggcatcctgggcagcgcttacctcttctgtcagcgaatcttctttggcttcatcaggaacaataggttcagctccaaactgctggccaccagcaagcctgtgtactccgctctggccaccttggttctcgcctccatcacctacccacccagcgccggccgcttcctagcttctcggctgtccatgaagcagcatctggactcgctgttcgacaaccactcctgggcgctgatgacccagaactccagcccaccctggcccgaggagctcgacccccagcacctgtggtgggaatggtaccacccgcggttcaccatctttgggacccttgccttcttcctggttatgaagttctggatgctgattctggccaccaccatccccatgcctgccgggtacttcatgcccatctttgtctatggagctgctatcgggcgcctctttggggagactctctcttttatcttccctgagggcatcgtggctggagggatcaccaatcccatcatgccaggggggtatgctctggcaggggctgcagccttctcaggggctgtgacccacaccatctccacggcgctgctggccttcgaggtgaccggccagatagtgcatgcactgcccgtgctgatggcggtgctggcagccaacgccattgcacagagctgccagccctccttctatgatggcaccgtcattgtcaagaagctgccatacctgccacggattctgggccgcaacatcggttcccaccgcgtgagggtggagcacttcatgaaccacagcatcaccacactggccaaggacatgccactggaggaggtggtcaaggttgtgacctccacagacgtggccaagtatcccctggtggagagcacagagtcccagatcctggtgggcatagtgcgaagggcccagctggtgcaggccctgaaggctgagcctccttcctgggctcctggacaccagcagtgtctccaggacatcttggctgcaggctgccccacagaaccagtgaccctgaagctgtccccagagacttccctgcatgaggcacacaacctctttgagctgttgaaccttcattccctctttgtgacgtcgcggggcagagctgtgggctgcgtgtcctgggtggagatgaagaaagcaatttccaacctgacaaatccgccagccccaaagtgagccggcccagcaagatgaaacagggcaccccagctgacctggtactgaggttgggctgagaccctgcttctcttcccccatcaccacctgcccctccctccagcccagctccattctttggcataacaggcaactttaacctagcccagaagaggatggctcatcctgggtgggacgatggctcctgccttgaaagacaaaaatcccaccttgggcagagctgagtgtgagaagatggaaaaccagtatctgccagttgctcagtgactggccatcacattaatgaatgatgagattggagtacactgtcaccaagggcaggcacagatgccttctggggttgtctggttcccagtgagaggctcctgagaaaaataaagctggttcccaga

SEQ ID NO: 117380 - DNA, 464 bp, Homo sapiens
  Payload ID: 2917
  Gene Symbol: CLCNKB
  Gene Name: chloride channel, voltage-sensitive Kb
  ENST ID: ENST00000431772
  CDS Start-End: 1-441
gcacagagctgccagccctccttctatgatggcaccgtcattgtcaagaagctgccatacctgccacggattctgggccgcaacatcggttcccaccgcgtgagggtggagcacttcatgaaccacagcatcaccacactggccaaggacatgccactggaggaggtggtcaaggttgtgacctccacagacgtggccaagtatcccctggtggagagcacagagtcccagatcctggtgggcatagtgcgaagggcccagctggtgcaggccctgaaggctgagcctccttcctgggctcctggacaccagtgtctccaggacatcttggctgcaggctgccccacagaaccagtgaccctgaagctgtccccagagacttccctgcatgaggcacagatgccttctggggttgtctggttcccagtgagaggctcctgagaaaaataaagctggttcccaga

SEQ ID NO: 117381 - DNA, 1544 bp, Homo sapiens
  Payload ID: 2917
  Gene Symbol: CLCNKB
  Gene Name: chloride channel, voltage-sensitive Kb
  ENST ID: ENST00000619181
  CDS Start-End: 153-1544
attctaagtgttcgccataaaccctgggcccaggcgggaaaggggggaggatgttgattgttggaacacacacctgtccaggtgcaggggagctggaggctctgtgagaggagggccagctcagccacagcaggaggactgacaggggcctgatggaggagtttgtggggctgcgtgaaggctcctcagggaaccctgtgactctgcaggagctgtggggcccctgtccccgcatccgccgaggcatccgaggtggcctggagtggctgaagcagaagctcttccgcctgggcgaggactggtacttcctgatgaccctcggggtgctcatggccctggtcagctgtgccatggacttggctgttgagagtgtggtccgagcgcaccagtggctgtacagggagattggggacagccacctgctccggtatctctcctggactgtgtaccctgtggccctcgtctctttctcttcaggcttctctcagagcatcacaccctcctctggaggttctggaatcccggaggtgaagaccatgttggcgggtgtggtcttggaggactacctggatatcaagaactttggggccaaagtggtgggcctctcctgcaccctggcctgtggcagcaccctcttcctcgggaaagtgggccctttcgtgcacctgtctgtgatgatggctgcctacctgggccgtgtgcgcaccacgaccatcggggagcctgagaacaagagcaacaagcctgtgtactccgctctggccaccttggttctcgcctccatcacctacccacccagcgccggccgcttcctagcttctcggctgtccatgaagcagcatctggactcgctgttcgacaaccactcctgggcgctgatgacccagaactccagcccaccctggcccgaggagctcgacccccagcacctgtggtgggaatggtaccacccgcggttcaccatctttgggacccttgccttcttcctggttatgaagttctggatgctgattctggccaccaccatccccatgcctgccgggtacttcatgcccatctttgtctatggagctgctatcgggcgcctctttggggagactctctcttttatcttccctgagggcatcgtggctggagggatcaccaatcccatcatgccaggggggtatgctctggcaggggctgcagccttctcaggggctgtgacccacaccatctccacggcgctgctggccttcgaggtgaccggccagatagtgcatgcactgcccgtgctgatggcggtgctggcagccaacgccattgcacagagctgccagccctccttctatgatggcaccgtcattgtcaagaagctgccatacctgccacggattctgggccgcaacatcggttcccaccgcgtgagggtggagcacttcatgaaccacagcatcaccacactggccatcacattaatgaatgatgagattggagtacactgtcaccaagggcaggcacagatgccttctggggttgtctggttcccagtgagaggctcctga

SEQ ID NO: 117382 - DNA, 1127 bp, Homo sapiens
  Payload ID: 2918
  Gene Symbol: CLIC1
  Gene Name: chloride intracellular channel 1
  Uniprot ID: O00299
  ENST ID: ENST00000375779
  CDS Start-End: 141-866
ctccccaggttcagggcggggccggtcgggacagccctgggtctaggggagagagtccctgagtgtgagacccgccttccccggtcccagcccctcccagttcccccagggacggccacttcctggtccccgacgcaaccatggctgaagaacaaccgcaggtcgaattgttcgtgaaggctggcagtgatggggccaagattgggaactgcccattctcccagagactgttcatggtactgtggctcaagggagtcaccttcaatgttaccaccgttgacaccaaaaggcggaccgagacagtgcagaagctgtgcccaggggggcagctcccattcctgctgtatggcactgaagtgcacacagacaccaacaagattgaggaatttctggaggcagtgctgtgccctcccaggtaccccaagctggcagctctgaaccctgagtccaacacagctgggctggacatatttgccaaattttctgcctacatcaagaattcaaacccagcactcaatgacaatctggagaagggactcctgaaagccctgaaggttttagacaattacttaacatcccccctcccagaagaagtggatgaaaccagtgctgaagatgaaggtgtctctcagaggaagtttttggatggcaacgagctcaccctggctgactgcaacctgttgccaaagttacacatagtacaggtggtgtgtaagaagtaccggggattcaccatccccgaggccttccggggagtgcatcggtacttgagcaatgcctacgcccgggaagaattcgcttccacctgtccagatgatgaggagatcgagctcgcctatgagcaagtggcaaaggccctcaaataagcccctcctgggactccctcaaccccctccattttctccacaaaggccctggtggtttccacattgctacccaatggacacactccaaaatggccagtgggcagggaatcctggagcacttgttccgggatggtgtggtggaagaggggatgagggaaagaaatggggggcctgggtcagatttttattgtggggtgggatgagtaggacaacatatttcagtaataaaatacagaataaaaatcaagtgtttttacgcaa

SEQ ID NO: 117383 - DNA, 1560 bp, Homo sapiens
  Payload ID: 2918
  Gene Symbol: CLIC1
  Gene Name: chloride intracellular channel 1
  Uniprot ID: O00299
  ENST ID: ENST00000375780
  CDS Start-End: 574-1299
ccaagtagctgggattacaggtgcccaccaccccgcctggcaaatttttgtatttttagtagagacagggtttcaccatgttggccagtctggtcttgactccctgacctcaggtgatccaccccccttggcctcctaaagtgttgggattacaggcgtgagccacctcacccggcccctaactctatttcctatgcccaatcccaagtgtaggccacaaggactgcaagtcctagtgctgagctgggcccggagacagtagactgcggggggcacaggacctactgagacaccagtctgggcagctcagggagtgctggcgtcaccccttccctaatcccaggctgcatggctaacggttcctatctgcagtcccagccttccacttccgagttcttctctcagaccacagtcccagcaacccagaatttggattggagtctggaagaaatgcagaatgattaaacgaccacctttccatttgaagtccccatccctgaatcttcacgggtgtgcccaagctcccctcccagttcccccagggacggccacttcctggtccccgacgcaaccatggctgaagaacaaccgcaggtcgaattgttcgtgaaggctggcagtgatggggccaagattgggaactgcccattctcccagagactgttcatggtactgtggctcaagggagtcaccttcaatgttaccaccgttgacaccaaaaggcggaccgagacagtgcagaagctgtgcccaggggggcagctcccattcctgctgtatggcactgaagtgcacacagacaccaacaagattgaggaatttctggaggcagtgctgtgccctcccaggtaccccaagctggcagctctgaaccctgagtccaacacagctgggctggacatatttgccaaattttctgcctacatcaagaattcaaacccagcactcaatgacaatctggagaagggactcctgaaagccctgaaggttttagacaattacttaacatcccccctcccagaagaagtggatgaaaccagtgctgaagatgaaggtgtctctcagaggaagtttttggatggcaacgagctcaccctggctgactgcaacctgttgccaaagttacacatagtacaggtggtgtgtaagaagtaccggggattcaccatccccgaggccttccggggagtgcatcggtacttgagcaatgcctacgcccgggaagaattcgcttccacctgtccagatgatgaggagatcgagctcgcctatgagcaagtggcaaaggccctcaaataagcccctcctgggactccctcaaccccctccattttctccacaaaggccctggtggtttccacattgctacccaatggacacactccaaaatggccagtgggcagggaatcctggagcacttgttccgggatggtgtggtggaagaggggatgagggaaagaaatggggggcctgggtcagatttttattgtggggtgggatgagtaggacaacatatttcagtaataaaatacagaataaaaatcaagtgtttttacgcaa

SEQ ID NO: 117384 - DNA, 1254 bp, Homo sapiens
  Payload ID: 2918
  Gene Symbol: CLIC1
  Gene Name: chloride intracellular channel 1
  Uniprot ID: O00299
  ENST ID: ENST00000375784
  CDS Start-End: 268-993
caggttcagggcggggccggtcggtgagtcagcggctctctgatccagcccgggagaggaccgagctggaggagctgggtgtggggtgcgttgggctggtggggaggcctagtttgggtgcaagtaggtctgattgagcttgtgttgtgctgaagggacagccctgggtctaggggagagagtccctgagtgtgagacccgccttccccggtcccagcccctcccagttcccccagggacggccacttcctggtccccgacgcaaccatggctgaagaacaaccgcaggtcgaattgttcgtgaaggctggcagtgatggggccaagattgggaactgcccattctcccagagactgttcatggtactgtggctcaagggagtcaccttcaatgttaccaccgttgacaccaaaaggcggaccgagacagtgcagaagctgtgcccaggggggcagctcccattcctgctgtatggcactgaagtgcacacagacaccaacaagattgaggaatttctggaggcagtgctgtgccctcccaggtaccccaagctggcagctctgaaccctgagtccaacacagctgggctggacatatttgccaaattttctgcctacatcaagaattcaaacccagcactcaatgacaatctggagaagggactcctgaaagccctgaaggttttagacaattacttaacatcccccctcccagaagaagtggatgaaaccagtgctgaagatgaaggtgtctctcagaggaagtttttggatggcaacgagctcaccctggctgactgcaacctgttgccaaagttacacatagtacaggtggtgtgtaagaagtaccggggattcaccatccccgaggccttccggggagtgcatcggtacttgagcaatgcctacgcccgggaagaattcgcttccacctgtccagatgatgaggagatcgagctcgcctatgagcaagtggcaaaggccctcaaataagcccctcctgggactccctcaaccccctccattttctccacaaaggccctggtggtttccacattgctacccaatggacacactccaaaatggccagtgggcagggaatcctggagcacttgttccgggatggtgtggtggaagaggggatgagggaaagaaatggggggcctgggtcagatttttattgtggggtgggatgagtaggacaacatatttcagtaataaaatacagaataaaaatcaagtgtttttacgcaa

SEQ ID NO: 117385 - DNA, 1127 bp, Homo sapiens; identical to SEQ ID NO: 117382
  Payload ID: 2918
  Gene Symbol: CLIC1
  Gene Name: chloride intracellular channel 1
  Uniprot ID: O00299
  ENST ID: ENST00000383404
  CDS Start-End: 141-866

SEQ ID NO: 117386 - DNA, 1560 bp, Homo sapiens
  Payload ID: 2918
  Gene Symbol: CLIC1
  Gene Name: chloride intracellular channel 1
  Uniprot ID: O00299
  ENST ID: ENST00000383405
  CDS Start-End: 574-1299
ccaagtagctgggattacaggtgcccaccaccccgcctggcaaatttttgtatttttagtagagacagggtttcaccatgttggccagtctggtcttgactccctgacctcaggtgatccaccccccttggcctcctaaagtgttgggattacaggcgtgaaccacctcacccggcccctaactctatttcctatgcccaatcccaagtgtaggccacaaggactgcaagtcctagtgctgagctgggcccggagacagtagactgcggggggcacaggacctactgagacaccagtctgggcagctcagggagtgctggcgtcaccccttccctaatcccaggctgcatggctaacggttcctatctgcagtcccagccttccacttccgagttcttctctcagaccacagtcccagcaacccagaatttggattggagtctggaagaaatgcagaatgattaaacgaccacctttccatttgaagtccccatccctgaatcttcacgggtgtgcccaagctcccctcccagttcccccagggacggccacttcctggtccccgacgcaaccatggctgaagaacaaccgcaggtcgaattgttcgtgaaggctggcagtgatggggccaagattgggaactgcccattctcccagagactgttcatggtactgtggctcaagggagtcaccttcaatgttaccaccgttgacaccaaaaggcggaccgagacagtgcagaagctgtgcccaggggggcagctcccattcctgctgtatggcactgaagtgcacacagacaccaacaagattgaggaatttctggaggcagtgctgtgccctcccaggtaccccaagctggcagctctgaaccctgagtccaacacagctgggctggacatatttgccaaattttctgcctacatcaagaattcaaacccagcactcaatgacaatctggagaagggactcctgaaagccctgaaggttttagacaattacttaacatcccccctcccagaagaagtggatgaaaccagtgctgaagatgaaggtgtctctcagaggaagtttttggatggcaacgagctcaccctggctgactgcaacctgttgccaaagttacacatagtacaggtggtgtgtaagaagtaccggggattcaccatccccgaggccttccggggagtgcatcggtacttgagcaatgcctacgcccgggaagaattcgcttccacctgtccagatgatgaggagatcgagctcgcctatgagcaagtggcaaaggccctcaaataagcccctcctgggactccctcaaccccctccattttctccacaaaggccctggtggtttccacattgctacccaatggacacactccaaaatggccagtgggcagggaatcctggagcacttgttccgggatggtgtggtggaagaggggatgagggaaagaaatggggggcctgggtcagatttttattgtggggtgggatgagtaggacaacatatttcagtaataaaatacagaataaaaatcaagtgtttttacgcaa

SEQ ID NO: 117387 - DNA, 1197 bp, Homo sapiens
  Payload ID: 2918
  Gene Symbol: CLIC1
  Gene Name: chloride intracellular channel 1
  Uniprot ID: O00299
  ENST ID: ENST00000395892
  CDS Start-End: 211-936
ggatttgattggcgcagtgggaagcccgcgagaagaggtggaagcattcgaattacatcaaattctggcagagagaagtagttctgatcagaacactcacacccctactgggacatgcccataccccttcgcacttctacacacccctgaagacagagagcccctcccagttcccccagggacggccacttcctggtccccgacgcaaccatggctgaagaacaaccgcaggtcgaattgttcgtgaaggctggcagtgatggggccaagattgggaactgcccattctcccagagactgttcatggtactgtggctcaagggagtcaccttcaatgttaccaccgttgacaccaaaaggcggaccgagacagtgcagaagctgtgcccaggggggcagctcccattcctgctgtatggcactgaagtgcacacagacaccaacaagattgaggaatttctggaggcagtgctgtgccctcccaggtaccccaagctggcagctctgaaccctgagtccaacacagctgggctggacatatttgccaaattttctgcctacatcaagaattcaaacccagcactcaatgacaatctggagaagggactcctgaaagccctgaaggttttagacaattacttaacatcccccctcccagaagaagtggatgaaaccagtgctgaagatgaaggtgtctctcagaggaagtttttggatggcaacgagctcaccctggctgactgcaacctgttgccaaagttacacatagtacaggtggtgtgtaagaagtaccggggattcaccatccccgaggccttccggggagtgcatcggtacttgagcaatgcctacgcccgggaagaattcgcttccacctgtccagatgatgaggagatcgagctcgcctatgagcaagtggcaaaggccctcaaataagcccctcctgggactccctcaaccccctccattttctccacaaaggccctggtggtttccacattgctacccaatggacacactccaaaatggccagtgggcagggaatcctggagcacttgttccgggatggtgtggtggaagaggggatgagggaaagaaatggggggcctgggtcagatttttattgtggggtgggatgagtaggacaacatatttcagtaataaaatacagaataaaaatcaagtgtttttacgcaa

SEQ ID NO: 117388 - DNA, 1254 bp, Homo sapiens; identical to SEQ ID NO: 117384
  Payload ID: 2918
  Gene Symbol: CLIC1
  Gene Name: chloride intracellular channel 1
  Uniprot ID: O00299
  ENST ID: ENST00000400052
  CDS Start-End: 268-993

SEQ ID NO: 117389 - DNA, 1197 bp, Homo sapiens; identical to SEQ ID NO: 117387
  Payload ID: 2918
  Gene Symbol: CLIC1
  Gene Name: chloride intracellular channel 1
  Uniprot ID: O00299
  ENST ID: ENST00000400058
  CDS Start-End: 211-936

SEQ ID NO: 117390 - DNA, 1197 bp, Homo sapiens; identical to SEQ ID NO: 117387
  Payload ID: 2918
  Gene Symbol: CLIC1
  Gene Name: chloride intracellular channel 1
  Uniprot ID: O00299
  ENST ID: ENST00000433916
  CDS Start-End: 211-936

SEQ ID NO: 117391 - DNA, 1254 bp, Homo sapiens
  Payload ID: 2918
  Gene Symbol: CLIC1
  Gene Name: chloride intracellular channel 1
  Uniprot ID: O00299
  ENST ID: ENST00000457485
  CDS Start-End: 268-993
caggttcagggcggggccggtcggtgagtcagcggctctctgatccagccagggagaggaccgagctggaggagctgggtgtggggtgcgttgggctggtggggaggcctagtttgggtgcaagtaggtctgattgagcttgtgttgtgctgaagggacagccctgggtctaggggagagagtccctgagtgtgagacccgccttccccggtcccagcccctcccagttcccccagggacggccacttcctggtccccgacgcaaccatggctgaagaacaaccgcaggtcgaattgttcgtgaaggctggcagtgatggggccaagattgggaactgcccattctcccagagactgttcatggtactgtggctcaagggagtcaccttcaatgttaccaccgttgacaccaaaaggcggaccgagacagtgcagaagctgtgcccaggggggcagctcccattcctgctgtatggcactgaagtgcacacagacaccaacaagattgaggaatttctggaggcagtgctgtgccctcccaggtaccccaagctggcagctctgaaccctgagtccaacacagctgggctggacatatttgccaaattttctgcctacatcaagaattcaaacccagcactcaatgacaatctggagaagggactcctgaaagccctgaaggttttagacaattacttaacatcccccctcccagaagaagtggatgaaaccagtgctgaagatgaaggtgtctctcagaggaagtttttggatggcaacgagctcaccctggctgactgcaacctgttgccaaagttacacatagtacaggtggtgtgtaagaagtaccggggattcaccatccccgaggccttccggggagtgcatcggtacttgagcaatgcctacgcccgggaagaattcgcttccacctgtccagatgatgaggagatcgagctcgcctatgagcaagtggcaaaggccctcaaataagcccctcctgggactccctcaaccccctccattttctccacaaaggccctggtggtttccacattgctacccaatggacacactccaaaatggccagtgggcagggaatcctggagcacttgttccgggatggtgtggtggaagaggggatgagggaaagaaatggggggcctgggtcagatttttattgtggggtgggatgagtaggacaacatatttcagtaataaaatacagaataaaaatcaagtgtttttacgcaa

SEQ ID NO: 117392 - DNA, 1560 bp, Homo sapiens; identical to SEQ ID NO: 117383
  Payload ID: 2918
  Gene Symbol: CLIC1
  Gene Name: chloride intracellular channel 1
  Uniprot ID: O00299
  ENST ID: ENST00000442045
  CDS Start-End: 574-1299

SEQ ID NO: 117393 - DNA, 1127 bp, Homo sapiens; identical to SEQ ID NO: 117382
  Payload ID: 2918
  Gene Symbol: CLIC1
  Gene Name: chloride intracellular channel 1
  Uniprot ID: O00299
  ENST ID: ENST00000434202
  CDS Start-End: 141-866

SEQ ID NO: 117394 - DNA, 1254 bp, Homo sapiens; identical to SEQ ID NO: 117384
  Payload ID: 2918
  Gene Symbol: CLIC1
  Gene Name: chloride intracellular channel 1
  Uniprot ID: O00299
  ENST ID: ENST00000425464
  CDS Start-End: 268-993

SEQ ID NO: 117395 - DNA, 1560 bp, Homo sapiens; identical to SEQ ID NO: 117383
  Payload ID: 2918
  Gene Symbol: CLIC1
  Gene Name: chloride intracellular channel 1
  Uniprot ID: O00299
  ENST ID: ENST00000438750
  CDS Start-End: 574-1299

SEQ ID NO: 117396 - DNA, 1127 bp, Homo sapiens; identical to SEQ ID NO: 117382
  Payload ID: 2918
  Gene Symbol: CLIC1
  Gene Name: chloride intracellular channel 1
  Uniprot ID: O00299
  ENST ID: ENST00000423143
  CDS Start-End: 141-866

SEQ ID NO: 117397 - DNA, 1127 bp, Homo sapiens; identical to SEQ ID NO: 117382
  Payload ID: 2918
  Gene Symbol: CLIC1
  Gene Name: chloride intracellular channel 1
  Uniprot ID: O00299
  ENST ID: ENST00000438708
  CDS Start-End: 141-866

SEQ ID NO: 117398 - DNA, 1254 bp, Homo sapiens; identical to SEQ ID NO: 117384
  Payload ID: 2918
  Gene Symbol: CLIC1
  Gene Name: chloride intracellular channel 1
  Uniprot ID: O00299
  ENST ID: ENST00000456863
  CDS Start-End: 268-993

SEQ ID NO: 117399 - DNA, 1127 bp, Homo sapiens; identical to SEQ ID NO: 117382
  Payload ID: 2918
  Gene Symbol: CLIC1
  Gene Name: chloride intracellular channel 1
  Uniprot ID: O00299
  ENST ID: ENST00000423055
  CDS Start-End: 141-866

SEQ ID NO: 117400 - DNA, 1254 bp, Homo sapiens; identical to SEQ ID NO: 117384
  Payload ID: 2918
  Gene Symbol: CLIC1
  Gene Name: chloride intracellular channel 1
  Uniprot ID: O00299
  ENST ID: ENST00000422167
  CDS Start-End: 268-993

SEQ ID NO: 117401 - DNA, 1254 bp, Homo sapiens; identical to SEQ ID NO: 117384
  Payload ID: 2918
  Gene Symbol: CLIC1
  Gene Name: chloride intracellular channel 1
  Uniprot ID: O00299
  ENST ID: ENST00000418285
  CDS Start-End: 268-993

SEQ ID NO: 117402 - DNA, 1560 bp, Homo sapiens; identical to SEQ ID NO: 117383
  Payload ID: 2918
  Gene Symbol: CLIC1
  Gene Name: chloride intracellular channel 1
  Uniprot ID: O00299
  ENST ID: ENST00000447369
  CDS Start-End: 574-1299

SEQ ID NO: 117403 - DNA, 1560 bp, Homo sapiens; identical to SEQ ID NO: 117383
  Payload ID: 2918
  Gene Symbol: CLIC1
  Gene Name: chloride intracellular channel 1
  Uniprot ID: O00299
  ENST ID: ENST00000431921
  CDS Start-End: 574-1299

SEQ ID NO: 117404 - DNA, 1197 bp, Homo sapiens
  Payload ID: 2918
  Gene Symbol: CLIC1
  Gene Name: chloride intracellular channel 1
  Uniprot ID: O00299
  ENST ID: ENST00000415179
  CDS Start-End: 211-936
ggatttgattggcgtagtgggaagcccgcgagaagaggtggaagcattcgaattacatcaaattctggcagagagaagtagttctgatcagaacactcacacccctactgggacatgcccataccccttcgcacttctacacacccctgaagacagagagcccctcccagttcccccagggacggccacttcctggtccccgacgcaaccatggctgaagaacaaccgcaggtcgaattgttcgtgaaggctggcagtgatggggccaagattgggaactgcccattctcccagagactgttcatggtactgtggctcaagggagtcaccttcaatgttaccaccgttgacaccaaaaggcggaccgagacagtgcagaagctgtgcccaggggggcagctcccattcctgctgtatggcactgaagtgcacacagacaccaacaagattgaggaatttctggaggcagtgctgtgccctcccaggtaccccaagctggcagctctgaaccctgagtccaacacagctgggctggacatatttgccaaattttctgcctacatcaagaattcaaacccagcactcaatgacaatctggagaagggactcctgaaagccctgaaggttttagacaattacttaacatcccccctcccagaagaagtggatgaaaccagtgctgaagatgaaggtgtctctcagaggaagtttttggatggcaacgagctcaccctggctgactgcaacctgttgccaaagttacacatagtacaggtggtgtgtaagaagtaccggggattcaccatccccgaggccttccggggagtgcatcggtacttgagcaatgcctacgcccgggaagaattcgcttccacctgtccagatgatgaggagatcgagctcgcctatgagcaagtggcaaaggccctcaaataagcccctcctgggactccctcaaccccctccattttctccacaaaggccctggtggtttccacattgctacccaatggacacactccaaaatggccagtgggcagggaatcctggagcacttgttccgggatggtgtggtggaagaggggatgagggaaagaaatggggggcctgggtcagatttttattgtggggtgggatgagtaggacaacatatttcagtaataaaatacagaataaaaatcaagtgtttttacgcaa

SEQ ID NO: 117405 - DNA, 1127 bp, Homo sapiens; identical to SEQ ID NO: 117382
  Payload ID: 2918
  Gene Symbol: CLIC1
  Gene Name: chloride intracellular channel 1
  Uniprot ID: O00299
  ENST ID: ENST00000423804
  CDS Start-End: 141-866

SEQ ID NO: 117406 - DNA, 1560 bp, Homo sapiens
  Payload ID: 2918
  Gene Symbol: CLIC1
  Gene Name: chloride intracellular channel 1
  Uniprot ID: O00299
  ENST ID: ENST00000420458
  CDS Start-End: 574-1299
ccaagtagctgggattacaggtgcccaccaccccgcctggcaaatttttgtatttttagtagagacagggtttcaccatgttggccagtctggtcttgactccctgacctcaggtgatccaccccccttggcctcctaaagtgttgggattacaggcgtgagccacctcacccggcccctaactctatttcctatgcccaatcccaagtgtaggccacaaggactgcaagtcctagtgctgagctgggcccggagacagtagactgcggggggcacaggacctactgagactccagtctgggcagctcagggagtgctggcgtcaccccttccctaatcccaggctgcatggctaacggttcctatctgcagtcccagccttccacttccgagttcttctctcagaccacagtcccagcaacccagaatttggattggagtctggaagaaatgcagaatgattaaacgaccacctttccatttgaagtccccatccctgaatcttcacgggtgtgcccaagctcccctcccagttcccccagggacggccacttcctggtccccgacgcaaccatggctgaagaacaaccgcaggtcgaattgttcgtgaaggctggcagtgatggggccaagattgggaactgcccattctcccagagactgttcatggtactgtggctcaagggagtcaccttcaatgttaccaccgttgacaccaaaaggcggaccgagacagtgcagaagctgtgcccaggggggcagctcccattcctgctgtatggcactgaagtgcacacagacaccaacaagattgaggaatttctggaggcagtgctgtgccctcccaggtaccccaagctggcagctctgaaccctgagtccaacacagctgggctggacatatttgccaaattttctgcctacatcaagaattcaaacccagcactcaatgacaatctggagaagggactcctgaaagccctgaaggttttagacaattacttaacatcccccctcccagaagaagtggatgaaaccagtgctgaagatgaaggtgtctctcagaggaagtttttggatggcaacgagctcaccctggctgactgcaacctgttgccaaagttacacatagtacaggtggtgtgtaagaagtaccggggattcaccatccccgaggccttccggggagtgcatcggtacttgagcaatgcctacgcccgggaagaattcgcttccacctgtccagatgatgaggagatcgagctcgcctatgagcaagtggcaaaggccctcaaataagcccctcctgggactccctcaaccccctccattttctccacaaaggccctggtggtttccacattgctacccaatggacacactccaaaatggccagtgggcagggaatcctggagcacttgttccgggatggtgtggtggaagaggggatgagggaaagaaatggggggcctgggtcagatttttattgtggggtgggatgagtaggacaacatatttcagtaataaaatacagaataaaaatcaagtgtttttacgcaa

SEQ ID NO: 117407 - DNA, 1197 bp, Homo sapiens; identical to SEQ ID NO: 117387
  Payload ID: 2918
  Gene Symbol: CLIC1
  Gene Name: chloride intracellular channel 1
  Uniprot ID: O00299
  ENST ID: ENST00000435242
  CDS Start-End: 211-936

SEQ ID NO: 117408 - DNA, 1197 bp, Homo sapiens; identical to SEQ ID NO: 117387
  Payload ID: 2918
  Gene Symbol: CLIC1
  Gene Name: chloride intracellular channel 1
  Uniprot ID: O00299
  ENST ID: ENST00000447338
  CDS Start-End: 211-936

SEQ ID NO: 117409 - DNA, 1197 bp, Homo sapiens; identical to SEQ ID NO: 117387
  Payload ID: 2918
  Gene Symbol: CLIC1
  Gene Name: chloride intracellular channel 1
  Uniprot ID: O00299
  ENST ID: ENST00000451546
  CDS Start-End: 211-936

SEQ ID NO: 117410 - DNA, 1098 bp, Homo sapiens
  Payload ID: 2918
  Gene Symbol: CLIC1
  Gene Name: chloride intracellular channel 1
  Uniprot ID: O00299
  ENST ID: ENST00000614982
  CDS Start-End: 114-839
ggtgagtcagcggctctctgatccagcccgggagaggaccgagctggaggagctgggtgtgggcccctcccagttcccccagggacggccacttcctggtccccgacgcaaccatggctgaagaacaaccgcaggtcgaattgttcgtgaaggctggcagtgatggggccaagattgggaactgcccattctcccagagactgttcatggtactgtggctcaagggagtcaccttcaatgttaccaccgttgacaccaaaaggcggaccgagacagtgcagaagctgtgcccaggggggcagctcccattcctgctgtatggcactgaagtgcacacagacaccaacaagattgaggaatttctggaggcagtgctgtgccctcccaggtaccccaagctggcagctctgaaccctgagtccaacacagctgggctggacatatttgccaaattttctgcctacatcaagaattcaaacccagcactcaatgacaatctggagaagggactcctgaaagccctgaaggttttagacaattacttaacatcccccctcccagaagaagtggatgaaaccagtgctgaagatgaaggtgtctctcagaggaagtttttggatggcaacgagctcaccctggctgactgcaacctgttgccaaagttacacatagtacaggtggtgtgtaagaagtaccggggattcaccatccccgaggccttccggggagtgcatcggtacttgagcaatgcctacgcccgggaagaattcgcttccacctgtccagatgatgaggagatcgagctcgcctatgagcaagtggcaaaggccctcaaataagcccctcctgggactccctcaaccccctccattttctccacaaaggccctggtggtttccacattgctacccaatggacacactccaaaatggccagtgggcagggaatcctggagcacttgttccgggatggtgtggtggaagaggggatgagggaaagaaatggggggcctgggtcagatttttattgtggggtgggatgagtaggacaacatatttcagtaataaaatacagaataaaaatcaagtgtttttacgc

SEQ ID NO: 117411 - DNA, 1098 bp, Homo sapiens; identical to SEQ ID NO: 117410
  Payload ID: 2918
  Gene Symbol: CLIC1
  Gene Name: chloride intracellular channel 1
  Uniprot ID: O00299
  ENST ID: ENST00000621055
  CDS Start-End: 114-839

SEQ ID NO: 117412 - DNA, 1098 bp, Homo sapiens; identical to SEQ ID NO: 117410
  Payload ID: 2918
  Gene Symbol: CLIC1
  Gene Name: chloride intracellular channel 1
  Uniprot ID: O00299
  ENST ID: ENST00000618288
  CDS Start-End: 114-839

SEQ ID NO: 117413 - DNA, 1098 bp, Homo sapiens; identical to SEQ ID NO: 117410
  Payload ID: 2918
  Gene Symbol: CLIC1
  Gene Name: chloride intracellular channel 1
  Uniprot ID: O00299
  ENST ID: ENST00000616760
  CDS Start-End: 114-839

SEQ ID NO: 117414 - DNA, 1098 bp, Homo sapiens
  Payload ID: 2918
  Gene Symbol: CLIC1
  Gene Name: chloride intracellular channel 1
  Uniprot ID: O00299
  ENST ID: ENST00000614673
  CDS Start-End: 114-839
ggtgagtcagcggctctctgatccagccagggagaggaccgagctggaggagctgggtgtgggcccctcccagttcccccagggacggccacttcctggtccccgacgcaaccatggctgaagaacaaccgcaggtcgaattgttcgtgaaggctggcagtgatggggccaagattgggaactgcccattctcccagagactgttcatggtactgtggctcaagggagtcaccttcaatgttaccaccgttgacaccaaaaggcggaccgagacagtgcagaagctgtgcccaggggggcagctcccattcctgctgtatggcactgaagtgcacacagacaccaacaagattgaggaatttctggaggcagtgctgtgccctcccaggtaccccaagctggcagctctgaaccctgagtccaacacagctgggctggacatatttgccaaattttctgcctacatcaagaattcaaacccagcactcaatgacaatctggagaagggactcctgaaagccctgaaggttttagacaattacttaacatcccccctcccagaagaagtggatgaaaccagtgctgaagatgaaggtgtctctcagaggaagtttttggatggcaacgagctcaccctggctgactgcaacctgttgccaaagttacacatagtacaggtggtgtgtaagaagtaccggggattcaccatccccgaggccttccggggagtgcatcggtacttgagcaatgcctacgcccgggaagaattcgcttccacctgtccagatgatgaggagatcgagctcgcctatgagcaagtggcaaaggccctcaaataagcccctcctgggactccctcaaccccctccattttctccacaaaggccctggtggtttccacattgctacccaatggacacactccaaaatggccagtgggcagggaatcctggagcacttgttccgggatggtgtggtggaagaggggatgagggaaagaaatggggggcctgggtcagatttttattgtggggtgggatgagtaggacaacatatttcagtaataaaatacagaataaaaatcaagtgtttttacgc

SEQ ID NO: 117415 - DNA, 1098 bp, Homo sapiens; identical to SEQ ID NO: 117410
  Payload ID: 2918
  Gene Symbol: CLIC1
  Gene Name: chloride intracellular channel 1
  Uniprot ID: O00299
  ENST ID: ENST00000619727
  CDS Start-End: 114-839

SEQ ID NO: 117416 - DNA, 1098 bp, Homo sapiens; identical to SEQ ID NO: 117410
  Payload ID: 2918
  Gene Symbol: CLIC1
  Gene Name: chloride intracellular channel 1
  Uniprot ID: O00299
  ENST ID: ENST00000622613
  CDS Start-End: 114-839

SEQ ID NO: 117417 - DNA, 629 bp, Homo sapiens
  Payload ID: 2919
  Gene Symbol: CLIC2
  Gene Name: chloride intracellular channel 2
  ENST ID: ENST00000321926
  CDS Start-End: 231-629
ggaagaaggaaaacgatttcaagagctgcacttaagcatctagaattttctgcgtcacacctcttgagagaagagactggctccaggtctgactcagtccactacaagctagacggtcttcttaaagcaccaacattacttgagtctttggataaaattgagaaaagagtctacaagtattgtggactctacaggaggcaggaggctgacaactggcagtaaagacaaagatgtcaggcctgcggcccggcactcaagtggaccctgagattgagctttttgtaaaggctggaagtgatggagagagtattggaaactgtcccttttgccaacgccttttcatgatcctctggcttaaaggagttaaatttaatgtgacaactgttgacatgaccaggtaccctcacctgagtcccaagtacaaggagtcttttgatgtgggctgtaacctctttgccaagttttctgcatacattaagaatacacaaaaggaggcaaataagaattttgaaaaatctctgctcaaagaattcaagcgtctggatgactacttaaacaccccacttctggatgaaattgatccagacagtgctgaggaacccccagtttccagaagactattcttggat

SEQ ID NO: 117418 - DNA, 2655 bp, Homo sapiens
  Payload ID: 2919
  Gene Symbol: CLIC2
  Gene Name: chloride intracellular channel 2
  Uniprot ID: O15247
  ENST ID: ENST00000369449
  CDS Start-End: 220-963
aacgatttcaagagctgcacttaagcatctagaattttctgcgtcacacctcttgagagaagagactggctccaggtctgactcagtccactacaagctagacggtcttcttaaagcaccaacattacttgagtctttggataaaattgagaaaagagtctacaagtattgtggactctacaggaggcaggaggctgacaactggcagtaaagacaaagatgtcaggcctgcggcccggcactcaagtggaccctgagattgagctttttgtaaaggctggaagtgatggagagagtattggaaactgtcccttttgccaacgccttttcatgatcctctggcttaaaggagttaaatttaatgtgacaactgttgacatgaccagaaagcctgaagaactaaaggacttagccccaggtaccaatcctccgttcctggtgtataacaaggagttgaaaacagacttcattaaaattgaggagtttttagaacaaaccctggctcctccaaggtaccctcacctgagtcccaagtacaaggagtcttttgatgtgggctgtaacctctttgccaagttttctgcatacattaagaatacacaaaaggaggcaaataagaattttgaaaaatctctgctcaaagaattcaagcgtctggatgactacttaaacaccccacttctggatgaaattgatccagacagtgctgaggaacccccagtttccagaagactattcttggatggggaccagctaacactggctgattgtagcttgttacccaagctgaacattattaaagttgctgccaagaaatatcgtgactttgacattccagcagaattctcaggagtctggcgttatctccacaatgcctatgcccgtgaagaatttacccacacgtgtcctgaagacaaagaaattgaaaatacttacgcaaatgtggctaaacagaagagttaggagagctcttacaggagacaaggctatatttgtgatcagattttacttattgacatattagaaaggtttttgcaaataagaatatgaaaaatactgtttcttctatccaactctcttatgaaaaggaactctgtattttctattagccataaataatctgtccactgtattttacaggtcttcatacttttacttaattttctttatctgtatggcaaaccactgcaatcctgaatgacatggaaagcatcacaatcttttgccctttgcttgaattcctggaatgcatacatataagctaaacagatgtctgcagttataaatgtcataagtagaggtacaatctcaccctgctccttagaaacatttccatataaatcgctaaaataatttcacatttttgttagtttaatatatacatgagtttatttctgatataaataataaatacagagagtgagcatatcagagaggcaaattcttaaagaatgatttttaaaatcagctctaggaagagctcaagatcaattggtcatagaacagcatttgacgcctagaactatgaccacctcatggtcagagatgagaatgtagcctttgtgaccagattatattatttttaaatgaagaagcactcattaaataaaacataattttaaaaaacaatataagaaacaaagtcaactgaatcttttattcatagaaatgaaaaggaaaataaaaactgtggctgaccaaaaggtcttcttgttgtccataaaaggataaggtaaacagtccttagataattacaaaactttctacaaaagttaaaatgttacattactatacgtattcagattcacttgttaaagtactcttaaatcattcaaatctggaaacaaaagctgaacttaactcttgctccctcaaaagagaaacacaagcataagtgcagcttcaaaaaaggaaaatattttaggctttggtggaagggtggagtttagataaaatttaaatgaagtagcgttttaataggttcaaagaaaagtaaggcaatgagcaaactcaaagtactgtccttgaaaaccatagagtcaagataaatgtatagtgtatggttaggtggcagagaaatgcaatcatgttgataatctttgagatacatcctgtcatcagtatatttcagaatacatgcaatgcactagcaagttacaattgatagaatacatttgaaatgttaaatgaaataagccaggcacagaaagacaaacaccacatgatctcactcatatgtggaattttaaaaagttgatctcactcatatgtggaattttaaaaagttgatctcacacaagtagagggtagaatcgtggttaccaggggctagggagagaaagaaggcagaggcactgaaagatgttggtcaatgggtataaagttacacctaggaagaataaattttggcattcaccacagtagggtgactatagcaaataataatgtagcatgtatttcaagatagctagaaaagcaggtttttaaatgtcaccacaaagaaataacaaatgtttatagtggtggatatggtaattacgcctatttgatcattatactgtgtgtacatgcattgaaacaccacattgtatcccatatatatgtacaattatgtgcccattatacatttaaaaaataaattttaaaaaccttcaa

SEQ ID NO: 117419 - DNA, 1017 bp, Homo sapiens
  Payload ID: 2920
  Gene Symbol: CLIC3
  Gene Name: chloride intracellular channel 3
  Uniprot ID: O95833
  ENST ID: ENST00000494426
  CDS Start-End: 261-971
ggatctccgtgcacaccagactcaagtccagggcagccccccacaccattccgccaccctgaggtcacaccctcaggctcagacaccccggggccgggctggcgttgctcaggcagctggttctgcgcgctgggcagcttcatctgcccgcctaggtggctccacggggcgggcccctcggccagggagggcggggcgcacagggagacttaaagagctccccaggtccccacccgcgcctgaccgcggcagctcccaccatggcggagaccaagctccagctgtttgtcaaggcgagtgaggacggggagagcgtgggtcactgcccctcctgccagcggctcttcatggtcctgctcctcaagggcgtacctttcaccctcaccacggtggacacgcgcaggtccccggacgtgctgaaggacttcgcccccggctcgcagctgcccatcctgctctatgacagcgacgccaagacagacacgctgcagatcgaggactttctggaggagacgctggggccgcccgacttccccagcctggcgcctcgttacagggagtccaacaccgccggcaacgacgttttccacaagttctccgcgttcatcaagaacccggtgcccgcgcaggacgaagccctgtaccagcagctgctgcgcgccctcgccaggctggacagctacctgcgcgcgcccctggagcacgagctggcgggggagccgcagctgcgcgagtcccgccgccgcttcctggacggcgacaggctcacgctggccgactgcagcctcctgcccaagctgcacatcgtcgacacggtgtgcgcgcacttccgccaggcgcccatccccgcggagctgcgcggcgtacgccgctacctggacagcgcgatgcaggagaaagagttcaaatacacgtgtccgcacagcgccgagatcctggcggcctaccggcccgccgtgcacccccgctagcgccccaccccgcgtctgtcgcccaataaaggcatctttgtcggga

SEQ ID NO: 117420 - DNA, 4346 bp, Homo sapiens
  Payload ID: 2921
  Gene Symbol: CLIC4
  Gene Name: chloride intracellular channel 4
  Uniprot ID: Q9Y696
  ENST ID: ENST00000374379
  CDS Start-End: 198-959
aagcggctcgggctgcggctggctcagagtggcgcggggggcgtggggcggtgctgaggagctgaagccgtggccagctcgacgccggacagtccagcgagcagcacggcgggaaccggcagccggagcagtcccggagcagaagcagcagcagcagcagcagccctcgccgttcgcggagcgcagccgagccggccatggcgttgtcgatgccgctgaatgggctgaaggaggaggacaaagagcccctcatcgagctcttcgtcaaggctggcagtgatggtgaaagcataggaaactgccccttttcccagaggctcttcatgattctttggctcaaaggagttgtatttagtgtgacgactgttgacctgaaaaggaagccagcagacctgcagaacttggctcccgggacccacccaccatttataactttcaacagtgaagtcaaaacggatgtaaataagattgaggaatttcttgaagaagtcttatgccctcccaagtacttaaagctttcaccaaaacacccagaatcaaatactgctggaatggacatctttgccaaattctctgcatatatcaagaattcaaggccagaggctaatgaagcactggagaggggtctcctgaaaaccctgcagaaactggatgaatatctgaattctcctctccctgatgaaattgatgaaaatagtatggaggacataaagttttctacacgtaaatttctggatggcaatgaaatgacattagctgattgcaacctgctgcccaaactgcatattgtcaaggtggtggccaaaaaatatcgcaactttgatattccaaaagaaatgactggcatctggagatacctaactaatgcatacagtagggacgagttcaccaatacctgtcccagtgataaggaggttgaaatagcatatagtgatgtagccaaaagactcaccaagtaaaatcgcgtttgtaaaagagatgtcttcatgtcttcccctaagaatacgcttttcctaacaggctactccttcctgtagagcagaaattgtattttgcacgaacatgcagttattgaagattaggatcaaggatagacaaggtatagtagttatcttaaaatatacactcctaagcagtattattttaaaatcctttaccctggctacctcccctacccgggttcccctctctttaatttggagacactccaccacaaacttttcactttagaggtagcttgccatctctcaggagccctcaccattgtgtccattcactgtgtatagatggcagaacttttgaggtgcaatgtttaattgttaaaaatagtagccacgactttatcaggcagccccaaactggtgcataatgcatggtacaagaaatatttatgtattttttggaattttgtaatatttagtaagagtatatgaaaggattgctactgtatcagaaatattgtttcaatttagtctatcctggatatgtactaacgaatattaccaccagagaagagagctttctacaaaagtcactacagattttgctatattgctttgtagatagatttttacttttgcctaaaagcatttatccttcataccaattgtaacatctgacaccatgtagaagctaaaagtttagagggagtgagggttttctcaagaccttcctcaagcattttatctttagaagagaaactgatgggcacctgatactctgtctaaatacgtttgttatatgtgttttgccctgtgccattcatttggaactttattgcattctttattttaaaaagcttgtttttacgtaatcatagagcttgctatttgtacatctgttgagcaacactacataactgatttttagttgacttagctatagcagtacaatgattagtaatgtaaaaattaacacagaaattaacctaaggaatgaagggtgggtttgtcaaaatatcaagtaaatttttgtttctaaagtacatttaatgtagatgacctaaagaatgcgttatccatcctatataaaagaaagataaaacacaggtcaccaattttctcatttcaccccatttaccttgtatagaggattgttcattcctttgggactaagttatagttatggtgagtgtgtatttactgtagttttgcctgatctcactcattgcacttcctggagttaaattttccaacagccatgttgaggaatagcactctgcatgtttttgttttgtttttcggggttttttttaattgaagccctaaaccaggaattatttgtgttctaacaggaggatgaacttgctgaaaataaaactttgctatgtatttactcttttttaaaagacaaaagcaaaaccagactttctacgtactactccaaagactgtgattgtgactataatacatttttggtaatttttttatacctaatttgtataggaagtgctatttctcataggctgtttcttgaaattttaagtttattgctttaaaatggcagtgtttctcccactttgatatgctaacatttagtaagcactggctttatgaaagcggctttttataagtatactgcattttttgagcctatcattaattagcttagtatgaaagataagaaaatctccatgttgtatccatttggctcaggaagattctttgccttacctttcttagaactctttattgcttatcaaaagtttgagtacccgcttggtttttttttggtaattaaatattgtatgatttatctggttcaaggaagatgcactattcagttatctattgagaaattattttgcagtggttttagtgggtgaaaatgtcccatctgcaccagtacacaggcaggcattatcattcttcacctactttttaaatagtggcaacttgggattcattctggtgattctgaaccttgcctcatagcttaaagtataaaaaagattcaagagcagtgaggtttgttctttccagtgaatggtggactgagtggtgcgaggtggagggctaacaagaggaaagaactacattcttcagaatacagtgatgaaaattcattttgaaactcaaatattttcattttggatattctcctgtttttattaaaccagtgattacacctggccatccctctaaatgttctaggaaggcatgtctattgtgattttgatgaagacagaattatttttctctgtagaaacacagataccactttatcagggaagttagtcaaatgaaatggaaattggtaaatggacaaaagctagctagtaaaaaggacgacccagcaacatgctttaaccccattgtatgtttgtggaaagagcatagtttaacatcttgagaaatttgggacataaagttttcatggtagacagttcatgcagtatatgaattgccataatggaaataatctgattttatttttacaactaacatccattccccttcatttaaacaccttttgtgttttacttcagtgaggagattggagtctgaatggatctgttttccaagagattctgagaaatttttgtattcagcagttggaaagctctctattctagttgataaaacttcccttttttgatgtagatgcagatattctatacagttctgttgtcttttactaggactgtaaacttttgtgataaaattcaaataagattttatttcttggtaattttggctttcacaatttatctttaaatccttgagcaatctgtatacaattaagagatttctgacatttattcttacactaaatggatcaactctaggatttaggcatgttaacttctgttgtgttttgaatctctccagagttgcatgtagatagcatttatttctgtgcccttaaacccatttagaaaataactacaaagtaaaaatgtagaggaaatagaaatgtattttttcatgaacattttgatacaaatttcatcatttaatgattcaccaatttcttgcattaatttgaatttaagcatttaattcaaagagaggggagcatccattattgatacatgtgggcttttaaaaactccatcctttataaatagtcaaggtttgggccacacaaagtatatttttatcatggaaaaatttcaactcctcaagccgtaatgttgaacagaattggagtattttctttataatttcttgaacaggcaaatgaaagcttattatagaatgcatgtattttcttttatctttggaacatcagcaccagtatattgctggcagctattgtattaaaaaataaagtatattttcactatcataaaggattcttttttcccccctcatgaaaataaacaacaacttggggtaaaagtg

SEQ ID NO: 117421 - DNA, 2723 bp, Homo sapiens
  Payload ID: 2921
  Gene Symbol: CLIC4
  Gene Name: chloride intracellular channel 4
  Uniprot ID: Q9Y696
  ENST ID: ENST00000488683
  CDS Start-End: 173-934
agagtggcgcggggggcgtggggcggtgctgaggagctgaagccgtggccagctcgacgccggacagtccagcgagcagcacggcgggaaccggcagccggagcagtcccggagcagaagcagcagcagcagcagcagccctcgccgttcgcggagcgcagccgagccggccatggcgttgtcgatgccgctgaatgggctgaaggaggaggacaaagagcccctcatcgagctcttcgtcaaggctggcagtgatggtgaaagcataggaaactgccccttttcccagaggctcttcatgattctttggctcaaaggagttgtatttagtgtgacgactgttgacctgaaaaggaagccagcagacctgcagaacttggctcccgggacccacccaccatttataactttcaacagtgaagtcaaaacggatgtaaataagattgaggaatttcttgaagaagtcttatgccctcccaagtacttaaagctttcaccaaaacacccagaatcaaatactgctggaatggacatctttgccaaattctctgcatatatcaagaattcaaggccagaggctaatgaagcactggagaggggtctcctgaaaaccctgcagaaactggatgaatatctgaattctcctctccctgatgaaattgatgaaaatagtatggaggacataaagttttctacacgtaaatttctggatggcaatgaaatgacattagctgattgcaacctgctgcccaaactgcatattgtcaaggtggtggccaaaaaatatcgcaactttgatattccaaaagaaatgactggcatctggagatacctaactaatgcatacagtagggacgagttcaccaatacctgtcccagtgataaggaggttgaaatagcatatagtgatgtagccaaaagactcaccaagtaaaatcgcgtttgtaaaagagatgtcttcatgtcttcccctaagaatacgcttttcctaacaggctactccttcctgtagagcagaaattgtattttgcacgaacatgcagttattgaagattaggatcaaggatagacaaggtatagtagttatcttaaaatatacactcctaagcagtattattttaaaatcctttaccctggctacctcccctacccgggttcccctctctttaatttggagacactccaccacaaacttttcactttagaggtagcttgccatctctcaggagccctcaccattgtgtccattcactgtgtatagatggcagaacttttgaggtgcaatgtttaattgttaaaaatagtagccacgactttatcaggcagccccaaactggtgcataatgcatggtacaagaaatatttatgtattttttggaattttgtaatatttagtaagagtatatgaaaggattgctactgtatcagaaatattgtttcaatttagtctatcctggatatgtactaacgaatattaccaccagagaagagagctttctacaaaagtcactacagattttgctatattgctttgtagatagatttttacttttgcctaaaagcatttatccttcataccaattgtaacatctgacaccatgtagaagctaaaagtttagagggagtgagggttttctcaagaccttcctcaagcattttatctttagaagagaaactgatgggcacctgatactctgtctaaatacgtttgttatatgtgttttgccctgtgccattcatttggaactttattgcattctttattttaaaaagcttgtttttacgtaatcatagagcttgctatttgtacatctgttgagcaacactacataactgatttttagttgacttagctatagcagtacaatgattagtaatgtaaaaattaacacagaaattaacctaaggaatgaagggtgggtttgtcaaaatatcaagtaaatttttgtttctaaagtacatttaatgtagatgacctaaagaatgcgttatccatcctatataaaagaaagataaaacacaggtcaccaattttctcatttcaccccatttaccttgtatagaggattgttcattcctttgggactaagttatagttatggtgagtgtgtatttactgtagttttgcctgatctcactcattgcacttcctggagttaaattttccaacagccatgttgaggaatagcactctgcatgtttttgttttgtttttcggggttttttttaattgaagccctaaaccaggaattatttgtgttctaacaggaggatgaacttgctgaaaataaaactttgctatgtatttactcttttttaaaagacaaaagcaaaaccagactttctacgtactactccaaagactgtgattgtgactataatacatttttggtaatttttttatacctaatttgtataggaagtgctatttctcataggctgtttcttgaaattttaagtttattgctttaaaatggcagtgtttctcccactttgatatgctaacatttagtaagcactggctttatgaaagcggctttttataagtatactgcattttttgagcctatcattaattagcttagtattttctttataatttcttgaacaggcaaatgaaagcttattatagaatgcatgtattttcttttatctttggaacatcagcaccagtatattgctggcagctattgtattaaaaaataaagtatattttcactatc

SEQ ID NO: 117422 - DNA, 6023 bp, Homo sapiens
  Payload ID: 2922
  Gene Symbol: CLIC5
  Gene Name: chloride intracellular channel 5
  Uniprot ID: Q9NZA1
  ENST ID: ENST00000185206
  CDS Start-End: 154-1386
attgttagagacctgtcattgatagcagttgctagttgctgccttttaagagctcgttgattcctctgcaaggtggtgcagcatcctctgtcccttcattcatttcagatctactcaggtctccctgtaaacagatctctcggatcaataagcatgaatgacgaagactacagcaccatctatgacacaatccaaaatgagaggacgtatgaggttccagaccagccagaagaaaatgaaagtccccattatgatgatgtccatgagtacttaaggccagaaaatgatttatatgccactcagctgaatacccatgagtatgattttgtgtcagtctataccattaagggtgaagagaccagcttggcctctgtccagtcagaagacagaggctacctcctgcctgatgagatatactctgaactccaggaggctcatccaggtgagccccaggaggacaggggcatctcaatggaagggttatattcatcaacccaggaccagcaactctgcgcagcagaactccaggagaatgggagtgtgatgaaggaagatctgccttctccttcaagcttcaccattcagcacagtaaggccttctctaccaccaagtattcctgctattctgatgctgaaggtttggaagaaaaggagggagctcacatgaaccctgagatttacctctttgtgaaggctggaatcgatggagaaagcatcggcaactgtcctttctctcagcgcctcttcatgatcctctggctgaaaggagtcgtgttcaatgtcaccactgtggatctgaaaagaaagccagctgacctgcacaacctagcccccggcacgcacccgcccttcctgaccttcaacggggacgtgaagacagacgtcaataagatcgaggagttcctggaggagaccttgacccctgaaaagtaccccaaactggctgcaaaacaccgggaatccaacacagcgggcatcgacatcttttccaagttttctgcctacatcaaaaataccaagcagcagaacaatgctgctcttgaaagaggcctaaccaaggctctaaagaaattggatgactacctgaacacccctctaccagaggagattgacgccaacacttgtggggaagacaaggggtcccggcgcaagttcctggatggggatgagctgaccctggctgactgcaatctgttgcccaagctccatgtggtcaagattgtggccaagaaataccgcaactatgatatcccggctgagatgacaggcctgtggcggtacctcaagaacgcctatgcccgtgatgagttcaccaacacctgtgcagctgacagtgagatcgagttggcctacgctgatgtcgccaaacgcctcagccgatcctgagcacagccattttgccccatccccgctgcagaaggactcaaccactcccctaagactccagcttcatagactcctctgtatcactgccttgaggcgcactttttataatcaagcctcatcttgctggtatcatgggaactccagcctgctatctttcatgaaggtcagcaccatccctggcctcctcacataggaatctagcagaaatgatagacacagtccacctttcggccggccagcctgatctgggctcagcatgtttggggtcagtcagtgttggagagcccacatatgggattgccactagcttcttctgccaatatcaaaataccttctcagatgctttagaaacatgcaacaccaactccttttctaccctcctctccgtccatacctacaaggccaaggacaaacgccatcttcatccttcttagaaagagatctattaccccattaggggagacagagagagtgaatggaggagtaccgagctggctatggacttgggtgtctggcaaacacagcttcagtctcactacttctgacactctggttattgggcactaagggccagactggaaagtcacttgagacacattctcagtttgttgcagtgccaggaatgctgcgctgctgctgctgcgcacctggcccatgctgtccctggcttccatgccgtccaggccctgccagaaaaggaaattggcatgcaattctaaactgcagtgactgggatgggaggggaggggagcagtgttgatgccaaaatacccacggggtctaccagccatggggtttgcttgcttaggagtagttgtttcagaggtgattacaggcctgggtttgactgtgcttaccaatgagtggtttttgagctatgagaaagtggatgggagtgggaggaggagagatgggtgaagacaaaagagttctttatgagcctcgatgttccctggtaaacttttaaaaaggccttctctcatgatctaagtcttggactggtggcatcatgtaactgctaaccttacagtaaaaacccaagaatgggtcaaaaatgtcttcccagtttctccaagctgcttctggaatgcaggtctgtcggctgggtgctctccagcagctgctcctgcctgattcaactgtagcctgtaatgggtaaaagccacatttaggaggtggtctgatcatagaacaccttaggaagaaagtccatgagactttctgactaggaaaccatgtggtttgaacttgaagaaaaatgtagacccatctgggttaattttcctacaatctgactcaactgccaggtgaaaaaaaaaaggaaaaatttttaagctaatatttcactcttttgtcattctccttaagtttcatctcctaaaaagcttacccagcctgagcttggggacctgtgcagaggaaactaagaaaaatgcactcatcaactccttctcccagtgaacgcccggtgagaaaatccatttgccacaggcccttaccttcaacaatcccccttctatagtgttcgctggtaaagggtgaggctcccaagtgctggaaagcccctggacttggctcatttctcagcaagggcaggatagcacgggtcctttccatagaaatatcaacaaattctaacccaagcaatccctggacctacctgcctccagggatctctgaagaaaaaaagtaacccattgatcaaatcagaggagaggaagcaggaggtctcctagagcccattgaggaagaggaactttctcagtaggacactttataagcctgagaaagctttgaaaaggcggaatgagttgattcatttccacctcaaaaggaacctttccaggtccccctggaaattgtgccctggagatgtttaacaaggagaactggtgaggaaagagtccttttttactgtagggaaaagccccaaactggcctcctgggggatgagggctgaaatgatcccgaaggccttttaattagtgtgaaatcctgctgtactcagaaatccttccccgaatttacagcacaggcaggatgacctaagaggcagtttacttccctgagacccacagttgggctgttctggaaacacatctgtgaatcatagccaattgccacagagaaaacagaaccaagcctccggtgaggccactccaccccagagaagtctgcagaattccaaggactcggattggatgttcagaattcagcaactggaaagtccttaaaaacaaacaggccaaaccaaatcaatattgctgtttctagatgtcccttctgtggttgagctagttttacagagataaatatattaagacaaggaggtgggggtgttatatgatcaatgatagccatttgaaagagagggaggagtacagaaggaaggcacttctgggtacttaattcagaaatttctttatatttcagcactggattatcatataatgcaagtgactatggactaagagttagttatggtgtcttatgactagatttattatggtatattaaagtaacaataatattaatattaccttcctttttttttttgtttcaaaagagatctttctccagatgcttcagcctgtctggccttcttatcatatgtgcagcacatcatgtctcagcaacagtgtggtgaggtccttaggtgtcccaagaacaactcagggagcacgggagggtctgcagttgggaccccacaactatacagctatagggtaggaggcttccttttcattggtcctgaatgaatacaaatcgctcagaaagcattttggtggcacagaaaggggatgtatttgtgttgagatcttattttattttgtatttatttatcttctttgacttgcacagcactattgggggtgggggaagcagggtagtgggagacgaaggcagaagcaagagtcaaactcagaatgactgagttgaattcactgtctagtcagcaatgcctgcttctgagtttggcccagagagaaggtattgagtaagattttaataactgtaaaaagtaagctggataagtaaaatcatgatggatccaaagcacagtttcttcatctcctgataaagaaagtcaaatgcttgataaattcagagtcacagatgtgagcatagctatattcttttaaacgagaggtagagtgacctagcactaagcaaatgagctgaaatgtcggaaacagagtccatcagcttatttggccacacgatcccaaactagttttatcttgggaaatggccctgtcctcagcattcccttcttgtgctggtggggccagtgaagtcttgatcttatcagaaaaaggccacaccaagtgcgagttttcccaggctgactttccaggcccttatcaaatgaaacaacagaagctcttcacagttctgtgccccatggccactccacagacagacaataccaagcatcttagaactgtcataagataggtcatgcctgaaatagatcttgaccatatgagagtcccagaaatcagcaaggcctggacaaatagaactaagagagaggcagaggcaggaagctgcgggtctatcttgtaaagagtttagcatcactgtgagagtgtgtgtctaaaattaaattaaactagaagcagcaggtgagtatttggtaagtacttctgtgactcgcctcaattcccactggccaggggccatctcaactgcacggtgaatcaagatgctggtgtcatcctccttggaaaaaggaaatgttaactcatggttaaaactaagtacaatgattcccaagggatcactttcttatttttttaaatgacattaaggagaatcttaagaaagcatcagagaaagacatgtgcatgtgaagcaccctgattctgatgttaggaaaacttaagcgaacaggacctgctgcacacagccccattgtcttctatccatttctctttatcattcaaatcaagcaacatgtgccctcctcatcaacacacattcttcccctttgtcagtatgcatctcccagcttagtgtcaggatactttcgattcataattatgtatgatccaaagtgtgcataatttcatttaacgttaaagaaatagatccaattcctttcttgcaaccaaaaataaataaaatacgttgcctcaatataaggtttgggctattctgtgtttctatagaagcaatctgtttttggtaaaatgtacttttaaggatccagtcatctgaagtattttatgtagagttagagatttcacaatattgactatacatatatttaaaatataaattatccagctgatgtttgaatttgtcttactttcctggccacctcgttgtcctattttataagctggggagttaactagcttaacaaaagatgcttagcttttgtaaaagaacaagtgtttcattttacaaagacactccaaatgatagttacttgattttctcgagacctttaactatggtgatgaataacaggacttgctttcaagccttaataaatgtaaaatgccttttaatgaagatacagctgagtgttttcctcatgaatctgaaccaattaccaatttgtgttccagtcttgattggtattgactgattcaaataaagttggtttattttcaaatattacaaaa

SEQ ID NO: 117423 - DNA, 2390 bp, Homo sapiens
  Payload ID: 2922
  Gene Symbol: CLIC5
  Gene Name: chloride intracellular channel 5
  Uniprot ID: Q9NZA1
  ENST ID: ENST00000339561
  CDS Start-End: 308-1063
cggatcctgtgacacctccgggcagcccggcacttgttgctcccacgacctgttgtcattcccttaacccggctttccccgtggccccccgcctcctcccggcttcgctccttttcatgtgagcatctgggacactgatctctcagaccccgctgctcgggctggagaatagatggttttgtgaaaaattaaacaccgccctgaagaggagccccgctgggcagcggcaggagcgcagagtgctggcccaggtgctgcagaggtggcgcctccccggcccgggacggtagccccgggcgccaacggcatgacagactcggcgacagctaacggggacgacagggaccccgagatcgagctctttgtgaaggctggaatcgatggagaaagcatcggcaactgtcctttctctcagcgcctcttcatgatcctctggctgaaaggagtcgtgttcaatgtcaccactgtggatctgaaaagaaagccagctgacctgcacaacctagcccccggcacgcacccgcccttcctgaccttcaacggggacgtgaagacagacgtcaataagatcgaggagttcctggaggagaccttgacccctgaaaagtaccccaaactggctgcaaaacaccgggaatccaacacagcgggcatcgacatcttttccaagttttctgcctacatcaaaaataccaagcagcagaacaatgctgctcttgaaagaggcctaaccaaggctctaaagaaattggatgactacctgaacacccctctaccagaggagattgacgccaacacttgtggggaagacaaggggtcccggcgcaagttcctggatggggatgagctgaccctggctgactgcaatctgttgcccaagctccatgtggtcaagattgtggccaagaaataccgcaactatgatatcccggctgagatgacaggcctgtggcggtacctcaagaacgcctatgcccgtgatgagttcaccaacacctgtgcagctgacagtgagatcgagttggcctacgctgatgtcgccaaacgcctcagccgatcctgagcacagccattttgccccatccccgctgcagaaggactcaaccactcccctaagactccagcttcatagactcctctgtatcactgccttgaggcgcactttttataatcaagcctcatcttgctggtatcatgggaactccagcctgctatctttcatgaaggtcagcaccatccctggcctcctcacataggaatctagcagaaatgatagacacagtccacctttcggccggccagcctgatctgggctcagcatgtttggggtcagtcagtgttggagagcccacatatgggattgccactagcttcttctgccaatatcaaaataccttctcagatgctttagaaacatgcaacaccaactccttttctaccctcctctccgtccatacctacaaggccaaggacaaacgccatcttcatccttcttagaaagagatctattaccccattaggggagacagagagagtgaatggaggagtaccgagctggctatggacttgggtgtctggcaaacacagcttcagtctcactacttctgacactctggttattgggcactaagggccagactggaaagtcacttgagacacattctcagtttgttgcagtgccaggaatgctgcgctgctgctgctgcgcacctggcccatgctgtccctggcttccatgccgtccaggccctgccagaaaaggaaattggcatgcaattctaaactgcagtgactgggatgggaggggaggggagcagtgttgatgccaaaatacccacggggtctaccagccatggggtttgcttgcttaggagtagttgtttcagaggtgattacaggcctgggtttgactgtgcttaccaatgagtggtttttgagctatgagaaagtggatgggagtgggaggaggagagatgggtgaagacaaaagagttctttatgagcctcgatgttccctggtaaacttttaaaaaggccttctctcatgatctaagtcttggactggtggcatcatgtaactgctaaccttacagtaaaaacccaagaatgggtcaaaaatgtcttcccagtttctccaagctgcttctggaatgcaggtctgtcggctgggtgctctccagcagctgctcctgcctgattcaactgtagcctgtaatgggtaaaagccacatttaggaggtggtctgatcatagaacaccttaggaagaaagtccatgagactttctgactaggaaaccatgtggtttgaacttgaagaaaaatgtagacccatctgggttaattttcctacaatctgactcaactgccaggtgaaaaaaaaaaggaaaaa

SEQ ID NO: 117424 - DNA, 2051 bp, Homo sapiens
  Payload ID: 2922
  Gene Symbol: CLIC5
  Gene Name: chloride intracellular channel 5
  Uniprot ID: Q9NZA1
  ENST ID: ENST00000544153
  CDS Start-End: 348-965
attttgggcgcgttggcggcggcgggatcgctgacagtcgcggatcctgtgacacctccgggcagcccggcacttgttgctcccacgacctgttgtcattcccttaacccggctttccccgtggccccccgcctcctcccggcttcgctccttttcatgtgagcatctgggacactgatctctcagaccccgctgctcgggctggagaatagatggttttgtgaaaaattaaacaccgccctgaagaggagccccgctgggcagcggcaggagcgcagagtgctggcccaggtgctgcagaggtggcgcctccccggcccgggacggtagccccgggcgccaacggcatgacagactcggcgacagctaacggggacgacagggaccccgagatcgagctctttgtgaaggctggaatcgatggagaaagcatcggcaactgtcctttctctcagcgcctcttcatgatcctctggctgaaaggagtcgtgttcaatgtcaccactgtggatctgaaaagaaagccagctgacctgcacaacctagcccccggcacgcacccgcccttcctgaccttcaacggggacgtgaagacagacgtcaataagatcgaggagttcctggaggagaccttgacccctgaaaagtaccccaaactggctgcaaaacaccgggaatccaacacagcgggcatcgacatcttttccaagttttctgcctacatcaaaaataccaagcagcagaacaatgctgctcttgaaagaggcctaaccaaggctctaaagaaattggatgactacctgaacacccctctaccagaggagattgacgccaacacttgtggggaagacaaggggtcccggcgcaagttcctggatggggatgagctgaccctggctgactgcaatctgttgcccaagctccatgtggtcaaggaacaagtaccactgaaagggatgatataattccagctcagtcacactgtgtcagagtgatacaatgcaaagatcaggagacccgagttccggtcctgtatttgctgccaactagcagcatgagctgaggcacatcatttaatctttttggaattcatttttctcatgcctagaagaacagaagtggattgtattccttcttgccttcttttcctttcttctttccctccttctttccttttctcttgctcaaacatgtattcactaccactcaaaaaccatttgttgaacaaagcaaacaaatgaatctcccaagccttgggcttcatcctgtgatttcctcaattcccacctgccttaaattactcagtgaagccctgtccttggagaaaattcagtgggtggttaacccagagaagctggagatcaaaaagaagatggccaatgaaagaacaaaggccagcccttggcccctatctctttggatttctgctgatccagcttatcagatcccagaaacctggcaaacctctaaagttcacaaagagcgaaggggaagccaagtcaggcctccagtttggcttcggatgccaaaacttaatctgggctgtgggagctaactgttttcatatgaaagagcaaattcagaacatgagcatggaagtccctgcgaacgtcagatctccgtgtgcatccttacccccttgctgctttcatgctcactctcctcttgcgtggctcgctttcaggtttatctccatccctggaagcagagttgctctggcccaggctctccatgagagtttggcttgaacattcattgtctggccccctcctagttctcatctcccaaagtcaagccaatgtgtgaagaaatgaccagctcagcagccaaggcccagggtgcacaggtcttcgttgggagaggcatctgcaggcctttccttgctcactgggatccttgcctagcatagtgacgatgttcagccctggagacaaacaagaaggggaacaccaacatcaatagaagtatatatttacaaattgcatttctgctgtattgaaactaacattctgccctttaaaatcctgaaaataaaatttcagtatgaaatg

SEQ ID NO: 117425 - DNA, 3806 bp, Homo sapiens
  Payload ID: 2923
  Gene Symbol: CLIC6
  Gene Name: chloride intracellular channel 6
  Uniprot ID: Q96NY7
  ENST ID: ENST00000349499
  CDS Start-End: 1-2061
atggccgaggccgcggagccggagggggttgccccgggtccccaggggccgccggaggtccccgcgcctctggctgagagacccggagagccaggagccgcgggcggggaggcagaagggccggaggggagcgagggcgcagaggaggcgccgaggggcgccgccgctgtgaaggaggcaggaggcggcgggccagacaggggcccggaggccgaggcgcggggcacgaggggggcgcacggcgagactgaggccgaggagggagccccggagggtgccgaggtgccccaaggaggggaggagacaagcggcgcgcagcaggtggagggggcgagcccgggacgcggcgcgcagggcgagccccgcggggaggctcagagggagcccgaggactctgcggcccccgagaggcaggaggaggcggagcagaggcctgaggtcccggaaggtagcgcgtccggggaggcgggggacagcgtagacgcggagggcccgctgggggacaacatagaagcggagggcccggcgggcgacagcgtagaggcggagggccgggtgggggacagcgtagacgcggaaggtccggcgggggacagcgtagacgcggagggcccgctgggggacaacatacaagccgagggcccggcgggggacagcgtagacgcggagggccgggtgggggacagcgtagacgcggaaggtccggcgggggacagcgtagacgcggagggccgggtgggggacagcgtagaggcgggggacccggcgggggacggcgtagaagcgggggtcccggcgggggacagcgtagaagccgaaggcccggcgggggacagcatggacgccgagggtccggcaggaagggcgcgccgggtctcgggtgagccgcagcaatcgggggacggcagcctctcgccccaggccgaggcaattgaggtcgcagccggggagagtgcggggcgcagccccggtgagctcgcctgggacgcagcggaggaggcggaggtcccgggggtaaaggggtccgaagaagcggcccccggggacgcaagggcagacgctggcgaggacagggtaggggatgggccacagcaggagccgggggaggacgaagagagacgagagcggagcccggaggggccaagggaggaggaagcagcggggggcgaagaggaatcccccgacagcagcccacatggggaggcctccaggggcgccgcggagcctgaggcccagctcagcaaccacctggccgaggagggccccgccgagggtagcggcgaggccgcgcgcgtgaacggccgccgggaggacggagaggcgtccgagccccgggccctggggcaggagcacgacatcaccctcttcgtcaaggctggttatgatggtgagagtatcggaaattgcccgttttctcagcgtctctttatgattctctggctgaaaggcgttatatttaatgtgaccacagtggacctgaaaaggaaacccgcagacctgcagaacctggctcccggaacaaaccctcctttcatgacttttgatggtgaagtcaagacggatgtgaataagatcgaggagttcttagaggagaaattagctcccccgaggtatcccaagctggggacccaacatcccgaatctaattccgcaggaaatgacgtgtttgccaaattctcagcgtttataaaaaacacgaagaaggatgcaaatgagattcatgaaaagaacctgctgaaggccctgaggaagctggataattacttaaatagccctctgcctgatgaaatagatgcctacagcaccgaggatgtcactgtttctggaaggaagtttctggatggggacgagctgacgctggctgactgcaacctcttacccaagctccatattattaagattgtggccaagaagtacagagattttgaatttccttctgaaatgactggcatctggagatacttgaataatgcttatgctagagatgagttcacaaatacgtgtccagctgatcaagagattgaacacgcatattcagatgttgcaaaaagaatgaaatgaagctgggctgttttctgtcttatttctcagttgagtgagcaaggatacgaaaacagtgtgtttgaaaacaaattaggtttgggttcaattccttcaatttttaaaaaactggtctctgagagttttttaaatcattgagagcctgtttttcttctctaaaacattagtttaattttcttcaaaatgaaaatactgctttgtaattacaaaatgagacacacctatcttgatattttaaagcaatatcagagggtgtaaagaaggacattttaacaatcgccttcaattttactccacttaattaccgaaaacttactggagaacatgttccaaatcttcagtatcttgttctctctctctctctctctctctctctctatcacacacacacacacacacacacacacacacacacacaatttcattcatatatggtattgcattattttattttaaagcactggtgaggggacctcttggtgattcctggatgatcatacacagaggacttacaccatacaaaaatattgggcaccgcagtgccagagaagatgcttgaggttagattttaaggagtggggaattgtgaagcccacagatgcgcacgcaatgaccagcaggaaccggaagccctgggtcacccccactctgcctcatttctgcctccaggatgccactgcctctgcttccaggaaaggcaagggggagggtgcttatccgtgtctctggttccagcttcctgtctttgctccctcccctctcttagagactgtgccttcagcaggactcttaatatctgctgcaacttggagaacctccctgccctgaaatgtgaaccaagcacactttggttccttctccgggcggctctctctgagacccaaggctgcagtccctcagtgctggtggtatcgtgtggggatagcaatacttctctgcccttcattgtctcatctagacatcaagcagggaaaatccagggagattaaattcatggtgacaagtcctgggcagttctggtaaacggtccagttagggagggagtagaaactattgactcaaaagagtttctggctgatctgtggctttgcctccaccatccctaaccaacctctcatcacagctttgtgtgtgggctgagtgctggccttaaccctaggcgtggaagagaaaatgtgaggttgtttagatactcatcaggacctcacaggagctgagacttatcagccagaatgtgttcttcggacagtcgtacacatcttacagaaaaccctccttgtagagttggttgtggtatgtgtttgatgctataaagctcatttttaatgtgtacacctgctctagggacgattcgtttgaaagagagtaagatgcattaacagaaactatcctgggattaggtgaaaaatgtctagcaaaagaaacaaagtctttaatagagtggcctctttcgctcttcgattatgactgctgcagttttaccccagcagtcagctgtctttgtcaaccatacgtttttggagattgggtctagcacatgtcacccttgtccacgttgtttcacatctggttagggggcagattttaaaatgtagttttgtaatgttacatttaagcatgataaatgattagactaccagatgttactagtgctaactttgtattcttagacattaaaatgattgacataaactctttgtgccttgaaaatgaaacaaattataaaaatgtttaaatggaaccaa

SEQ ID NO: 117426 - DNA, 3860 bp, Homo sapiens
  Payload ID: 2923
  Gene Symbol: CLIC6
  Gene Name: chloride intracellular channel 6
  Uniprot ID: Q96NY7
  ENST ID: ENST00000360731
  CDS Start-End: 1-2115
atggccgaggccgcggagccggagggggttgccccgggtccccaggggccgccggaggtccccgcgcctctggctgagagacccggagagccaggagccgcgggcggggaggcagaagggccggaggggagcgagggcgcagaggaggcgccgaggggcgccgccgctgtgaaggaggcaggaggcggcgggccagacaggggcccggaggccgaggcgcggggcacgaggggggcgcacggcgagactgaggccgaggagggagccccggagggtgccgaggtgccccaaggaggggaggagacaagcggcgcgcagcaggtggagggggcgagcccgggacgcggcgcgcagggcgagccccgcggggaggctcagagggagcccgaggactctgcggcccccgagaggcaggaggaggcggagcagaggcctgaggtcccggaaggtagcgcgtccggggaggcgggggacagcgtagacgcggagggcccgctgggggacaacatagaagcggagggcccggcgggcgacagcgtagaggcggagggccgggtgggggacagcgtagacgcggaaggtccggcgggggacagcgtagacgcggagggcccgctgggggacaacatacaagccgagggcccggcgggggacagcgtagacgcggagggccgggtgggggacagcgtagacgcggaaggtccggcgggggacagcgtagacgcggagggccgggtgggggacagcgtagaggcgggggacccggcgggggacggcgtagaagcgggggtcccggcgggggacagcgtagaagccgaaggcccggcgggggacagcatggacgccgagggtccggcaggaagggcgcgccgggtctcgggtgagccgcagcaatcgggggacggcagcctctcgccccaggccgaggcaattgaggtcgcagccggggagagtgcggggcgcagccccggtgagctcgcctgggacgcagcggaggaggcggaggtcccgggggtaaaggggtccgaagaagcggcccccggggacgcaagggcagacgctggcgaggacagggtaggggatgggccacagcaggagccgggggaggacgaagagagacgagagcggagcccggaggggccaagggaggaggaagcagcggggggcgaagaggaatcccccgacagcagcccacatggggaggcctccaggggcgccgcggagcctgaggcccagctcagcaaccacctggccgaggagggccccgccgagggtagcggcgaggccgcgcgcgtgaacggccgccgggaggacggagaggcgtccgagccccgggccctggggcaggagcacgacatcaccctcttcgtcaaggtaaaacttactgcattaggctgttctcgcattgctataaagaaatacctgagagctggttatgatggtgagagtatcggaaattgcccgttttctcagcgtctctttatgattctctggctgaaaggcgttatatttaatgtgaccacagtggacctgaaaaggaaacccgcagacctgcagaacctggctcccggaacaaaccctcctttcatgacttttgatggtgaagtcaagacggatgtgaataagatcgaggagttcttagaggagaaattagctcccccgaggtatcccaagctggggacccaacatcccgaatctaattccgcaggaaatgacgtgtttgccaaattctcagcgtttataaaaaacacgaagaaggatgcaaatgagattcatgaaaagaacctgctgaaggccctgaggaagctggataattacttaaatagccctctgcctgatgaaatagatgcctacagcaccgaggatgtcactgtttctggaaggaagtttctggatggggacgagctgacgctggctgactgcaacctcttacccaagctccatattattaagattgtggccaagaagtacagagattttgaatttccttctgaaatgactggcatctggagatacttgaataatgcttatgctagagatgagttcacaaatacgtgtccagctgatcaagagattgaacacgcatattcagatgttgcaaaaagaatgaaatgaagctgggctgttttctgtcttatttctcagttgagtgagcaaggatacgaaaacagtgtgtttgaaaacaaattaggtttgggttcaattccttcaatttttaaaaaactggtctctgagagttttttaaatcattgagagcctgtttttcttctctaaaacattagtttaattttcttcaaaatgaaaatactgctttgtaattacaaaatgagacacacctatcttgatattttaaagcaatatcagagggtgtaaagaaggacattttaacaatcgccttcaattttactccacttaattaccgaaaacttactggagaacatgttccaaatcttcagtatcttgttctctctctctctctctctctctctctctatcacacacacacacacacacacacacacacacacacacaatttcattcatatatggtattgcattattttattttaaagcactggtgaggggacctcttggtgattcctggatgatcatacacagaggacttacaccatacaaaaatattgggcaccgcagtgccagagaagatgcttgaggttagattttaaggagtggggaattgtgaagcccacagatgcgcacgcaatgaccagcaggaaccggaagccctgggtcacccccactctgcctcatttctgcctccaggatgccactgcctctgcttccaggaaaggcaagggggagggtgcttatccgtgtctctggttccagcttcctgtctttgctccctcccctctcttagagactgtgccttcagcaggactcttaatatctgctgcaacttggagaacctccctgccctgaaatgtgaaccaagcacactttggttccttctccgggcggctctctctgagacccaaggctgcagtccctcagtgctggtggtatcgtgtggggatagcaatacttctctgcccttcattgtctcatctagacatcaagcagggaaaatccagggagattaaattcatggtgacaagtcctgggcagttctggtaaacggtccagttagggagggagtagaaactattgactcaaaagagtttctggctgatctgtggctttgcctccaccatccctaaccaacctctcatcacagctttgtgtgtgggctgagtgctggccttaaccctaggcgtggaagagaaaatgtgaggttgtttagatactcatcaggacctcacaggagctgagacttatcagccagaatgtgttcttcggacagtcgtacacatcttacagaaaaccctccttgtagagttggttgtggtatgtgtttgatgctataaagctcatttttaatgtgtacacctgctctagggacgattcgtttgaaagagagtaagatgcattaacagaaactatcctgggattaggtgaaaaatgtctagcaaaagaaacaaagtctttaatagagtggcctctttcgctcttcgattatgactgctgcagttttaccccagcagtcagctgtctttgtcaaccatacgtttttggagattgggtctagcacatgtcacccttgtccacgttgtttcacatctggttagggggcagattttaaaatgtagttttgtaatgttacatttaagcatgataaatgattagactaccagatgttactagtgctaactttgtattcttagacattaaaatgattgacataaactctttgtgccttgaaaatgaaacaaattataaaaatgtttaaatggaaccaa

SEQ ID NO: 117427 - DNA, 830 bp, Homo sapiens
  Payload ID: 2924
  Gene Symbol: CCK
  Gene Name: cholecystokinin
  Uniprot ID: P06307
  ENST ID: ENST00000334681
  CDS Start-End: 210-557
cacttcaaccggttgtcgccccagtggccgccctctgagcacgtgttactgccagtctgcgtcagcgttgggtaaatacatgactggccgacgccgccgggtggggctatttaagagacagccgcccgctggtcctccctgaacttggctcagctgccgggctgctccggttggaaacgccaagccagctgcgtcctaatccaaaagccatgaacagcggcgtgtgcctgtgcgtgctgatggcggtactggcggctggcgccctgacgcagccggtgcctcccgcagatcccgcgggctccgggctgcagcgggcagaggaggcgccccgtaggcagctgagggtatcgcagagaacggatggcgagtcccgagcgcacctgggcgccctgctggcaagatacatccagcaggcccggaaagctccttctggacgaatgtccatcgttaagaacctgcagaacctggaccccagccacaggataagtgaccgggactacatgggctggatggattttggccgtcgcagtgccgaggagtatgagtacccctcctagaggacccagccgccatcagcccaacgggaagcaacctcccaacccagaggaggcagaataagaaaacaatcacactcataactcattgtctgtggagtttgacattgtatgtatctatttattaagttctcaatgtgaaaaatgtgtctgtaagattgtccagtgcaaccacacacctcaccagaattgtgcaaatggaagacaaaatgttttcttcatctgtgactcctggtctgaaaatgttgttatgctattaaagtgatttcattctgc

SEQ ID NO: 117428 - DNA, 1527 bp, Homo sapiens
  Payload ID: 2924
  Gene Symbol: CCK
  Gene Name: cholecystokinin
  Uniprot ID: P06307
  ENST ID: ENST00000396169
  CDS Start-End: 907-1254
ctggcgttgccacagtccctccattccagagggaattccagagcggaatacggattccgattttaaaataagcgcttctaaatctttctccttgcatctaagacgggtgggggaaagaaagggagaggagttgaggtcccaaggttcaaggcctggtgatctccaggtcccaggctgggcggcctcggtgcacggagagggcgaggggcgtgttgtggagccttggcaaggcgctgctcttcctcgcgcctcggtttgcggtctgtgaaatggggttggcagtgcctttgcagggacgcggcgaactcaagcaccagcaagcggactcgaactcaaagggtttcagggtgtagacgaccagagcgcactgaggggctccaggtcggcccgctccggagccgggagagtaaccgcgtgcagggaaaggcgcacggcagcctcggtgcctcccttccctccaccggacgggtgactgactaggggtgaggtcctcacctccaggctgcgcagctgagttctggaagctgcgtcaagagaggcccaggacaccaagagccagctgtggccagagccctttcactgacccagaacactggccctcggaaacctggagaactgcgagggcttttaatgcggctgagaagaaagtgaagaccccgactcctcctctctccttcgaaagagccgacacaggagccacttcaaccggttgtcgccccagtggccgccctctgagcacgtgttactgccagtctgcgtcagcgttgggtaaatacatgactggccgacgccgccgggtggggctatttaagagacagccgcccgctggtcctccctgaacttggctcagctgccgggctgctccggttggaaacgccaagccagctgcgtcctaatccaaaagccatgaacagcggcgtgtgcctgtgcgtgctgatggcggtactggcggctggcgccctgacgcagccggtgcctcccgcagatcccgcgggctccgggctgcagcgggcagaggaggcgccccgtaggcagctgagggtatcgcagagaacggatggcgagtcccgagcgcacctgggcgccctgctggcaagatacatccagcaggcccggaaagctccttctggacgaatgtccatcgttaagaacctgcagaacctggaccccagccacaggataagtgaccgggactacatgggctggatggattttggccgtcgcagtgccgaggagtatgagtacccctcctagaggacccagccgccatcagcccaacgggaagcaacctcccaacccagaggaggcagaataagaaaacaatcacactcataactcattgtctgtggagtttgacattgtatgtatctatttattaagttctcaatgtgaaaaatgtgtctgtaagattgtccagtgcaaccacacacctcaccagaattgtgcaaatggaagacaaaatgttttcttcatctgtgactcctggtctgaaaatgttgttatgctattaaagtgatttcattctgc

SEQ ID NO: 117429 - DNA, 747 bp, Homo sapiens
  Payload ID: 2924
  Gene Symbol: CCK
  Gene Name: cholecystokinin
  Uniprot ID: P06307
  ENST ID: ENST00000434608
  CDS Start-End: 128-475
gagaggcactctgcaaacacttcctcaaactttaggaaagcaaaaacattccttctgctcaacacggcagaaaacagggtctctgccccttggcgctgggtgaggagttcccaaagaccagccagccatgaacagcggcgtgtgcctgtgcgtgctgatggcggtactggcggctggcgccctgacgcagccggtgcctcccgcagatcccgcgggctccgggctgcagcgggcagaggaggcgccccgtaggcagctgagggtatcgcagagaacggatggcgagtcccgagcgcacctgggcgccctgctggcaagatacatccagcaggcccggaaagctccttctggacgaatgtccatcgttaagaacctgcagaacctggaccccagccacaggataagtgaccgggactacatgggctggatggattttggccgtcgcagtgccgaggagtatgagtacccctcctagaggacccagccgccatcagcccaacgggaagcaacctcccaacccagaggaggcagaataagaaaacaatcacactcataactcattgtctgtggagtttgacattgtatgtatctatttattaagttctcaatgtgaaaaatgtgtctgtaagattgtccagtgcaaccacacacctcaccagaattgtgcaaatggaagacaaaatgttttcttcatctgtgactcctggtctgaaaatgttgttatgctattaaagtgatttcattctg

SEQ ID NO: 117430 - DNA, 1720 bp, Homo sapiens
  Payload ID: 2925
  Gene Symbol: CCKAR
  Gene Name: cholecystokinin A receptor
  Uniprot ID: P32238
  ENST ID: ENST00000295589
  CDS Start-End: 196-1482
tacaaatgctggagtgagtgaggtgaactcaagtcgcctttaggaatggctgaaaaagcccacacctggaaatcactccctccctgctcctccacggcaggttgcatctgcgagacgcttcggtcattagaggaatgagccgggagtgagcaattcaccagctctccagcacttggtggaaagcagcaggcaaggatggatgtggttgacagccttcttgtgaatggaagcaacatcactcctccctgtgaactcgggctcgaaaatgagacgcttttctgcttggatcagccccgtccttccaaagagtggcagccagcggtgcagattctcttgtactccttgatattcctgctcagcgtgctgggaaacacgctggtcatcaccgtgctgattcggaacaagcggatgcggacggtcaccaacatcttcctcctctccctggctgtcagcgacctcatgctctgtctcttctgcatgccgttcaacctcatccccaatctgctcaaggatttcatcttcgggagcgccgtttgcaagaccaccacctacttcatgggcacctctgtgagtgtatctacctttaatctggtagccatatctctagagagatatggtgcgatttgcaaacccttacagtcccgggtctggcagacaaaatcccatgctttgaaggtgattgctgctacctggtgcctttcctttaccatcatgactccgtaccccatttatagcaacttggtgccttttaccaaaaataacaaccagaccgcgaatatgtgccgctttctactgccaaatgatgttatgcagcagtcctggcacacattcctgttactcatcctctttcttattcctggaattgtgatgatggtggcatatggattaatctctttggaactctaccagggaataaaatttgaggctagccagaagaagtctgctaaagaaaggaaacctagcaccaccagcagcggcaaatatgaggacagcgatgggtgttacctgcaaaagaccaggcccccgaggaagctggagctccggcagctgtccaccggcagcagcagcagggccaaccgcatccggagtaacagctccgcagccaacctgatggccaagaaaagggtgatccgcatgctcatcgtcatcgtggtcctcttcttcctgtgctggatgcccatcttcagcgccaacgcctggcgggcctacgacaccgcctccgcagagcgccgcctctcaggaacccccatttccttcatcctcctcctgtcctacacctcctcctgcgtcaaccccatcatctactgcttcatgaacaaacgcttccgcctcggcttcatggccaccttcccctgctgccccaatcctggtcccccaggggcgaggggagaggtgggggaggaggaggaaggcgggaccacaggagcctctctgtccaggttctcgtacagccatatgagtgcctcggtgccaccccagtgagatgtcccctgaccctccaccgcagaaggaaggcagggaggaggcagagaagaaagaacggaagaagagatcaggaagagaaggagcagagctgatggagaaggaaggctccatctccagtgggaactcttcaaggtctgcttttcatccttcatctggattccagagcactgctccagtggggccatgattggtttctaggcagttcaaagcaggatatgttaagtaacactcacca

SEQ ID NO: 117431 - DNA, 2121 bp, Homo sapiens
  Payload ID: 2926
  Gene Symbol: CCKBR
  Gene Name: cholecystokinin B receptor
  Uniprot ID: P32239
  ENST ID: ENST00000334619
  CDS Start-End: 194-1537
cgggaacccaggcggggcgagccgcgggagagtggagggcaggcgcctgggctgggggcggggaccaggcggggcagggggcagggagaggagggcggcgggagcctgagccggaatcgcagcgtgagcaggtggagccgcgttgggagcccgccgggtcgagctgagtaaggcggcgggctcggcgggggccatggagctgctaaagctgaaccggagcgtgcagggaaccggacccgggccgggggcttccctgtgccgcccgggggcgcctctcctcaacagcagcagtgtgggcaacctcagctgcgagccccctcgcattcgcggagccgggacacgagaattggagctggccattagaatcactctttacgcagtgatcttcctgatgagcgttggaggaaatatgctcatcatcgtggtcctgggactgagccgccgcctgaggactgtcaccaatgccttcctcctctcactggcagtcagcgacctcctgctggctgtggcttgcatgcccttcaccctcctgcccaatctcatgggcacattcatctttggcaccgtcatctgcaaggcggtttcctacctcatgggggtgtctgtgagtgtgtccacgctaagcctcgtggccatcgcactggagcggtacagcgccatctgccgaccactgcaggcacgagtgtggcagacgcgctcccacgcggctcgcgtgattgtagccacgtggctgctgtccggactactcatggtgccctaccccgtgtacactgtcgtgcaaccagtggggcctcgtgtgctgcagtgcgtgcatcgctggcccagtgcgcgggtccgccagacctggtccgtactgctgcttctgctcttgttcttcatcccgggtgtggttatggccgtggcctacgggcttatctctcgcgagctctacttagggcttcgctttgacggcgacagtgacagcgacagccaaagcagggtccgaaaccaaggcgggctgccaggggctgttcaccagaacgggcgttgccggcctgagactggcgcggttggcgaagacagcgatggctgctacgtgcaacttccacgttcccggcctgccctggagctgacggcgctgacggctcctgggccgggatccggctcccggcccacccaggccaagctgctggctaagaagcgcgtggtgcgaatgttgctggtgatcgttgtgcttttttttctgtgttggttgccagtttatagtgccaacacgtggcgcgcctttgatggcccgggtgcacaccgagcactctcgggtgctcctatctccttcattcacttgctgagctacgcctcggcctgtgtcaaccccctggtctactgcttcatgcaccgtcgctttcgccaggcctgcctggaaacttgcgctcgctgctgcccccggcctccacgagctcgccccagggctcttcccgatgaggaccctcccactccctccattgcttcgctgtccaggcttagctacaccaccatcagcacactgggccctggctgaggagtagaggggccgtgggggttgaggcagggcaaatgacatgcactgacccttccagacatacgaaacacaaaccacaactgacacaggaaaccaacacccaaagcatggactaaccccaacgcacaggaaaaggtagcttacctgacacaagaggaataagaatggagcagtacatgggaaaggaggcatgcctctgatatgggactgagcctggcccatagaaacatgacactgaccttggagagacacagcgtccctagcagtgaactatttctacacagtgggaactctgacaagggctgacctgcctctcacacacatagattaatggcactgattgttttagagactatggagcctggcacaggactgattctgggatgctcctagtttgacctcacagtgacccttcccaatcagcactgaaaataccatcaggcctaatctcatacctctgaccaacaggctgttctgcactgaaaaggttcttcatccctttccagttaaggaccgtggccctgccctctccttccttacccaaactgttcaagaaataataaattgtttggcttcctcctgaa

SEQ ID NO: 117432 - DNA, 1734 bp, Homo sapiens
  Payload ID: 2926
  Gene Symbol: CCKBR
  Gene Name: cholecystokinin B receptor
  ENST ID: ENST00000532715
  CDS Start-End: 124-1215
ggggcagggggcagggagaggagggcggcgggagcctgagccggaatcgcagcgtgagcaggtggagccgcgttgggagcccgccgggtcgagctgagtaaggcggcgggctcggcgggggccatggagctgctaaagctgaaccggagcgtgcagggaaccggacccgggccgggggcttccctgtgccgcccgggggcgcctctcctcaacagcagcagtgtgggcaacctcagctgcgagccccctcgcattcgcggagccgggacacgaggggtgtctgtgagtgtgtccacgctaagcctcgtggccatcgcactggagcggtacagcgccatctgccgaccactgcaggcacgagtgtggcagacgcgctcccacgcggctcgcgtgattgtagccacgtggctgctgtccggactactcatggtgccctaccccgtgtacactgtcgtgcaaccagtggggcctcgtgtgctgcagtgcgtgcatcgctggcccagtgcgcgggtccgccagacctggtccgtactgctgcttctgctcttgttcttcatcccgggtgtggttatggccgtggcctacgggcttatctctcgcgagctctacttagggcttcgctttgacggcgacagtgacagcgacagccaaagcagggtccgaaaccaaggcgggctgccaggggctgttcaccagaacgggcgttgccggcctgagactggcgcggttggcgaagacagcgatggctgctacgtgcaacttccacgttcccggcctgccctggagctgacggcgctgacggctcctgggccgggatccggctcccggcccacccaggccaagctgctggctaagaagcgcgtggtgcgaatgttgctggtgatcgttgtgcttttttttctgtgttggttgccagtttatagtgccaacacgtggcgcgcctttgatggcccgggtgcacaccgagcactctcgggtgctcctatctccttcattcacttgctgagctacgcctcggcctgtgtcaaccccctggtctactgcttcatgcaccgtcgctttcgccaggcctgcctggaaacttgcgctcgctgctgcccccggcctccacgagctcgccccagggctcttcccgatgaggaccctcccactccctccattgcttcgctgtccaggcttagctacaccaccatcagcacactgggccctggctgaggagtagaggggccgtgggggttgaggcagggcaaatgacatgcactgacccttccagacatacgaaacacaaaccacaactgacacaggaaaccaacacccaaagcatggactaaccccaacgcacaggaaaaggtagcttacctgacacaagaggaataagaatggagcagtacatgggaaaggaggcatgcctctgatatgggactgagcctggcccatagaaacatgacactgaccttggagagacacagcgtccctagcagtgaactatttctacacagtgggaactctgacaagggctgacctgcctctcacacacatagattaatggcactgattgttttagagactatggagcctggcacaggactgattctgggatgctcctagtttgacctcacagtgacccttcccaatcagcactgaaaataccatcaggcctaatctcatacctctgaccaacaggctgttctgcactgaaaaggttcttcatccctttccagttaaggaccgtgg

SEQ ID NO: 117433 - DNA, 2138 bp, Homo sapiens
  Payload ID: 2926
  Gene Symbol: CCKBR
  Gene Name: cholecystokinin B receptor
  Uniprot ID: P32239
  ENST ID: ENST00000525462
  CDS Start-End: 4-1554
gccatggagctgctaaagctgaaccggagcgtgcagggaaccggacccgggccgggggcttccctgtgccgcccgggggcgcctctcctcaacagcagcagtgtgggcaacctcagctgcgagccccctcgcattcgcggagccgggacacgagaattggagctggccattagaatcactctttacgcagtgatcttcctgatgagcgttggaggaaatatgctcatcatcgtggtcctgggactgagccgccgcctgaggactgtcaccaatgccttcctcctctcactggcagtcagcgacctcctgctggctgtggcttgcatgcccttcaccctcctgcccaatctcatgggcacattcatctttggcaccgtcatctgcaaggcggtttcctacctcatgggggtgtctgtgagtgtgtccacgctaagcctcgtggccatcgcactggagcggtacagcgccatctgccgaccactgcaggcacgagtgtggcagacgcgctcccacgcggctcgcgtgattgtagccacgtggctgctgtccggactactcatggtgccctaccccgtgtacactgtcgtgcaaccagtggggcctcgtgtgctgcagtgcgtgcatcgctggcccagtgcgcgggtccgccagacctggtccgtactgctgcttctgctcttgttcttcatcccgggtgtggttatggccgtggcctacgggcttatctctcgcgagctctacttagggcttcgctttgacggcgacagtgacagcgacagccaaagcagggtccgaaaccaaggcgggctgccaggtggggctggaccacgtgagcaaaatctgggcgaggcggagctttggagggcgacggggcctgctggagtgggtgggactgaaatgaaggtgagggtgagaaggaagctggaaatggagttgagctgggagcggaggtcaggtggggactgggctggagactggggggactcgcctttttctctgaccgcccaccctttgtgctcaggggctgttcaccagaacgggcgttgccggcctgagactggcgcggttggcgaagacagcgatggctgctacgtgcaacttccacgttcccggcctgccctggagctgacggcgctgacggctcctgggccgggatccggctcccggcccacccaggccaagctgctggctaagaagcgcgtggtgcgaatgttgctggtgatcgttgtgcttttttttctgtgttggttgccagtttatagtgccaacacgtggcgcgcctttgatggcccgggtgcacaccgagcactctcgggtgctcctatctccttcattcacttgctgagctacgcctcggcctgtgtcaaccccctggtctactgcttcatgcaccgtcgctttcgccaggcctgcctggaaacttgcgctcgctgctgcccccggcctccacgagctcgccccagggctcttcccgatgaggaccctcccactccctccattgcttcgctgtccaggcttagctacaccaccatcagcacactgggccctggctgaggagtagaggggccgtgggggttgaggcagggcaaatgacatgcactgacccttccagacatacgaaacacaaaccacaactgacacaggaaaccaacacccaaagcatggactaaccccaacgcacaggaaaaggtagcttacctgacacaagaggaataagaatggagcagtacatgggaaaggaggcatgcctctgatatgggactgagcctggcccatagaaacatgacactgaccttggagagacacagcgtccctagcagtgaactatttctacacagtgggaactctgacaagggctgacctgcctctcacacacatagattaatggcactgattgttttagagactatggagcctggcacaggactgattctgggatgctcctagtttgacctcacagtgacccttcccaatcagcactgaaaataccatcaggcctaatctcatacctctgaccaacaggctgttctgcactgaaaaggttcttcatccctttccagttaaggaccgtggccctgccctctccttccttacccaaactgttcaagaaataataaattgtttggcttcctcctgaa

SEQ ID NO: 117434 - DNA, 463 bp, Homo sapiens
  Payload ID: 2926
  Gene Symbol: CCKBR
  Gene Name: cholecystokinin B receptor
  ENST ID: ENST00000531712
  CDS Start-End: 4-267
gccatggagctgctaaagctgaaccggagcgtgcagggaaccggacccgggccgggggcttccctgtgccgcccgggggcgcctctcctcaacagcagcagtgtgggcaacctcagctgcgagccccctcgcattcgcggagccgggacacgagacagaacaaatacagatcttctaaacaccaggagaagaactgaactgtcccaatcttctgagtcgcctggtctgatgccagttttcctcatccccaggaagatgatgagatgatgctcacgggtagacttatcaaggcacttgtggatgtaccccagcagaattggagctggccattagaatcactctttacgcagtgatcttcctgatgagcgttggaggaaatatgctcatcatcgtggtcctgggactgagccgccgcctgaggactgtcaccaatgccttcctcctctcactggcagtcagcgac

SEQ ID NO: 117435 - DNA, 792 bp, Homo sapiens
  Payload ID: 2926
  Gene Symbol: CCKBR
  Gene Name: cholecystokinin B receptor
  ENST ID: ENST00000525014
  CDS Start-End: 55-465
gcgttgggagcccgccgggtcgagctgagtaaggcggcgggctcggcgggggccatggagctgctaaagctgaaccggagcgtgcagggaaccggacccgggccgggggcttccctgtgccgcccgggggcgcctctcctcaacagcagcagtgtgggcaacctcagctgcgagccccctcgcattcgcggagccgggacacgagaattggagctggccattagaatcactctttacgcagtgatcttcctgatgagcgttggaggaaatatgctcatcatcgtggtcctgggactgagccgccgcctgaggactgtcaccaatgccttcctcctctcactggcagtcagcgacctcctgctggctgtggcttgcatgcccttcaccctcctgcccaatctcatgggcacattcatctttggcaccgtcatctgcaaggcggtttcctacctcatgggtgggtgagacaaccaccccacccccacttgccactctccccgcctaaagctcttgtggatgtaggggtcttccccggttggcagggaggggtgtgaggaagtcccactgatgcttgtgtagtgcaagtttcctaggtgactccttcctttctcttcccttgtttaggggtgtctgtgagtgtgtccacgctaagcctcgtggccatcgcactggagcggtacagcgccatctgccgaccactgcaggcacgagtgtggcagacgcgctcccacgcggctcgcgtgattgtagccacgtggctgctgtccggactactcatggtgccctaccccg

SEQ ID NO: 117436 - DNA, 1686 bp, Homo sapiens
  Payload ID: 2927
  Gene Symbol: CH25H
  Gene Name: cholesterol 25-hydroxylase
  Uniprot ID: O95992
  ENST ID: ENST00000371852
  CDS Start-End: 23-841
agctgccttgcacagcctcgcaatgagctgccacaactgctccgacccccaggtcctttgcagctccgggcagctgttcctgcagcccctctgggaccacctgaggagctgggaggccctcctacagtcgcccttcttcccggtcatcttctccatcaccacatacgtgggcttttgcctgcccttcgtggtcctggatatcctgtgctcctgggtgcccgccctgcggcgctacaagatccaccctgacttctcgccatccgcgcagcagctgctaccttgcctggggcagaccctctaccagcatgtgatgtttgtgttccccgtgacgctgctgcattgggcccgcagcccggccctcctgccccacgaagctcccgagctgctcctgctgctgcaccacatcctgttctgcctgctactcttcgacatggagttcttcgtgtggcacctgctgcaccacaaggtgccctggctgtaccgcaccttccacaaggtgcaccaccagaactcgtcctcgttcgcgctggcaacgcagtatatgagcgtctgggaactgttttctttgggcttcttcgacatgatgaacgtcacactgctcgggtgccacccgctcaccaccctgaccttccacgtggtcaacatctggctttccgtggaggaccactccggctacaacttcccttggtccactcacagactggtgcccttcgggtggtacgggggtgtggtgcaccacgacctgcatcactctcactttaactgcaacttcgctccgtactttacacactgggacaaaatactgggaacgctgcggactgcatctgtcccagcgcggtgatgtggctgcggtgggtgcccctaagactcgggactgctgtgcctttcacacttgaatgaagagaaacacctgagctatatatttttttaaagcaactaacttattgctttatgtttatctatgaaaaccatagataaaatctgatgcatttttgtaatctgacaaagtaatttacatactgtttgtgtatcaatacaattttgtgttcttggtattcttagtctagctcacctcaatagccttgaatcctgcatatgaattagacattcatcactggcatatttagaatatctctaaaaggacttgtttgtagaataaggaattttctatgtttcaaagtgttctaaaacctggctaaaagaatgtatttttgtggatggtgttgacttctgactctaaaagcaatcaaacatgtttctgctggacagtgaccaagaattatagtaccttcttatatttttttatagaactgtatatttattttgaaagaaatgttattcgtgctttaaaaaggaaaaaaaaccatgaatcaaataagtattgacttccgtttcactggtattttgactgataaaaaagggaagagggagcgggcataccaagtgtccttctaagcctccatcagcctcaccatggaaagagaggaatctgggtgtagggtgttctgttgggggttgttagagaaaaggaggcaggagaaggggctctgtttgttgtgctctagcaatttcatggaggaaaaacacgctaatattcttaatgcttttcagctgatttctgtataacaggcaaatgataggattactctgtaaagtttcatagaaagattaacgctgagcagtcaa

SEQ ID NO: 117437 - DNA, 1791 bp, Homo sapiens
  Payload ID: 2928
  Gene Symbol: CETP
  Gene Name: cholesteryl ester transfer protein, plasma
  Uniprot ID: P11597
  ENST ID: ENST00000200676
  CDS Start-End: 131-1612
gtgaatctctggggccaggaagaccctgctgcccggaagagcctcatgttccgtgggggctgggcggacatacatatacgggctccaggctgaacggctcgggccacttacacaccactgcctgataaccatgctggctgccacagtcctgaccctggccctgctgggcaatgcccatgcctgctccaaaggcacctcgcacgaggcaggcatcgtgtgccgcatcaccaagcctgccctcctggtgttgaaccacgagactgccaaggtgatccagaccgccttccagcgagccagctacccagatatcacgggcgagaaggccatgatgctccttggccaagtcaagtatgggttgcacaacatccagatcagccacttgtccatcgccagcagccaggtggagctggtggaagccaagtccattgatgtctccattcagaacgtgtctgtggtcttcaaggggaccctgaagtatggctacaccactgcctggtggctgggtattgatcagtccattgacttcgagatcgactctgccattgacctccagatcaacacacagctgacctgtgactctggtagagtgcggaccgatgcccctgactgctacctgtctttccataagctgctcctgcatctccaaggggagcgagagcctgggtggatcaagcagctgttcacaaatttcatctccttcaccctgaagctggtcctgaagggacagatctgcaaagagatcaacgtcatctctaacatcatggccgattttgtccagacaagggctgccagcatcctttcagatggagacattggggtggacatttccctgacaggtgatcccgtcatcacagcctcctacctggagtcccatcacaagggtcatttcatctacaagaatgtctcagaggacctccccctccccaccttctcgcccacactgctgggggactcccgcatgctgtacttctggttctctgagcgagtcttccactcgctggccaaggtagctttccaggatggccgcctcatgctcagcctgatgggagacgagttcaaggcagtgctggagacctggggcttcaacaccaaccaggaaatcttccaagaggttgtcggcggcttccccagccaggcccaagtcaccgtccactgcctcaagatgcccaagatctcctgccaaaacaagggagtcgtggtcaattcttcagtgatggtgaaattcctctttccacgcccagaccagcaacattctgtagcttacacatttgaagaggatatcgtgactaccgtccaggcctcctattctaagaaaaagctcttcttaagcctcttggatttccagattacaccaaagactgtttccaacttgactgagagcagctccgagtccgtccagagcttcctgcagtcaatgatcaccgctgtgggcatccctgaggtcatgtctcggctcgaggtagtgtttacagccctcatgaacagcaaaggcgtgagcctcttcgacatcatcaaccctgagattatcactcgagatggcttcctgctgctgcagatggactttggcttccctgagcacctgctggtggatttcctccagagcttgagctagaagtctccaaggaggtcgggatggggcttgtagcagaaggcaagcaccaggctcacagctggaaccctggtgtctcctccagcgtggtggaagttgggttaggagtacggagatggagattggctcccaactcctccctatcctaaaggcccactggcattaaagtgctgtatccaaga

SEQ ID NO: 117438 - DNA, 1537 bp, Homo sapiens
  Payload ID: 2928
  Gene Symbol: CETP
  Gene Name: cholesteryl ester transfer protein, plasma
  Uniprot ID: P11597
  ENST ID: ENST00000379780
  CDS Start-End: 58-1359
atatacgggctccaggctgaacggctcgggccacttacacaccactgcctgataaccatgctggctgccacagtcctgaccctggccctgctgggcaatgcccatgcctgctccaaaggcacctcgcacgaggcaggcatcgtgtgccgcatcaccaagcctgccctcctggtgttgaaccacgagactgccaaggtgatccagaccgccttccagcgagccagctacccagatatcacgggcgagaaggccatgatgctccttggccaagtcaagtatgggttgcacaacatccagatcagccacttgtccatcgccagcagccaggtggagctggtggaagccaagtccattgatgtctccattcagaacgtgtctgtggtcttcaaggggaccctgaagtatggctacaccactgcctggtggctgggtattgatcagtccattgacttcgagatcgactctgccattgacctccagatcaacacacagctgacctgtgactctggtagagtgcggaccgatgcccctgactgctacctgtctttccataagctgctcctgcatctccaaggggagcgagagcctgggtggatcaagcagctgttcacaaatttcatctccttcaccctgaagctggtcctgaagggacagatctgcaaagagatcaacgtcatctctaacatcatggccgattttgtccagacaagggctgccagcatcctttcagatggagacattggggtggacatttccctgacaggtgatcccgtcatcacagcctcctacctggagtcccatcacaaggcagtgctggagacctggggcttcaacaccaaccaggaaatcttccaagaggttgtcggcggcttccccagccaggcccaagtcaccgtccactgcctcaagatgcccaagatctcctgccaaaacaagggagtcgtggtcaattcttcagtgatggtgaaattcctctttccacgcccagaccagcaacattctgtagcttacacatttgaagaggatatcgtgactaccgtccaggcctcctattctaagaaaaagctcttcttaagcctcttggatttccagattacaccaaagactgtttccaacttgactgagagcagctccgagtccgtccagagcttcctgcagtcaatgatcaccgctgtgggcatccctgaggtcatgtctcggctcgaggtagtgtttacagccctcatgaacagcaaaggcgtgagcctcttcgacatcatcaaccctgagattatcactcgagatggcttcctgctgctgcagatggactttggcttccctgagcacctgctggtggatttcctccagagcttgagctagaagtctccaaggaggtcgggatggggcttgtagcagaaggcaagcaccaggctcacagctggaaccctggtgtctcctccagcgtggtggaagttgggttaggagtacggagatggagattggctcccaactcctccctatcctaaaggcccactggcattaaagtgctgtatccaag

SEQ ID NO: 117439 - DNA, 1733 bp, Homo sapiens
  Payload ID: 2928
  Gene Symbol: CETP
  Gene Name: cholesteryl ester transfer protein, plasma
  ENST ID: ENST00000566128
  CDS Start-End: 268-1554
agtgcatctgtctgccctgccaggggtcttttcatggacacccactatgccaggagcctccctggcctgaagccagccctgaagccggctgccacactagcccagagagaggagtgccctgggagggagatgggctgagtggagctgtcatcaccccctcctgacctcgccttcaaggtcaagttctttgtgaaccacgagactgccaaggtgatccagaccgccttccagcgagccagctacccagatatcacgggcgagaaggccatgatgctccttggccaagtcaagtatgggttgcacaacatccagatcagccacttgtccatcgccagcagccaggtggagctggtggaagccaagtccattgatgtctccattcagaacgtgtctgtggtcttcaaggggaccctgaagtatggctacaccactgcctggtggctgggtattgatcagtccattgacttcgagatcgactctgccattgacctccagatcaacacacagctgacctgtgactctggtagagtgcggaccgatgcccctgactgctacctgtctttccataagctgctcctgcatctccaaggggagcgagagcctgggtggatcaagcagctgttcacaaatttcatctccttcaccctgaagctggtcctgaagggacagatctgcaaagagatcaacgtcatctctaacatcatggccgattttgtccagacaagggctgccagcatcctttcagatggagacattggggtggacatttccctgacaggtgatcccgtcatcacagcctcctacctggagtcccatcacaagggtcatttcatctacaagaatgtctcagaggacctccccctccccaccttctcgcccacactgctgggggactcccgcatgctgtacttctggttctctgagcgagtcttccactcgctggccaaggtagctttccaggatggccgcctcatgctcagcctgatgggagacgagttcaaggcagtgctggagacctggggcttcaacaccaaccaggaaatcttccaagaggttgtcggcggcttccccagccaggcccaagtcaccgtccactgcctcaagatgcccaagatctcctgccaaaacaagggagtcgtggtcaattcttcagtgatggtgaaattcctctttccacgcccagaccagcaacattctgtagcttacacatttgaagaggatatcgtgactaccgtccaggcctcctattctaagaaaaagctcttcttaagcctcttggatttccagattacaccaaagactgtttccaacttgactgagagcagctccgagtccgtccagagcttcctgcagtcaatgatcaccgctgtgggcatccctgaggtcatgtctcggctcgaggtagtgtttacagccctcatgaacagcaaaggcgtgagcctcttcgacatcatcaaccctgagattatcactcgagatggcttcctgctgctgcagatggactttggcttccctgagcacctgctggtggatttcctccagagcttgagctagaagtctccaaggaggtcgggatggggcttgtagcagaaggcaagcaccaggctcacagctggaaccctggtgtctcctccagcgtggtggaagttgggttaggagtacggagatggagattggctcccaactcctccctatcctaaaggcccactggcattaaagtgctgtatccaaga

SEQ ID NO: 117440 - DNA, 7665 bp, Homo sapiens
  Payload ID: 2929
  Gene Symbol: CHDH
  Gene Name: choline dehydrogenase
  Uniprot ID: Q8NE62
  ENST ID: ENST00000315251
  CDS Start-End: 439-2223
cgtgtccgagcgctggcggagcacgggccgccgcggcgcgcgcctacccccgcgcacacgtgcatgcagtgagccaggtgcatcagctgcacccgccctcgggcttcgcgcgcctccgctggagcccagctagcctcgcggctccggggccgaccgggtcggaactgctgcgtccccattccggacgcagagagcgcgcggggcgccggcgccgccggttaaagtgccgcggggcaggggccgggccgcggccacccgctcctcccgctccggtcccgactgtcgggctctcggccgagtcgccccggacaatcacaaagagtgtgtaggccagccccggtcacagagtgcaccgtatcctgtcacttctggatgtgagggagaagtgagtcatctcattcccctccgtggatcagaggacttggactagatagaagcatgtggtgtctcctacgaggcctgggccggcctggagccctggcacggggagccctggggcagcagcaatccctgggtgcccgggccctggccagcgcaggctctgagagccgggacgagtacagctatgtggtggtgggcgcgggctcggcgggctgcgtgctggctgggaggctcacggaggaccccgccgagcgcgtgctgctgctggaggccgggcccaaggacgtgctcgcggggagcaagcggctctcgtggaagatccacatgcccgcggccctggtggccaacctgtgcgacgacaggtacaactggtgctaccacacagaggtgcagcggggcctggacggccgcgtgctgtactggccacgcggccgcgtctggggtggctcctcatccctcaatgccatggtctacgtccgtgggcacgccgaggactacgagcgctggcagcgccagggcgcccgcggctgggactacgcgcactgcctgccctacttccgcaaggcgcagggccacgagctgggcgccagccggtaccggggcgccgatggcccgctgcgggtgtcccggggcaagaccaaccacccgctgcactgcgcattcctggaggccacgcagcaggccggctacccgctcaccgaggacatgaatggcttccagcaggagggcttcggctggatggacatgaccatccatgaaggcaaacggtggagcgcggcctgtgcctacctgcacccagcactgagccgcaccaacctcaaggccgaggccgagacgcttgtgagcagggtgctatttgagggcacccgtgcagtgggcgtggagtatgtcaagaatggccagagccacagggcttatgccagcaaggaggtgattctgagtggaggtgccatcaactctccacagctgctcatgctctctggcatcgggaatgctgatgacctcaagaaactgggcatccctgtggtgtgccacctacctggggttggccagaacctgcaagaccacctggagatctacattcagcaggcatgcacccgccctatcaccctccattcagcacagaagcccctgcggaaggtctgcattggtctggagtggctctggaaattcacaggggagggagccactgcccatctggaaacaggtgggttcatccgcagccagcctggggtcccccacccggacatccagttccatttcctgccatcccaagtgattgaccacgggcgggtccccacccagcaggaggcttaccaggtacatgtggggcccatgcggggcacgagtgtgggctggctcaaactgagaagtgccaatccccaagaccaccctgtgatccagcccaactacttgtcaacagaaactgatattgaggatttccgtctgtgtgtgaagctcaccagagaaatttttgcacaggaagccctggctccgttccgagggaaagagctccagccaggaagccacattcagtcagataaagagatagatgcctttgtgcgggcaaaagccgacagcgcctaccacccctcgtgcacctgtaagatgggccagccctccgatcccactgccgtggtggatccgcagacaagggtcctcggggtggaaaacctcagggtcgtcgatgcctccatcatgcctagcatggtcagcggcaacctgaacgcccccacaatcatgatcgcagagaaggcagctgacattatcaaggggcagcctgcactctgggacaaagatgtccctgtctacaagcccaggacgctggccacccagcgctaagacagttgctgctggaggatgaccagggaagccccctgataagccaagagggccagcacagcccttgctcccaggctcctgcctgaaactatctagcacactaggacccaggtggtaccctactcagtggctgagaattggataaagtcttgggaaatgagacaagtactgggcagtgaatccagctccttttccccagcctttccctgtgggccatttggggaaggccagcattcagcctgagatgttcctccctgcctcctggagggacagaaggggaggatggttaactcctgccgcatcctttttcttgtgttcacgtggcattctctaacccagggcagtggttccttcccaggccatgcacagaggctgggtgcctgccagacccacggagggttcgcgaaggaaggggcatcctccttcttgagctgcaagctttagctgaggcagtaagtcacacagtagttagttcagcctgggctggcacataagtccccagtgtccctgttgagaggggaaagttgcctgctggttgaaaaactggcttttcctttctcgctgcctaatttcactctcagagtgaggcaggtaactggggctccactgggtcactctgagagggttgtggctctggttcttattaaaccagggccaggtgcagggctcacacctgtaatcccagcactttgggaaggtcacttgagctcaggagttcaagaccagcctgggcaacatagtgagaccttgtctctggaaaacaattagctgggcatggtggtacacacctgtagtcccagctacttgggaggctgaggcgggaggatggctttagcccaggaggttgaggctcctgtgaaccctgatggcaccactgcactccagcctgggtgacagggtgagaccctgtctcaaaaaaaaaaaaaaaaaaaaaaacctgagatttttttggaccttattcaaggggagaggagtctggagggaatgccgcttggcttcactaccaaaggttttatgacttagcattttaaaaggttttccttttaccaagaaatgcagaaaccaagagcaaaccccacgtaccagatcactgattcctactgaagcagctagcccgagaaaggactctctcatactggtcttgggaaatgacttggcagcctgagccatcccagcagtggacaaggatggttaattcttattctgtagacgtccacaggaacagactaggatggaaaacacagttaagcacagccatgcaccctgtggctgtagaaatgcccctgtgtgaaagaaaaataaattcaagactggagttttggaggaaaaaaaatacaagtagcatttacaacagctctttgctctttaaatttcttaccattcaataaagtgatccagtcactcacatttgaactgagatgccttctccagactgttctgacaaggtaatgaaaataaaatgcacttggatttttccagacatccacatccaccgtcaagggctgggaagaaaagcattgttgcgtggaaacctgcagctatactaggcccagaataaggacgggaggaaattgggggattccaggctttgctcggatctgagaggattggggcggcttacagactggggcggggggggggggcgtccgacagccacaagttagttttctgagaaaaaccttcgagagaggcagcaggaagaaacccatcacacctctccttttaaaaatcttaagcagctcttgtttaatcttacctgtattttttaaaatttttgttcgaagagagggtcaagaaagaaaattctaaaccggccaagagacttatttctcctacggagggtccccacctgccccacagcagcagtccatggccatcagtcacctgggtctcggggctgcctgcaagagtgcagaaacaggagttcaggtgccagccccgtaacttggagggcctcgtgcagctttcctgctggagcgtgtgtggattcaggggcaggggatagtcctggaccaaccatgactgtgctgacccttcttctctggaacaggtatggatatggcagggtgacagtcacttagttctaccatctctgtgtcccatgggtgtgtcagtgtctgagaccatggtgggttcagtctggtggctgtattttaaaataagcaaaacgtcatatggtaagaggagcccattggtgatgctgctcaattgcacccaggcccttctttcactctcaaatacttagccatgttctacacaatcgcacaatttggccataaacaggaatgaggtttaaaagaaaagatggtaagtgtcacatgtccagaacctgagcgttcccctgccatgaagggagtctttcattcaccccaggaggagaggctgtcacctgaggaagccagcatgggggagaaaggcacttgctacaaagtggggtgcacagagggtacccccccatcttcagtctcatagggaattgggccccttggccaaaagcttgcagtacctaaaaacagagaaacgtgctttgcaaaaatggctcaaagagcacaacagaatgcgctgtccatgtgcccagtgctctcaggagccctgacctattgcagaagcctgtgttgaagccgctgcactagtagaaggcagctcctgatggaataggggataggggtgggctgtgtgggagccaagagcatctggcagcctgactggagatggtgagttcctgaagcaggagttgtaggcacccaaacatctagtctttctgcttgtagcgaaggttgcaggcatcatctccacgaattcaaatagattcttcttggctaggcatggtggctcacgcctgtaatcccagcactttgcaaggctgaggtgggtggatcacttgaggccaggagtttgagaccagcctggccaacatggtgaaaccccgtctctactaaaaatacaaaaattagctgggcatggtggtgcacgcctgtagtcccagctacttgggaggccgatacaggagaatcgcttgaacctgggtggcgcaggctgcagtgagccaagattgcaccactgcactccaccctgggtgacagagtgagactgtctcaaaaaaaaacaacaaaaaaacagattcttctccacccaaccatgtcccgccactcagaagtggtttcatgcttctactgataagccaacttaacatcagatccaatacagattttttaaagataaaataccatctctactggacctgtttagtggctcaggctgccctcacaggacatccctgagaccaccctgtcactcttgatgttggaaccagggcccaggcctgctcctcattgtctcctgccctcctagtccccaggagaggaaaagaaatactgttttagagaaataacattttcaacaaaacatccctggagtcagattttgagttggggtgggctaatcagggagtcggggctctctgcgtgatgtcagttctatggctaactggtttttctaaaccagccagctgcctatcaaaacagtacaacttttctaggaaatgcaattggcaaagacacttacgatgctgagaagtacacaaggtgaaactgctccagtttttctcatagcagggtcagcaggaaagcaagtggtgcccctggtcccatctcacacaggtgagactgcaccgagaggtaacgtggccctcacagcccaccacgcctggccttcgcccaattctgaaacttcgtaggatagagctggaaagtgccacatggtgaagcgagatccagctgtctgggtggatgtcggagtccataggctgagcagagatggttcttagtgaggttctcgctgccagttgacggtgaaatcatagctgccatttacattttgtgagattatgaaaaacataagactaaagaaactaaatgtgttattcctgtggacacaaaaatgtgtgtttttcagatggggaggggaccaaaaaggaaaaacatttcatcttaaaactttcctaagacaagggaaaacaaaaaaccatgctctacaacttcaaatttttcttacaaagaaaaatttaatattcgatgagaggttgaaccaggcttaaagcagacatactaggaaatggtgcagcctgtaagaatgccagtttgtaagtactgactttggaaaagatcatcgcctctatcagacacttagggtcctggtctggcaattttggcctgatgtgatgccacaagacccaacagagagagacacagagtccaggataatgttgacagtggtgtagccctttaggagaaatggcgctccctgcggctggtattaggttaccattggcaccgaaggaaccaggaggataagaatatccataatttcagagctgccctggcacagtacctgccctgtcggaggctctcactggcaaatgacagctctgtgcaaggagcactcccaagtataaaaattattacacagttttattctgaagaacattttgcattttaataaaaaaggatttatgtcaggaaagagtcatttacaaaccttgaagtgtttttgcctggatcagagtaagaatgtcttaagaagaggtttgtaaggtcttcataacaaagtggtgtttgttatttacaaaaaaaaaaaaaaaaaaaaaaattaacaggttgtctgtatactattaaaaattttggaccaaaattgctacctatcatctatctttttgattgcagggaatccctgccaaggtaacctgacagtcggcctaattctgttgacagaaaatgaagccttgacggttctaattatccaaaagtgggttttcatcaggacgtacagtcagagtgtgagtgcattctaatgaaaacttcagccctcattcaattgcatataaaagccctcaaagagaacatacagtacagcagttttgtaaaaggcaacaatacgatttgtacagaccccgacactccaatcctatagatcaccacgttgctcctctgtccccagcaccccttatttcttaagcagcaccaccagtccccagaggacaagagcagctatatctcatccacctatgcatttctgcaccagcgatgcaaaaaacaccctgggtgggccacagagaaaaccgtaactatggatacccaaggggcagagcagccagctggacctgctctgtaattcacttacttacttaccagagggtggttcaagtcaaacaaacaaaaccaaagacagttgcaacccatggtggatccaaaggtacagtatcaaaatcatggaactcttgcccaaagaaaagactgcaaatagtcatctggtatatcttgtggaaagatgataggtttatagtgactcaaaatattttagaaaaatttctgtagtgtcaagttctttcaaacttaaaattttaaccccagaggattttcgctgaataaatgagaattggctcta

SEQ ID NO: 117441 - DNA, 631 bp, Homo sapiens
  Payload ID: 2929
  Gene Symbol: CHDH
  Gene Name: choline dehydrogenase
  ENST ID: ENST00000481668
  CDS Start-End: 167-631
tcggcacacaggctttgagacaaccagggtgcggagacaatcacaaagagtgtgtaggccagccccggtcacagagtgcaccgtatcctgtcacttctggatgtgagggagaagtgagtcatctcattcccctccgtggatcagaggacttggactagatagaagcatgtggtgtctcctacgaggcctgggccggcctggagccctggcacggggagccctggggcagcagcaatccctgggtgcccgggccctggccagcgcaggctctgagagccgggacgagtacagctatgtggtggtgggcgcgggctcggcgggctgcgtgctggctgggaggctcacggaggaccccgccgagcgcgtgctgctgctggaggccgggcccaaggacgtgctcgcggggagcaagcggctctcgtggaagatccacatgcccgcggccctggtggccaacctgtgcgacgacaggtacaactggtgctaccacacagaggtgcagcggggcctggacggccgcgtgctgtactggccacgcggccgcgtctggggtggctcctcatccctcaatgccatggtctacgtccgtgggcacgccgaggactacgagcgctggcagcgccagggcgcc

SEQ ID NO: 117442 - DNA, 565 bp, Homo sapiens
  Payload ID: 2929
  Gene Symbol: CHDH
  Gene Name: choline dehydrogenase
  ENST ID: ENST00000467802
  CDS Start-End: 188-565
ggctagtccctctgagacgagcgagcaggcagccattcactaacatgcgttcattccacaatcacaaagagtgtgtaggccagccccggtcacagagtgcaccgtatcctgtcacttctggatgtgagggagaagtgagtcatctcattcccctccgtggatcagaggacttggactagatagaagcatgtggtgtctcctacgaggcctgggccggcctggagccctggcacggggagccctggggcagcagcaatccctgggtgcccgggccctggccagcgcaggctctgagagccgggacgagtacagctatgtggtggtgggcgcgggctcggcgggctgcgtgctggctgggaggctcacggaggaccccgccgagcgcgtgctgctgctggaggccgggcccaaggacgtgctcgcggggagcaagcggctctcgtggaagatccacatgcccgcggccctggtggccaacctgtgcgacgacaggtacaactggtgctaccacacagaggtgcagcggggcctggacggccgcgtgctgtactggccacgcggccgc

SEQ ID NO: 117443 - DNA, 2530 bp, Homo sapiens
  Payload ID: 2930
  Gene Symbol: CHKA
  Gene Name: choline kinase alpha
  Uniprot ID: P35790
  ENST ID: ENST00000265689
  CDS Start-End: 28-1401
ccgcgcctcctcggccgcctgtcgggcatgaaaaccaaattctgcaccgggggcgaggcggagccctcgccgctcgggctgctgctgagctgcggtagcggcagcgcggccccggcgcccggcgtggggcagcagcgcgacgccgccagcgacctcgagtccaagcagctgggcggccaacagccgccgctcgcgctgccccctccgccgccgctgccgctgccgctgccgctgccccagcccccgccgccgcagccgcccgcagacgagcagccggagccccggacgcggcgcagggcctatctgtggtgcaaggagttcctgcccggcgcctggcggggcctccgcgaggacgagttccacatcagtgtcatcagaggcggccttagcaacatgctgttccagtgctccctacctgacaccacagccacccttggtgatgagcctcggaaagtgctcctgcggctgtatggagcgattttgcagatgaggtcctgtaataaagagggatccgaacaagctcagaaagaaaatgaatttcaaggggctgaggccatggttctggagagcgttatgtttgccattctcgcagagaggtcacttgggccaaaactctatggcatctttccccaaggccgactggagcagttcatcccgagccggcgattagatactgaagaattaagtttgccagatatttctgcagaaatcgccgagaaaatggctacatttcatggtatgaaaatgccattcaataaggaaccaaaatggctttttggcacaatggaaaagtatctaaaggaagtgctgagaattaaatttactgaggaatccagaattaaaaagctccacaaattgctcagttacaatctgcccttggaactggaaaacctgagatcattgcttgaatctactccatctccagttgtattttgtcataatgactgtcaagaaggtaatatcttgttgctggaaggccgagagaattctgaaaaacagaaactgatgctcattgatttcgaatacagcagttacaattacaggggattcgacattggaaatcacttctgtgagtggatgtatgattatagctatgaaaaatacccttttttcagagcaaacatccggaagtatcccaccaagaaacaacagctccattttatttccagttacttgcctgcattccaaaatgactttgaaaacctcagtactgaagaaaaatccattataaaagaagaaatgttgcttgaagttaataggtttgcccttgcatctcatttcctctggggactgtggtccattgtacaagccaagatttcatctattgaatttgggtacatggactacgcccaagcaaggtttgatgcctatttccaccagaagaggaagcttggggtgtgactgtggggaggactccatccacctcatcactggactgcatggggaggcagcagagcggggtcccctctgtgcttcgactactgctcctgtggcaggaggctttgggtggctcactactgaacacatgtgtatgatactaaagacggtattaaaatggagcgacgtttatttcatctcttgtttacgatttcactaggactcagaaacgagatcgggaagcagaaatatagtgcaatagtgcaacatctctgaatccttttaatctagagaaggcatttcatatttgggggctaaggtttccagtcagatgaggcaaacagcaagagtaagcagtgttacttgcaggtactttggttaatgttgatttaaattttcatgaatgtgctggtgaacactgtgaccaggcttttgtagatggcgatgtgttatagacggtgctcactcccaagggacagcaagtgagcagagatgtactgcaaagtcgccagtcactgctgcaaggtggcctctgcctggggcctccagaagctgctcctttaccctcttggtcccatggctgaagctggagcagcggattgctctggagcagccaaggccgccagcgtgtggagcagagctctcccctcctgctgggcgtgtgtgacactgatgagtttcactgtactgcatgtgacttctcccctgcccttcctcctgatggagtgtgcagacagccatgcgtggccacgggggcagtgtgaggacctccctgtctcccggctcccctcccaggggagccagctgcttgacctagctctttgggcctctcctgccctctgctctgcctggagtgtcggatcctgtgagtaggctgggcctcccctgggcagggttctccaagggcccggtttcccggcccttacctttcctgatgcccctgacatcatcattcttgtgggagacagcagcctgtatgtggtgtggggcgtggatcgagtgtagctgtgaaatccatatatatgaaatgtcctgcgggatacagtcttagctgacttttttttactctgaactcttatttgaattgttttttgtgcatatatttctgctaccacagagattgtactatacaaataaaaaaataaaaacccaa

SEQ ID NO: 117444 - DNA, 1755 bp, Homo sapiens
  Payload ID: 2930
  Gene Symbol: CHKA
  Gene Name: choline kinase alpha
  Uniprot ID: P35790
  ENST ID: ENST00000356135
  CDS Start-End: 268-1587
gtggcgagcgcgagggcgggctgtgacgcggccggcgctcctcgtgcggcggcggcagaggagcgagtgcagcggccagcagcacatccccgctccacagtcgccgcagtcgccgcagccgccgccgccgccccgcgcgcccaaccgccgcggccccctgccccgccggcctgccagtgagagagcggcgagggggcgcccggccggactctgagcctagtcctctcgcgctgcggccgcccgcgcctcctcggccgcctgtcgggcatgaaaaccaaattctgcaccgggggcgaggcggagccctcgccgctcgggctgctgctgagctgcggtagcggcagcgcggccccggcgcccggcgtggggcagcagcgcgacgccgccagcgacctcgagtccaagcagctgggcggccaacagccgccgctcgcgctgccccctccgccgccgctgccgctgccgctgccgctgccccagcccccgccgccgcagccgcccgcagacgagcagccggagccccggacgcggcgcagggcctatctgtggtgcaaggagttcctgcccggcgcctggcggggcctccgcgaggacgagttccacatcagtgtcatcagaggcggccttagcaacatgctgttccagtgctccctacctgacaccacagccacccttggtgatgagcctcggaaagtgctcctgcggctgtatggagcgattttgcagatgggggctgaggccatggttctggagagcgttatgtttgccattctcgcagagaggtcacttgggccaaaactctatggcatctttccccaaggccgactggagcagttcatcccgagccggcgattagatactgaagaattaagtttgccagatatttctgcagaaatcgccgagaaaatggctacatttcatggtatgaaaatgccattcaataaggaaccaaaatggctttttggcacaatggaaaagtatctaaaggaagtgctgagaattaaatttactgaggaatccagaattaaaaagctccacaaattgctcagttacaatctgcccttggaactggaaaacctgagatcattgcttgaatctactccatctccagttgtattttgtcataatgactgtcaagaaggtaatatcttgttgctggaaggccgagagaattctgaaaaacagaaactgatgctcattgatttcgaatacagcagttacaattacaggggattcgacattggaaatcacttctgtgagtggatgtatgattatagctatgaaaaatacccttttttcagagcaaacatccggaagtatcccaccaagaaacaacagctccattttatttccagttacttgcctgcattccaaaatgactttgaaaacctcagtactgaagaaaaatccattataaaagaagaaatgttgcttgaagttaataggtttgcccttgcatctcatttcctctggggactgtggtccattgtacaagccaagatttcatctattgaatttgggtacatggactacgcccaagcaaggtttgatgcctatttccaccagaagaggaagcttggggtgtgactgtggggaggactccatccacctcatcactggactgcatggggaggcagcagagcggggtcccctctgtgcttcgactactgctcctgtggcaggaggctttgggtggctcactactgaacacatgtgtatgatactaaagacggtattaaaatggagcgacgttta

SEQ ID NO: 117445 - DNA, 1201 bp, Homo sapiens
  Payload ID: 2930
  Gene Symbol: CHKA
  Gene Name: choline kinase alpha
  ENST ID: ENST00000525155
  CDS Start-End: 1-495
attgatttcgaatacagcagttacaattacaggggattcgacattggaaatcacttctgtgagtggatgtatgattatagctatgaaaaatacccttttttcagagcaaacatccggaagtatcccaccaagaaacaacagctccattttatttccagttacttgcctgcattccaaaatgactttgaaaacctcagtactgaagaaaaatccattataaaagaagaaatgttgcttgaagttaataggtttgcccttgcatctcatttcctctggggactgtggtccattgtacaagccaagatttcatctattgaatttgggtacatgtacccgaatgtggtgacctggtggcatcaggacagtgtggctcagcccaggaagccgggggagaagccgctgtcactgatgctgtggttgcctttggaggttgccctcacttccaggccagctgaccttgcctcccctgcttcagagaagtgcctgcaatcctgatggggaatgtaggcatctgcaccctcgaagtccagctctgacctcagtcccttctgacacgggacagtaagtgaagaagagtgggtggctcctgcctgtgctgtggaaggttttatttatcggttaccacttcattctccagcctgtagtgcccgactttgggttggaagctggactacgcccaagcaaggtttgatgcctatttccaccagaagaggaagcttggggtgtgactgtggggaggactccatccacctcatcactggactgcatggggaggcagcagagcggggtcccctctgtgcttcgactactgctcctgtggcaggaggctttgggtggctcactactgaacacatgtgtatgatactaaagacggtattaaaatggagcgacgtttatttcatctcttgtttacgatttcactaggactcagaaacgagatcgggaagcagaaatatagtgcaatagtgcaacatctctgaatccttttaatctagagaaggcatttcatatttgggggctaaggtttccagtcagatgaggcaaacagcaagagtaagcagtgttacttgcaggtactttggttaatgttgatttaaattttcatgaatgtgctggtgaacactgtgaccaggcttttgtagatggcgatgtgttatagacggtgctcactcccaagggacagcaagtgagcagagatgta

SEQ ID NO: 117446 - DNA, 524 bp, Homo sapiens
  Payload ID: 2930
  Gene Symbol: CHKA
  Gene Name: choline kinase alpha
  ENST ID: ENST00000531341
  CDS Start-End: 56-524
ggtcggtggcgccgggtctgggggccgcgggacagtcagaggcggccttagcaacatgctgttccagtgctccctacctgacaccacagccacccttggtgatgagcctcggaaagtgctcctgcggctgtatggagcgattttgcagatgaggtcctgtaataaagagggatccgaacaagctcagaaagaaaatgaatttcaaggggctgaggccatggttctggagagcgttatgtttgccattctcgcagagaggtcacttgggccaaaactctatggcatctttccccaaggccgactggagcagttcatcccgagccggcgattagatactgaagaattaagtttgccagatatttctgcagaaatcgccgagaaaatggctacatttcatggtatgaaaatgccattcaataaggaaccaaaatggctttttggcacaatggaaaagtatctaaaggaagtgctgagaattaaatttactgaggaatccagaattaaaaagctccacaaattgctca

SEQ ID NO: 117447 - DNA, 1638 bp, Homo sapiens
  Payload ID: 2931
  Gene Symbol: CHKB
  Gene Name: choline kinase beta
  Uniprot ID: Q9Y259
  ENST ID: ENST00000406938
  CDS Start-End: 219-1406
agagatctgcggaattcggccttcggaaagagcccccgggccggggcacggagagagccgagcgccgcagccgtgagccgaatagagccggagagacccgagtatgaccggagaagcccaggccggccggaagaggagccgagcgcggccggaaggaaccgagcccgtccgaagggagcggagcgcagcctggcctggggcccggtcgagcccgcgccatggcggccgaggcgacagctgtggccggaagcggggctgttggcggctgcctggccaaagacggcttgcagcagtctaagtgcccggacactaccccaaaacggcggcgcgcctcgtcgctgtcgcgtgacgccgagcgccgagcctaccaatggtgccgggagtacttgggcggggcctggcgccgagtgcagcccgaggagctgagggtttaccccgtgagcggaggcctcagcaacctgctcttccgctgctcgctcccggaccacctgcccagcgttggcgaggagccccgggaggtgcttctgcggctgtacggagccatcttgcagggcgtggactccctggtgctagaaagcgtgatgttcgccatacttgcggagcggtcgctggggccccagctgtacggagtcttcccagagggccggctggaacagtacatcccaagtcggccattgaaaactcaagagcttcgagagccagtgttgtcagcagccattgccacgaagatggcgcaatttcatggcatggagatgcctttcaccaaggagccccactggctgtttgggaccatggagcggtacctaaaacagatccaggacctgcccccaactggcctccctgagatgaacctgctggagatgtacagcctgaaggatgagatgggcaacctcaggaagttactagagtctaccccatcgccagtcgtcttctgccacaatgacatccaggaagggaacatcttgctgctctcagagccagaaaatgctgacagcctcatgctggtggacttcgagtacagcagttataactataggggctttgacattgggaaccatttttgtgagtgggtttatgattatactcacgaggaatggcctttctacaaagcaaggcccacagactaccccactcaagaacagcagttgcattttattcgtcattacctggcagaggcaaagaaaggtgagaccctctcccaagaggagcagagaaaactggaagaagatttgctggtagaagtcagtcggtatgctctggcatcccatttcttctggggtctgtggtccatcctccaggcatccatgtccaccatagaatttggttacttggactatgcccagtctcggttccagttctacttccagcagaaggggcagctgaccagtgtccactcctcatcctgactccaccctcccactccttggatttctcctggagcctccagggcaggaccttggagggaggaacaacgagcagaaggccctggcgactgggctgagcccccaagtgaaactgaggttcaggagaccggcctgttcctgagtttgagtaggtccccatggctggcaggccagagccccgtgctgtgtatgtaacacaataaacaagcttcttcttcccaccctgtcctggccc

SEQ ID NO: 117448 - DNA, 2458 bp, Homo sapiens
  Payload ID: 2932
  Gene Symbol: CHAT
  Gene Name: choline O-acetyltransferase
  Uniprot ID: P28329
  ENST ID: ENST00000337653
  CDS Start-End: 154-2400
aaatgctgagctaggggcaggaggcatgggcgggacagtgttctgtgcccccttctagagcctaaatttgttgcccgagttcctccgggaagcgctccgggtagattctgggggccgggagctgagatccctgggcggggagctggggaagggatggggctgaggacagcgaagaagagggggcttgggggaggggggaaatggaagagagaggagggaggaggtacaagaggaaggagagaagtgcggccagcttgctttctccagtcgggtggccgcggggacccgggcgacgtcggaggccctgccgggaacccaggctgcagcccccacccccgcgctgcgacacgccccccaccccttccggctcacacccccgcccacactcctgagtggtgcggtgcagcgtcggccgaggcagcagagccgaggagagcaggtccacacctctgcatccctgcaccaggactcaccaagacgcccatcctggaaaaggtcccccgtaagatggcagcaaaaactcccagcagtgaggagtctgggctgcccaaactgcccgtgcccccgctgcagcagaccctggccacgtacctgcagtgcatgcgacacttggtgtctgaggagcagttcaggaagagccaggccattgtgcagcagtttggggcccctggtggcctcggcgagaccctgcagcagaaactcctggagcggcaggagaagacagccaactgggtgtctgagtactggctgaatgacatgtatctcaacaaccgcctggccctgcctgtcaactccagccctgccgtgatctttgctcggcagcacttccctggcaccgatgaccagctgaggtttgcagccagcctcatctctggtgtactcagctacaaggccctgctggacagccactccattcccactgactgtgccaaaggccagctgtcagggcagcccctttgcatgaagcaatactatgggctcttctcctcctaccggctccccggccatacccaggacacgctggtggctcagaacagcagcatcatgccggagcctgagcacgtcatcgtagcctgctgcaatcagttctttgtcttggatgttgtcattaatttccgccgtctcagtgagggggatctgttcactcagttgagaaagatagtcaaaatggcttccaacgaggacgagcgtttgcctccaattggcctgctgacgtctgacgggaggagcgagtgggccgaggccaggacggtcctcgtgaaagactccaccaaccgggactcgctggacatgattgagcgctgcatctgccttgtatgcctggacgcgccaggaggcgtggagctcagcgacacccacagggcactccagctccttcacggcggaggctacagcaagaacggggccaatcgctggtacgacaagtccctgcagtttgtggtgggccgagacggcacctgcggtgtggtgtgcgaacactccccattcgatggcatcgtcctggtgcagtgcactgagcatctgctcaagcacgtgacgcagagcagcaggaagctgatccgagcagactccgtcagcgagctccccgccccccggaggctgcggtggaaatgctccccggaaattcaaggccacttagcctcctcggcagaaaaacttcaacgaatagtaaagaaccttgacttcattgtctataagtttgacaactatgggaaaacattcattaagaagcagaaatgcagccctgatgccttcatccaggtggccctccagctggccttctacaggctccatcgaagactggtgcccacctacgagagcgcgtccatccgccgattccaggagggacgcgtggacaacatcagatcggccactccagaggcactggcttttgtgagagccgtgactgaccacaaggctgctgtgccagcttctgagaagcttctgctcctgaaggatgccatccgtgcccagactgcatacacagtcatggccataacagggatggccattgacaaccacctgctggcactgcgggagctggcccgggccatgtgcaaggagctgcccgagatgttcatggatgaaacctacctgatgagcaaccggtttgtcctctccactagccaggtgcccacaaccacggagatgttctgctgctatggtcctgtggtcccaaatgggtatggtgcctgctacaacccccagccagagaccatccttttctgcatctctagctttcacagctgcaaagagacttcttctagcaagtttgcaaaagctgtggaagaaagcctcattgacatgagagacctctgcagtctgctgccgcctactgagagcaagccattggcaacaaaggaaaaagccacgaggcccagccagggacaccaaccttgactcctgccactaggtttcacctcccaaacccagcctctagaacagccagaccctgcag

SEQ ID NO: 117449 - DNA, 2124 bp, Homo sapiens
  Payload ID: 2932
  Gene Symbol: CHAT
  Gene Name: choline O-acetyltransferase
  Uniprot ID: P28329
  ENST ID: ENST00000339797
  CDS Start-End: 174-2066
tcaacgccgctctggggacgcgtcaggcccagcgcacagcctgggcagctcagcctgtcagctgagcacgggcgcctcaaggggtgcggccctctcagaaggaaggtccacacctctgcatccctgcaccaggactcaccaagacgcccatcctggaaaaggtcccccgtaagatggcagcaaaaactcccagcagtgaggagtctgggctgcccaaactgcccgtgcccccgctgcagcagaccctggccacgtacctgcagtgcatgcgacacttggtgtctgaggagcagttcaggaagagccaggccattgtgcagcagtttggggcccctggtggcctcggcgagaccctgcagcagaaactcctggagcggcaggagaagacagccaactgggtgtctgagtactggctgaatgacatgtatctcaacaaccgcctggccctgcctgtcaactccagccctgccgtgatctttgctcggcagcacttccctggcaccgatgaccagctgaggtttgcagccagcctcatctctggtgtactcagctacaaggccctgctggacagccactccattcccactgactgtgccaaaggccagctgtcagggcagcccctttgcatgaagcaatactatgggctcttctcctcctaccggctccccggccatacccaggacacgctggtggctcagaacagcagcatcatgccggagcctgagcacgtcatcgtagcctgctgcaatcagttctttgtcttggatgttgtcattaatttccgccgtctcagtgagggggatctgttcactcagttgagaaagatagtcaaaatggcttccaacgaggacgagcgtttgcctccaattggcctgctgacgtctgacgggaggagcgagtgggccgaggccaggacggtcctcgtgaaagactccaccaaccgggactcgctggacatgattgagcgctgcatctgccttgtatgcctggacgcgccaggaggcgtggagctcagcgacacccacagggcactccagctccttcacggcggaggctacagcaagaacggggccaatcgctggtacgacaagtccctgcagtttgtggtgggccgagacggcacctgcggtgtggtgtgcgaacactccccattcgatggcatcgtcctggtgcagtgcactgagcatctgctcaagcacgtgacgcagagcagcaggaagctgatccgagcagactccgtcagcgagctccccgccccccggaggctgcggtggaaatgctccccggaaattcaaggccacttagcctcctcggcagaaaaacttcaacgaatagtaaagaaccttgacttcattgtctataagtttgacaactatgggaaaacattcattaagaagcagaaatgcagccctgatgccttcatccaggtggccctccagctggccttctacaggctccatcgaagactggtgcccacctacgagagcgcgtccatccgccgattccaggagggacgcgtggacaacatcagatcggccactccagaggcactggcttttgtgagagccgtgactgaccacaaggctgctgtgccagcttctgagaagcttctgctcctgaaggatgccatccgtgcccagactgcatacacagtcatggccataacagggatggccattgacaaccacctgctggcactgcgggagctggcccgggccatgtgcaaggagctgcccgagatgttcatggatgaaacctacctgatgagcaaccggtttgtcctctccactagccaggtgcccacaaccacggagatgttctgctgctatggtcctgtggtcccaaatgggtatggtgcctgctacaacccccagccagagaccatccttttctgcatctctagctttcacagctgcaaagagacttcttctagcaagtttgcaaaagctgtggaagaaagcctcattgacatgagagacctctgcagtctgctgccgcctactgagagcaagccattggcaacaaaggaaaaagccacgaggcccagccagggacaccaaccttgactcctgccactaggtttcacctcccaaacccagcctctagaacagccagaccctgcag

SEQ ID NO: 117450 - DNA, 2286 bp, Homo sapiens
  Payload ID: 2932
  Gene Symbol: CHAT
  Gene Name: choline O-acetyltransferase
  Uniprot ID: P28329
  ENST ID: ENST00000351556
  CDS Start-End: 336-2228
cccgccccgttgaggctttgagaaaggagtaggagccgagcattccggcagaggaagaaaaacggcccatcttttagagtccgacctctggaaattcgggtggccgcggggacccgggcgacgtcggaggccctgccgggaacccaggctgcagcccccacccccgcgctgcgacacgccccccaccccttccggctcacacccccgcccacactcctgagtggtgcggtgcagcgtcggccgaggcagcagagccgaggagagcaggtccacacctctgcatccctgcaccaggactcaccaagacgcccatcctggaaaaggtcccccgtaagatggcagcaaaaactcccagcagtgaggagtctgggctgcccaaactgcccgtgcccccgctgcagcagaccctggccacgtacctgcagtgcatgcgacacttggtgtctgaggagcagttcaggaagagccaggccattgtgcagcagtttggggcccctggtggcctcggcgagaccctgcagcagaaactcctggagcggcaggagaagacagccaactgggtgtctgagtactggctgaatgacatgtatctcaacaaccgcctggccctgcctgtcaactccagccctgccgtgatctttgctcggcagcacttccctggcaccgatgaccagctgaggtttgcagccagcctcatctctggtgtactcagctacaaggccctgctggacagccactccattcccactgactgtgccaaaggccagctgtcagggcagcccctttgcatgaagcaatactatgggctcttctcctcctaccggctccccggccatacccaggacacgctggtggctcagaacagcagcatcatgccggagcctgagcacgtcatcgtagcctgctgcaatcagttctttgtcttggatgttgtcattaatttccgccgtctcagtgagggggatctgttcactcagttgagaaagatagtcaaaatggcttccaacgaggacgagcgtttgcctccaattggcctgctgacgtctgacgggaggagcgagtgggccgaggccaggacggtcctcgtgaaagactccaccaaccgggactcgctggacatgattgagcgctgcatctgccttgtatgcctggacgcgccaggaggcgtggagctcagcgacacccacagggcactccagctccttcacggcggaggctacagcaagaacggggccaatcgctggtacgacaagtccctgcagtttgtggtgggccgagacggcacctgcggtgtggtgtgcgaacactccccattcgatggcatcgtcctggtgcagtgcactgagcatctgctcaagcacgtgacgcagagcagcaggaagctgatccgagcagactccgtcagcgagctccccgccccccggaggctgcggtggaaatgctccccggaaattcaaggccacttagcctcctcggcagaaaaacttcaacgaatagtaaagaaccttgacttcattgtctataagtttgacaactatgggaaaacattcattaagaagcagaaatgcagccctgatgccttcatccaggtggccctccagctggccttctacaggctccatcgaagactggtgcccacctacgagagcgcgtccatccgccgattccaggagggacgcgtggacaacatcagatcggccactccagaggcactggcttttgtgagagccgtgactgaccacaaggctgctgtgccagcttctgagaagcttctgctcctgaaggatgccatccgtgcccagactgcatacacagtcatggccataacagggatggccattgacaaccacctgctggcactgcgggagctggcccgggccatgtgcaaggagctgcccgagatgttcatggatgaaacctacctgatgagcaaccggtttgtcctctccactagccaggtgcccacaaccacggagatgttctgctgctatggtcctgtggtcccaaatgggtatggtgcctgctacaacccccagccagagaccatccttttctgcatctctagctttcacagctgcaaagagacttcttctagcaagtttgcaaaagctgtggaagaaagcctcattgacatgagagacctctgcagtctgctgccgcctactgagagcaagccattggcaacaaaggaaaaagccacgaggcccagccagggacaccaaccttgactcctgccactaggtttcacctcccaaacccagcctctagaacagccagaccctgcag

SEQ ID NO: 117451 - DNA, 2114 bp, Homo sapiens
  Payload ID: 2932
  Gene Symbol: CHAT
  Gene Name: choline O-acetyltransferase
  Uniprot ID: P28329
  ENST ID: ENST00000395559
  CDS Start-End: 164-2056
cccgccccgttgaggctttgagaaaggagtaggagccgagcattccggcagaggaagaaaaacggcccatcttttagagtccgacctctggaaatgtccacacctctgcatccctgcaccaggactcaccaagacgcccatcctggaaaaggtcccccgtaagatggcagcaaaaactcccagcagtgaggagtctgggctgcccaaactgcccgtgcccccgctgcagcagaccctggccacgtacctgcagtgcatgcgacacttggtgtctgaggagcagttcaggaagagccaggccattgtgcagcagtttggggcccctggtggcctcggcgagaccctgcagcagaaactcctggagcggcaggagaagacagccaactgggtgtctgagtactggctgaatgacatgtatctcaacaaccgcctggccctgcctgtcaactccagccctgccgtgatctttgctcggcagcacttccctggcaccgatgaccagctgaggtttgcagccagcctcatctctggtgtactcagctacaaggccctgctggacagccactccattcccactgactgtgccaaaggccagctgtcagggcagcccctttgcatgaagcaatactatgggctcttctcctcctaccggctccccggccatacccaggacacgctggtggctcagaacagcagcatcatgccggagcctgagcacgtcatcgtagcctgctgcaatcagttctttgtcttggatgttgtcattaatttccgccgtctcagtgagggggatctgttcactcagttgagaaagatagtcaaaatggcttccaacgaggacgagcgtttgcctccaattggcctgctgacgtctgacgggaggagcgagtgggccgaggccaggacggtcctcgtgaaagactccaccaaccgggactcgctggacatgattgagcgctgcatctgccttgtatgcctggacgcgccaggaggcgtggagctcagcgacacccacagggcactccagctccttcacggcggaggctacagcaagaacggggccaatcgctggtacgacaagtccctgcagtttgtggtgggccgagacggcacctgcggtgtggtgtgcgaacactccccattcgatggcatcgtcctggtgcagtgcactgagcatctgctcaagcacgtgacgcagagcagcaggaagctgatccgagcagactccgtcagcgagctccccgccccccggaggctgcggtggaaatgctccccggaaattcaaggccacttagcctcctcggcagaaaaacttcaacgaatagtaaagaaccttgacttcattgtctataagtttgacaactatgggaaaacattcattaagaagcagaaatgcagccctgatgccttcatccaggtggccctccagctggccttctacaggctccatcgaagactggtgcccacctacgagagcgcgtccatccgccgattccaggagggacgcgtggacaacatcagatcggccactccagaggcactggcttttgtgagagccgtgactgaccacaaggctgctgtgccagcttctgagaagcttctgctcctgaaggatgccatccgtgcccagactgcatacacagtcatggccataacagggatggccattgacaaccacctgctggcactgcgggagctggcccgggccatgtgcaaggagctgcccgagatgttcatggatgaaacctacctgatgagcaaccggtttgtcctctccactagccaggtgcccacaaccacggagatgttctgctgctatggtcctgtggtcccaaatgggtatggtgcctgctacaacccccagccagagaccatccttttctgcatctctagctttcacagctgcaaagagacttcttctagcaagtttgcaaaagctgtggaagaaagcctcattgacatgagagacctctgcagtctgctgccgcctactgagagcaagccattggcaacaaaggaaaaagccacgaggcccagccagggacaccaaccttgactcctgccactaggtttcacctcccaaacccagcctctagaacagccagaccctgcag

SEQ ID NO: 117452 - DNA, 2528 bp, Homo sapiens
  Payload ID: 2932
  Gene Symbol: CHAT
  Gene Name: choline O-acetyltransferase
  Uniprot ID: P28329
  ENST ID: ENST00000395562
  CDS Start-End: 470-2470
aaatgctgagctaggggcaggaggcatgggcgggacagtgttctgtgcccccttctagagcctaaatttgttgcccgagttcctccgggaagcgctccgggtagattctgggggccgggagctgagatccctgggcggggagctggggaagggatggggctgaggacagcgaagaagagggggcttgggggaggggggaaatggaagagagaggagggaggaggtacaagaggaaggagagaagtgcggccagcttgctttctccagtcgggtggccgcggggacccgggcgacgtcggaggccctgccgggaacccaggctgcagcccccacccccgcgctgcgacacgccccccaccccttccggctcacacccccgcccacactcctgagtggtgcggtgcagcgtcggccgaggcagcagagccgaggagagcagtgagggaattcaccctactccacaccagagatgtggccggaatgcagagatgaagcactgagcacagtaggtccacacctctgcatccctgcaccaggactcaccaagacgcccatcctggaaaaggtcccccgtaagatggcagcaaaaactcccagcagtgaggagtctgggctgcccaaactgcccgtgcccccgctgcagcagaccctggccacgtacctgcagtgcatgcgacacttggtgtctgaggagcagttcaggaagagccaggccattgtgcagcagtttggggcccctggtggcctcggcgagaccctgcagcagaaactcctggagcggcaggagaagacagccaactgggtgtctgagtactggctgaatgacatgtatctcaacaaccgcctggccctgcctgtcaactccagccctgccgtgatctttgctcggcagcacttccctggcaccgatgaccagctgaggtttgcagccagcctcatctctggtgtactcagctacaaggccctgctggacagccactccattcccactgactgtgccaaaggccagctgtcagggcagcccctttgcatgaagcaatactatgggctcttctcctcctaccggctccccggccatacccaggacacgctggtggctcagaacagcagcatcatgccggagcctgagcacgtcatcgtagcctgctgcaatcagttctttgtcttggatgttgtcattaatttccgccgtctcagtgagggggatctgttcactcagttgagaaagatagtcaaaatggcttccaacgaggacgagcgtttgcctccaattggcctgctgacgtctgacgggaggagcgagtgggccgaggccaggacggtcctcgtgaaagactccaccaaccgggactcgctggacatgattgagcgctgcatctgccttgtatgcctggacgcgccaggaggcgtggagctcagcgacacccacagggcactccagctccttcacggcggaggctacagcaagaacggggccaatcgctggtacgacaagtccctgcagtttgtggtgggccgagacggcacctgcggtgtggtgtgcgaacactccccattcgatggcatcgtcctggtgcagtgcactgagcatctgctcaagcacgtgacgcagagcagcaggaagctgatccgagcagactccgtcagcgagctccccgccccccggaggctgcggtggaaatgctccccggaaattcaaggccacttagcctcctcggcagaaaaacttcaacgaatagtaaagaaccttgacttcattgtctataagtttgacaactatgggaaaacattcattaagaagcagaaatgcagccctgatgccttcatccaggtggccctccagctggccttctacaggctccatcgaagactggtgcccacctacgagagcgcgtccatccgccgattccaggagggacgcgtggacaacatcagatcggccactccagaggcactggcttttgtgagagccgtgactgaccacaaggctgctgtgccagcttctgagaagcttctgctcctgaaggatgccatccgtgcccagactgcatacacagtcatggccataacagggatggccattgacaaccacctgctggcactgcgggagctggcccgggccatgtgcaaggagctgcccgagatgttcatggatgaaacctacctgatgagcaaccggtttgtcctctccactagccaggtgcccacaaccacggagatgttctgctgctatggtcctgtggtcccaaatgggtatggtgcctgctacaacccccagccagagaccatccttttctgcatctctagctttcacagctgcaaagagacttcttctagcaagtttgcaaaagctgtggaagaaagcctcattgacatgagagacctctgcagtctgctgccgcctactgagagcaagccattggcaacaaaggaaaaagccacgaggcccagccagggacaccaaccttgactcctgccactaggtttcacctcccaaacccagcctctagaacagccagaccctgcag

SEQ ID NO: 117453 - DNA, 2528 bp, Homo sapiens; identical to SEQ ID NO: 117452
  Payload ID: 2932
  Gene Symbol: CHAT
  Gene Name: choline O-acetyltransferase
  ENST ID: ENST00000466590
  CDS Start-End: 154-492

SEQ ID NO: 117454 - DNA, 1585 bp, Homo sapiens
  Payload ID: 2933
  Gene Symbol: CHPT1
  Gene Name: choline phosphotransferase 1
  Uniprot ID: Q8WUD6
  ENST ID: ENST00000229266
  CDS Start-End: 236-1456
tccccgaggccccgccccacccgcgagccgcagccgcggccccacagcttctggggctggggccccggcagccgggcaggccggcctgacctcgacctccgccgtgcgggcccgaccggtgagtccagcccggcagtcgcaggacccggccgccagcctctccctccacctctccctgcccccagcgccaggcgcgggctgcgctcggtggcggcggcggggccctcaggcggccatggcggcaggcgccggggccgggtccgcgccgcgctggctgagggcgctgagcgagccgctgagcgcggcgcagctgcggcgactggaggagcaccgctacagcgcggcgggcgtctcgctgctcgagccgccgctgcagctctactggacctggctgctccagtggatcccgctctggatggcccccaactccatcaccctgctggggctcgccgtcaacgtggtcaccacgctcgtgctcatctcctactgtcccacggccaccgaagaggcaccatactggacataccttttatgtgcactgggactttttatttaccagtcactggatgctattgatgggaaacaagccagaagaacaaactcttgttcccctttaggggagctctttgaccatggctgtgactctctttccacagtatttatggcagtgggagcttcaattgccgctcgcttaggaacttatcctgactggttttttttctgctcttttattgggatgtttgtgttttattgcgctcattggcagacttatgtttcaggcatgttgagatttggaaaagtggatgtaactgaaattcagatagctttagtgattgtctttgtgttgtctgcatttggaggagcaacaatgtgggactatacgattcctattctagaaataaaattgaagatccttccagttcttggatttctaggtggagtaatattttcctgttcaaattatttccatgttatcctccatggtggtgttggcaagaatggatccactatagcaggcaccagtgtcttgtcacctggactccacataggactaattattatactggcaataatgatctataaaaagtcagcaactgatgtgtttgaaaagcatccttgtctttatatcctaatgtttggatgtgtctttgctaaagtctcacaaaaattagtggtagctcacatgaccaaaagtgaactatatcttcaagacactgtctttttggggccaggtcttttgtttttagaccagtactttaataactttatagacgaatatgttgttctatggatggcaatggtgatttcttcatttgatatggtgatatactttagtgctttgtgcctgcaaatttcaagacaccttcatctaaatatattcaagactgcatgtcatcaagcacctgaacaggttcaagttctttcttcaaagagtcatcagaataacatggattgaagagacttccgaacacttgctatctcttgctgctgctgtttcatggaaggagatattaaacatttgtttaatttttatttaagtgttatacctatttcagcaaataaaatatttcattgcttatattaa

SEQ ID NO: 117455 - DNA, 1552 bp, Homo sapiens
  Payload ID: 2933
  Gene Symbol: CHPT1
  Gene Name: choline phosphotransferase 1
  ENST ID: ENST00000549128
  CDS Start-End: 171-1367
cggcagccgggcaggccggcctgacctcgacctccgccgtgcgggcccgaccggtgagtccagcccggcagtcgcaggacccggccgccagcctctccctccacctctccctgcccccagcgccaggcgcgggctgcgctcggtggcggcggcggggccctcaggcggccatggcggcaggcgccggggccgggtccgcgccgcgctggctgagggcgctgagcgagccgctgagcgcggcgcagctgcggcgactggaggagcaccgctacagcgcggcgggcgtctcgctgctcgagccgccgctgcagctctactggacctggctgctccagtggatcccgctctggatggcccccaactccatcaccctgctggggctcgccgtcaacgtggtcaccacgctcgtgctcatctcctactgtcccacggccaccgaagaggcaccatactggacataccttttatgtgcactgggactttttatttaccagtcactggatgctattgatgggaaacaagccagaagaacaaactcttgttcccctttaggggagctctttgaccatggctgtgactctctttccacagtatttatggcagtgggagcttcaattgccgctcgcttaggaacttatcctgactggttttttttctgctcttttattgggatgtttgtgttttattgcgctcattggcagacttatgtttcaggcatgttgagatttggaaaagtggatgtaactgaaattcagatagctttagtgattgtctttgtgttgtctgcatttggaggagcaacaatgtgggactatacgattcctattctagaaataaaattgaagatccttccagttcttggatttctaggtggagtaatattttcctgttcaaattatttccatgttatcctccatggtggtgttggcaagaatggatccactatagcaggcaccagtgtcttgtcacctggactccacataggactaattattatactggcaataatgatctataaaaagtcagcaactgatgtgtttgaaaagcatccttgtctttatatcctaatgtttggatgtgtctttgctaaagtctcacaaaaattagtggtagctcacatgaccaaaagtgaactatatcttcaagacactgtctttttggggccaggtcttttgtttttagaccagtactttaataactttatagacgaatatgttgttctatggatggcaatggtgatttcttcatttgatatggtgatatactttagtgctttgtgcctgcaaatttcaagacaccttcatctaaatatattcaagactgcatgtcatcaagcacctgaacaggttcacaagcatattgactgactaatagcccaaggaaaagaggagatgaagttaggggaatctatgagtgaaggaaatccccctgtgcaggaggctattctttcttcaaagagtcatcagaataacatggattgaagagacttccgaacacttgctatctcttgctgctgctgtttcatggaaggagatattaaacatttgtttaa

SEQ ID NO: 117456 - DNA, 1524 bp, Homo sapiens
  Payload ID: 2933
  Gene Symbol: CHPT1
  Gene Name: choline phosphotransferase 1
  Uniprot ID: Q8WUD6
  ENST ID: ENST00000552351
  CDS Start-End: 171-827
cggcagccgggcaggccggcctgacctcgacctccgccgtgcgggcccgaccggtgagtccagcccggcagtcgcaggacccggccgccagcctctccctccacctctccctgcccccagcgccaggcgcgggctgcgctcggtggcggcggcggggccctcaggcggccatggcggcaggcgccggggccgggtccgcgccgcgctggctgagggcgctgagcgagccgctgagcgcggcgcagctgcggcgactggaggagcaccgctacagcgcggcgggcgtctcgctgctcgagccgccgctgcagctctactggacctggctgctccagtggatcccgctctggatggcccccaactccatcaccctgctggggctcgccgtcaacgtggtcaccacgctcgtgctcatctcctactgtcccacggccaccgaagaggcaccatactggacataccttttatgtgcactgggactttttatttaccagtcactggatgctattgatgggaaacaagccagaagaacaaactcttgttcccctttaggggagctctttgaccatggctgtgactctctttccacagtatttatggcagtgggagcttcaattgccgctcgcttaggaacttatcctgactggttttttttctgctcttttattgggatgtttgtgttttattgcgctcattggcagacttatgtttcaggcatgttgagatttggaaaagtggatgtaactgaaattcagatagctttagtgattgtctttgtgttgtctgcatttggaggagcaacaatgtgggactatacgttttcttgaacagcagttgaccaacagattcctattctagaaataaaattgaagatccttccagttcttggatttctaggtggagtaatattttcctgttcaaattatttccatgttatcctccatggtggtgttggcaagaatggatccactatagcaggcaccagtgtcttgtcacctggactccacataggactaattattatactggcaataatgatctataaaaagtcagcaactgatgtgtttgaaaagcatccttgtctttatatcctaatgtttggatgtgtctttgctaaagtctcacaaaaattagtggtagctcacatgaccaaaagtgaactatatcttcaagacactgtctttttggggccaggtcttttgtttttagaccagtactttaataactttatagacgaatatgttgttctatggatggcaatggtgatttcttcatttgatatggtgatatactttagtgctttgtgcctgcaaatttcaagacaccttcatctaaatatattcaagactgcatgtcatcaagcacctgaacaggttcaagttctttcttcaaagagtcatcagaataacatggattgaagagacttccgaacacttgctatctcttgctgctgctgtttcatggaaggagatattaaacatttgtttaatttttatttaagtgttatacctatttcagcaaata

SEQ ID NO: 117457 - DNA, 580 bp, Homo sapiens
  Payload ID: 2933
  Gene Symbol: CHPT1
  Gene Name: choline phosphotransferase 1
  ENST ID: ENST00000552329
  CDS Start-End: 1-284
ttgccgctcgcttaggaacttatcctgactggttttttttctgctcttttattgggatgtttgtgttttattgcgctcattggcagacttatgtttcaggcatgttgagatttggaaaagtggatgtaactgaaattcagatagctttagtgattgtctttgtgttgtctgcatttggaggagcaacaatgtgggactatacggtgaagattcccatattaaggaatgtttttattttctgcctgcttggtgacctcagtagtttcataaaagttggctcttaggaggccactgtcataaattcaagcttttttgcaaaagaagaacatttctgaagaaacagttgtcctgttaccacaacattcctattctagaaataaaattgaagatccttccagttcttggatttctaggtggagtaatattttcctgttcaaattatttccatgttatcctccatggtggtgttggcaagaatggatccactatagcaggcaccagtgtcttgtcacctggactccacataggactaattattatactggcaataatgatctataaaaagtcagcaactgatgtg

SEQ ID NO: 117458 - DNA, 624 bp, Homo sapiens
  Payload ID: 2933
  Gene Symbol: CHPT1
  Gene Name: choline phosphotransferase 1
  ENST ID: ENST00000546873
  CDS Start-End: 1-115
ctttagtgctttgtgcctgcaaatttcaagacaccttcatctaaatatattcaagactgcatgtcatcaagcacctgaacagggtctcgctgtcgcccaggctggagtacagtagtacgatttcagctcactgcaacctttgcctccagggctcaagtgatcctcccacctcagccttcccagtagctgggactacaggcacagtggctcacacctgtaatcccagcaccgtggaaggtcgaagcaggagtattgcttgagcccaggagttcaagacagcctggataacagtaagaccctgtctctacaaaaatataaacaaaattagtcaggtgtggtggagcacatctgtggtcacagctgctcaggaagctgaggtgagaggactgcttgagcctgtgaggttgacgctgcagtcagctgagatcacgccactgctctccagcctggggcaacagagtgagatcgtctcaaaagaaacaaacaaacaaaaaacacttttgaagacataaggtaggttaaaaaaatcctttgtaattagaaaatgtgtcacttttttagctaagagcaatataatcatctcaccctaatgactagactaggagcctcacctctggcctggac

SEQ ID NO: 117459 - DNA, 2001 bp, Homo sapiens
  Payload ID: 2933
  Gene Symbol: CHPT1
  Gene Name: choline phosphotransferase 1
  ENST ID: ENST00000549872
  CDS Start-End: 191-1387
agcttctggggctggggccccggcagccgggcaggccggcctgacctcgacctccgccgtgcgggcccgaccggtgagtccagcccggcagtcgcaggacccggccgccagcctctccctccacctctccctgcccccagcgccaggcgcgggctgcgctcggtggcggcggcggggccctcaggcggccatggcggcaggcgccggggccgggtccgcgccgcgctggctgagggcgctgagcgagccgctgagcgcggcgcagctgcggcgactggaggagcaccgctacagcgcggcgggcgtctcgctgctcgagccgccgctgcagctctactggacctggctgctccagtggatcccgctctggatggcccccaactccatcaccctgctggggctcgccgtcaacgtggtcaccacgctcgtgctcatctcctactgtcccacggccaccgaagaggcaccatactggacataccttttatgtgcactgggactttttatttaccagtcactggatgctattgatgggaaacaagccagaagaacaaactcttgttcccctttaggggagctctttgaccatggctgtgactctctttccacagtatttatggcagtgggagcttcaattgccgctcgcttaggaacttatcctgactggttttttttctgctcttttattgggatgtttgtgttttattgcgctcattggcagacttatgtttcaggcatgttgagatttggaaaagtggatgtaactgaaattcagatagctttagtgattgtctttgtgttgtctgcatttggaggagcaacaatgtgggactatacgattcctattctagaaataaaattgaagatccttccagttcttggatttctaggtggagtaatattttcctgttcaaattatttccatgttatcctccatggtggtgttggcaagaatggatccactatagcaggcaccagtgtcttgtcacctggactccacataggactaattattatactggcaataatgatctataaaaagtcagcaactgatgtgtttgaaaagcatccttgtctttatatcctaatgtttggatgtgtctttgctaaagtctcacaaaaattagtggtagctcacatgaccaaaagtgaactatatcttcaagacactgtctttttggggccaggtcttttgtttttagaccagtactttaataactttatagacgaatatgttgttctatggatggcaatggtgatttcttcatttgatatggtgatatactttagtgctttgtgcctgcaaatttcaagacaccttcatctaaatatattcaagactgcatgtcatcaagcacctgaacaggttcacaagcatattgactgactaatagcccaaggaaaagaggagatgaagttaggggaatctatgagtgaaggaaatccccctgtgcaggaggctagtataccatcaataaggttatatttgaatataaaacataaaccctgtagatttcattgtgtcttatttcagttatgaagcccccattgtatcatcattttttatcacagatgttctcagaattgtctacatattaattagaaacaagactaaagaaatgtcaatcctgaggacaacagtgaacccctgtaattctaagtagcagtttgtctctgagacttatcagacacagggttttcactgccaaaggattacataaatattcagaacataaaggattttagccatcttgagggtgcttactttgactgctaaaaactgaaaagtgattcaatactgcttaagtgcatggcttataatgtaattattgaatcaagttatgttctaagaaattttttatactaatcatttttcaagaggcatattagtatgttataaaatacttgcttttagtatactagaatttaaaagggctacaggaattttttaaataaaatttgtatttaataaaaggaatttgttgtaccagttcagaaaaa

SEQ ID NO: 117460 - DNA, 4342 bp, Homo sapiens
  Payload ID: 2933
  Gene Symbol: CHPT1
  Gene Name: choline phosphotransferase 1
  ENST ID: ENST00000552215
  CDS Start-End: 1-554
gcgcggcgggcgtctcgctgctcgagccgccgctgcagctctactggacctggctgctccagtggatcccgctctggatggcccccaactccatcaccctgctggggctcgccgtcaacgtggtcaccacgctcgtgctcatctcctactgtcccacggccaccgaagaggcaccatactggacataccttttatgtgcactgggactttttatttaccagtcactggatgctattgatgggaaacaagccagaagaacaaactcttgttcccctttaggggagctctttgaccatggctgtgactctctttccacagtatttatggcagtgggagcttcaattgccgctcgcttaggaacttatcctgactggttttttttctgctcttttattgggatgtttgtgttttattgcgctcattggcagacttatgtttcaggcatgttgagatttggaaaagtggatgtaactgaaattcagatagctttagtgattgtctttgtgttgtctgcatttggaggagcaacaatgtgggactatacgttttcttgaacagcagttgaccaacagattcctattctagaaataaaattgaagatccttccagttcttggatttctaggtggagtaatattttcctgttcaaattatttccatgttatcctccatggtggtgttggcaagaatggatccactatagcaggcaccagtgtcttgtcacctggactccacataggactaattattatactggcaataatgatctataaaaagtcagcaactgatgtgtttgaaaagcatccttgtctttatatcctaatgtttggatgtgtctttgctaaagtctcacaaaaattagtggtagctcacatgaccaaaagtgaactatatcttcaagacactgtctttttggggccaggtcttttgtttttagaccagtactttaataactttatagacgaatatgttgttctatggatggcaatggtgatttcttcatttgatatggtgatatactttagtgctttgtgcctgcaaatttcaagacaccttcatctaaatatattcaagactgcatgtcatcaagcacctgaacaggttcacaagcatattgactgactaatagcccaaggaaaagaggagatgaagttaggggaatctatgagtgaaggaaatccccctgtgcaggaggctagtataccatcaataaggttatatttgaatataaaacataaaccctgtagatttcattgtgtcttatttcagttatgaagcccccattgtatcatcattttttatcacagatgttctcagaattgtctacatattaattagaaacaagactaaagaaatgtcaatcctgaggacaacagtgaacccctgtaattctaagtagcagtttgtctctgagacttatcagacacagggttttcactgccaaaggattacataaatattcagaacataaaggattttagccatcttgagggtgcttactttgactgctaaaaactgaaaagtgattcaatactgcttaagtgcatggcttataatgtaattattgaatcaagttatgttctaagaaattttttatactaatcatttttcaagaggcatattagtatgttataaaatacttgcttttagtatactagaatttaaaagggctacaggaattttttaaataaaatttgtatttaataaaaggaatttgttgtaccagttcagaaaaacatacgaatctttatactgaaggtaacttgttccttgatattttgagttaaaatttcactgtcactgaaaagtggatgttaaatattccctttcatgaaaaatgaaaacagtagctaagagtcagttgacatgtaagaaaattagtaacttagaaaaacttacttggtaaaaaaaatcttccttttagaatacaaaagtttactttaagtacacactgactcatttgaggtgataagggataaaataagtaaaagttattcaaccactaagtacattaggtactgatacttatctttccactctaattgaaatgtatttagattactcattatgaatactactagaactatcacaaagatctctggggatccaaatcttcagattcccatctgaccctatttatttttaattttatataatagttcaacagaccatatgtcatatgatgaagtaatcaaaaaaaaaaaaaaggagtaatttgtgtactacatctgttttaggcaagaaaaaggtatattgaagaaaacagtgaaagatgatattccttaaaagcaaaaaaacatacttatgggaattaagtacacagaaaacactggagtacttattttgcctctaactaactattggtaaaacttcccaaataaggactttcttacaaggatgaatagtacttatgatttatattctaataatatatactttggcttaaaaggaaaatcctttacaaagttcaaaaatttaggaaataatgtcaaatattcgttaatggtggaagactaatttcttcctgtacaagtaggttgtcacaattagaaaaagtttatctgtaggcacctgtttttttaaaacttggaaaaccttattataactaagataagggtgagttatacaggcaaaaattagaatttaaaacatagaaaagcaggaggccaggcatggtggctcacacctgtaatcccagcactttgggaggccgaggcgggcagatcatttgaagtcaggagttcgagaccagcctggccaacatggcgaaaccccgtctctactaaaaatacaaaaataagctgggcgtggtggcaagtgcctgtagtcccagctacttgggaagctgaggcaggaaaatcgcttgaacctgggaggcggaggttgcagtgagctgagattactccactgcactccagctggggtgacagagtgagactccatctcaaaaaataaataaacgcagatgtgatatatataaaccataagaaattaggtatgttaatgatgtgctcttaatttaattgcagaccaagcccaatgaagtgacattatgtctttgtggcaatgacatattcacaaatccatgtcttaaaactgttatttatatattgttctattgctagtgatttaatgttcagaggttaatgattttagcaatttattccagaacacaaatttaaatgcatcttattgtcattagaatcggttgtacaacttaagtatatagaaaaggatgtacatgtaaaatagattttgtattccgttttttccttaaagaacataaccttctatacttggttttctaccttttgggattgatagagatacaatgaagccaaacctaaaattaaatcgtctttatttaattgacagtgttagagagaaaaattcactatcattactaaagagctgaaagcttaatacatattctttaggaatagttgctaactaactcataactatttagatttgacttaacagaaagggaggtcttacaatgaaacaggtttatgattaaagatgttacaattaaactattctaaagacttacaatatgcttcttagctaacgttataattgtatcatattacttaggttcaagttctttcttcaaagagtcatcagaataacatggattgaagagacttccgaacacttgctatctcttgctgctgctgtttcatggaaggagatattaaacatttgtttaatttttatttaagtgttatacctatttcagcaaataaaatatttcattgcttatattaatccttattttttcaatttcaatatgatcacttacagtttccatcataatttttttttgcaacatagccatttcttttttaaattcattttgtgcaccagtaagtagattatcatgattcttctccaactcttccatactctaaaaacacaaaagacaagttaagttacaaaggaccacttttcatctcaggttctaaacttgtacaattaattttcaaaagtagtaatttttgaatattcaaatgctcatctatttgaaataaaaatattctaagtaatacatgaataccaaaatacctactaaaaaagaaaaaatataagacatgaataaaatgttataggaagtacaatgtagtatactttgcccacaatgggtttcctgaactgttaaggtcaagataaaaaagactggaagtcccacatcagtaaaaaccatttctattaagctttccaaatatcaagcaataatctacttatgactaatagtgtgccatgaattcactagagggaataaaataatctatagtacaacctctttcacattatgaaaaataaaaattatgtcttacgtc

SEQ ID NO: 117461 - DNA, 2198 bp, Homo sapiens
  Payload ID: 2934
  Gene Symbol: CEPT1
  Gene Name: choline/ethanolamine phosphotransferase 1
  Uniprot ID: Q9Y6K0
  ENST ID: ENST00000357172
  CDS Start-End: 156-1406
gtgaacgtgctgccgccgatcagtcacccagtcggctggagtcggaggcgatatttctaggggtgtacttgttggggtcagggtaagcaccagccacaaaaacctacaaaagaagggaaattactgtctttaaatattaaaaaaaaacaagatccatgagtgggcatcgatcaacaaggaaaagatgtggagattctcacccggagtccccagtgggcttcgggcatatgagtactacaggatgtgtattaaataaattgtttcagttaccaacaccaccattgtcaagacaccaactaaagcggctagaagaacacagatatcaaagtgctggacggtccctgcttgagcccttaatgcaagggtattgggaatggctcgttagaagagttccctcctggattgccccaaatctcatcaccatcattggactgtcaataaacatctgtacaactattttattagtcttctactgccctacagctacagagcaggcacctctgtgggcatatattgcttgtgcctgtggccttttcatttaccagtctttggatgctattgatgggaaacaggcaagaagaaccaatagtagttctcctctgggagaactttttgatcatggctgtgattcactatcaacagtttttgtggttcttggaacttgtattgcagtgcagctggggacaaaccctgattggatgtttttttgttgttttgcggggacatttatgttctattgtgcgcactggcaaacgtatgtttctggaacattgcgatttggaataattgatgtgactgaagtgcaaatcttcataataatcatgcatttgctggcagtgattggaggaccacctttttggcaatctatgattccagtgctgaatattcaaatgaaaatttttcctgcactttgtactgtagcagggaccatattttcctgtacaaattacttccgtgtaatcttcacaggtggtgttggcaaaaatggatcaacaatagcaggaacaagtgtcctttctccttttctccatattggatcagtgattacattagctgcaatgatctacaagaaatctgcagttcagctttttgaaaagcatccctgtctttatatactgacatttggttttgtgtctgctaaaatcactaataagcttgtggttgcacacatgacgaaaagtgaaatgcatttgcatgacacagcattcataggtccggcacttttgtttctggaccagtattttaacagctttattgatgaatatattgtactttggattgccctggttttctctttctttgatttgatccgctactgtgtcagtgtttgcaatcagattgcgtctcacctgcacatacatgtcttcagaatcaaggtctctacagctcattctaatcatcattaatgatgtaattggtatataggaacatcatgttttctgcaggaaagaaagtaacatattaaggagaatgggggtggataagaacaaatataatttataataatcaatgttgtataacttttattctttattattggtaacacgccctaactatcctgtgtgagaatgggaatttcaagtcccatcttgtaaattgtatatgttgtcatgcagggtttgggccaagaaagcatgcagaaaaaaatgccatgtgattgtaattatcctggattcagaataatactgtgatggggagccagatccgcagtggtggagagttctaatgttgactgtttgcaggccaaaagatgattgctttataattttaacaaatcattgtcttttagtaacatccttgtttagtgtcttctcaagctttctttactgaggaattcagcttgtgacacagatacatcccactagcttgtgaggtggaactagtaataaagaccttgaatttggattgaaaagtttcctatctttacattgttgaggaagtccttttttttttttttttttttttaattgctcaagaaatgattctctcacaggcttgggaaatcctgttagcatgcagaataatgtggtaactttgtcaatttcccattttatttttttaaataaatatatgatctaaaagccaactttttctcagttttactcagtggaaagataaactaagttttaatgttatttttttaaatttaagcaaaatttatttctgttctttaataaataagaaaatgtggtccactg

SEQ ID NO: 117462 - DNA, 2251 bp, Homo sapiens
  Payload ID: 2934
  Gene Symbol: CEPT1
  Gene Name: choline/ethanolamine phosphotransferase 1
  Uniprot ID: Q9Y6K0
  ENST ID: ENST00000545121
  CDS Start-End: 209-1459
cgaagcactaggccgtttgaggatctccgctccgctttgcctgggaccaggaaaagacgcgagagacggaactcggcatcaggcactgcttggggcaggaggagagtaggggaaaccaaggaagagaacagaaaggtaagcaccagccacaaaaacctacaaaagaagggaaattactgtctttaaatattaaaaaaaaacaagatccatgagtgggcatcgatcaacaaggaaaagatgtggagattctcacccggagtccccagtgggcttcgggcatatgagtactacaggatgtgtattaaataaattgtttcagttaccaacaccaccattgtcaagacaccaactaaagcggctagaagaacacagatatcaaagtgctggacggtccctgcttgagcccttaatgcaagggtattgggaatggctcgttagaagagttccctcctggattgccccaaatctcatcaccatcattggactgtcaataaacatctgtacaactattttattagtcttctactgccctacagctacagagcaggcacctctgtgggcatatattgcttgtgcctgtggccttttcatttaccagtctttggatgctattgatgggaaacaggcaagaagaaccaatagtagttctcctctgggagaactttttgatcatggctgtgattcactatcaacagtttttgtggttcttggaacttgtattgcagtgcagctggggacaaaccctgattggatgtttttttgttgttttgcggggacatttatgttctattgtgcgcactggcaaacgtatgtttctggaacattgcgatttggaataattgatgtgactgaagtgcaaatcttcataataatcatgcatttgctggcagtgattggaggaccacctttttggcaatctatgattccagtgctgaatattcaaatgaaaatttttcctgcactttgtactgtagcagggaccatattttcctgtacaaattacttccgtgtaatcttcacaggtggtgttggcaaaaatggatcaacaatagcaggaacaagtgtcctttctccttttctccatattggatcagtgattacattagctgcaatgatctacaagaaatctgcagttcagctttttgaaaagcatccctgtctttatatactgacatttggttttgtgtctgctaaaatcactaataagcttgtggttgcacacatgacgaaaagtgaaatgcatttgcatgacacagcattcataggtccggcacttttgtttctggaccagtattttaacagctttattgatgaatatattgtactttggattgccctggttttctctttctttgatttgatccgctactgtgtcagtgtttgcaatcagattgcgtctcacctgcacatacatgtcttcagaatcaaggtctctacagctcattctaatcatcattaatgatgtaattggtatataggaacatcatgttttctgcaggaaagaaagtaacatattaaggagaatgggggtggataagaacaaatataatttataataatcaatgttgtataacttttattctttattattggtaacacgccctaactatcctgtgtgagaatgggaatttcaagtcccatcttgtaaattgtatatgttgtcatgcagggtttgggccaagaaagcatgcagaaaaaaatgccatgtgattgtaattatcctggattcagaataatactgtgatggggagccagatccgcagtggtggagagttctaatgttgactgtttgcaggccaaaagatgattgctttataattttaacaaatcattgtcttttagtaacatccttgtttagtgtcttctcaagctttctttactgaggaattcagcttgtgacacagatacatcccactagcttgtgaggtggaactagtaataaagaccttgaatttggattgaaaagtttcctatctttacattgttgaggaagtccttttttttttttttttttttttaattgctcaagaaatgattctctcacaggcttgggaaatcctgttagcatgcagaataatgtggtaactttgtcaatttcccattttatttttttaaataaatatatgatctaaaagccaactttttctcagttttactcagtggaaagataaactaagttttaatgttatttttttaaatttaagcaaaatttatttctgttctttaataaataagaaaatgtggtccactg

SEQ ID NO: 117463 - DNA, 1966 bp, Homo sapiens
  Payload ID: 2934
  Gene Symbol: CEPT1
  Gene Name: choline/ethanolamine phosphotransferase 1
  ENST ID: ENST00000615636
  CDS Start-End: 39-881
aaattactgtctttaaatattaaaaaaaaacaagatccatgagtgggcatcgatcaacaaggaaaagatgtggagattctcacccggagtccccagtgggcttcgggcatatgagtactacaggatgtgtattaaataaattgtttcagttaccaacaccaccattgtcaagacaccaactaaagcggctagaagaacacagatatcaaagtgctggacggtccctgcttgagcccttaatgcaagggtattgggaatggctcgttagaagagttccctcctggattgccccaaatctcatcaccatcattggactgtcaataaacatctgtacaactattttattagtcttctactgccctacagctacagagcaggcacctctgtgggcatatattgcttgtgcctgtggccttttcatttaccagtctttggatgctattgatgggaaacaggcaagaagaaccaatagtagttctcctctgggagaactttttgatcatggctgtgattcactatcaacagtttttgtggttcttggaacttgtattgcagtgcagctggggacaaaccctgattggatgtttttttgttgttttgcggggacatttatgttctattgtgcgcactggcaaacgtatgtttctggaacattgcgatttggaataattgatgtgactgaagtgcaaatcttcataataatcatgcatttgctggcagtgattggaggaccacctttttggcaatctatgattccagtgctgaatattcaaatgaaaatttttcctgcactttgtactgtagcagggaccatattttcctgtacaaattacttccgtgtaatcttcacaggtggtgttggcaaaatggatcaacaatagcaggaacaagtgtcctttctccttttctccatattggatcagtgattacattagctgcaatgatctacaagaaatctgcagttcagctttttgaaaagcatccctgtctttatatactgacatttggttttgtgtctgctaaaatcactaataagcttgtggttgcacacatgacgaaaagtgaaatgcatttgcatgacacagcattcataggtccggcacttttgtttctggaccagtattttaacagctttattgatgaatatattgtactttggattgccctggttttctctttctttgatttgatccgctactgtgtcagtgtttgcaatcagattgcgtctcacctgcacatacatgtcttcagaatcaaggtctctacagctcattctaatcatcattaatgatgtaattggtatataggaacatcatgttttctgcaggaaagaaagtaacatattaaggagaatgggggtggataagaacaaatataatttataataatcaatgttgtataacttttattctttattattggtaacacgccctaactatcctgtgtgagaatgggaatttcaagtcccatcttgtaaattgtatatgttgtcatgcagggtttgggccaagaaagcatgcagaaaaaaatgccatgtgattgtaattatcctggattcagaataatactgtgatggggagccagatccgcagtggtggagagttctaatgttgactgtttgcaggccaaaagatgattgctttataattttaacaaatcattgtcttttagtaacatccttgtttagtgtcttctcaagctttctttactgaggaattcagcttgtgacacagatacatcccactagcttgtgaggtggaactagtaataaagaccttgaatttggattgaaaagtttcctatctttacattgttgaggaagtccttttttttttttttttttttttaattgctcaagaaatgattctctcacaggcttgggaaatcctgttagcatgcagaataatgtggtaactttgtcaatttcccattttatttttttaaataaatatatgatctaaaagcc

SEQ ID NO: 117464 - DNA, 2964 bp, Homo sapiens
  Payload ID: 2935
  Gene Symbol: CHRM1
  Gene Name: cholinergic receptor, muscarinic 1
  Uniprot ID: P11229
  ENST ID: ENST00000306960
  CDS Start-End: 543-1925
agtgtgcctttgtgagggtgtgtgtgccgccgggtctgtgcagtgggtgtgggtgtttgtctccctgtatccgccttctctcccgtccgggacttttagccttcctgggctcgccttcctcatgtcctttctcctccctcttggggctcaaattgggtgccctggtgaaggaggggggcacactccagaacctagtccaaccccagacgctgcctgaggcttccctccagctcccctcccttccttttctccctttcctccctccctctctttccctttctccctccccgctaaggctggcgtgccagggggtgggacatgccaatcactggctgtgcctctcccgctgccagcacagggcgcagctccccctgggagccaggtgtttgggtccctggagacgccgcaggcccccagggaggcagtggggctgaggaccctacagacccctcttcagccccgtggtgatgactttcccctgaggaagccctgtagcgtgcctggaggaaggggctctccaaccccagccccacctagccaccatgaacacttcagccccacctgctgtcagccccaacatcaccgtcctggcaccaggaaagggtccctggcaagtggccttcattgggatcaccacgggcctcctgtcgctagccacagtgacaggcaacctgctggtactcatctctttcaaggtcaacacggagctcaagacagtcaataactacttcctgctgagcctggcctgtgctgacctcatcatcggtaccttctccatgaacctctataccacgtacctgctcatgggccactgggctctgggcacgctggcttgtgacctctggctggccctggactatgtggccagcaatgcctccgtcatgaatctgctgctcatcagctttgaccgctacttctccgtgactcggcccctgagctaccgtgccaagcgcacaccccgccgggcagctctgatgatcggcctggcctggctggtttcctttgtgctctgggccccagccatcctcttctggcagtacctggtaggggagcggacagtgctagctgggcagtgctacatccagttcctctcccagcccatcatcacctttggcacagccatggctgccttctacctccctgtcacagtcatgtgcacgctctactggcgcatctaccgggagacagagaaccgagcacgggagctggcagcccttcagggctccgagacgccaggcaaagggggtggcagcagcagcagctcagagaggtctcagccaggggctgagggctcaccagagactcctccaggccgctgctgtcgctgctgccgggcccccaggctgctgcaggcctacagctggaaggaagaagaggaagaggacgaaggctccatggagtccctcacatcctcagagggagaggagcctggctccgaagtggtgatcaagatgccaatggtggaccccgaggcacaggcccccaccaagcagcccccacggagctccccaaatacagtcaagaggccgactaagaaagggcgtgatcgagctggcaagggccagaagccccgtggaaaggagcagctggccaagcggaagaccttctcgctggtcaaggagaagaaggcggctcggaccctgagtgccatcctcctggccttcatcctcacctggacaccgtacaacatcatggtgctggtgtccaccttctgcaaggactgtgttcccgagaccctgtgggagctgggctactggctgtgctacgtcaacagcaccatcaaccccatgtgctacgcactctgcaacaaagccttccgggacacctttcgcctgctgctgctttgccgctgggacaagagacgctggcgcaagatccccaagcgccctggctccgtgcaccgcactccctcccgccaatgctgatagtcccctctcctgcatccctccaccccagtccccgggaaaggccggtgggaagagggcaggggctgcatcctcagccccagggccctgctcaggcctcacctggcttcccaggaccctgggtcaccttcctgggcagcccagagagaccctgccaactttccagacttcgctattcccaggcagggagggaaacccggggaactggtttttctgttccctgctgggtgggaatgcgctcttcaccaggaagaaggcccgggaggaggatccgggctttggactccttgtttgcctttaggcaggaagtcaggagccagcagggcgggccaggagaaagaaggcttaacattaagtattccttggcccagcagcggcccagattgcggtgtgagatggtgccccctggggggcacagccagaaactgaactggccgctgggagaaaagccagatgacagggagctggggaatcccctcgcttcataggcagagcccgcccacctgggccctaggcatactctccaggattgtccacaaatgtcctcagagggtccctaggtgggtcaactccaaggcaaatgtccaagcatcagcaagacaatgacactggaagggtccggcttggctagtcacatatcaagtcccgaggcagcaacaggaccaggagccaggtgtcctgactgtcctacaatatcattttcctgggagtgggagtcaagtgtgcctgctatccagccgcaaatccataccccctgccccagagaagcctcagtccctccctcctggctcacagccaccacctggatggatctgctccatgcagatctagccaggcctcccgcatgctgcctgcctccggccctgccccacacaggcctggcccagccagcaggttctctcctgtgagctccccaatccaacccatgcatggcctcccagccacccggatctccaggcccagcctggccccaaatgttctttcctttcatcctcagcaagtgctgagtctgtgaataaagccacataaccagcgggca

SEQ ID NO: 117465 - DNA, 2123 bp, Homo sapiens
  Payload ID: 2935
  Gene Symbol: CHRM1
  Gene Name: cholinergic receptor, muscarinic 1
  Uniprot ID: P11229
  ENST ID: ENST00000543973
  CDS Start-End: 761-2123
atgtgcaggggggagggcgtgtgtgcgagggaagcaggcatgtgaataccagggcatgtgtgttggggcatggtgcacaggggctgggggctctaaggttgggtggggggaggagcccaaggaaacagtgtgcctttgtgagggtgtgtgtgccgccgggtctgtgcagtgggtgtgggtgtttgtctccctgtatccgccttctctcccgtccgggacttttagccttcctgggctcgccttcctcatgtcctttctcctccctcttggggctcaaattgggtgccctggtgaaggaggggggcacactccagaacctagtccaaccccagacgctgcctgaggcttccctccagctcccctcccttccttttctccctttcctccctccctctctttccctttctccctccccgctaaggctggcgtgccagggggtgggacatgccaatcactggctgtgcctctcccgctgccagcacagggcgcagctccccctgggagccaggtgtttgggtccctggagacgccgcaggcccccagggaggcagtggggctgaggaccctacagacccctcttcagccccgtgggcaccctgaaacccaccacccccgtccacctcagctcccccaagatggactgaatcaggctgctggccagatagagaagctagaagccaaggtgatgactttcccctgaggaagccctgtagcgtgcctggaggaaggggctctccaaccccagccccacctagccaccatgaacacttcagccccacctgctgtcagccccaacatcaccgtcctggcaccaggaaagggtccctggcaagtggccttcattgggatcaccacgggcctcctgtcgctagccacagtgacaggcaacctgctggtactcatctctttcaaggtcaacacggagctcaagacagtcaataactacttcctgctgagcctggcctgtgctgacctcatcatcggtaccttctccatgaacctctataccacgtacctgctcatgggccactgggctctgggcacgctggcttgtgacctctggctggccctggactatgtggccagcaatgcctccgtcatgaatctgctgctcatcagctttgaccgctacttctccgtgactcggcccctgagctaccgtgccaagcgcacaccccgccgggcagctctgatgatcggcctggcctggctggtttcctttgtgctctgggccccagccatcctcttctggcagtacctggtaggggagcggacagtgctagctgggcagtgctacatccagttcctctcccagcccatcatcacctttggcacagccatggctgccttctacctccctgtcacagtcatgtgcacgctctactggcgcatctaccgggagacagagaaccgagcacgggagctggcagcccttcagggctccgagacgccaggcaaagggggtggcagcagcagcagctcagagaggtctcagccaggggctgagggctcaccagagactcctccaggccgctgctgtcgctgctgccgggcccccaggctgctgcaggcctacagctggaaggaagaagaggaagaggacgaaggctccatggagtccctcacatcctcagagggagaggagcctggctccgaagtggtgatcaagatgccaatggtggaccccgaggcacaggcccccaccaagcagcccccacggagctccccaaatacagtcaagaggccgactaagaaagggcgtgatcgagctggcaagggccagaagccccgtggaaaggagcagctggccaagcggaagaccttctcgctggtcaaggagaagaaggcggctcggaccctgagtgccatcctcctggccttcatcctcacctggacaccgtacaacatcatggtgctggtgtccaccttctgcaaggactgtgttcccgagaccctgtgggagctgggctactggctgtgctacgtcaacagcaccatcaaccccatgtgctacgcactctgcaacaaagccttccgggacacctttcgcctgctgctgctttgccgctgggacaagagacgctggcgcaagatccccaagcgccctggctccgtgcaccgca

SEQ ID NO: 117466 - DNA, 549 bp, Homo sapiens
  Payload ID: 2935
  Gene Symbol: CHRM1
  Gene Name: cholinergic receptor, muscarinic 1
  ENST ID: ENST00000536524
  CDS Start-End: 147-549
cggtggcaagaatcaggttccaattctctggaacctctggtgacttctctacctgccacctgccccaggtgatgactttcccctgaggaagccctgtagcgtgcctggaggaaggggctctccaaccccagccccacctagccaccatgaacacttcagccccacctgctgtcagccccaacatcaccgtcctggcaccaggaaagggtccctggcaagtggccttcattgggatcaccacgggcctcctgtcgctagccacagtgacaggcaacctgctggtactcatctctttcaaggtcaacacggagctcaagacagtcaataactacttcctgctgagcctggcctgtgctgacctcatcatcggtaccttctccatgaacctctataccacgtacctgctcatgggccactgggctctgggcacgctggcttgtgacctctggctggccctggactatgtggccagcaatgcctccgtcatgaatctgctgctcatcagctttgaccgctacttctccgtgactcggcccctgagctaccgtg

SEQ ID NO: 117467 - DNA, 1694 bp, Homo sapiens
  Payload ID: 2936
  Gene Symbol: CHRM2
  Gene Name: cholinergic receptor, muscarinic 2
  Uniprot ID: P08172
  ENST ID: ENST00000320658
  CDS Start-End: 294-1694
acagactagccaagtggctgagacgagtgtggggtgcgtgactctgcctgcgcgcgcgccagccccgcagctctcgccagagccttgggatcaagggagaaagagaaccggcagctggcctcggactctaagcggtgcgcagctccagcccgagcggatcggccctgaacccacaaaggactcctcgctccttcaagcctccaccacctcgcagccggggaggcaactggagcgaaaccagcgacaggtttaaatgtttatttgctacttggctactgattagagaacgcaaaatgaataactcaacaaactcctctaacaatagcctggctcttacaagtccttataagacatttgaagtggtgtttattgtcctggtggctggatccctcagtttggtgaccattatcgggaacatcctagtcatggtttccattaaagtcaaccgccacctccagaccgtcaacaattactttttattcagcttggcctgtgctgaccttatcataggtgttttctccatgaacttgtacaccctctacactgtgattggttactggcctttgggacctgtggtgtgtgacctttggctagccctggactatgtggtcagcaatgcctcagttatgaatctgctcatcatcagctttgacaggtacttctgtgtcacaaaacctctgacctacccagtcaagcggaccacaaaaatggcaggtatgatgattgcagctgcctgggtcctctctttcatcctctgggctccagccattctcttctggcagttcattgtaggggtgagaactgtggaggatggggagtgctacattcagtttttttccaatgctgctgtcacctttggtacggctattgcagccttctatttgccagtgatcatcatgactgtgctatattggcacatatcccgagccagcaagagcaggataaagaaggacaagaaggagcctgttgccaaccaagaccccgtttctccaagtctggtacaaggaaggatagtgaagccaaacaataacaacatgcccagcagtgacgatggcctggagcacaacaaaatccagaatggcaaagcccccagggatcctgtgactgaaaactgtgttcagggagaggagaaggagagctccaatgactccacctcagtcagtgctgttgcctctaatatgagagatgatgaaataacccaggatgaaaacacagtttccacttccctgggccattccaaagatgagaactctaagcaaacatgcatcagaattggcaccaagaccccaaaaagtgactcatgtaccccaactaataccaccgtggaggtagtggggtcttcaggtcagaatggagatgaaaagcagaatattgtagcccgcaagattgtgaagatgactaagcagcctgcaaaaaagaagcctcctccttcccgggaaaagaaagtcaccaggacaatcttggctattctgttggctttcatcatcacttgggccccatacaatgtcatggtgctcattaacaccttttgtgcaccttgcatccccaacactgtgtggacaattggttactggctttgttacatcaacagcactatcaaccctgcctgctatgcactttgcaatgccaccttcaagaagacctttaaacaccttctcatgtgtcattataagaacataggcgctacaaggtaa

SEQ ID NO: 117468 - DNA, 2571 bp, Homo sapiens
  Payload ID: 2936
  Gene Symbol: CHRM2
  Gene Name: cholinergic receptor, muscarinic 2
  Uniprot ID: P08172
  ENST ID: ENST00000401861
  CDS Start-End: 413-1813
gtgactctgcctgcgcgcgcgccagccccgcagctctcgccagagccttgggatcaagggagaaagagaaccggcagctggcctcggactctaagcggtgcgcagctccagcccgagcggatcggccctgaacccacaaaggactcctcgctccttcaagcctccaccacctcgcagccggggaggcaactggagcgaaaccagcgacaggttgtccaggctgatcttatactcctggcctcaagtgatcctcctgcctcagtctccaaaagcactgggaatacataggttgttagcgacatgagtacagggtctggatcttacccattcaagagtgtattctcagcacccaatgcctggcatatagtttaaatgtttatttgctacttggctactgattagagaacgcaaaatgaataactcaacaaactcctctaacaatagcctggctcttacaagtccttataagacatttgaagtggtgtttattgtcctggtggctggatccctcagtttggtgaccattatcgggaacatcctagtcatggtttccattaaagtcaaccgccacctccagaccgtcaacaattactttttattcagcttggcctgtgctgaccttatcataggtgttttctccatgaacttgtacaccctctacactgtgattggttactggcctttgggacctgtggtgtgtgacctttggctagccctggactatgtggtcagcaatgcctcagttatgaatctgctcatcatcagctttgacaggtacttctgtgtcacaaaacctctgacctacccagtcaagcggaccacaaaaatggcaggtatgatgattgcagctgcctgggtcctctctttcatcctctgggctccagccattctcttctggcagttcattgtaggggtgagaactgtggaggatggggagtgctacattcagtttttttccaatgctgctgtcacctttggtacggctattgcagccttctatttgccagtgatcatcatgactgtgctatattggcacatatcccgagccagcaagagcaggataaagaaggacaagaaggagcctgttgccaaccaagaccccgtttctccaagtctggtacaaggaaggatagtgaagccaaacaataacaacatgcccagcagtgacgatggcctggagcacaacaaaatccagaatggcaaagcccccagggatcctgtgactgaaaactgtgttcagggagaggagaaggagagctccaatgactccacctcagtcagtgctgttgcctctaatatgagagatgatgaaataacccaggatgaaaacacagtttccacttccctgggccattccaaagatgagaactctaagcaaacatgcatcagaattggcaccaagaccccaaaaagtgactcatgtaccccaactaataccaccgtggaggtagtggggtcttcaggtcagaatggagatgaaaagcagaatattgtagcccgcaagattgtgaagatgactaagcagcctgcaaaaaagaagcctcctccttcccgggaaaagaaagtcaccaggacaatcttggctattctgttggctttcatcatcacttgggccccatacaatgtcatggtgctcattaacaccttttgtgcaccttgcatccccaacactgtgtggacaattggttactggctttgttacatcaacagcactatcaaccctgcctgctatgcactttgcaatgccaccttcaagaagacctttaaacaccttctcatgtgtcattataagaacataggcgctacaaggtaaaatatctttgaaaaagatagaaggtgggcaaggggagcttgagaagaataaaagggataaacgagctcctagttttaaaatctctgccattgcactttatagtctgattacaaaacgtgcaattcaggagcccagcagtgacacacttatcacgcctaggctccagtttgcaaaaattgcaccttataaactgtcagtattaggagcaatgagacaatgaaagaaacatgttgggatcgtggatttaagaaactatacactgtttctcataatctcttgaagaagggcttctgattctacaattttatcagtctctgcacaagaggaataaccttgttccttttttgttacttttgttgttgttgttctcatgtgtccttaagagaaggaaatgccacagttacaaggtaaacatggagacttaaacataaagaaataggcactatacaatggggacataaaaaaagaaaatcaaagaaggatgcagaaattgtctccggagtgttaagcatattttattcttttgttacggtcctatttagaggattggaatgtaataaatgcttattttttgcctttctttttcccaccatgaagagaaagcaaacaaacagaaaccccaactaggtcacaccatttttcttcttgttatgccactattttgtacatccctgttctatattgtttatagggaaaacctacaggactttcactaaagctagccagagacagccatgaaaatggacgtttcacccctc

SEQ ID NO: 117469 - DNA, 5918 bp, Homo sapiens
  Payload ID: 2936
  Gene Symbol: CHRM2
  Gene Name: cholinergic receptor, muscarinic 2
  Uniprot ID: P08172
  ENST ID: ENST00000445907
  CDS Start-End: 529-1929
acacacgcacgaatacagacacgctctcctgctgtactaaaggcgccagggcgcaaagacctagggagcgcgcgcgggcacacacacacacacacacacacacacagacacacacacactcacacactccaggctgcgggttggccagagcctggaaatcgcagatttcaccaggaaatcgccgaggtacccgaataggtgttgcctcccaaaactaattcctacttccccaagcactttggtgaagaaatgaatccagcccagctcgccgaggcatccaggtctccattctattttggtctccaggctcttcgtgaaagccagatcaagggagaaagagaaccggcagctggcctcggactctaagcggtgcgcagctccagcccgagcggatcggccctgaacccacaaaggactcctcgctccttcaagcctccaccacctcgcagccggggaggcaactggagcgaaaccagcgacaggtttaaatgtttatttgctacttggctactgattagagaacgcaaaatgaataactcaacaaactcctctaacaatagcctggctcttacaagtccttataagacatttgaagtggtgtttattgtcctggtggctggatccctcagtttggtgaccattatcgggaacatcctagtcatggtttccattaaagtcaaccgccacctccagaccgtcaacaattactttttattcagcttggcctgtgctgaccttatcataggtgttttctccatgaacttgtacaccctctacactgtgattggttactggcctttgggacctgtggtgtgtgacctttggctagccctggactatgtggtcagcaatgcctcagttatgaatctgctcatcatcagctttgacaggtacttctgtgtcacaaaacctctgacctacccagtcaagcggaccacaaaaatggcaggtatgatgattgcagctgcctgggtcctctctttcatcctctgggctccagccattctcttctggcagttcattgtaggggtgagaactgtggaggatggggagtgctacattcagtttttttccaatgctgctgtcacctttggtacggctattgcagccttctatttgccagtgatcatcatgactgtgctatattggcacatatcccgagccagcaagagcaggataaagaaggacaagaaggagcctgttgccaaccaagaccccgtttctccaagtctggtacaaggaaggatagtgaagccaaacaataacaacatgcccagcagtgacgatggcctggagcacaacaaaatccagaatggcaaagcccccagggatcctgtgactgaaaactgtgttcagggagaggagaaggagagctccaatgactccacctcagtcagtgctgttgcctctaatatgagagatgatgaaataacccaggatgaaaacacagtttccacttccctgggccattccaaagatgagaactctaagcaaacatgcatcagaattggcaccaagaccccaaaaagtgactcatgtaccccaactaataccaccgtggaggtagtggggtcttcaggtcagaatggagatgaaaagcagaatattgtagcccgcaagattgtgaagatgactaagcagcctgcaaaaaagaagcctcctccttcccgggaaaagaaagtcaccaggacaatcttggctattctgttggctttcatcatcacttgggccccatacaatgtcatggtgctcattaacaccttttgtgcaccttgcatccccaacactgtgtggacaattggttactggctttgttacatcaacagcactatcaaccctgcctgctatgcactttgcaatgccaccttcaagaagacctttaaacaccttctcatgtgtcattataagaacataggcgctacaaggtaaaatatctttgaaaaagatagaaggtgggcaaggggagcttgagaagaataaaagggataaacgagctcctagttttaaaatctctgccattgcactttatagtctgattacaaaacgtgcaattcaggagcccagcagtgacacacttatcacgcctaggctccagtttgcaaaaattgcaccttataaactgtcagtattaggagcaatgagacaatgaaagaaacatgttgggatcgtggatttaagaaactatacactgtttctcataatctcttgaagaagggcttctgattctacaattttatcagtctctgcacaagaggaataaccttgttccttttttgttacttttgttgttgttgttctcatgtgtccttaagagaaggaaatgccacagttacaaggtaaacatggagacttaaacataaagaaataggcactatacaatggggacataaaaaaagaaaatcaaagaaggatgcagaaattgtctccggagtgttaagcatattttattcttttgttacggtcctatttagaggattggaatgtaataaatgcttattttttgcctttctttttcccaccatgaagagaaagcaaacaaacagaaaccccaactaggtcacaccatttttcttcttgttatgccactattttgtacatccctgttctatattgtttatagggaaaacctacaggactttcactaaagctagccagagacagccatgaaaatggacgtttcacccctcctcactgtgtcctttgcattcgttggggatatcaaggtctataaggatttagtgcacttataatcctatatgcgaaatgtttaaaccaatctgattttctcctaaatagccttttatatcaacagaatatcctacctaaaacataaacctgtttaagaaaccatcgtcactgtaaagttgaggtttcatcaaattaaataatggactatctagttggaccaagtttattaaagtcaggtgaattttaagattaaaaaatagaagtttaggactttctatttcaacctgaatttgcctgacccatgtatgaaatgttaacttatagaaaatgaactcctgactttctcagcagaaaggaatgctgttttatttatttggaatcctaaacaggattaacatactcacatagcaccagtgatttctgggccagtccctagagaatagaaccttctatccaatgcctgctaaaggatgatattcaaattataaccaagtgaggatgtctgcaattatcctatgaccccatgaaaggggaaaaaacgatattttaaaaactattactgaaacaattacatattccatattcctcaaattgtcaattctccctaacattatttaacttcaaaattctcttatcaatagaattatagtaatctttgtgacagaaatgtagtggctaactaaatagaggccaaacgagcttacagaatctgacagaaggaggtaggtggctgttgccatgccacatctcaccatctaattctagaccataataatcatgtcaggaactattatctaagtggtggcattatatagaatcttgccacgtagagattttttatttggtcgtctaaataaatataggattaggattatacggattcacatacaactagttatttttatcctttatatttttcttacagtatttgctgtagttttccaatgagattttctaaaaatggctcaatcaatggaaatcaaattataaacgcatttgcaaatttcatattttggattttagatttatgatatcttgttcagtaataataatgttagttacatggtaaatttatcaatattagaccccagcacttaaaagaattattttgtatgattagcctcatagatgccacctcaacattttggagagttaaggaggaaaaaaagcatgagggaaaaaaaaaaccaaaaaacttataagttagtaagaagcaaattgccagcagtatttatatttgacttatccttcgtaaaaacaatttcctgtttaaataacttcagtcattacccccccaaagtaatcttccatatttaaagcattcatttatagagattcccttacctacagttacttcaacatgcacttttacattttaaattcatatttattttcatattgtttcttcaaatgaaggaatcagttgaacggaaataacgtcaagccagtgggctcctcgagtttctgaaaaccagagaattgactagccaagtatttccctttttaatgtattgtattattattatgtagatttggcttcagttgggaagaaccctttggcatccaggattcaggattcagggtctttttttgtttgctctaataatccaacgcaccatgaatcaagcttttagtctctgctgccattgtatccttccttttcctccctctgttattgatccttgccacagccactgcaacctcattgaaagagaaactgtcactttaaagaaagaaattgaagataggctgacaccatggaaactacgtcaaacagataagaaaaatggaaggaatactgaaaatgatagatgattggagagatatggagattatattcaaggatttttattaaccactgctggatttgtctatttcagtggctctcaaacagagacaattcccctctccccgaaaggggacacttagcaatgtgtaaagacatttttggttgccacactgggaggaatgctattggtatctagtgcatagaggctgggaatgctgctaaatagcctataatgctcaggacattttcccccaacccctttaaacaaatattatttggctcaaaatgtcaatagttccaagattgagaaattcttgtctactttaagggatttctaaagcttgcctcttattagtgggaaaataaccctgcattatttttagaatatcaatgcaaattcctcacctgttagaaaaaggtaatactcaccaaccatgtatcagaaaaacttttctcctgagtctggtgtatgtgtcagtcacagattgggaactcaggccacatctacatatcaaaaatcaccagactatgcatatcgcacatcttttttccagcatcttaatgttcaattatgattgccacagatctagtcaattgaggttgcagtagttggccatcaaaatatttgcagttgatatgatcagtttctactggagctgcaatttttcctttcaaaaaatattaagagcctctttcagaaacaatatcatttatcttctttgcatttactggaaaggtgtatctgtaaggtctttgttttttctctcctcatagcaataatgtagctatcccagagtgatattataagaagaggagattaagaatatggaaaaagtctgttcatttcttcgaaacaagaaatgattttccttttaccagttcatcattaatttaacgccagctcccaagtattagggcagagtaatcaatatgagaagccacaacgggtaagctttctgatttgaaatgtacaagctggatgtccaacatactcctgctctttgttcatttgcttttttgatcctgaagatctgacattgggagagatgggaattcaaaatgatggcaacaattactcagcaatgcagtctgtttttattttctcctacttagttcattgacagtttcctcctcgccccagtttgataatatccctttcaacaaccatagtaccggtgttgcaaatagtttaggaaagcacccaaagctggatgaaattgtgcaaagtgtattctcagcatgtatattcaataccatgcctcttaaaaatgcttctcttaaagggtgcacgctgtagcatgaaatgtgtgcatatttaatgtatcttcctggaatatgctatgtgctaaatatatatatattctataaataaaataataaaatgtacaatagaaatacatatttctgtatgcaaataaatatattatacacaaactcttaa

SEQ ID NO: 117470 - DNA, 2014 bp, Homo sapiens
  Payload ID: 2936
  Gene Symbol: CHRM2
  Gene Name: cholinergic receptor, muscarinic 2
  Uniprot ID: P08172
  ENST ID: ENST00000453373
  CDS Start-End: 238-1638
acagactagccaagtggctgagacgagtgtgggatcaagggagaaagagaaccggcagctggcctcggactctaagcggtgcgcagctccagcccgagcggatcggccctgaacccacaaaggactcctcgctccttcaagcctccaccacctcgcagccggggaggcaactggagcgaaaccagcgacaggtttaaatgtttatttgctacttggctactgattagagaacgcaaaatgaataactcaacaaactcctctaacaatagcctggctcttacaagtccttataagacatttgaagtggtgtttattgtcctggtggctggatccctcagtttggtgaccattatcgggaacatcctagtcatggtttccattaaagtcaaccgccacctccagaccgtcaacaattactttttattcagcttggcctgtgctgaccttatcataggtgttttctccatgaacttgtacaccctctacactgtgattggttactggcctttgggacctgtggtgtgtgacctttggctagccctggactatgtggtcagcaatgcctcagttatgaatctgctcatcatcagctttgacaggtacttctgtgtcacaaaacctctgacctacccagtcaagcggaccacaaaaatggcaggtatgatgattgcagctgcctgggtcctctctttcatcctctgggctccagccattctcttctggcagttcattgtaggggtgagaactgtggaggatggggagtgctacattcagtttttttccaatgctgctgtcacctttggtacggctattgcagccttctatttgccagtgatcatcatgactgtgctatattggcacatatcccgagccagcaagagcaggataaagaaggacaagaaggagcctgttgccaaccaagaccccgtttctccaagtctggtacaaggaaggatagtgaagccaaacaataacaacatgcccagcagtgacgatggcctggagcacaacaaaatccagaatggcaaagcccccagggatcctgtgactgaaaactgtgttcagggagaggagaaggagagctccaatgactccacctcagtcagtgctgttgcctctaatatgagagatgatgaaataacccaggatgaaaacacagtttccacttccctgggccattccaaagatgagaactctaagcaaacatgcatcagaattggcaccaagaccccaaaaagtgactcatgtaccccaactaataccaccgtggaggtagtggggtcttcaggtcagaatggagatgaaaagcagaatattgtagcccgcaagattgtgaagatgactaagcagcctgcaaaaaagaagcctcctccttcccgggaaaagaaagtcaccaggacaatcttggctattctgttggctttcatcatcacttgggccccatacaatgtcatggtgctcattaacaccttttgtgcaccttgcatccccaacactgtgtggacaattggttactggctttgttacatcaacagcactatcaaccctgcctgctatgcactttgcaatgccaccttcaagaagacctttaaacaccttctcatgtgtcattataagaacataggcgctacaaggtaaaatatctttgaaaaagatagaaggtgggcaaggggagcttgagaagaataaaagggataaacgagctcctagttttaaaatctctgccattgcactttatagtctgattacaaaacgtgcaattcaggagcccagcagtgacacacttatcacgcctaggctccagtttgcaaaaattgcaccttataaactgtcagtattaggagcaatgagacaatgaaagaaacatgttgggatcgtggatttaagaaactatacactgtttctcataatctcttgaagaagggcttctgattctacaattttatcagtctctgcacaagaggaataaccttgttccttttttgttacttttgttgttgttgttctcatgtgt

SEQ ID NO: 117471 - DNA, 8780 bp, Homo sapiens
  Payload ID: 2937
  Gene Symbol: CHRM3
  Gene Name: cholinergic receptor, muscarinic 3
  Uniprot ID: P20309
  ENST ID: ENST00000255380
  CDS Start-End: 780-2552
gggcaatggcgggcgcccctcccccagcctcgttgccgccttgcagtttgatctcagactgctgtgctagcaatcagcgagactccgtgggcgtaggaccctccgagccaggtgtgggatatagtctcgtggtgcgccgtttcttaagctggtctgaaaagcgcaatattcgggtgggagtgacccgattttccaggtgcttccgtcacccctttctttgactcggaaagggaactccctgaccccttgcgcttcccaggtgaggcaatgcctcgccctgcttcggctcgcgcacggtgcgcgcacacactggcctgcgcccactgtctagcactccctagtgagatgaacccggtacctcagatggaaatgcagaaatcacccgtcttctgcgtcgctcacgctgggagctgtagaccggagctgttcctattcggccatcttggctcctagtatttttaattaagcacttgtgttctgattagtggccaaataaatgacagtcagaacttcagctaaggtacaataaggttttgctgtggcgtggcacctggtctctttctagaaggaaagttcaacatacagcacaattctggacacattgtattggtttgatgctcctacctggaacaggtggagctggtctcttgggcagcctgacatctggtccactcctctgtcctatgccgggatcatcatgaccgtagagattatgtcactgttttgcatccttgttacataactcagttcctggtagattactatgtcagagagtcacaatgaccttgcacaataacagtacaacctcgcctttgtttccaaacatcagctcctcctggatacacagcccctccgatgcagggctgcccccgggaaccgtcactcatttcggcagctacaatgtttctcgagcagctggcaatttctcctctccagacggtaccaccgatgaccctctgggaggtcataccgtctggcaagtggtcttcatcgctttcttaacgggcatcctggccttggtgaccatcatcggcaacatcctggtaattgtgtcatttaaggtcaacaagcagctgaagacggtcaacaactacttcctcttaagcctggcctgtgccgatctgattatcggggtcatttcaatgaatctgtttacgacctacatcatcatgaatcgatgggccttagggaacttggcctgtgacctctggcttgccattgactacgtagccagcaatgcctctgttatgaatcttctggtcatcagctttgacagatacttttccatcacgaggccgctcacgtaccgagccaaacgaacaacaaagagagccggtgtgatgatcggtctggcttgggtcatctcctttgtcctttgggctcctgccatcttgttctggcaatactttgttggaaagagaactgtgcctccgggagagtgcttcattcagttcctcagtgagcccaccattacttttggcacagccatcgctgctttttatatgcctgtcaccattatgactattttatactggaggatctataaggaaactgaaaagcgtaccaaagagcttgctggcctgcaagcctctgggacagaggcagagacagaaaactttgtccaccccacgggcagttctcgaagctgcagcagttacgaacttcaacagcaaagcatgaaacgctccaacaggaggaagtatggccgctgccacttctggttcacaaccaagagctggaaacccagctccgagcagatggaccaagaccacagcagcagtgacagttggaacaacaatgatgctgctgcctccctggagaactccgcctcctccgacgaggaggacattggctccgagacgagagccatctactccatcgtgctcaagcttccgggtcacagcaccatcctcaactccaccaagttaccctcatcggacaacctgcaggtgcctgaggaggagctggggatggtggacttggagaggaaagccgacaagctgcaggcccagaagagcgtggacgatggaggcagttttccaaaaagcttctccaagcttcccatccagctagagtcagccgtggacacagctaagacttctgacgtcaactcctcagtgggtaagagcacggccactctacctctgtccttcaaggaagccactctggccaagaggtttgctctgaagaccagaagtcagatcactaagcggaaaaggatgtccctggtcaaggagaagaaagcggcccagaccctcagtgcgatcttgcttgccttcatcatcacttggaccccatacaacatcatggttctggtgaacaccttttgtgacagctgcatacccaaaaccttttggaatctgggctactggctgtgctacatcaacagcaccgtgaaccccgtgtgctatgctctgtgcaacaaaacattcagaaccactttcaagatgctgctgctgtgccagtgtgacaaaaaaaagaggcgcaagcagcagtaccagcagagacagtcggtcatttttcacaagcgcgcacccgagcaggccttgtagaatgaggttgtatcaatagcagtgacaaaacgcacacatcaacccacagaccttaggaggaggaaggcgagggcggggtgacttctggtgatgataaaaatggttttatcacccagatgtgaaagaagctgcctgtttactgatccattgaataaacccattttaatagaaaaagtcaataccaattcagcaaaaagaaaaaaaaaacatactactgaatataaagaaatttattctgaaatagactttacgtgtttttttcttaaagaggagaaaaatattgcttgacggcaattatatacccaaagtgatttgcctgggtcctttaattcccattagctttggaatctcagatgagcatagctgacccagttcccacattcttcccaaggatcccaaaagtgggaatccagaccccaagtggaacactgcaggcttacgaatctgtggttccaaaattatttcatacgttgcaaagctgaatcttcttgtcccaatagagcttcctgtcttttctttggtgtgttgttaaactctatttgtggacttgattcttgattcttgcaaagtactgttttgtgcagttcaagtttcgtacaaataaaaatacttaagtatatatatatgtgtgagttctgcacgcacacacatagtgtatataatatcatgggaaacactgaactggcaaattattcctgcaacatacgctttcagtactttggtaactgaagttctctaggatcctaatgcaacattaacgtgaaataagcccagtgtaatgtttttgaaaccagggctgttttccacagagagcagccaggccttcccagcaggtctgtgcagagcggacaggctcgtgagtcagctgagcgccgtggcttcgccagacttggtgttaagcaacctcctttgttgatgtctcaacagagctaaatcggggcccctctgagctcaaagaatgaaccacatccacacgtttgaatttaatcatctaaatctgaatgtttcagaacaaaatttctgctatctaaactgcttgaaactcaataatagtgtcacgtttgaatgtcatacacagcaatatatatatatgtgtatatatatatatatggcaaagcaaaaaaaaaaacatggtaagagagaatgaaggagaacattgtgtttgattcttgctgaatggcaccttctcaaagaaaatagggcttgcacctttgttaatcagctgtggccagtgctttctggtgttcattgtgtaaccttcacccaggaataggtgaggttttaggaagttacatgtcctctgaagaaagaattacactctgaaaagtaatgcttcaaattgatttccttaccttttgggaaaaaaaaaaaattgtttttttgcattctcccttgaattgaccaaaatgttaactgtttcatttggggaggggatggggtgctgccatcattgtcgttgttgttgctgctgtagctgttggggtttcttttcctgttgccggggctgtttggggagagggaggggagggaggtgggagggccgcggagatatcttccctttgtacagggcattcgtgttgtgaacccagagctgggtagaagctgcttttgtattcagtgtgaggtggtgtttacagacgactttgacaacagtagaagtgtactcagtggtgtctgtgtatctgaactatttaatttcgtgttatgtttatatgcagaaatatttatggatactacaccaagtgtttatttaatgttgataaatatgactcttcagtcgtcagccatggtgtcctttcaaagtgattctttaaggtccacttgagcaatgaatagagtatattggagctttcctgtggctaagaagaagaaacatgtcatcctgttggcatcaccaagcacctaactctttctaggtaataaaaagtcaacggtcacttcaacgtaaatgtttaaaaccactctttagttaaatctgatgggaactgaacaaagctccaccattgtgtctgaaatcattttacacagggaaaaaaaaaaacaatcagcataattgtaagaatgatttttttgggcccacattcaaccaaagaacaagaaagaaacagacgattttctaatatgtacacagcaaactacagaatgtcatattatccacctgtgaaacatctagtaagcaattgcatctatattttatttctcaagttggcctggcactaataaatatgtgaaagcttattcaagtgtcccagtacttcagcacttcccatccttttggaaactcctatcttgcctccctcccaaaagggctgtttcttttattaaaaaaaaaaaagaaatagaattaaatttgagaaaaggagaaaccctgaaatttaacagaactttgagagtcacttccaatctccttaaacatgattatctccttatccttgtccttttgtgatgctaataatagcagaaaaggaacaaatccaagactctaggtctcccttttttgttttactggttttattatagaattgtttttaagcctcttatggatgaaagctgcatttaaatactatctactgattttatagaaaggtatgtccatttcttgggtcactttcagagaaagaaaacaagcaaaataggttcttttgaatatgaataatttaaaagcataattgaagatgtagtgagtatttataattggaccttagttacacgtgcatttctcaaagggcttgtcattacaggagatattcagcacttacctaagatcaaaatgtcttcatcccaaattgggaatcgaattatttcatgccatatgcatgaggtttgcagacatttcaagattagccactttgcttgaaagaagaaaatgatcaaacctaaaataaactacacatggagaatctctctctctctctctgcctctctctctctctttctccctcttcttccttctctctctctcacaagcacacacacacacactcaatctccattctccaggcattgccagatggttaggagaagtgagctctctctggtcccctagatccctcggctctgctctcctttgcccatcagctccctgtggcctctatgctagtcctccctattctcctagtcaccctttgcctcttaagcccagccttgactctctacatatttttcatttctctttaccctttagtgtacaatagttgtagactctgacggaatgaaaacaaacaagaagcctaagcgttagaccctgctgtggctaaagatctagaaggcatatcagttttctctgtcaggcttcctacgttgccctcgtgcagggctcattgctctgcagagcgctggaagccccttcatgtatcgagagagaagctggagcacagagctctgatgcacagttggctgtttcagctctgactcagggaggaaagaaggatgccaaggctctgtcacagcggagaagtctaataccagagtggcacagagaaggattccagggatcagtcagggtgtcctgtacctatctgagtagagatgattcaaggatggggacatattccaggaaattgcacaatcttcccctggcagcttcagaggacgagtgaaaatagtgcagtatagtcaaagaagcaatgaatttaggatgaggaacctgaagtttctggaccagtttggtcactgcttagttacatgtccttaggaatgcttgtcacttaacctaaactttctgggttttatcctcattgctcaaactaagcaacaacaccgaagcttctctaatttgccttctgatgccaaatcggtcaaaactgaggtcagcagctaccatgacgaaagtaaaatggtatattgggtgaatgtttgaaaatttcagattttatattctgtaaagttatttacttactctatttcaacaccacaaaatcttgaaatttggaaggtaaccaaggaagctttgaaatttgttggcaaacccggagtagtatggtttcaaataccactccaacccagcacctgaggtcgggcaaactcacaaaatagagtttctaggtagcaggtgtttgctttggttttgcaatagcatttctcataacagaactgaaactgtatagattacaacactccaaagttatttttttttaacctaaagaaccctacttctagcacctcctctgaaagaatattttgctccaataccacgtgcaacaaacttatttagacagtatcaactctagcccttaataggttcaaggacaagtttactgcttcctttctacacgcttaagttacactctcttctcctgttctgatgactctaaatcttcagcctctcccagcattaatgtgtgagtcaacattgcagacctgagaaaggtttctagaatggtaacccaatgttctttagaactggagaattccattttccttttctggctttagtgttaatgtctgggaagggaggctcatgataagaaaataaaaatgagaaaagaagatctagttcataaaatgactataccccacgtaagtttgtaactgcacagtgttttgttgtacggctcagaaatgagcaagtgttagtattattaggcacacatcacgttcacagcttcgcgcagagacggatagtgtatttggatatatggaagtcatccaaatgcgttgctagaatatcaggcctatgtttgttctggtagaaccacagagactcacacaaagttctgaccctaccactctggtctgggctgagaccaccccaaaaaatcatctagagaatcaaaggggctcacatctcagttgcattctatttaaaagataaaggggccatactctccactgcaaagaagcattagtaaaacttcccgcacccaaattataatccggcaaccctagcttcagctaaaaagattatccccagaatctaaaagcttactattgttctttcttggagtccaaaatgcttagcagttctgcagttcacatacaaaactcaaaactctttttatcctgtattctgtgagttccttgatgatagtaattgggtcttattcatcactctgtatcctgtggctcacacagaatctggcaaattgcatatattcaataaatgttgaatatctaataacctccttattaatataacaaatattatcaacattctgtgcacatcaatgtcccatgctgctactgtagtcaggagttatttggctgggaagtggaaagtgttcacaaacatgatgcttatctaataaaatatcactgagcaataaggagaaatattttaaatagatttgaagttgtgaacaaataatttagagtccaaagaggaaaaagaaaattaactctgttttttatccctagaactcagaaactttactggattggtcaacaaagacaaactttttattgtataaaacagtagaattcatggaagggataattcttttggaacaggcttctcggttacttgccttagtaaaagaagtatctggagggcctggagagttcataaacatagttttctgtgcaagtgaagatctgtagtttggcttaaaaatccttgcatgtagttttgcttggcgtggaaagttattaggagacaatcctttatcctgttctgcaagcaatcaaacacatgatctcccttctagccattcctcatccagtacatgggcatttccagcctcctacatgtaacacttcaaacttcctctgggcgtctgcttagagctatgtgatggccacagtttgggcaaagcccttctttcttttaaatataggaactgttaccaagtttggtgcaggcttgaggaataattacataaaaatgggcttccacgatggtgaatcagcatgctgatttctcttggcaggaagctctcagggaaatgtctgtgaatcatttaaagatgctctctggtggatagagaaaccgcagtccaaaaacagatgggtgtatatttgctttgtaagcaaagggcatgtatcatactcgcatctaaaacagtgtccacatctttgccaaaggcactgaattttacctttttttattacctcgtggccagcacttcctcagtaggcatttcaggtgtgtcacaaaccatgttcatttttaatcttgaaaaagtcaatcgtctgtagtctgtactataaaatgatgcctgcaactttgtggtgaatattatccccaagttaacagtgaaataagtaaataaaactattattgaacaaaga

SEQ ID NO: 117472 - DNA, 587 bp, Homo sapiens
  Payload ID: 2937
  Gene Symbol: CHRM3
  Gene Name: cholinergic receptor, muscarinic 3
  ENST ID: ENST00000448020
  CDS Start-End: 259-587
ttttagtacggtattgttgcagctgacctgtatacgtaaggaattactgggtcatcagctctggggaatgtcttttgattatgaacacattttcagcatgtgtccactgaaggtggagctggtctcttgggcagcctgacatctggtccactcctctgtcctatgccgggatcatcatgaccgtagagattatgtcactgttttgcatccttgttacataactcagttcctggtagattactatgtcagagagtcacaatgaccttgcacaataacagtacaacctcgcctttgtttccaaacatcagctcctcctggatacacagcccctccgatgcagggctgcccccgggaaccgtcactcatttcggcagctacaatgtttctcgagcagctggcaatttctcctctccagacggtaccaccgatgaccctctgggaggtcataccgtctggcaagtggtcttcatcgctttcttaacgggcatcctggccttggtgaccatcatcggcaacatcctggtaattgtgtcatttaaggtcaacaagcagctgaagacggtcaacaactacttcctcttaagcct

SEQ ID NO: 117473 - DNA, 2294 bp, Homo sapiens
  Payload ID: 2937
  Gene Symbol: CHRM3
  Gene Name: cholinergic receptor, muscarinic 3
  Uniprot ID: P20309
  ENST ID: ENST00000615928
  CDS Start-End: 331-2103
ttgtttgttcttttctagcacttgtgttctgattagtggccaaataaatgacagtcagaacttcagctaaggtacaataaggttttgctgtggcgtggcacctggtctctttctagaaggaaagttcaacatacagcacaattctggacacattgtattggtttgatgctcctacctggaacaggtggagctggtctcttgggcagcctgacatctggtccactcctctgtcctatgccgggatcatcatgaccgtagagattatgtcactgttttgcatccttgttacataactcagttcctggtagattactatgtcagagagtcacaatgaccttgcacaataacagtacaacctcgcctttgtttccaaacatcagctcctcctggatacacagcccctccgatgcagggctgcccccgggaaccgtcactcatttcggcagctacaatgtttctcgagcagctggcaatttctcctctccagacggtaccaccgatgaccctctgggaggtcataccgtctggcaagtggtcttcatcgctttcttaacgggcatcctggccttggtgaccatcatcggcaacatcctggtaattgtgtcatttaaggtcaacaagcagctgaagacggtcaacaactacttcctcttaagcctggcctgtgccgatctgattatcggggtcatttcaatgaatctgtttacgacctacatcatcatgaatcgatgggccttagggaacttggcctgtgacctctggcttgccattgactacgtagccagcaatgcctctgttatgaatcttctggtcatcagctttgacagatacttttccatcacgaggccgctcacgtaccgagccaaacgaacaacaaagagagccggtgtgatgatcggtctggcttgggtcatctcctttgtcctttgggctcctgccatcttgttctggcaatactttgttggaaagagaactgtgcctccgggagagtgcttcattcagttcctcagtgagcccaccattacttttggcacagccatcgctgctttttatatgcctgtcaccattatgactattttatactggaggatctataaggaaactgaaaagcgtaccaaagagcttgctggcctgcaagcctctgggacagaggcagagacagaaaactttgtccaccccacgggcagttctcgaagctgcagcagttacgaacttcaacagcaaagcatgaaacgctccaacaggaggaagtatggccgctgccacttctggttcacaaccaagagctggaaacccagctccgagcagatggaccaagaccacagcagcagtgacagttggaacaacaatgatgctgctgcctccctggagaactccgcctcctccgacgaggaggacattggctccgagacgagagccatctactccatcgtgctcaagcttccgggtcacagcaccatcctcaactccaccaagttaccctcatcggacaacctgcaggtgcctgaggaggagctggggatggtggacttggagaggaaagccgacaagctgcaggcccagaagagcgtggacgatggaggcagttttccaaaaagcttctccaagcttcccatccagctagagtcagccgtggacacagctaagacttctgacgtcaactcctcagtgggtaagagcacggccactctacctctgtccttcaaggaagccactctggccaagaggtttgctctgaagaccagaagtcagatcactaagcggaaaaggatgtccctggtcaaggagaagaaagcggcccagaccctcagtgcgatcttgcttgccttcatcatcacttggaccccatacaacatcatggttctggtgaacaccttttgtgacagctgcatacccaaaaccttttggaatctgggctactggctgtgctacatcaacagcaccgtgaaccccgtgtgctatgctctgtgcaacaaaacattcagaaccactttcaagatgctgctgctgtgccagtgtgacaaaaaaaagaggcgcaagcagcagtaccagcagagacagtcggtcatttttcacaagcgcgcacccgagcaggccttgtagaatgaggttgtatcaatagcagtgacaaaacgcacacatcaacccacagaccttaggaggaggaaggcgagggcggggtgacttctggtgatgataaaaatggttttatcacccagatgtgaaagaagctgcctgtttactgatccattgaataaacccattttaatagaaaaagtcaataccaattcagc

SEQ ID NO: 117474 - DNA, 1511 bp, Homo sapiens
  Payload ID: 2938
  Gene Symbol: CHRM4
  Gene Name: cholinergic receptor, muscarinic 4
  Uniprot ID: P08173
  ENST ID: ENST00000433765
  CDS Start-End: 52-1491
tttctctccccttcctccccagacacggcctacccacccctggcaaccaacatggccaacttcacacctgtcaatggcagctcgggcaatcagtccgtgcgcctggtcacgtcatcatcccacaatcgctatgagacggtggaaatggtcttcattgccacagtgacaggctccctgagcctggtgactgtcgtgggcaacatcctggtgatgctgtccatcaaggtcaacaggcagctgcagacagtcaacaactacttcctcttcagcctggcgtgtgctgatctcatcataggcgccttctccatgaacctctacaccgtgtacatcatcaagggctactggcccctgggcgccgtggtctgcgacctgtggctggccctggactacgtggtgagcaacgcctccgtcatgaaccttctcatcatcagctttgaccgctacttctgcgtcaccaagcctctcacctaccctgcccggcgcaccaccaagatggcaggcctcatgattgctgctgcctgggtactgtccttcgtgctctgggcgcctgccatcttgttctggcagtttgtggtgggtaagcggacggtgcccgacaaccagtgcttcatccagttcctgtccaacccagcagtgacctttggcacagccattgctgccttctacctgcctgtggtcatcatgacggtgctgtacatccacatctccctggccagtcgcagccgagtccacaagcaccggcccgagggcccgaaggagaagaaagccaagacgctggccttcctcaagagcccactaatgaagcagagcgtcaagaagcccccgcccggggaggccgcccgggaggagctgcgcaatggcaagctggaggaggcccccccgccagcgctgccaccgccaccgcgccccgtggctgataaggacacttccaatgagtccagctcaggcagtgccacccagaacaccaaggaacgcccagccacagagctgtccaccacagaggccaccacgcccgccatgcccgcccctcccctgcagccgcgggccctcaacccagcctccagatggtccaagatccagattgtgacgaagcagacaggcaatgagtgtgtgacagccattgagattgtgcctgccacgccggctggcatgcgccctgcggccaacgtggcccgcaagttcgccagcatcgctcgcaaccaggtgcgcaagaagcggcagatggcggcccgggagcgcaaagtgacacgaacgatctttgccattctgctagccttcatcctcacctggacgccctacaacgtcatggtcctggtgaacaccttctgccagagctgcatccctgacacggtgtggtccattggctactggctctgctacgtcaacagcaccatcaaccctgcctgctatgctctgtgcaacgccacctttaaaaagaccttccggcacctgctgctgtgccagtatcggaacatcggcactgccaggtaggcaggcaggagtgccctagg

SEQ ID NO: 117475 - DNA, 5410 bp, Homo sapiens
  Payload ID: 2939
  Gene Symbol: CHRM5
  Gene Name: cholinergic receptor, muscarinic 5
  Uniprot ID: P08912
  ENST ID: ENST00000383263
  CDS Start-End: 671-2269
atcagatcaactgctgttaccagataaaggcaaaactcacccttctggttctataatcctatccaaatggagtcttcatctaccgcatactatcctaactaatgctacaggattatcaggaatacagatataaagacactgcaagaaataaaacactggcaaaataaaacatgaaaggaaagtagagaaggcattttgggtctcgaagcttactatttccagccagagttcaaattactgagcttcaaacaaaccactgccaggaacctaggaaatcattctcagccttgcaacttaaaatatggtacatggatcagtagcatcaagaatactcaggagcttttcagaaatgtgcaattgtgaaatatggccaagatggcggattagaagcagcggcagcccgcagctctcatgcaaaggaatgaaaggtgtgagtgaatacagcgccttcaactgaaatatccaggttctcgctttgggactaattgggcaaacaacttgacccacagaaaacaaagaaaagcagggtggggtgacggcccacctgggagcagcacagagccaaaggaacccccacctccagccaagggaagcgatgctggccaagaagagctgaaatagaaaacagcctagaacctaacactatttactgtaaaatttttgcaccaggatggaaggggattcttaccacaatgcaaccaccgtcaatggcaccccagtaaatcaccagcctttggaacgccacaggttgtgggaagtcatcaccattgcagctgtgactgctgtggtaagcctgatcaccattgtgggcaatgtcttggtcatgatctccttcaaagtcaacagccagctcaagacagttaacaactattacctgctcagcttagcctgtgcagatctcatcattggaatcttctccatgaacctctacaccacctacatcctcatgggacgctgggctctcgggagtctggcttgtgacctttggcttgcactggactacgtggccagcaacgcttctgtcatgaaccttctggtgatcagttttgaccgttacttttccatcacaagacccttgacatatcgggccaagcgtactccgaaaagggctggcatcatgattggcttggcctggctgatctccttcatcctctgggccccagcaatcctctgctggcagtacttggttgggaagcggacagttccactggatgagtgccagatccagtttctctctgagcccaccatcacttttggcactgccattgctgccttctacatccctgtttctgtcatgaccatcctctactgtcgaatctaccgggaaacagagaagcgaaccaaggacctggctgacctccagggttctgactctgtgaccaaagctgagaagagaaagccagctcatagggctctgttcagatcctgcttgcgctgtcctcgacccaccctggcccagcgggaaaggaaccaggcctcctggtcatcctcccgcaggagcacctccaccactgggaagccatcccaagccactggcccaagcgccaattgggccaaagctgagcagctcaccacctgtagcagctacccttcctcagaggatgaggacaagcccgccactgaccctgtcctccaagtggtctacaagagtcagggtaaggaaagcccaggggaagaattcagtgctgaagagactgaggaaacttttgtgaaagctgaaactgaaaaaagtgactatgacaccccaaactaccttctgtctccagcagctgctcatagacccaagagtcagaaatgtgtggcctataagttccgattggtggtaaaagctgacgggaaccaggagaccaacaatggctgtcacaaggtgaaaatcatgccctgccccttcccagtggccaaggaaccttcaacgaaaggcctcaatcccaaccccagccatcaaatgaccaaacgaaagagagtggtcctagtcaaagagaggaaagcagcccagacactgagtgccattctcctggccttcatcatcacatggaccccgtataacatcatggtcctggtttctaccttctgtgacaagtgtgtcccagtcaccctgtggcacttgggctattggttgtgctatgtcaatagcactgtcaaccccatctgctatgccctctgcaacagaaccttcaggaagacctttaagatgctgcttctctgccgatggaaaaagaaaaaagtggaagagaagttgtactggcaggggaacagcaagctaccctgaaaagtcaacaactcctctcgaaagaacaatgaccacagtcaacatcctctgaggatgagcaagctgattctggtttgtatattttcaaaaagaagacatctcattttgagtccttgaagatttttgtaaaggctcaagtttggttgccaaatggaaggggccatagctgcagcaattgctgacatattaaatgactcttgcctatgaccaaggccatttgatgccaggggagtttgccaatgaagtaaagggataggctcatggcccttcacaagaggaagcacactgggtaacaatgaacagtgactcagggaacttatgccccttctgtaggaaacagcagagaccaggtggaaaccttttcctgtggaaacctgtcatagaattttgtgcaatatgtatgtgtctatgaagctgtcttgtgccagtgagaaccagcaggagaatgtacaacagtgtcacttgttaacgagactgatattcaacaggcttctaagaatatgtatcttcataaactgatcactatctattatgcagctattatgtggtctatactatactgtggtttgttttcctgtccccacatctgagtgaaggtcttgctcttccctttcatatccaatgtcaattccttgtactcactgaacccatgctgatctccagggaaccatccttcctctcagaatccagagtctggaaggactgaaacctggtcatacccagtcctttcaaggggcctcttttctactaataaagatggatcaagtctccacagtcagttattttagtttttgccagtggaaattttttcttttatctaaacagatattgtgcattctattttgtgcccatttgaacccatttatttatgctctgttcttaggaagactaattgtgtaagagcccttcactggctgaagattttctccaggctgttgaattaaggttcttatattgttttcagagatcttgctttctaatctcttcacagggcaaacctgagcaaaatgtggaaaacagatttgcttttgaatttcttccagagcccttttgcagcctccaatttcccttgttcagatccccagttcacaccaagacgcaagcaggtcagctgtgctgcctccaagcagggggttgtggggtgaggtgggggtagaaagtctttttttataggtccttcaaatcagggcctaaaaatgacttctttattcctctccaaattcggtcacaaatgagaaggccagaaaagcacacttgagggtgcgatgaagctgaaaatgatctgaaagcttcatttttaaaaacaaagtgtaggtcatagtaatacataaaaataaaacagttgacatgcatgacagcatgaggattattaaaaaccacacttaattgaaatctctaagtgcgtataaacaaacggaatcaaaggacctttgtggacaaaagtccacaaagaagcagtagtgtggtacacagcaaggattttaaagatgaagcactcctgtcagacattatttaactcgttggttacatctgcagctggacttaaaaatcaccagacttcatgcgtcttagtgtaggccgggtccttttcagtctcatttgctaagaggatggaaaattagctggtttagttgtcctgggaattagatatgtacctgagtatgggagagcttcagcctaccactgaagagcatcatcagcctctcacaggatgtcccacggaggcttcagggtagtagaatctcaggcaggacgggactggtcccttataaagacttcacgttgacatgaaacatcttgtaagcagtgcatctgctgagcctttgtaaagggcaggttgacacctgcaaagaattcggtgggaacagtaattggctcagttctccagcacagaggctttcgggcctccgtgatgccaactgggtgtgacttcatgagcaaacctgctctaccagcgccagataaacagttgagtcttcgtttaaggctttgattcctgataaagatgaaaaccccttcatgagaataggcttttaagcccatgttgggcattcaccattcgcagttgagagtgaaacaagctaatttaaacaaaagaacacaaatcgggaaaggatgccatggagggcactcctcgcacactccgcacttgcttaggacttggccttttttgttcatcttttgtgaaattgattaagaagtgtattgctgggtgtggtggctgacacctgtaatcccagcactttgggaggctgaggcaagaggactgcttgaccctaggggctcaagaccagcctggcaacatagggagaccctgtctctacaaaaaaaattttaaatacctgggcattagcagggcatcgtagtgtgtgcctgtagacccagctacttcagaggttgaagcaggaggatcgcatgagcccaggagttagaggttgcagtgagctatgatcacactactgcattccagtctaagtgacagagcaagaccctgcctcaaaaaaaaaaagagagagagagaggtcaatgcttctttttttatcattggttttggaaagcagccagttttgcagactacctatgcctcttgacatagacaaaaaatatcccaaactactagggacaactagacttctatagaatagcggctttagtggggtcctcagaatgaatagacctaattgtaaactacagggacctgatgggtgggtgggaggcgcatggcctgacttgagatcttaggccttctatgcccccagtcttccaggctttgtctatagtaaaccatgtatgactttggctagttacctactggatgctgttactttgctatcattgtaatttgtttccccttggctgtgaatttgatgacttgtcagggaatctgttttccattcaatttttggttgaacaaagcattttgtcaatattctcagcttttgcttcgctcctttggtgaatgtcctttgaagacaatactgatgccagctctttgtaattgtgaaatctgtacccaaacctctggattagaatctccagttgtctactgtaaatactggaattacagcaaaggatatggggactgggctgcttttctgtattgtataagcactattctagatattaaagaaatttaaccgc

SEQ ID NO: 117476 - DNA, 572 bp, Homo sapiens
  Payload ID: 2939
  Gene Symbol: CHRM5
  Gene Name: cholinergic receptor, muscarinic 5
  ENST ID: ENST00000560035
  CDS Start-End: 507-572
cagataatgttttttaaagcagcttgatttggaagcgtgtgtaattctgaaatacgaacaagcagaacttttccagggggtcaaatgcatataggaacaaccaggatttctcattgctgaagcattcaatgaatctttaataagttctcaacactcagattgtttgtgatcagatcaactgctgttaccagataaaggcaaaactcacccttctggttctataatcctatccaaatggagtcttcatctaccgcatactatcctaactaatgctacaggattatcaggaatacagatataaagacactgcaagaaataaaacactggcaaaataaaacatgaaaggaaagtagagaaggcattttgggtctcgaagcttactatttccagccagagttcaaattactgagcttcaaacaaaccactgccagatgctggccaagaagagctgaaatagaaaacagcctagaacctaacactatttactgtaaaatttttgcaccaggatggaaggggattcttaccacaatgcaaccaccgtcaatggcaccccagtaaatcaccagcctttg

SEQ ID NO: 117477 - DNA, 2687 bp, Homo sapiens
  Payload ID: 2939
  Gene Symbol: CHRM5
  Gene Name: cholinergic receptor, muscarinic 5
  Uniprot ID: P08912
  ENST ID: ENST00000557872
  CDS Start-End: 315-1913
agtggtacaagatgtggaggtggaagacagtgatattgtgtccggaatttattccttcttgtgggttctcggtctcactaacttcaagaatgaagccgcagaccgtcgcggtgtgttacagttcttaaagatggtgtgtccagagtttgttccttcagatgttcagatgtgtcgagtttcttccttccggtgggttcgtggtctccctgacttcagaagtgaagccacataccttcgcaatgctggccaagaagagctgaaatagaaaacagcctagaacctaacactatttactgtaaaatttttgcaccaggatggaaggggattcttaccacaatgcaaccaccgtcaatggcaccccagtaaatcaccagcctttggaacgccacaggttgtgggaagtcatcaccattgcagctgtgactgctgtggtaagcctgatcaccattgtgggcaatgtcttggtcatgatctccttcaaagtcaacagccagctcaagacagttaacaactattacctgctcagcttagcctgtgcagatctcatcattggaatcttctccatgaacctctacaccacctacatcctcatgggacgctgggctctcgggagtctggcttgtgacctttggcttgcactggactacgtggccagcaacgcttctgtcatgaaccttctggtgatcagttttgaccgttacttttccatcacaagacccttgacatatcgggccaagcgtactccgaaaagggctggcatcatgattggcttggcctggctgatctccttcatcctctgggccccagcaatcctctgctggcagtacttggttgggaagcggacagttccactggatgagtgccagatccagtttctctctgagcccaccatcacttttggcactgccattgctgccttctacatccctgtttctgtcatgaccatcctctactgtcgaatctaccgggaaacagagaagcgaaccaaggacctggctgacctccagggttctgactctgtgaccaaagctgagaagagaaagccagctcatagggctctgttcagatcctgcttgcgctgtcctcgacccaccctggcccagcgggaaaggaaccaggcctcctggtcatcctcccgcaggagcacctccaccactgggaagccatcccaagccactggcccaagcgccaattgggccaaagctgagcagctcaccacctgtagcagctacccttcctcagaggatgaggacaagcccgccactgaccctgtcctccaagtggtctacaagagtcagggtaaggaaagcccaggggaagaattcagtgctgaagagactgaggaaacttttgtgaaagctgaaactgaaaaaagtgactatgacaccccaaactaccttctgtctccagcagctgctcatagacccaagagtcagaaatgtgtggcctataagttccgattggtggtaaaagctgacgggaaccaggagaccaacaatggctgtcacaaggtgaaaatcatgccctgccccttcccagtggccaaggaaccttcaacgaaaggcctcaatcccaaccccagccatcaaatgaccaaacgaaagagagtggtcctagtcaaagagaggaaagcagcccagacactgagtgccattctcctggccttcatcatcacatggaccccgtataacatcatggtcctggtttctaccttctgtgacaagtgtgtcccagtcaccctgtggcacttgggctattggttgtgctatgtcaatagcactgtcaaccccatctgctatgccctctgcaacagaaccttcaggaagacctttaagatgctgcttctctgccgatggaaaaagaaaaaagtggaagagaagttgtactggcaggggaacagcaagctaccctgaaaagtcaacaactcctctcgaaagaacaatgaccacagtcaacatcctctgaggatgagcaagctgattctggtttgtatattttcaaaaagaagacatctcattttgagtccttgaagatttttgtaaaggctcaagtttggttgccaaatggaaggggccatagctgcagcaattgctgacatattaaatgactcttgcctatgaccaaggccatttgatgccaggggagtttgccaatgaagtaaagggataggctcatggcccttcacaagaggaagcacactgggtaacaatgaacagtgactcagggaacttatgccccttctgtaggaaacagcagagaccaggtggaaaccttttcctgtggaaacctgtcatagaattttgtgcaatatgtatgtgtctatgaagctgtcttgtgccagtgagaaccagcaggagaatgtacaacagtgtcacttgttaacgagactgatattcaacaggcttctaagaatatgtatcttcataaactgatcactatctattatgcagctattatgtggtctatactatactgtggtttgttttcctgtccccacatctgagtgaaggtcttgctcttccctttcatatccaatgtcaattccttgtactcactgaacccatgctgatctccagggaaccatccttcctctcagaatccagagtctggaaggactgaaacctggtcatacccagtcctttcaaggggcctcttttctactaataaagatggatcaagtctccaca

SEQ ID NO: 117478 - DNA, 2071 bp, Homo sapiens
  Payload ID: 2940
  Gene Symbol: CHRNA7
  Gene Name: Cholinergic receptor, nicotinic alpha 7
  ENST ID: ENST00000632335
  CDS Start-End: 105-1613
ggcgcgcgagccgagcggcgaggtgcctctgtggccgcaggcgcaggcccgggcgacagccgagacgtggagcgcgccggctcgctgcagctccgggactcaacatgcgctgctcgccgggaggcgtctggctggcgctggccgcgtcgctcctgcacgtgtccctgcaaggcgagttccagaggaagctttacaaggagctggtcaagaactacaatcccttggagaggcccgtggccaatgactcgcaaccactcaccgtctacttctccctgagcctcctgcagatcatggacgtggatgagaagaaccaagttttaaccaccaacatttggctgcaaatgtcttggacagatcactatttacagtggaatgtgtcagaatatccaggggtgaagactgttcgtttcccagatggccagatttggaaaccagacattcttctctataacagtgctgatgagcgctttgacgccacattccacactaacgtgttggtgaattcttctgggcattgccagtacctgcctccaggcatattcaagagttcctgctacatcgatgtacgctggtttccctttgatgtgcagcactgcaaactgaagtttgggtcctggtcttacggaggctggtccttggatctgcagatgcaggaggcagatatcagtggctatatccccaatggagaatgggacctagtgggaatccccggcaagaggagtgaaaggttctatgagtgctgcaaagagccctaccccgatgtcaccttcacagtgaccatgcgccgcaggacactctactatggcctcaacctgctgatcccctgtgtgctcatctccgccctcgccctgctggtgttcctgcttcctgcagattccggggagaagatttccctggggataacagtcttactctctcttaccgtcttcatgctgctcgtggctgagatcatgcccgcaacatccgattcggtaccattgatagcccagtacttcgccagcaccatgatcatcgtgggcctctcggtggtggtgacagtgatcgtgctgcagtaccaccaccacgaccccgacgggggcaagatgcccaagtggaccagagtcatccttctgaactggtgcgcgtggttcctgcgaatgaagaggcccggggaggacaaggtgcgcccggcctgccagcacaagcagcggcgctgcagcctggccagtgtggagatgagcgccgtggcgccgccgcccgccagcaacgggaacctgctgtacatcggcttccgcggcctggacggcgtgcactgtgtcccgacccccgactctggggtagtgtgtggccgcatggcctgctcccccacgcacgatgagcacctcctgcacggcgggcaaccccccgagggggacccggacttggccaagatcctggaggaggtccgctacattgccaaccgcttccgctgccaggacgaaagcgaggcggtctgcagcgagtggaagttcgccgcctgtgtggtggaccgcctgtgcctcatggccttctcggtcttcaccatcatctgcaccatcggcatcctgatgtcggctcccaacttcgtggaggccgtgtccaaagactttgcgtaaccacgcctggttctgtacatgtggaaaactcacagatgggcaaggcctttggcttggcgagatttgggggtgctaatccaggacagcattacacgccacaactccagtgttcccttctggctgtcagtcgtgttgcttacggtttctttgttactttaggtagtagaatctcagcactttgtttcatattctcagatgggctgatagatatccttggcacatccgtaccatcggtcagcagggccactgagtagtcattttgcccattagcccactgcctggaaagcccttcggagagctccccatggctcctcaccaccgagacagttggttttgcatgtctgcatgaaggtctacctgaaaattcaacatttgctttttgcttgtgtacaaacccagattgaagctaaaataaaccagactcactaaatcctttccaataattgactggtggaagg

SEQ ID NO: 117479 - DNA, 1980 bp, Homo sapiens
  Payload ID: 2941
  Gene Symbol: CHRNA1
  Gene Name: cholinergic receptor, nicotinic, alpha 1 (muscle)
  Uniprot ID: P02708
  ENST ID: ENST00000261007
  CDS Start-End: 68-1516
cagccagagtgccagtgagaagcacaggccaccactctgccctggtccacacaagctccggtagcccatggagccctggcctctcctcctgctctttagcctttgctcagctggcctcgtcctgggctccgaacatgagacccgtctggtggcaaagctatttaaagactacagcagcgtggtgcggccagtggaagaccaccgccaggtcgtggaggtcaccgtgggcctgcagctgatacagctcatcaatgtggatgaagtaaatcagatcgtgacaaccaatgtgcgtctgaaacagggtgacatggtagatctgccacgccccagctgcgtgactttgggagttcctttgttttctcatctgcagaatgagcaatgggtggattacaacctaaaatggaatccagatgactatggcggtgtgaaaaaaattcacattccttcagaaaagatctggcgcccagaccttgttctctataacaatgcagatggtgactttgctattgtcaagttcaccaaagtgctcctgcagtacactggccacatcacgtggacacctccagccatctttaaaagctactgtgagatcatcgtcacccactttccctttgatgaacagaactgcagcatgaagctgggcacctggacctacgacggctctgtcgtggccatcaacccggaaagcgaccagccagacctgagcaacttcatggagagcggggagtgggtgatcaaggagtcccggggctggaagcactccgtgacctattcctgctgccccgacaccccctacctggacatcacctaccacttcgtcatgcagcgcctgcccctctacttcatcgtcaacgtcatcatcccctgcctgctcttctccttcttaactggcctggtattctacctgcccacagactcaggggagaagatgactctgagcatctctgtcttactgtctttgactgtgttccttctggtcatcgtggagctgatcccctccacgtccagtgctgtgcccttgattggaaaatacatgctgttcaccatggtgttcgtcattgcctccatcatcatcactgtcatcgtcatcaacacacaccaccgctcacccagcacccatgtcatgcccaactgggtgcggaaggtttttatcgacactatcccaaatatcatgtttttctccacaatgaaaagaccatccagagaaaagcaagacaaaaagatttttacagaagacattgatatctctgacatttctggaaagccagggcctccacccatgggcttccactctcccctgatcaaacaccccgaggtgaaaagtgccatcgagggcatcaagtacatcgcagagaccatgaagtcagaccaggagtctaacaatgcggcggcagagtggaagtacgttgcaatggtgatggaccacatactcctcggagtcttcatgcttgtttgcatcatcggaaccctagccgtgtttgcaggtcgactcattgaattaaatcagcaaggatgagcagaaaatgagctgagcttagctctgccctggaacctaccagagcagagaagggcaggagaggaagatttgtctacttgctccactcgcacttatcaaacgtgttatattccatacttattattgatgataagatttacctttatgtaagtttatggccttgaagtgttttcatattgcttctccctttagttctgctgtctccctgaagagtgaaccctctttagtaaatgaaactaatcactaaaaaaagtgttcatttccagtgtctggaagagtttttgccaggataaccgaggttttctgttgcattgtcattgctgttatatttatatatttacttattttgtctaaccacgagaccactagggagttgctgatgttctaaatgaagtgtattctttgcttaagagtcagttttgtacctactaagaaaaccccatctaccagtcctaaagagataa

SEQ ID NO: 117480 - DNA, 1984 bp, Homo sapiens
  Payload ID: 2941
  Gene Symbol: CHRNA1
  Gene Name: cholinergic receptor, nicotinic, alpha 1 (muscle)
  Uniprot ID: P02708
  ENST ID: ENST00000348749
  CDS Start-End: 79-1452
agacaagcacccagccagagtgccagtgagaagcacaggccaccactctgccctggtccacacaagctccggtagcccatggagccctggcctctcctcctgctctttagcctttgctcagctggcctcgtcctgggctccgaacatgagacccgtctggtggcaaagctatttaaagactacagcagcgtggtgcggccagtggaagaccaccgccaggtcgtggaggtcaccgtgggcctgcagctgatacagctcatcaatgtggatgaagtaaatcagatcgtgacaaccaatgtgcgtctgaaacagcaatgggtggattacaacctaaaatggaatccagatgactatggcggtgtgaaaaaaattcacattccttcagaaaagatctggcgcccagaccttgttctctataacaatgcagatggtgactttgctattgtcaagttcaccaaagtgctcctgcagtacactggccacatcacgtggacacctccagccatctttaaaagctactgtgagatcatcgtcacccactttccctttgatgaacagaactgcagcatgaagctgggcacctggacctacgacggctctgtcgtggccatcaacccggaaagcgaccagccagacctgagcaacttcatggagagcggggagtgggtgatcaaggagtcccggggctggaagcactccgtgacctattcctgctgccccgacaccccctacctggacatcacctaccacttcgtcatgcagcgcctgcccctctacttcatcgtcaacgtcatcatcccctgcctgctcttctccttcttaactggcctggtattctacctgcccacagactcaggggagaagatgactctgagcatctctgtcttactgtctttgactgtgttccttctggtcatcgtggagctgatcccctccacgtccagtgctgtgcccttgattggaaaatacatgctgttcaccatggtgttcgtcattgcctccatcatcatcactgtcatcgtcatcaacacacaccaccgctcacccagcacccatgtcatgcccaactgggtgcggaaggtttttatcgacactatcccaaatatcatgtttttctccacaatgaaaagaccatccagagaaaagcaagacaaaaagatttttacagaagacattgatatctctgacatttctggaaagccagggcctccacccatgggcttccactctcccctgatcaaacaccccgaggtgaaaagtgccatcgagggcatcaagtacatcgcagagaccatgaagtcagaccaggagtctaacaatgcggcggcagagtggaagtacgttgcaatggtgatggaccacatactcctcggagtcttcatgcttgtttgcatcatcggaaccctagccgtgtttgcaggtcgactcattgaattaaatcagcaaggatgagcagaaaatgagctgagcttagctctgccctggaacctaccagagcagagaagggcaggagaggaagatttgtctacttgctccactcgcacttatcaaacgtgttatattccatacttattattgatgataagatttacctttatgtaagtttatggccttgaagtgttttcatattgcttctccctttagttctgctgtctccctgaagagtgaaccctctttagtaaatgaaactaatcactaaaaaaagtgttcatttccagtgtctggaagagtttttgccaggataaccgaggttttctgttgcattgtcattgctgttatatttatatatttacttattttgtctaaccacgagaccactagggagttgctgatgttctaaatgaagtgtattctttgcttaagagtcagttttgtacctactaagaaaaccccatctaccagtcctaaagagataaggcatttgatttggagagagaggaagcagtagaaatgaaataaactaaaatgcaaactgcatcaaaaa

SEQ ID NO: 117481 - DNA, 1466 bp, Homo sapiens
  Payload ID: 2941
  Gene Symbol: CHRNA1
  Gene Name: cholinergic receptor, nicotinic, alpha 1 (muscle)
  ENST ID: ENST00000409219
  CDS Start-End: 19-1152
cacaagctccggtagcccatggagccctggcctctcctcctgctctttagcctttgctcagctggcctcgtcctgggctccgaacatgagacccgtctggtggcaaagctatttaaagactacagcagcgtggtgcggccagtggaagaccaccgccaggtcgtggaggtcaccgtgggcctgcagctgatacagctcatcaatgtggatgaagtaaatcagatcgtgacaaccaatgtgcgtctgaaacagcaatgggtggattacaacctaaaatggaatccagatgactatggcggtgtgaaaaaaattcacattccttcagaaaagatctggcgcccagaccttgttctctataacaatgcagatggtgactttgctattgtcaagttcaccaaagtgctcctgcagtacactggccacatcacgtggacacctccagccatctttaaaagctactgtgagatcatcgtcacccactttccctttgatgaacagaactgcagcatgaagctgggcacctggacctacgacggctctgtcgtggccatcaacccggaaagcgaccagccagacctgagcaacttcatggagagcggggagtgggtgatcaaggagtcccggggctggaagcactccgtgacctattcctgctgccccgacaccccctacctggacatcacctaccacttcgtcatgcagcgcctgcccctctacttcatcgtcaacgtcatcatcccctgcctgctcttctccttcttaactggcctggtattctacctgcccacagactcaggggagaagatgactctgagcatctctgtcttactgtctttgactgtgttccttctggtcatcgtggagctgatcccctccacgtccagtgctgtgcccttgattggaaaatacatgctgttcaccatggtgttcgtcattgcctccatcatcatcactgtcatcgtcatcaacacacaccaccgctcacccagcacccatgtcatgcccaactgggtgcggaaggcggcggcagagtggaagtacgttgcaatggtgatggaccacatactcctcggagtcttcatgcttgtttgcatcatcggaaccctagccgtgtttgcaggtcgactcattgaattaaatcagcaaggatgagcagaaaatgagctgagcttagctctgccctggaacctaccagagcagagaagggcaggagaggaagatttgtctacttgctccactcgcacttatcaaacgtgttatattccatacttattattgatgataagatttacctttatgtaagtttatggccttgaagtgttttcatattgcttctccctttagttctgctgtctccctgaagagtgaaccctctttagtaaatgaaactaatcactaaaaaaagtgttcatttccagtgtctggaagagtttttgccaggataaccgaggttttctgttgcattg

SEQ ID NO: 117482 - DNA, 1585 bp, Homo sapiens
  Payload ID: 2941
  Gene Symbol: CHRNA1
  Gene Name: cholinergic receptor, nicotinic, alpha 1 (muscle)
  ENST ID: ENST00000409323
  CDS Start-End: 60-869
gtgccagtgagaagcacaggccaccactctgccctggtccacacaagctccggtagcccatggagccctggcctctcctcctgctctttagcctttgctcagctggcctcgtcctgggctccgaacatgagacccgtctggtggcaaagctatttaaagactacagcagcgtggtgcggccagtggaagaccaccgccaggtcgtggaggtcaccgtgggcctgcagctgatacagctcatcaatgtggatgaagtaaatcagatcgtgacaaccaatgtgcgtctgaaacagcaatgggtggattacaacctaaaatggaatccagatgactatggcggtgtgaaaaaaattcacattccttcagaaaagatctggcgcccagaccttgttctctataacaatgcagatggtgactttgctattgtcaagttcaccaaagtgctcctgcagtacactggccacatcacgtggacacctccagccatctttaaaagctactgtgagatcatcgtcacccactttccctttgatgaacagaactgcagcatgaagctgggcacctggacctacgacggctctgtcgtggccatcaacccggaaagcgaccagccagacctgagcaacttcatggagagcggggagtgggtgatcaaggagtcccggggctggaagcactccgtgacctattcctgctgccccgacaccccctacctggacatcacctaccacttcgtcatgcagcgcctgcccctctacttcatcgtcaacgtcatcatcccctgcctgctcttctccttcttaactggcctggtattctacctgcccacagactcaggtgggtgtggttgccatgactgctgctgctgacgctgatgggtctcgtgctgctattttggggaagccagaaataatcatgtgctaacaaacaggcagatcgacccgaaccatcatcattaggagggtgcatttgctgagtgggcgtgcgcagtggtgagagtcactgtgagtggagctcacagctggggcagacaccccgagcggcagggagttgaacatgaccctagagatgcacagtgtagcttaggctggttaaagtacattaaccaccaatacctatttgctgaataccaactgtgtgcccagaagtgtactgggtaaggcatgtgatcccagacacttctcatgccacttccacgatgaagtcactttctatgtactgactaatcctggtcttgcccctttacccactgctcaccacttgaaaatagattttgcatatctttttttccagatggtggcatcttcacacacaagaccctacttcccaagtggctgttctttctcacatatcagcctagacaacttacttacctcctactgagtaatcctatctgtgacataattttatcaaacaataacaatccaccagaaaggaggaaagggtacccatctgcctgccagcaagtcactattcataaacaacttatggcagacaagtttgaaaaaaagaaagatgctacagacagacctcaagcttatgacaggtagcaatttttatcaaaatgactttaaaaaaaaaaaaa

SEQ ID NO: 117483 - DNA, 1460 bp, Homo sapiens
  Payload ID: 2941
  Gene Symbol: CHRNA1
  Gene Name: cholinergic receptor, nicotinic, alpha 1 (muscle)
  ENST ID: ENST00000409542
  CDS Start-End: 19-1146
cacaagctccggtagcccatggagccctggcctctcctcctgctctttagcctttgctcagctggcctcgtcctgggctccgaacatgagacccgtctggtggcaaagctatttaaagactacagcagcgtggtgcggccagtggaagaccaccgccaggtcgtggaggtcaccgtgggcctgcagctgatacagctcatcaatgtggatgaagtaaatcagatcgtgacaaccaatgtgcgtctgaaacagaactgcagcatgaagctgggcacctggacctacgacggctctgtcgtggccatcaacccggaaagcgaccagccagacctgagcaacttcatggagagcggggagtgggtgatcaaggagtcccggggctggaagcactccgtgacctattcctgctgccccgacaccccctacctggacatcacctaccacttcgtcatgcagcgcctgcccctctacttcatcgtcaacgtcatcatcccctgcctgctcttctccttcttaactggcctggtattctacctgcccacagactcaggggagaagatgactctgagcatctctgtcttactgtctttgactgtgttccttctggtcatcgtggagctgatcccctccacgtccagtgctgtgcccttgattggaaaatacatgctgttcaccatggtgttcgtcattgcctccatcatcatcactgtcatcgtcatcaacacacaccaccgctcacccagcacccatgtcatgcccaactgggtgcggaaggtttttatcgacactatcccaaatatcatgtttttctccacaatgaaaagaccatccagagaaaagcaagacaaaaagatttttacagaagacattgatatctctgacatttctggaaagccagggcctccacccatgggcttccactctcccctgatcaaacaccccgaggtgaaaagtgccatcgagggcatcaagtacatcgcagagaccatgaagtcagaccaggagtctaacaatgcggcggcagagtggaagtacgttgcaatggtgatggaccacatactcctcggagtcttcatgcttgtttgcatcatcggaaccctagccgtgtttgcaggtcgactcattgaattaaatcagcaaggatgagcagaaaatgagctgagcttagctctgccctggaacctaccagagcagagaagggcaggagaggaagatttgtctacttgctccactcgcacttatcaaacgtgttatattccatacttattattgatgataagatttacctttatgtaagtttatggccttgaagtgttttcatattgcttctccctttagttctgctgtctccctgaagagtgaaccctctttagtaaatgaaactaatcactaaaaaaagtgttcatttccagtgtctggaagagtttttgccaggataaccgaggttttctgttgcattg

SEQ ID NO: 117484 - DNA, 1596 bp, Homo sapiens
  Payload ID: 2941
  Gene Symbol: CHRNA1
  Gene Name: cholinergic receptor, nicotinic, alpha 1 (muscle)
  ENST ID: ENST00000435083
  CDS Start-End: 19-264
cacaagctccggtagcccatggagccctggcctctcctcctgctctttagcctttgctcagctggcctcgtcctgggctccgaacatgagacccgtctggtggcaaagctatttaaagactacagcagcgtggtgcggccagtggaagaccaccgccaggtcgtggaggtcaccgtgggcctgcagctgatacagctcatcaatgtggatgaagtaaatcagatcgtgacaaccaatgtgcgtctgaaacagtgcagatggtgactttgctattgtcaagttcaccaaagtgctcctgcagtacactggccacatcacgtggacacctccagccatctttaaaagctactgtgagatcatcgtcacccactttccctttgatgaacagaactgcagcatgaagctgggcacctggacctacgacggctctgtcgtggccatcaacccggaaagcgaccagccagacctgagcaacttcatggagagcggggagtgggtgatcaaggagtcccggggctggaagcactccgtgacctattcctgctgccccgacaccccctacctggacatcacctaccacttcgtcatgcagcgcctgcccctctacttcatcgtcaacgtcatcatcccctgcctgctcttctccttcttaactggcctggtattctacctgcccacagactcaggggagaagatgactctgagcatctctgtcttactgtctttgactgtgttccttctggtcatcgtggagctgatcccctccacgtccagtgctgtgcccttgattggaaaatacatgctgttcaccatggtgttcgtcattgcctccatcatcatcactgtcatcgtcatcaacacacaccaccgctcacccagcacccatgtcatgcccaactgggtgcggaaggtttttatcgacactatcccaaatatcatgtttttctccacaatgaaaagaccatccagagaaaagcaagacaaaaagatttttacagaagacattgatatctctgacatttctggaaagccagggcctccacccatgggcttccactctcccctgatcaaacaccccgaggtgaaaagtgccatcgagggcatcaagtacatcgcagagaccatgaagtcagaccaggagtctaacaatgcggcggcagagtggaagtacgttgcaatggtgatggaccacatactcctcggagtcttcatgcttgtttgcatcatcggaaccctagccgtgtttgcaggtcgactcattgaattaaatcagcaaggatgagcagaaaatgagctgagcttagctctgccctggaacctaccagagcagagaagggcaggagaggaagatttgtctacttgctccactcgcacttatcaaacgtgttatattccatacttattattgatgataagatttacctttatgtaagtttatggccttgaagtgttttcatattgcttctccctttagttctgctgtctccctgaagagtgaaccctctttagtaaatgaaactaatcactaaaaaaagtgttcatttccagtgtctggaagagtttttgccaggataaccgaggttttctgttgcattg

SEQ ID NO: 117485 - DNA, 1945 bp, Homo sapiens
  Payload ID: 2942
  Gene Symbol: CHRNA10
  Gene Name: cholinergic receptor, nicotinic, alpha 10 (neuronal)
  Uniprot ID: Q9GZZ6
  ENST ID: ENST00000250699
  CDS Start-End: 73-1425
taattttgccctaggtctggccaggaggcctcacatccagagacctgcccccgctcttgcagtgccagggccatggggctccggagccaccacctcagcctgggccttctgcttctgtttctactccctgcagagtgcctgggagctgagggccggctggctctcaagctgttccgtgacctctttgccaactacacaagtgccctgagacctgtggcagacacagaccagactctgaatgtgaccctggaggtgacactgtcccagatcatcgacatggatgaacggaaccaggtgctgaccctgtatctgtggatacggcaggagtggacagatgcctacctacgatgggaccccaatgcctatggtggcctggatgccatccgcatccccagcagtcttgtgtggcggccagacatcgtactctataacaaagccgacgcgcagcctccaggttccgccagcaccaacgtggtcctgcgccacgatggcgccgtgcgctgggacgcgccggccatcacgcgcagctcgtgccgcgtggatgtagcagccttcccgttcgacgcccagcactgcggcctgacgttcggctcctggactcacggcgggcaccaactggatgtgcggccgcgcggcgctgcagccagcctggcggacttcgtggagaacgtggagtggcgcgtgctgggcatgccggcgcggcggcgcgtgctcacctacggctgctgctccgagccctaccccgacgtcaccttcacgctgctgctgcgccgccgcgccgccgcctacgtgtgcaacctgctgctgccctgcgtgctcatctcgctgcttgcgccgctcgccttccacctgcctgccgactcaggcgagaaggtgtcgctgggcgtcaccgtgctgctggcgctcaccgtcttccagttgctgctggccgagagcatgccaccggccgagagcgtgccgctcatcgggaagtactacatggccactatgaccatggtcacattctcaacagcactcaccatccttatcatgaacctgcattactgtggtcccagtgtccgcccagtgccagcctgggctagggccctcctgctgggacacctggcacggggcctgtgcgtgcgggaaagaggggagccctgtgggcagtccaggccacctgagttatctcctagcccccagtcgcctgaaggaggggctggccccccagcgggcccttgccacgagccacgatgtctgtgccgccaggaagccctactgcaccacgtagccaccattgccaataccttccgcagccaccgagctgcccagcgctgccatgaggactggaagcgcctggcccgtgtgatggaccgcttcttcctggccatcttcttctccatggccctggtcatgagcctcctggtgctggtgcaggccctgtgagggctgggactaagtcacagggatctgctgcagccacagctcctccagaaagggacagccacggccaagtggttgctggtctttgggccagccagtctctccccactgctcctaagatcctgagacacttgacttcacaatccacaagggagcactcattgtctacacaccctaactaaaggaagtccagagcctgccactcccctaattccaaaaaaaagaggaactctacaaaggccaagatcacagagtacagtcttggagggacagaattgtttgtgctgggtattggagctctcagtggggagcacatgggttataatgagaaactgaactgtactgctgcatttcctgtcttccttcctaggtggctgctttgcagggctttggctgttacctttccctgctgaggggctcagggaaaagggtcggggattctcagtcgagtttccagagcaggaggccctacagacatttggccccaaatccctgactcaataaagtaagcgtgtacctagca

SEQ ID NO: 117486 - DNA, 1541 bp, Homo sapiens
  Payload ID: 2942
  Gene Symbol: CHRNA10
  Gene Name: cholinergic receptor, nicotinic, alpha 10 (neuronal)
  ENST ID: ENST00000526599
  CDS Start-End: 56-346
tggccaggaggcctcacatccagagacctgcccccgctcttgcagtgccagggccatggggctccggagccaccacctcagcctgggccttctgcttctgtttctactccctgcagagtgcctgggagctgagggccggctggctctcaagctgttccgtgacctctttgccaactacacaagtgccctgagacctgtggcagacacagaccagactctgaatgtgaccctggaggtgacactgtcccagatcatcgacatggtgcgttgtggtggtggtacagctgtggagtcttacctgtcacagtgtcaagaaatgaaggggatgaacggaaccaggtgctgaccctgtatctgtggatacggcaggagtggacagatgcctacctacgatgggaccccaatgcctatggtggcctggatgccatccgcatccccagcagtcttgtgtggcggccagacatcgtactctataacaaagccgacgcgcagcctccaggttccgccagcaccaacgtggtcctgcgccacgatggcgccgtgcgctgggacgcgccggccatcacgcgcagctcgtgccgcgtggatgtagcagccttcccgttcgacgcccagcactgcggcctgacgttcggctcctggactcacggcgggcaccaactggatgtgcggccgcgcggcgctgcagccagcctggcggacttcgtggagaacgtggagtggcgcgtgctgggcatgccggcgcggcggcgcgtgctcacctacggctgctgctccgagccctaccccgacgtcaccttcacgctgctgctgcgccgccgcgccgccgcctacgtgtgcaacctgctgctgccctgcgtgctcatctcgctgcttgcgccgctcgccttccacctgcctgccgactcaggcgagaaggtgtcgctgggcgtcaccgtgctgctggcgctcaccgtcttccagttgctgctggccgagagcatgccaccggccgagagcgtgccgctcatcgggaagtactacatggccactatgaccatggtcacattctcaacagcactcaccatccttatcatgaacctgcattactgtggtcccagtgtccgcccagtgccagcctgggctagggccctcctgctgggacacctggcacggggcctgtgcgtgcgggaaagaggggagccctgtgggcagtccaggccacctgagttatctcctagcccccagtcgcctgaaggaggggctggccccccagcgggcccttgccacgagccacgatgtctgtgccgccaggaagccctactgcaccacgtagccaccattgccaataccttccgcagccaccgagctgcccagcgctgccatgaggactggaagcgcctggcccgtgtgatggaccgcttcttcctggccatcttcttctccatggccctggtcatgagcctcctggtgctggtgcaggccctgtgagggctgggactaagtcacagggatctgctgcagccacagctcctccagaaagggacagccacggccaagtg

SEQ ID NO: 117487 - DNA, 1474 bp, Homo sapiens
  Payload ID: 2942
  Gene Symbol: CHRNA10
  Gene Name: cholinergic receptor, nicotinic, alpha 10 (neuronal)
  ENST ID: ENST00000534359
  CDS Start-End: 598-969
tggccaggaggcctcacatccagagacctgcccccgctcttgcagtgccagggccatggggctccggagccaccacctcagcctgggccttctgcttctgtttctactccctgcagtgccctgagacctgtggcagacacagaccagactctgaatgtgaccctggaggtgacactgtcccagatcatcgacatggtgcgttgtggtggtggtacagctgtggagtcttacctgtcacagtgtcaagaaatgaaggggatgaacggaaccaggtgctgaccctgtatctgtggatacggcaggagtggacagatgcctacctacgatgggaccccaatgcctatggtggcctggatgccatccgcatccccagcagtcttgtgtggcggccagacatcgtactctataacaaagccgacgcgcagcctccaggttccgccagcaccaacgtggtcctgcgccacgatggcgccgtgcgctgggacgcgccggccatcacgcgcagctcgtgccgcgtggatgtagcagccttcccgttcgacgcccagcactgcggcctgacgttcggctcctggactcacggcgggcaccaactggatgtgcggccgcgcggcgctgcagccagcctggcggacttcgtggagaacgtggagtggcgcgtgctgggcatgccggcgcggcggcgcgtgctcacctacggctgctgctccgagccctaccccgacgtcaccttcacgctgctgctgcgccgccgcgccgccgcctacgtgtgcaacctgctgctgccctgcgtgctcatctcgctgcttgcgccgctcgccttccacctgcctgccgactcaggcgagaaggtgtcgctgggcgtcaccgtgctgctggcgctcaccgtcttccagttgctgctggccgagagcatgccaccggccgagagcgtgccgctcatcgggaagtactacatggccactatgaccatggtcacattctcaacagcactcaccatccttatcatgaacctgcattactgtggtcccagtgtccgcccagtgccagcctgggctagggccctcctgctgggacacctggcacggggcctgtgcgtgcgggaaagaggggagccctgtgggcagtccaggccacctgagttatctcctagcccccagtcgcctgaaggaggggctggccccccagcgggcccttgccacgagccacgatgtctgtgccgccaggaagccctactgcaccacgtagccaccattgccaataccttccgcagccaccgagctgcccagcgctgccatgaggactggaagcgcctggcccgtgtgatggaccgcttcttcctggccatcttcttctccatggccctggtcatgagcctcctggtgctggtgcaggccctgtgagggctgggactaagtcacagggatctgctgcagccacagctcctccagaaagggacagccacggccaagtg

SEQ ID NO: 117488 - DNA, 1735 bp, Homo sapiens
  Payload ID: 2943
  Gene Symbol: CHRNA2
  Gene Name: cholinergic receptor, nicotinic, alpha 2 (neuronal)
  Uniprot ID: Q15822
  ENST ID: ENST00000240132
  CDS Start-End: 165-1709
aatgacctgttttcttctgtaaccacaggttcggtggtgagaggaagcctcgcagaatccagcagaatcctcacagaatccagcagcagctctgctggggacatggtccatggtgcaacccacagcaaagccctgacctgacctcctgatgctcaggagaagccatgggcccctcctgtcctgtgttcctgtccttcacaaagctcagcctgtggtggctccttctgaccccagcaggtggagaggaagctaagcgcccacctcccagggctcctggagacccactctcctctcccagtcccacggcattgccgcagggaggctcgcataccgagactgaggaccggctcttcaaacacctcttccggggctacaaccgctgggcgcgcccggtgcccaacacttcagacgtggatgagaagaaccaaatgatgaccaccaacgtctggctaaaacaggagtggagcgactacaaactgcgctggaaccccactgattttggcaacatcacatctctcagggtcccttctgagatgatctggatccccgacattgttctctacaacaatgcagatggggagtttgcagtgacccacatgaccaaggcccacctcttctccacgggcactgtgcactgggtgcccccggccatctacaagagctcctgcagcatcgacgtcaccttcttccccttcgaccagcagaactgcaagatgaagtttggctcctggacttatgacaaggccaagatcgacctggagcagatggagcagactgtggacctgaaggactactgggagagcggcgagtgggccatcgtcaatgccacgggcacctacaacagcaagaagtacgactgctgcgccgagatctaccccgacgtcacctacgccttcgtcatccggcggctgccgctcttctacaccatcaacctcatcatcccctgcctgctcatctcctgcctcactgtgctggtcttctacctgccctccgactgcggcgagaagatcacgctgtgcatttcggtgctgctgtcactcaccgtcttcctgctgctcatcactgagatcatcccgtccacctcgctggtcatcccgctcatcggcgagtacctgctgttcaccatgatcttcgtcaccctgtccatcgtcatcaccgtcttcgtgctcaatgtgcaccaccgctcccccagcacccacaccatgccccactgggtgcggggggcccttctgggctgtgtgccccggtggcttctgatgaaccggcccccaccacccgtggagctctgccaccccctacgcctgaagctcagcccctcttatcactggctggagagcaacgtggatgccgaggagagggaggtggtggtggaggaggaggacagatgggcatgtgcaggtcatgtggccccctctgtgggcaccctctgcagccacggccacctgcactctggggcctcaggtcccaaggctgaggctctgctgcaggagggtgagctgctgctatcaccccacatgcagaaggcactggaaggtgtgcactacattgccgaccacctgcggtctgaggatgctgactcttcggtgaaggaggactggaagtatgttgccatggtcatcgacaggatcttcctctggctgtttatcatcgtctgcttcctggggaccatcggcctctttctgcctccgttcctagctggaatgatctgactgcacctccctcgagctggctccca

SEQ ID NO: 117489 - DNA, 4067 bp, Homo sapiens
  Payload ID: 2943
  Gene Symbol: CHRNA2
  Gene Name: cholinergic receptor, nicotinic, alpha 2 (neuronal)
  Uniprot ID: Q15822
  ENST ID: ENST00000407991
  CDS Start-End: 610-2199
agagaggctgtgtgtgtgtgtgtgtgtgtgtatgtgtgtgtgtgtgtgagagagagagagaacagcgtgagcctgtgtgcttgtgtgctgagccctcatcccctcctggggccaggcttgggtttcacctgcagaatcgcttgtgctgggctgcctgggctgtcctcagtggcacctgcatgaagccgttctggctgccagagctggacagccccaggaaaacccacctctctgcagagcttgcccagctgtccccgggaagccaaatgcctctcatgtaagtcttctgctcgacggggtgtctcctaaaccctcactcttcagcctctgtttgaccatgaaatgaagtgactgagctctattctgtacctgccactctatttctggggtgacttttgtcagctgcccagaatctccaagccaggctggttctctgcatcctttcaatgacctgttttcttctgtaaccacaggttcggtggtgagaggaagcctcgcagaatccagcagaatcctcacagaatccagcagcagctctgctggggacatggtccatggtgcaacccacagcaaagccctgacctgacctcctgatgctcaggagaagccatgggcccctcctgtcctgtgttcctgtccttcacaaagctcagcctgtggtggctccttctgaccccagcaggtggagaggaagctaagcgcccacctcccagggctcctggagacccactctcctctcccagtcccacggcattgccgcagggaggctcgcataccgagactgaggaccggctcttcaaacacctcttccggggctacaaccgctgggcgcgcccggtgcccaacacttcagacgtggtgattgtgcgctttggactgtccatcgctcagctcatcgatgtggatgagaagaaccaaatgatgaccaccaacgtctggctaaaacaggagtggagcgactacaaactgcgctggaaccccactgattttggcaacatcacatctctcagggtcccttctgagatgatctggatccccgacattgttctctacaacaatgcagatggggagtttgcagtgacccacatgaccaaggcccacctcttctccacgggcactgtgcactgggtgcccccggccatctacaagagctcctgcagcatcgacgtcaccttcttccccttcgaccagcagaactgcaagatgaagtttggctcctggacttatgacaaggccaagatcgacctggagcagatggagcagactgtggacctgaaggactactgggagagcggcgagtgggccatcgtcaatgccacgggcacctacaacagcaagaagtacgactgctgcgccgagatctaccccgacgtcacctacgccttcgtcatccggcggctgccgctcttctacaccatcaacctcatcatcccctgcctgctcatctcctgcctcactgtgctggtcttctacctgccctccgactgcggcgagaagatcacgctgtgcatttcggtgctgctgtcactcaccgtcttcctgctgctcatcactgagatcatcccgtccacctcgctggtcatcccgctcatcggcgagtacctgctgttcaccatgatcttcgtcaccctgtccatcgtcatcaccgtcttcgtgctcaatgtgcaccaccgctcccccagcacccacaccatgccccactgggtgcggggggcccttctgggctgtgtgccccggtggcttctgatgaaccggcccccaccacccgtggagctctgccaccccctacgcctgaagctcagcccctcttatcactggctggagagcaacgtggatgccgaggagagggaggtggtggtggaggaggaggacagatgggcatgtgcaggtcatgtggccccctctgtgggcaccctctgcagccacggccacctgcactctggggcctcaggtcccaaggctgaggctctgctgcaggagggtgagctgctgctatcaccccacatgcagaaggcactggaaggtgtgcactacattgccgaccacctgcggtctgaggatgctgactcttcggtgaaggaggactggaagtatgttgccatggtcatcgacaggatcttcctctggctgtttatcatcgtctgcttcctggggaccatcggcctctttctgcctccgttcctagctggaatgatctgactgcacctccctcgagctggctcccagggcacccccgctgaccatcttttgaccgtctctgctacagctgcctctggtgtcccctttgggatgagcaggtgcctctccgcggagtctggacactgacccagggattgcaggcttccatccagcttaacgttattgtaccagggctgacagcctgctgggtgcaaagccctgttttggatacggaggagctggggaagctctgcagaaggtcgcaatagtgtggtgaccaagtggggcagagtaagattctcctggaggagcagtgcagaccctaagtgacagaagggtcaaccagggggacagtggggccagggtgacgaggaagggaatgcagacctcaaaggaggggccgtgggggcaaaggggagggttcttggatgtggaagggctttgaacaatgtttagatttggagatgagcccaaagtgccagggagaacagccaggtgaggtgggaggttggagagccaggtgaggtctctgtaagtcaggctggggttgaagtttggagtctgtccgagtttgcagggtgctgagctgtatggtccagcaggggagtaataagggctcttctggaaggggaggaagcgggaggcagggcctgcacctgatgtggaggtacagggcagatcttccctaccggggagggatggatggttggatacaggtggctgggctattccatccatctggaagcacatttgagcctccaggcttctccttgacgtcattcctctccttccttgctgcaaaatggctctgcaccagccggcccccaggaggtctggcagagctgagagccatggcctgcaggggctccatatgtccctacgcgtgcagcaggcaaacaagaaagaccatcctgagctgctcctgacccacctcaaactcatctcatttggcctgtcctccctcccttcacccctccttccctccccaggaaccctgttccctgtgcctggctccatcaggaggaggcctcacttgggagttgaagatctttgcctttagttcctttgattctgaacttctcaaaggcaggtactctgcctgttatttttcccacccccagcacctagcacagcgccgggtgagtggggtcagcacttagggcgtttgttctgagtggttgaggggagcaagctggattgtttgggccccaggactgttgtgtagatggcaaagctgtggtcccgtcccttatcagcctgcctcgtctctcccagagccccgaggtgtgttgacctgctctgaacccttcagagcagcctgtgtgtgcaccttggaatgcaatgcaccaccccacagtctgaggctgcacccaggatcccaggccgagctgctgctcctgggatcgggcaacagacctccccccaactctgtccagactggagggtgggacattggcagctaacagatgtgggcatcgggttctcgggacagcatggaggctccaggcaggaagccgagcagggcgagcttccagtttccttttggtcctaggggtcccctccttccaaaccccaaaatgtctctccctgacactctcaggggaaaccagcctggctgtgacgccctggcccaggccctgccatgcctcacttctctcccacaacccccctgctcatggcacatctggtctctggctcctgtctactcgtgtgcatgcagcccccagcgccccctctcctcccacttgctctccggaggcctcagagctctcgggtccaggctcccagacccactctcctgagacagtgatgttcacttctgttatccatgtctcccatccatcttgcatgtgaataaagagattaaataaagctgcacctactgctga

SEQ ID NO: 117490 - DNA, 2497 bp, Homo sapiens
  Payload ID: 2943
  Gene Symbol: CHRNA2
  Gene Name: cholinergic receptor, nicotinic, alpha 2 (neuronal)
  Uniprot ID: Q15822
  ENST ID: ENST00000520933
  CDS Start-End: 443-1966
cttctgctcgacggggtgtctcctaaaccctcactcttcagcctctgtttgaccatgaaatgaagtgactgagctctattctgtacctgccactctatttctggggtgacttttgtcagctgcccagaatctccaagccaggctggttctctgcatcctttcaatgacctgttttcttctgtaaccacaggttcggtggtgagaggaagcctcgcagaatccagcagaatcctcacagaatccagcagcagctctgctggggacatggtccatggtgcaacccacagcaaagccctgacctgacctcctgatgctcaggagaagccatgggcccctcctgtcctgtgttcctgtccttcacaaagctcagcctgtggtggctccttctgaccccagcagatgagcaaactgaggctcagtgaggctgagtggctctgatttgatggcaggtggagaggaagctaagcgcccacctcccagggctcctggagacccactctcctctcccagtcccacggcattgccgcagggaggctcgcataccgagactgaggaccggctcttcaaacacctcttccggggctacaaccgctgggcgcgcccggtgcccaacacttcagacgtggtgattgtgcgctttggactgtccatcgctcagctcatcgatgtggatgagaagaaccaaatgatgaccaccaacgtctggctaaaacaggagtggagcgactacaaactgcgctggaaccccactgattttggcaacatcacatctctcagggtcccttctgagatgatctggatccccgacattgttctctacaacaatgcagatggggagtttgcagtgacccacatgaccaaggcccacctcttctccacgggcactgtgcactgggtgcccccggccatctacaagagctcctgcagcatcgacgtcaccttcttccccttcgaccagcagaactgcaagatgaagtttggctcctggacttatgacaaggccaagatcgacctggagcagatggagcagactgtggacctgaaggactactgggagagcggcgagtgggccatcgtcaatgccacgggcacctacaacagcaagaagtacgactgctgcgccgagatctaccccgacgtcacctacgccttcgtcatccggcggctgccgctcttctacaccatcaacctcatcatcccctgcctgctcatctcctgcctcactgtgctggtcttctacctgccctccgactgcggcgagaagatcacgctgtgcatttcggtgctgctgtcactcaccgtcttcctgctgctcatcactgagatcatcccgtccacctcgctggtcatcccgctcatcggcgagtacctgctgttcaccatgatcttcgtcaccctgtccatcgtcatcaccgtcttcgtgctcaatgtgcaccaccgctcccccagcacccacaccatgccccactgggtgcggggggcccttctgggctgtgtgccccggtggcttctgatgaaccggcccccaccacccgtggagctctgccaccccctacgcctgaagctcagcccctcttatcactggctggagagcaacgtggatgccgaggagagggaggtggtggtggaggaggaggacagatgggcatgtgcaggtcatgtggccccctctgtgggcaccctctgcagccacggccacctgcactctggggcctcaggtcccaaggctgaggctctgctgcaggagggtgagctgctgctatcaccccacatgcagaaggcactggaaggtgtgcactacattgccgaccacctgcggtctgaggatgctgactcttcggtgaaggaggactggaagtatgttgccatggtcatcgacaggatcttcctctggctgtttatcatcgtctgcttcctggggaccatcggcctctttctgcctccgttcctagctggaatgatctgactgcacctccctcgagctggctcccagggcacccccgctgaccatcttttgaccgtctctgctacagctgcctctggtgtcccctttgggatgagcaggtgcctctccgcggagtctggacactgacccagggattgcaggcttccatccagcttaacgttattgtaccagggctgacagcctgctgggtgcaaagccctgttttggatacggaggagctggggaagctctgcagaaggtcgcaatagtgtggtgaccaagtggggcagagtaagattctcctggaggagcagtgcagaccctaagtgacagaagggtcaaccagggggacagtggggccagggtgacgaggaagggaatgcagacctcaaaggaggggccgtgggggcaaaggggagggttcttggatgtggaagggctttgaacaatgtttagatttggagatgagcccaaagtgccagggagaacagccaggtgaggtgggaggttggagagccaggtgaggtctctgtaagtcaggctggggttgaa

SEQ ID NO: 117491 - DNA, 576 bp, Homo sapiens
  Payload ID: 2943
  Gene Symbol: CHRNA2
  Gene Name: cholinergic receptor, nicotinic, alpha 2 (neuronal)
  ENST ID: ENST00000521921
  CDS Start-End: 427-576
aatttgactattctaggaacatcctataaaaggaatcataatgtctttgtctttttgtaactggcttattttacatagcataatgccctcaagtttcatccacgttgtagcatgggtcagaatttctgtcctttttaaggacaaataatattccactgtatggatagaccacatttgttcaaccattcatctgtcgctggataccggagttgcttccactttttacacagctgattgatgaactgcactgcattctgatggaagagtggagtcaaatctacacagtttgggttcggtggtgagaggaagcctcgcagaatccagcagaatcctcacagaatccagcagcagctctgctggggacatggtccatggtgcaacccacagcaaagccctgacctgacctcctgatgctcaggagaagccatgggcccctcctgtcctgtgttcctgtccttcacaaagctcagcctgtggtggctccttctgaccccagcaggtggagaggaagctaagcgcccacctcccagggctcctggagacccactctcctctcccagtcccacggcattgccg

SEQ ID NO: 117492 - DNA, 576 bp, Homo sapiens
  Payload ID: 2943
  Gene Symbol: CHRNA2
  Gene Name: cholinergic receptor, nicotinic, alpha 2 (neuronal)
  ENST ID: ENST00000524096
  CDS Start-End: 252-576
gttaatagatggggtgatgtcaagatcacagtgggccaggattcgccatgcacaggaggagacaggagtactcatctgatactagagaaaaggaggcttcaccggaaaatcaaaggttcggtggtgagaggaagcctcgcagaatccagcagaatcctcacagaatccagcagcagctctgctggggacatggtccatggtgcaacccacagcaaagccctgacctgacctcctgatgctcaggagaagccatgggcccctcctgtcctgtgttcctgtccttcacaaagctcagcctgtggtggctccttctgaccccagcaggtggagaggaagctaagcgcccacctcccagggctcctggagacccactctcctctcccagtcccacggcattgccgcagggaggctcgcataccgagactgaggaccggctcttcaaacacctcttccggggctacaaccgctgggcgcgcccggtgcccaacacttcagacgtggtgattgtgcgctttggactgtccatcgctcagctcatcgatgtggatgagaagaaccaaatgatgaccaccaacg

SEQ ID NO: 117493 - DNA, 2515 bp, Homo sapiens
  Payload ID: 2943
  Gene Symbol: CHRNA2
  Gene Name: cholinergic receptor, nicotinic, alpha 2 (neuronal)
  ENST ID: ENST00000523695
  CDS Start-End: 528-992
gtgtgctgagccctcatcccctcctggggccaggcttgggtttcacctgcagaatcgcttgtgctgggctgcctgggctgtcctcagtggcacctgcatgaagccgttctggctgccagagctggacagccccaggaaaacccacctctctgcagagcttgcccagctgtccccgggaagccaaatgcctctcatgtaagtcttctgctcgacggggtgtctcctaaaccctcactcttcagcctctgtttgaccatgaaatgaagtgactgagctctattctgtacctgccactctatttctggggtgacttttgtcagctgcccagaatctccaagccaggctggttctctgcatcctttcaatgacctgttttcttctgtaaccacaggttcggtggtgagaggaagcctcgcagaatccagcagaatcctcacagaatccagcagcagctctgctggggacatggtccatggtgcaacccacagcaaagccctgacctgacctcctgatgctcaggagaagccatgggcccctcctgtcctgtgttcctgtccttcacaaagctcagcctgtggtggctccttctgaccccagcaggtggagaggaagctaagcgcccacctcccagggctcctggagacccactctcctctcccagtcccacggcattgccgcagggaggctcgcataccgagactgaggaccggctcttcaaacacctcttccggggctacaaccgctgggcgcgcccggtgcccaacacttcagacgtggtgattgtgcgctttggactgtccatcgctcagctcatcgatgtggatgagaagaaccaaatgatgaccaccaacgtctggctaaaacaggagtggagcgactacaaactgcgctggaaccccactgattttggcaacatcacatctctcagggtcccttctgagatgatctggatccccgacattgttctctacaacaacagaactgcaagatgaagtttggctcctggacttatgacaaggccaagatcgacctggagcagatggagcagactgtggacctgaaggactactgggagagcggcgagtgggccatcgtcaatgccacgggcacctacaacagcaagaagtacgactgctgcgccgagatctaccccgacgtcacctacgccttcgtcatccggcggctgccgctcttctacaccatcaacctcatcatcccctgcctgctcatctcctgcctcactgtgctggtcttctacctgccctccgactgcggcgagaagatcacgctgtgcatttcggtgctgctgtcactcaccgtcttcctgctgctcatcactgagatcatcccgtccacctcgctggtcatcccgctcatcggcgagtacctgctgttcaccatgatcttcgtcaccctgtccatcgtcatcaccgtcttcgtgctcaatgtgcaccaccgctcccccagcacccacaccatgccccactgggtgcggggggcccttctgggctgtgtgccccggtggcttctgatgaaccggcccccaccacccgtggagctctgccaccccctacgcctgaagctcagcccctcttatcactggctggagagcaacgtggatgccgaggagagggaggtggtggtggaggaggaggacagatgggcatgtgcaggtcatgtggccccctctgtgggcaccctctgcagccacggccacctgcactctggggcctcaggtcccaaggctgaggctctgctgcaggagggtgagctgctgctatcaccccacatgcagaaggcactggaaggtgtgcactacattgccgaccacctgcggtctgaggatgctgactcttcggtgaaggaggactggaagtatgttgccatggtcatcgacaggatcttcctctggctgtttatcatcgtctgcttcctggggaccatcggcctctttctgcctccgttcctagctggaatgatctgactgcacctccctcgagctggctcccagggcacccccgctgaccatcttttgaccgtctctgctacagctgcctctggtgtcccctttgggatgagcaggtgcctctccgcggagtctggacactgacccagggattgcaggcttccatccagcttaacgttattgtaccagggctgacagcctgctgggtgcaaagccctgttttggatacggaggagctggggaagctctgcagaaggtcgcaatagtgtggtgaccaagtggggcagagtaagattctcctggaggagcagtgcagaccctaagtgacagaagggtcaaccagggggacagtggggccagggtgacgaggaagggaatgcagacctcaaaggaggggccgtgggggcaaaggggagggttcttggatgtggaagggctttgaacaatgtttagatttggagatgagcccaaagtgccagggagaacagccaggtgaggtgggaggttggagagccaggtgaggtctctgtaagtcaggctggggttgaa

SEQ ID NO: 117494 - DNA, 546 bp, Homo sapiens
  Payload ID: 2943
  Gene Symbol: CHRNA2
  Gene Name: cholinergic receptor, nicotinic, alpha 2 (neuronal)
  ENST ID: ENST00000518712
  CDS Start-End: 304-546
acctgccactctatttctggggtgacttttgtcagctgcccagaatctccaagccaggctggttctctgcatcctttcaatgacctgttttcttctgtaaccacagacctcagtcctgatggtggcttagcaatgacagacacagtgctagggtctacggaacacaggttcggtggtgagaggaagcctcgcagaatccagcagaatcctcacagaatccagcagcagctctgctggggacatggtccatggtgcaacccacagcaaagccctgacctgacctcctgatgctcaggagaagccatgggcccctcctgtcctgtgttcctgtccttcacaaagctcagcctgtggtggctccttctgaccccagcaggtggagaggaagctaagcgcccacctcccagggctcctggagacccactctcctctcccagtcccacggcattgccgcagggaggctcgcataccgagactgaggaccggctcttcaaacacctcttccggggctacaaccgctgggcgcgcccggtgcccaacacttca

SEQ ID NO: 117495 - DNA, 578 bp, Homo sapiens
  Payload ID: 2943
  Gene Symbol: CHRNA2
  Gene Name: cholinergic receptor, nicotinic, alpha 2 (neuronal)
  ENST ID: ENST00000520208
  CDS Start-End: 522-578
cacagtgggccaggattcgccatgcacaggaggagacaggagtactcatctgatactagagaaaaggaggcttcaccggaaaatcaaagagcttgcccagctgtccccgggaagccaaatgcctctcatgtaagtcttctgctcgacggggtgtctcctaaaccctcactcttcagcctctgtttgaccatgaaatgaagtgactgagctctattctgtacctgccactctatttctggggtgacttttgtcagctgcccagaatctccaagccaggctggttctctgcatcctttcaatgacctgttttcttctgtaaccacagctgattgatgaactgcactgcattctgatggaagagtggagtcaaatctacacagtttgggttcggtggtgagaggaagcctcgcagaatccagcagaatcctcacagaatccagcagcagctctgctggggacatggtccatggtgcaacccacagcaaagccctgacctgacctcctgatgctcaggagaagccatgggcccctcctgtcctgtgttcctgtccttcacaaagctcagcctgtggtggctc

SEQ ID NO: 117496 - DNA, 2030 bp, Homo sapiens
  Payload ID: 2944
  Gene Symbol: CHRNA3
  Gene Name: cholinergic receptor, nicotinic, alpha 3 (neuronal)
  Uniprot ID: P32297
  ENST ID: ENST00000348639
  CDS Start-End: 502-1971
gtccttcccagggtgtgttagcgtctctcctacggcgcccgcctagcccggtggtcccaaccccctgcgggagctgcacacgccccggaaacctgggacagaaactgagtccctctccttcctggtggtggtgacagcacctgctcagatctggtcggacgccgccggccggagcacccagcccggcggagaaggagctcgcccggcgctggggactgggacctggagccccttcccctaccgcacgtacgccccgccccgcgcacgcccgcccgcccgcccgcgcctggcgcagcttcactccggatggttcctgtcctcccgcgggtccgagggcgctggaaacccagcggcggcgaagcggagaggagccccgcgcgtctccgcccgcacggctccaggtctggggtctgcgctggagccgcgcggggagaggccgtctctgcgaccgccgcgcccgctcccgaccgtccgggtccgcggccagcccggccaccagccatgggctctggcccgctctcgctgcccctggcgctgtcgccgccgcggctgctgctgctgctgctgctgtctctgctgccagtggccagggcctcagaggctgagcaccgtctatttgagcggctgtttgaagattacaatgagatcatccggcctgtagccaacgtgtctgacccagtcatcatccatttcgaggtgtccatgtctcagctggtgaaggtggatgaagtaaaccagatcatggagaccaacctgtggctcaagcaaatctggaatgactacaagctgaaatggaacccctctgactatggtggggcagagttcatgcgtgtccctgcacagaagatctggaagccagacattgtgctgtataacaatgctgttggggatttccaggtggacgacaagaccaaagccttactcaagtacactggggaggtgacttggatacctccggccatctttaagagctcctgtaaaatcgacgtgacctacttcccgtttgattaccaaaactgtaccatgaagttcggttcctggtcctacgataaggcgaaaatcgatctggtcctgatcggctcttccatgaacctcaaggactattgggagagcggcgagtgggccatcatcaaagccccaggctacaaacacgacatcaagtacaactgctgcgaggagatctaccccgacatcacatactcgctgtacatccggcgcctgcccttgttctacaccatcaacctcatcatcccctgcctgctcatctccttcctcactgtgctcgtcttctacctgccctccgactgcggtgagaaggtgaccctgtgcatttctgtcctcctctccctgacggtgtttctcctggtgatcactgagaccatcccttccacctcgctggtcatccccctgattggagagtacctcctgttcaccatgatttttgtaaccttgtccatcgtcatcaccgtcttcgtgctcaacgtgcactacagaaccccgacgacacacacaatgccctcatgggtgaagactgtattcttgaacctgctccccagggtcatgttcatgaccaggccaacaagcaacgagggcaacgctcagaagccgaggcccctctacggtgccgagctctcaaatctgaattgcttcagccgcgcagagtccaaaggctgcaaggagggctacccctgccaggacgggatgtgtggttactgccaccaccgcaggataaaaatctccaatttcagtgctaacctcacgagaagctctagttctgaatctgttgatgctgtgctgtccctctctgctttgtcaccagaaatcaaagaagccatccaaagtgtcaagtatattgctgaaaatatgaaagcacaaaatgaagccaaagaggaacaaaaagcccaagagatccaacaattgaaacgaaaagaaaagtccacagaaacatccgatcaagaacctgggctatgaatttccaatcttcaacaacctgttaggaaaaaaataaaaatgcattaaataattgtaaa

SEQ ID NO: 117497 - DNA, 3202 bp, Homo sapiens
  Payload ID: 2944
  Gene Symbol: CHRNA3
  Gene Name: cholinergic receptor, nicotinic, alpha 3 (neuronal)
  Uniprot ID: P32297
  ENST ID: ENST00000326828
  CDS Start-End: 386-1903
ccttcctggtggtggtgacagcacctgctcagatctggtcggacgccgccggccggagcacccagcccggcggagaaggagctcgcccggcgctggggactgggacctggagccccttcccctaccgcacgtacgccccgccccgcgcacgcccgcccgcccgcccgcgcctggcgcagcttcactccggatggttcctgtcctcccgcgggtccgagggcgctggaaacccagcggcggcgaagcggagaggagccccgcgcgtctccgcccgcacggctccaggtctggggtctgcgctggagccgcgcggggagaggccgtctctgcgaccgccgcgcccgctcccgaccgtccgggtccgcggccagcccggccaccagccatgggctctggcccgctctcgctgcccctggcgctgtcgccgccgcggctgctgctgctgctgctgctgtctctgctgccagtggccagggcctcagaggctgagcaccgtctatttgagcggctgtttgaagattacaatgagatcatccggcctgtagccaacgtgtctgacccagtcatcatccatttcgaggtgtccatgtctcagctggtgaaggtggatgaagtaaaccagatcatggagaccaacctgtggctcaagcaaatctggaatgactacaagctgaaatggaacccctctgactatggtggggcagagttcatgcgtgtccctgcacagaagatctggaagccagacattgtgctgtataacaatgctgttggggatttccaggtggacgacaagaccaaagccttactcaagtacactggggaggtgacttggatacctccggccatctttaagagctcctgtaaaatcgacgtgacctacttcccgtttgattaccaaaactgtaccatgaagttcggttcctggtcctacgataaggcgaaaatcgatctggtcctgatcggctcttccatgaacctcaaggactattgggagagcggcgagtgggccatcatcaaagccccaggctacaaacacgacatcaagtacaactgctgcgaggagatctaccccgacatcacatactcgctgtacatccggcgcctgcccttgttctacaccatcaacctcatcatcccctgcctgctcatctccttcctcactgtgctcgtcttctacctgccctccgactgcggtgagaaggtgaccctgtgcatttctgtcctcctctccctgacggtgtttctcctggtgatcactgagaccatcccttccacctcgctggtcatccccctgattggagagtacctcctgttcaccatgatttttgtaaccttgtccatcgtcatcaccgtcttcgtgctcaacgtgcactacagaaccccgacgacacacacaatgccctcatgggtgaagactgtattcttgaacctgctccccagggtcatgttcatgaccaggccaacaagcaacgagggcaacgctcagaagccgaggcccctctacggtgccgagctctcaaatctgaattgcttcagccgcgcagagtccaaaggctgcaaggagggctacccctgccaggacgggatgtgtggttactgccaccaccgcaggataaaaatctccaatttcagtgctaacctcacgagaagctctagttctgaatctgttgatgctgtgctgtccctctctgctttgtcaccagaaatcaaagaagccatccaaagtgtcaagtatattgctgaaaatatgaaagcacaaaatgaagccaaagagattcaagatgattggaagtatgttgccatggtgattgatcgtatttttctgtgggttttcaccctggtgtgcattctagggacagcaggattgtttctgcaacccctgatggccagggaagatgcataagcactaagctgtgtgcctgcctgggagacttccttgtgtcagggcaggaggaggctgcttcctagtaagaacgtactttctgttatcaagctaccagctttgtttttggcatttcgaggtttacttattttccacttatcttggaatcatgcaaaaaaaaaaatgtcaagagtatttattaccgataaatgaacatttaactagcctttttggtatggtaaagagatgtcaaaatgtgattctatgtgattagtatgctatgctatggaatatacatgtaaaaatgtttccttttagttgttgaaacaaaactggatagaaaaatgctgttcagaaatatgaaaagtcattcagttatcactacagatctcccagtaatttttcttatttagcccataatctctttgaaggtttatactaattcagcaatcccccatcgttacccatttcttaccatgcatttctcgttctttactgggtctaaagggctatgcctccatttcagagagcttcaactacttctcttgcatacttctaaattataccatgagaaatcatgcctagttattcattgttaatataactgtcttagtacaccataaactgggtggattataaacaacagaaacttctcagttttggaggttgggaggtccaaggtcaaggcaccagcaaatttggtgtctggtgagggtcctcttcctcaaagggtgccttctagctgtgtcctcacatgactgaagggactagctatctctgtggggtctattttataagggcactaaccccattcatgagagcagagcccccatggcctaatcacctttccaaggccccaccttctatctaagacaatcacgctgggaataggtttcaacatatgaattgggggaggacacatttggaccacagcatgaacctttagaacagggtttctcagccttagcactatggacattttgggctggataaatatgtgttggtacagaatgggggtatcctgtgcattgtaggatctttagcagtaccctagcctcaactcactagatgccaatgacataccttgcttcttcaccagttatgataaccaagaatgtctccattgttaaatgttcccttaggagcaaaattgcccctggttgagaaacattgctttagacaaattgttaagagtatcatgtactacacttctgaaacttaacgtgatcatcaccactgacagatgattcacagagactgtttgaatcttgtctcactagtttttcctgtgcaaaaataaaatggacagaattgcagccc

SEQ ID NO: 117498 - DNA, 1889 bp, Homo sapiens
  Payload ID: 2944
  Gene Symbol: CHRNA3
  Gene Name: cholinergic receptor, nicotinic, alpha 3 (neuronal)
  Uniprot ID: P32297
  ENST ID: ENST00000559658
  CDS Start-End: 70-1587
gaggccgtctctgcgaccgccgcgcccgctcccgaccgtccgggtccgcggccagcccggccaccagccatgggctctggcccgctctcgctgcccctggcgctgtcgccgccgcggctgctgctgctgctgctgctgtctctgctgccagtggccagggcctcagaggctgagcaccgtctatttgagcggctgtttgaagattacaatgagatcatccggcctgtagccaacgtgtctgacccagtcatcatccatttcgaggtgtccatgtctcagctggtgaaggtggatgaagtaaaccagatcatggagaccaacctgtggctcaagcaaatctggaatgactacaagctgaaatggaacccctctgactatggtggggcagagttcatgcgtgtccctgcacagaagatctggaagccagacattgtgctgtataacaatgctgttggggatttccaggtggacgacaagaccaaagccttactcaagtacactggggaggtgacttggatacctccggccatctttaagagctcctgtaaaatcgacgtgacctacttcccgtttgattaccaaaactgtaccatgaagttcggttcctggtcctacgataaggcgaaaatcgatctggtcctgatcggctcttccatgaacctcaaggactattgggagagcggcgagtgggccatcatcaaagccccaggctacaaacacgacatcaagtacaactgctgcgaggagatctaccccgacatcacatactcgctgtacatccggcgcctgcccttgttctacaccatcaacctcatcatcccctgcctgctcatctccttcctcactgtgctcgtcttctacctgccctccgactgcggtgagaaggtgaccctgtgcatttctgtcctcctctccctgacggtgtttctcctggtgatcactgagaccatcccttccacctcgctggtcatccccctgattggagagtacctcctgttcaccatgatttttgtaaccttgtccatcgtcatcaccgtcttcgtgctcaacgtgcactacagaaccccgacgacacacacaatgccctcatgggtgaagactgtattcttgaacctgctccccagggtcatgttcatgaccaggccaacaagcaacgagggcaacgctcagaagccgaggcccctctacggtgccgagctctcaaatctgaattgcttcagccgcgcagagtccaaaggctgcaaggagggctacccctgccaggacgggatgtgtggttactgccaccaccgcaggataaaaatctccaatttcagtgctaacctcacgagaagctctagttctgaatctgttgatgctgtgctgtccctctctgctttgtcaccagaaatcaaagaagccatccaaagtgtcaagtatattgctgaaaatatgaaagcacaaaatgaagccaaagagattcaagatgattggaagtatgttgccatggtgattgatcgtatttttctgtgggttttcaccctggtgtgcattctagggacagcaggattgtttctgcaacccctgatggccagggaagatgcataagcactaagctgtgtgcctgcctgggagacttccttgtgtcagggcaggaggaggctgcttcctagctggagtgcaatggcgtgatctcagctcaccgcaacctccgccacctgggttcaagcgattctcctgccgcagcctcccaggtagctgggattacaggaacaaaaagcccaagagatccaacaattgaaacgaaaagaaaagtccacagaaacatccgatcaagaacctgggctatgaatttccaatcttcaacaacctgttaggaaaaaaataaaaatgcattaaataattgtaaa

SEQ ID NO: 117499 - DNA, 535 bp, Homo sapiens
  Payload ID: 2944
  Gene Symbol: CHRNA3
  Gene Name: cholinergic receptor, nicotinic, alpha 3 (neuronal)
  ENST ID: ENST00000559080
  CDS Start-End: 483-535
gtttataatccttattttgactggtaaagacacaggttcagagaggttaagccacttgcctaagctcacacagcttacaagtgatttgtcaggatttgcaccagatctgtccaactccagagcccaggcttgcaaccactgtgcttctcactgaatgcgtgtggccaggtagaatcctgcccctcttgggcctcagtttcccattttgtaacccactgggttagactggcctgaaagtctagggttccacagaatccccccacaggtggaggggatgctgtagatgggtgatgtttctgctgggctgggtgggggaggttaagtaacgatttccccagggactgacagggctgcttcccacagtggccagggcctcagaggctgagcaccgtctatttgagcggctgtttgaagattacaatgagatcatccggcctgtagccaacgtgtctgacccagtcatcatccatttcgaggtgtccatgtctcagctggtgaaggtggatgaagtaaaccagatcatggagaccaacct

SEQ ID NO: 117500 - DNA, 5577 bp, Homo sapiens
  Payload ID: 2945
  Gene Symbol: CHRNA4
  Gene Name: cholinergic receptor, nicotinic, alpha 4 (neuronal)
  Uniprot ID: P43681
  ENST ID: ENST00000370263
  CDS Start-End: 179-2062
agcccggcgctccctgccgcgccgccgccgcaccgcgccccacaggagaagacgaaccgggcccggcggccgaagcggcccgcgaggcgcgggaggcatgaagttgggcgcgcacgggcctcgaagcggcggggagccgggagccgcccgcatctagagcccgcgaggtgcgtgcgccatggagctagggggccccggagcgccgcggctgctgccgccgctgctgctgcttctggggaccggcctcctgcgcgccagcagccatgtggagacccgggcccacgccgaggagcggctcctgaagaaactcttctccggttacaacaagtggtcccgacccgtggccaacatctcggacgtggtcctcgtccgcttcggcctgtccatcgctcagctcattgacgtggatgagaagaaccagatgatgaccacgaacgtatgggtgaagcaggagtggcacgactacaagctgcgctgggacccagctgactatgagaatgtcacctccatccgcatcccctccgagctcatctggcggccggacatcgtcctctacaacaatgctgacggggacttcgcggtcacccacctgaccaaggcccacctgttccatgacgggcgggtgcagtggactcccccggccatttacaagagctcctgcagcatcgacgtcaccttcttccccttcgaccagcagaactgcaccatgaaattcggctcctggacctacgacaaggccaagatcgacctggtgaacatgcacagccgcgtggaccagctggacttctgggagagtggcgagtgggtcatcgtggatgccgtgggcacctacaacaccaggaagtacgagtgctgtgccgagatctacccggacatcacctatgccttcgtcatccggcggctgccgctcttctacaccatcaacctcatcatcccctgcctgctcatctcctgcctcaccgtgctggtcttctacctgccctccgagtgtggcgagaagatcacgctgtgcatctccgtgctgctgtcgctcaccgtcttcctgctgctcatcaccgagatcatcccgtccacctcactggtcatcccactcatcggcgagtacctgctgttcaccatgatcttcgtcaccctgtccatcgtcatcacggtcttcgtgctcaacgtgcaccaccgctcgccacgcacgcacaccatgcccacctgggtacgcagggtcttcctggacatcgtgccacgcctgctcctcatgaagcggccgtccgtggtcaaggacaattgccggcggctcatcgagtccatgcataagatggccagtgccccgcgcttctggcccgagccagaaggggagccccctgccacgagcggcacccagagcctgcacccgccctcaccgtccttctgtgtccccctggatgtgccggctgagcctgggccttcctgcaagtcaccctccgaccagctccctcctcagcagcccctggaagctgagaaagccagcccccacccctcgcctggaccctgccgcccgccccacggcacccaggcaccagggctggccaaagccaggtccctcagcgtccagcacatgtccagccctggcgaagcggtggaaggcggcgtccggtgccggtctcggagcatccagtactgtgttccccgagacgatgccgcccccgaggcagatggccaggctgccggcgccctggcctctcgcaacacccactcggctgagctcccacccccagaccagccctctccgtgcaaatgcacatgcaagaaggagccctcttcggtgtccccgagcgccacggtcaagacccgcagcaccaaagcgccgcccccgcacctgcccctgtcgccggccctgacccgggcggtggagggcgtccagtacattgcagaccacctgaaggccgaagacacagacttctcggtgaaggaggactggaagtacgtggccatggtcatcgaccgcatcttcctctggatgttcatcatcgtctgcctgctggggacggtgggcctcttcctgccgccctggctggctggcatgatctaggaagggaccgggagcctgcgtggcctggggctgccgtgcacggggccagcatccatgcggccggcctggggccgggctggcttctccctggactctgtggggccacacgtttgccaaattttccttcctgttctgtgtctgctgtaagacggccttggacggggacacggcctctggggagaccgagtgtggagctgcttccagttggactgtggcctcaggaggcagtggcttggagcagaggtgggggtcggcgccttctacctgcaggactcgggctaagtccagttcaagagtctcctgagctcccctgcagatggaactcactcctcccagtctctcagcagatctggtgatggtcccgaccgccccaaggggcccttgaagggagttcacgccccttcagccccaagcgccccgtcttctggaggcccggccgcctctcccacccaccgtgtcctgcgcctgtgtgggcttcaacttctcccccagggtccttgagcctctcgggccccatgagggtgagccagcagcgctccaatctgcttcgctaggagagggtccaggcagggattgtgtttggttgtgttttgggtaagttagtgagaactcaagtcttgtgcctaaggagccttggagaacagagttttgtggagctggttccgcgtggggagaatcgggaggcccacgcgggaccagctctcccctgcgcaggccctccgcgggggacaggaacacccagccccagcgagtctggagaccaggactctgccttccaggcgtagggccagggctctggcaggtggccagggctccacgggggcctagtggcttcagcccctggggtacttctgtgttgtgattccccggagctgggaaggtcccgaatggagtccagacctgggccctggttcccccaggaccctgagggtttccaccttggcgcgcagcccgggagatccgccctgggctctgggttcgggaagaaggacttcctgctacagtagctgtggggagctggtgggggcatccttgaggacctccacctgggagatgctgggaccctcggggcaggaagtccctgagaagcctcatgggagtcagggagccctggggtttccacacaggcccatgccctccgtcctggcagggcaggcagagctcagcacagcctcacccctgcaggcggtatccagaggtgagggaggcctgaaatgtttccaggcatgaccctggagcccggcagtgcaccccctaaagatggcgcacccggcagccccccagtgtccccaggggcacacttccccttgggatgggcacaggctgccccacccctccatgattccaagggcccagaggggcggggccaggatggcgtgtcccctgcctgtgagtgacatcggttcaggaggagacagtcaggaagcctcctgctgagtggtccacattctgctgcccccagaccccatccagccaggggtggggatggggttgggctctgcgtcccactgagtctcattcctctgtccccgagccgagctctcctgggccagggtctcgtcaggaggtgcctgagagcagaatgaataattgaggttaggaacccggcatgccgagtgccccagaaatgccgctgtgtccccgcgggcagtgacgtgagtggggaggagactcaggcccacattgcccacacctgcctctgaactgctgctggtcacccccacccccgggtgcctgtgaccggggtcctgaggctggggcttttgtgccaggagtgggtgggacacagagacccccgtgccaaatcctgggcatccccagccccctggcccctcccacatcccccgtgtattcaggaccccatctgctgagctctgacctgcccccgctctgccatcagcccctgctgctcctcggccagagctcccaggacgcagggagaccctgggagagtgaggtcatcccggggccatggaagctggcaggagacactggtctcagaggagggatagagacgcagatttcagatgtaagaagcccgatccacattgcataagtggacccagctgccagatgtgtgggcagctgcagggagtggcccggggtgctgggcccagctgtggttgttcttttctgggtcaggagtgactgcggagtggctgggacgctcctgccgggggaccctcctgccgggggtggccgcttgcctgggggaagacccctttccctttctttttttttttgaggctcaaaaaaaaaatccaaataaagcaccatattcccaccacgccaaattaaccttgacaacaatgttggcgtatttgcgtccagtgctgtttttattaattaaggtaaaatttacatatggtgagatgcatgctcttcagtggagacccagcccctagaaggtccctccagcccttcctgtcggcgtccctccccatctgtggctctgacttaagcaccgtggattgacctctccggctcacgaccttcgaggagtcagaatcctgcagttggagcctttgatgtctggcttcttcatcctatgacttagagcttcatccgtgctgttgtgtgtgtccgtagctccttgctgtctgttccttcgtttttaattgtgagcagtgttcttctgtctgaataaactaagacgcagtttgtccatcacctgttagtggactttgcttgcagctgtcggtgattaggaatggaggtgccggtgtgtgcatggcactctatccgttatgcatgtttattttctgcatctgttaatgttttaacatctttcagacccaggactgctcctcctagggccagttagttcccgggggtggacagcttgcctagaacccaccttgccagggctgtgacccccgaccccctatcaaagtctcacactaagccaacgtttccccgccctgtgccaggcaccaggcagcgggagacactgctgcagctcgaagcctgccggggcgccggcccctctgcggctgcttgcgccatcctgccccctccttcccaggggaggccccagtgaaggccctggccagggcttcccagccccttctgcctccggaccggcctgggtgcttcccgtgtggcccggcctggggcgacgtggccctcctctcaggaagcgtggtaatctctcaatggctggcctccggagttgtcactcaggctcccttgtaagttaaggccgggcccaggacactctagggcacgcagctgctgtgggactgctgggttaggtgtcccctggagcagaggcggcttcggatttctaaagtggctgagtcctttcaccttgcaccagaaatgctggatcaggcgcagcacacacagcacctggggatgcaagcccggccagccccatggaccaagccccgccgaccgtgtggcccgccgagcccaggtgcggccgcccggcttctgcaggcaatgtctgccaagccctggaatgtgctcccagtgtgtgcacagacttcaatgaataaaacgcaccgtcacca

SEQ ID NO: 117501 - DNA, 2052 bp, Homo sapiens
  Payload ID: 2945
  Gene Symbol: CHRNA4
  Gene Name: cholinergic receptor, nicotinic, alpha 4 (neuronal)
  ENST ID: ENST00000498043
  CDS Start-End: 1-413
ccagcagccatgtggagacccgggcccacgccgaggagcggctcctgaagaaactcttctccggttacaacaagtggtcccgacccgtggccaacatctcggacgtggtcctcgtccgcttcggcctgtccatcgctcagctcattgacgtggatgagaagaaccagatgatgaccacgaacgtatgggtgaagcaggagtggcacgactacaagctgcgctgggacccagctgactatgagaatgtcacctccatccgcatcccctccgagctcatctggcggccggacatcgtcctctacaacaactgcaggagagcccttttgggcaggagtgcttttcgccatcagaccccatcctggcctttctgggagaatagtgtggactgcagggtgccctggagagggtgctgacggggacttcgcggtcacccacctgaccaaggcccacctgttccatgacgggcgggtgcagtggactcccccggccatttacaagagctcctgcagcatcgacgtcaccttcttccccttcgaccagcagaactgcaccatgaaattcggctcctggacctacgacaaggccaagatcgacctggtgaacatgcacagccgcgtggaccagctggacttctgggagagtggcgagtgggtcatcgtggatgccgtgggcacctacaacaccaggaagtacgagtgctgtgccgagatctacccggacatcacctatgccttcgtcatccggcggctgccgctcttctacaccatcaacctcatcatcccctgcctgctcatctcctgcctcaccgtgctggtcttctacctgccctccgagtgtggcgagaagatcacgctgtgcatctccgtgctgctgtcgctcaccgtcttcctgctgctcatcaccgagatcatcccgtccacctcactggtcatcccactcatcggcgagtacctgctgttcaccatgatcttcgtcaccctgtccatcgtcatcacggtcttcgtgctcaacgtgcaccaccgctcgccacgcacgcacaccatgcccacctgggtacgcagggtcttcctggacatcgtgccacgcctgctcctcatgaagcggccgtccgtggtcaaggacaattgccggcggctcatcgagtccatgcataagatggccagtgccccgcgcttctggcccgagccagaaggggagccccctgccacgagcggcacccagagcctgcacccgccctcaccgtccttctgtgtccccctggatgtgccggctgagcctgggccttcctgcaagtcaccctccgaccagctccctcctcagcagcccctggaagctgagaaagccagcccccacccctcgcctggaccctgccgcccgccccacggcacccaggcaccagggctggccaaagccaggtccctcagcgtccagcacatgtccagccctggcgaagcggtggaaggcggcgtccggtgccggtctcggagcatccagtactgtgttccccgagacgatgccgcccccgaggcagatggccaggctgccggcgccctggcctctcgcaacacccactcggctgagctcccacccccagaccagccctctccgtgcaaatgcacatgcaagaaggagccctcttcggtgtccccgagcgccacggtcaagacccgcagcaccaaagcgccgcccccgcacctgcccctgtcgccggccctgacccgggcggtggagggcgtccagtacattgcagaccacctgaaggccgaagacacagacttctcggtgaaggaggactggaagtacgtggccatggtcatcgaccgcatcttcctctggatgttcatcatcgtctgcctgctggggacggtgggcctcttcctgccgccctggctggctggcatgatctaggaagggaccgggagcctgcgtggcctggggctgccgtgcacggggccagcatccatgcggccggcctggggccgggctggcttctccctggactctgtggggccacacgtttgccaaattttccttcctgttctgtgtctgctg

SEQ ID NO: 117502 - DNA, 5643 bp, Homo sapiens
  Payload ID: 2945
  Gene Symbol: CHRNA4
  Gene Name: cholinergic receptor, nicotinic, alpha 4 (neuronal)
  Uniprot ID: P43681
  ENST ID: ENST00000615287
  CDS Start-End: 545-2215
tcccagccggctgaggcgggcagggccgggcggggccgcgccacggagcccacagcccggcgctccctgccgcgccgccgccgcaccgcgccccacaggagaagacgaaccgggcccggcggccgaagcggcccgcgaggcgcgggaggcatgaagttgggcgcgcacgggcctcgaagcggcggggagccgggagccgcccgcatctagagcccgcgaggtgcgtgcgccatggagctagggggccccggagcgccgcggctgctgccgccgctgctgctgcttctggggaccggcctcctgcgcgccagcagccatgtggagacccgggcccacgccgaggagcggctcctgaagaaactcttctccggttacaacaagtggtcccgacccgtggccaacatctcggacgtggtcctcgtccgcttcggcctgtccatcgctcagctcattgacgtggatgagaagaaccagatgatgaccacgaacgtatgggtgaagcaggagtggcacgactacaagctgcgctgggacccagctgactatgagaatgtcacctccatccgcatcccctccgagctcatctggcggccggacatcgtcctctacaacaactgcaggagagcccttttgggcaggagtgcttttcgccatcagaccccatcctggcctttctgggagaatagtgtggactgcagggtgccctggagagggtgctgacggggacttcgcggtcacccacctgaccaaggcccacctgttccatgacgggcgggtgcagtggactcccccggccatttacaagagctcctgcagcatcgacgtcaccttcttccccttcgaccagcagaactgcaccatgaaattcggctcctggacctacgacaaggccaagatcgacctggtgaacatgcacagccgcgtggaccagctggacttctgggagagtggcgagtgggtcatcgtggatgccgtgggcacctacaacaccaggaagtacgagtgctgtgccgagatctacccggacatcacctatgccttcgtcatccggcggctgccgctcttctacaccatcaacctcatcatcccctgcctgctcatctcctgcctcaccgtgctggtcttctacctgccctccgagtgtggcgagaagatcacgctgtgcatctccgtgctgctgtcgctcaccgtcttcctgctgctcatcaccgagatcatcccgtccacctcactggtcatcccactcatcggcgagtacctgctgttcaccatgatcttcgtcaccctgtccatcgtcatcacggtcttcgtgctcaacgtgcaccaccgctcgccacgcacgcacaccatgcccacctgggtacgcagggtcttcctggacatcgtgccacgcctgctcctcatgaagcggccgtccgtggtcaaggacaattgccggcggctcatcgagtccatgcataagatggccagtgccccgcgcttctggcccgagccagaaggggagccccctgccacgagcggcacccagagcctgcacccgccctcaccgtccttctgtgtccccctggatgtgccggctgagcctgggccttcctgcaagtcaccctccgaccagctccctcctcagcagcccctggaagctgagaaagccagcccccacccctcgcctggaccctgccgcccgccccacggcacccaggcaccagggctggccaaagccaggtccctcagcgtccagcacatgtccagccctggcgaagcggtggaaggcggcgtccggtgccggtctcggagcatccagtactgtgttccccgagacgatgccgcccccgaggcagatggccaggctgccggcgccctggcctctcgcaacacccactcggctgagctcccacccccagaccagccctctccgtgcaaatgcacatgcaagaaggagccctcttcggtgtccccgagcgccacggtcaagacccgcagcaccaaagcgccgcccccgcacctgcccctgtcgccggccctgacccgggcggtggagggcgtccagtacattgcagaccacctgaaggccgaagacacagacttctcggtgaaggaggactggaagtacgtggccatggtcatcgaccgcatcttcctctggatgttcatcatcgtctgcctgctggggacggtgggcctcttcctgccgccctggctggctggcatgatctaggaagggaccgggagcctgcgtggcctggggctgccgtgcacggggccagcatccatgcggccggcctggggccgggctggcttctccctggactctgtggggccacacgtttgccaaattttccttcctgttctgtgtctgctgtaagacggccttggacggggacacggcctctggggagaccgagtgtggagctgcttccagttggactgtggcctcaggaggcagtggcttggagcagaggtgggggtcggcgccttctacctgcaggactcgggctaagtccagttcaagagtctcctgagctcccctgcagatggaactcactcctcccagtctctcagcagatctggtgatggtcccgaccgccccaaggggcccttgaagggagttcacgccccttcagccccaagcgccccgtcttctggaggcccggccgcctctcccacccaccgtgtcctgcgcctgtgtgggcttcaacttctcccccagggtccttgagcctctcgggccccatgagggtgagccagcagcgctccaatctgcttcgctaggagagggtccaggcagggattgtgtttggttgtgttttgggtaagttagtgagaactcaagtcttgtgcctaaggagccttggagaacagagttttgtggagctggttccgcgtggggagaatcgggaggcccacgcgggaccagctctcccctgcgcaggccctccgcgggggacaggaacacccagccccagcgagtctggagaccaggactctgccttccaggcgtagggccagggctctggcaggtggccagggctccacgggggcctagtggcttcagcccctggggtacttctgtgttgtgattccccggagctgggaaggtcccgaatggagtccagacctgggccctggttcccccaggaccctgagggtttccaccttggcgcgcagcccgggagatccgccctgggctctgggttcgggaagaaggacttcctgctacagtagctgtggggagctggtgggggcatccttgaggacctccacctgggagatgctgggaccctcggggcaggaagtccctgagaagcctcatgggagtcagggagccctggggtttccacacaggcccatgccctccgtcctggcagggcaggcagagctcagcacagcctcacccctgcaggcggtatccagaggtgagggaggcctgaaatgtttccaggcatgaccctggagcccggcagtgcaccccctaaagatggcgcacccggcagccccccagtgtccccaggggcacacttccccttgggatgggcacaggctgccccacccctccatgattccaagggcccagaggggcggggccaggatggcgtgtcccctgcctgtgagtgacatcggttcaggaggagacagtcaggaagcctcctgctgagtggtccacattctgctgcccccagaccccatccagccaggggtggggatggggttgggctctgcgtcccactgagtctcattcctctgtccccgagccgagctctcctgggccagggtctcgtcaggaggtgcctgagagcagaatgaataattgaggttaggaacccggcatgccgagtgccccagaaatgccgctgtgtccccgcgggcagtgacgtgagtggggaggagactcaggcccacattgcccacacctgcctctgaactgctgctggtcacccccacccccgggtgcctgtgaccggggtcctgaggctggggcttttgtgccaggagtgggtgggacacagagacccccgtgccaaatcctgggcatccccagccccctggcccctcccacatcccccgtgtattcaggaccccatctgctgagctctgacctgcccccgctctgccatcagcccctgctgctcctcggccagagctcccaggacgcagggagaccctgggagagtgaggtcatcccggggccatggaagctggcaggagacactggtctcagaggagggatagagacgcagatttcagatgtaagaagcccgatccacattgcataagtggacccagctgccagatgtgtgggcagctgcagggagtggcccggggtgctgggcccagctgtggttgttcttttctgggtcaggagtgactgcggagtggctgggacgctcctgccgggggaccctcctgccgggggtggccgcttgcctgggggaagacccctttccctttctttttttttttgaggctcaaaaaaaaaatccaaataaagcaccatattcccaccacgccaaattaaccttgacaacaatgttggcgtatttgcgtccagtgctgtttttattaattaaggtaaaatttacatatggtgagatgcatgctcttcagtggagacccagcccctagaaggtccctccagcccttcctgtcggcgtccctccccatctgtggctctgacttaagcaccgtggattgacctctccggctcacgaccttcgaggagtcagaatcctgcagttggagcctttgatgtctggcttcttcatcctatgacttagagcttcatccgtgctgttgtgtgtgtccgtagctccttgctgtctgttccttcgtttttaattgtgagcagtgttcttctgtctgaataaactaagacgcagtttgtccatcacctgttagtggactttgcttgcagctgtcggtgattaggaatggaggtgccggtgtgtgcatggcactctatccgttatgcatgtttattttctgcatctgttaatgttttaacatctttcagacccaggactgctcctcctagggccagttagttcccgggggtggacagcttgcctagaacccaccttgccagggctgtgacccccgaccccctatcaaagtctcacactaagccaacgtttccccgccctgtgccaggcaccaggcagcgggagacactgctgcagctcgaagcctgccggggcgccggcccctctgcggctgcttgcgccatcctgccccctccttcccaggggaggccccagtgaaggccctggccagggcttcccagccccttctgcctccggaccggcctgggtgcttcccgtgtggcccggcctggggcgacgtggccctcctctcaggaagcgtggtaatctctcaatggctggcctccggagttgtcactcaggctcccttgtaagttaaggccgggcccaggacactctagggcacgcagctgctgtgggactgctgggttaggtgtcccctggagcagaggcggcttcggatttctaaagtggctgagtcctttcaccttgcaccagaaatgctggatcaggcgcagcacacacagcacctggggatgcaagcccggccagccccatggaccaagccccgccgaccgtgtggcccgccgagcccaggtgcggccgc

SEQ ID NO: 117503 - DNA, 2192 bp, Homo sapiens
  Payload ID: 2945
  Gene Symbol: CHRNA4
  Gene Name: cholinergic receptor, nicotinic, alpha 4 (neuronal)
  ENST ID: ENST00000627000
  CDS Start-End: 140-475
ccacaggagaagacgaaccgggcccggcggccgaagcggcccgcgaggcgcgggaggcatgaagttgggcgcgcacgggcctcgaagcggcggggagccgggagccgcccgcatctagagcccgcgaggtgcgtgcgccatggagctagggggccccggagcgccgcggctgctgccgccgctgctgctgcttctggggaccggcctcctgcgcgccagcagccatgtggagacccgggcccacgccgaggagcggctcctgaagaaactcttctccggttacaacaagtggtcccgacccgtggccaacatctcggacgtggtcctcgtccgcttcggcctgtccatcgctcagctcattgacgtggatgagaagaaccagatgatgaccacgaacgtatgggtgaagcagcctccccccgccccacctcatccaggagtggcacgactacaagctgcgctgggacccagctgactatgagaatgtcacctccatccgcatcccctccgagctcatctggcggccggacatcgtcctctacaacaatgctgacggggacttcgcggtcacccacctgaccaaggcccacctgttccatgacgggcgggtgcagtggactcccccggccatttacaagagctcctgcagcatcgacgtcaccttcttccccttcgaccagcagaactgcaccatgaaattcggctcctggacctacgacaaggccaagatcgacctggtgaacatgcacagccgcgtggaccagctggacttctgggagagtggcgagtgggtcatcgtggatgccgtgggcacctacaacaccaggaagtacgagtgctgtgccgagatctacccggacatcacctatgccttcgtcatccggcggctgccgctcttctacaccatcaacctcatcatcccctgcctgctcatctcctgcctcaccgtgctggtcttctacctgccctccgagtgtggcgagaagatcacgctgtgcatctccgtgctgctgtcgctcaccgtcttcctgctgctcatcaccgagatcatcccgtccacctcactggtcatcccactcatcggcgagtacctgctgttcaccatgatcttcgtcaccctgtccatcgtcatcacggtcttcgtgctcaacgtgcaccaccgctcgccacgcacgcacaccatgcccacctgggtacgcagggtcttcctggacatcgtgccacgcctgctcctcatgaagcggccgtccgtggtcaaggacaattgccggcggctcatcgagtccatgcataagatggccagtgccccgcgcttctggcccgagccagaaggggagccccctgccacgagcggcacccagagcctgcacccgccctcaccgtccttctgtgtccccctggatgtgccggctgagcctgggccttcctgcaagtcaccctccgaccagctccctcctcagcagcccctggaagctgagaaagccagcccccacccctcgcctggaccctgccgcccgccccacggcacccaggcaccagggctggccaaagccaggtccctcagcgtccagcacatgtccagccctggcgaagcggtggaaggcggcgtccggtgccggtctcggagcatccagtactgtgttccccgagacgatgccgcccccgaggcagatggccaggctgccggcgccctggcctctcgcaacacccactcggctgagctcccacccccagaccagccctctccgtgcaaatgcacatgcaagaaggagccctcttcggtgtccccgagcgccacggtcaagacccgcagcaccaaagcgccgcccccgcacctgcccctgtcgccggccctgacccgggcggtggagggcgtccagtacattgcagaccacctgaaggccgaagacacagacttctcggtgaaggaggactggaagtacgtggccatggtcatcgaccgcatcttcctctggatgttcatcatcgtctgcctgctggggacggtgggcctcttcctgccgccctggctggctggcatgatctaggaagggaccgggagcctgcgtggcctggggctgccgtgcacggggccagcatccatgcggccggcctggggccgggctggcttctccctggactctgtggggccacacgtttgccaaattttccttcctgttctgtgtctgctg

SEQ ID NO: 117504 - DNA, 3623 bp, Homo sapiens
  Payload ID: 2946
  Gene Symbol: CHRNA5
  Gene Name: cholinergic receptor, nicotinic, alpha 5 (neuronal)
  Uniprot ID: P30532
  ENST ID: ENST00000299565
  CDS Start-End: 201-1607
acatgcgtcccgagcccgccagaagctgctaggctgaggctgctgtcccggcgggagctgtggcgcggagcggcccctctgctgcgtctgccctcgttttgtctcacgactcacactcagtgctccattccccaagagttcgcgttccccgcgcggcggtcgagaggcggctgcccgcggtcccgcgcgggcgcggggcgatggcggcgcgggggtcagggccccgcgcgctccgcctgctgctcttggtccagctggtcgcggggcgctgcggtctagcgggcgcggcgggcggcgcgcagagaggattatctgaaccttcttctattgcaaaacatgaagatagtttgcttaaggatttatttcaagactacgaaagatgggttcgtcctgtggaacacctgaatgacaaaataaaaataaaatttggacttgcaatatctcaattggtggatgtggatgagaaaaatcagttaatgacaacaaacgtctggttgaaacaggaatggatagatgtaaaattaagatggaaccctgatgactatggtggaataaaagttatacgtgttccttcagactctgtctggacaccagacatcgttttgtttgataatgcagatggacgttttgaagggaccagtacgaaaacagtcatcaggtacaatggcactgtcacctggactccaccggcaaactacaaaagttcctgtaccatagatgtcacgtttttcccatttgaccttcagaactgttccatgaaatttggttcttggacttatgatggatcacaggttgatataattctagaggaccaagatgtagacaagagagatttttttgataatggagaatgggagattgtgagtgcaacagggagcaaaggaaacagaaccgacagctgttgctggtatccgtatgtcacttactcatttgtaatcaagcgcctgcctctcttttataccttgttccttataataccctgtattgggctctcatttttaactgtacttgtcttctatcttccttcaaatgaaggtgaaaagatttgtctctgcacttcagtacttgtgtctttgactgtcttccttctggttattgaagagatcataccatcatcttcaaaagtcatacctctaattggagagtatctggtatttaccatgatttttgtgacactgtcaattatggtaaccgtcttcgctatcaacattcatcatcgttcttcctcaacacataatgccatggcgcctttggtccgcaagatatttcttcacacgcttcccaaactgctttgcatgagaagtcatgtagacaggtacttcactcagaaagaggaaactgagagtggtagtggaccaaaatcttctagaaacacattggaagctgcgctcgattctattcgctacattacaagacacatcatgaaggaaaatgatgtccgtgaggttgttgaagattggaaattcatagcccaggttcttgatcggatgtttctgtggacttttcttttcgtttcaattgttggatctcttgggctttttgttcctgttatttataaatgggcaaatatattaataccagttcatattggaaatgcaaataagtgaagcctcccaagggactgaagtatacatttagttaacacacatatatctgatggcacctataaaattatgaaaatgtaagttatgtgttaaatttagtgcaagctttaacagactaagttgctaacctcaatttatgttaacagatgatccatttgaacagttggctgtatgactgaagtaataactgatgagatacatttgatcttgtaaaaatagcaaaatattatctgaactggactagtgaaaaatctagtatttgtatcctggcaaataatactaatttataatccacagtaaagttcatcctttgactgtgctggagaattccagttgtatttgaagactgattttaaaacttttctgcatttggtaaaggtatgtaaactttcctgtactcactgagtaacagctaatctttaatataatattatactgctatatttaaaaagctgactacttgatataattacttaatgtgatgcttgatataataattacttaatgtggccgggcacggtggctcacacctgtaatcccagcactttgggaggtcgaggtgggcgtatcacctgaggttgggagttcgagaccagcctgaccaacgtggagaaaccccgtctctactaaaaatatgaaattagccagggtggtggtgcacacctgtaatcccagctacctgggaggctgcggcaggagaatcgcttgaacccaggtggcggaggttgcggtgagctgagatcacgccattgcactccagcctgggcaacaagagcaaaactcagtctcaaataataataataacaacaacttaatgtgctgctgcttttccataaccaacattttaaaaataaatgaaaaacaggaattgggaactcctttaaggcttactttattctttagatgcttaattattgtgttaactatttctgtagcttagcttccactgtaaagtcatacagtagacaactcctgtggacacgcagtagcatatccttaacattaatttcagtcctcttgtccacatttcccacaattaatagaaccatcttctatataaattgtggtagtatctctttatccttgatcttagaatagtcagtccactacaattacatgaaccccatttaaaaaacatatttagggccgggggcagtggctcacatctgtaatccaagcactttgggaggctgaggcaggtggatcaccagaggttaggagttcgagactagcctgaccaacatggtgaagccccgtctctactaagaatacaaaaaattagtcgggcatggtagcaggcgcctgtagtcccagctactcaagaggctgaggcaggagaatcgcttgaacctgggaggtggaggctgcagtgagccgagactgcgccattgcactccagcctggcaacaagagcaaaactctgtctcaaacatattttggtctaaatcattctgtgagaaaacaatcttctaatatgaaacacagtattctaatttggtatatgcacactgttatatacctgtaatatttcagttttctctccttcattctaacaattacaataatagaatcttagagttgcaagggcctttagatgtaatcaatcttagcctattactagtacagcgtaaatgatttagtacagtataatgtatcacagttaaaacagttaaattccatctctaaatgtcaccacttcaggtgtgaccaggtagcaaacactgacagaaaccctcgttcaatttagaactcttagctgttgagatcacaaacacctcatttatttataataagtaacctatctaagttcaagccaatgctctttggaaggcggaggagaccctatctaatttgcatttaatcgtaggcaggtgtttaatgccatttaatgagtgaaagcctggtgtgatgaatttagattgcctgccagctacctaccttagttcgtatacatccctgatccctcttatactaccattactgttacttatgatttttatatataaatttttatcgaca

SEQ ID NO: 117505 - DNA, 705 bp, Homo sapiens
  Payload ID: 2946
  Gene Symbol: CHRNA5
  Gene Name: cholinergic receptor, nicotinic, alpha 5 (neuronal)
  ENST ID: ENST00000394802
  CDS Start-End: 1-547
tcgtcctgtggaacacctgaatgacaaaataaaaataaaatttggacttgcaatatctcaattggtggatgtggatgagaaaaatcagttaatgacaacaaacgtctggttgaaacaggaatggatagatgtaaaattaagatggaaccctgatgactatggtggaataaaagttatacgtgttccttcagactctgtctggacaccagacatcgttttgtttgataatgcagatggacgttttgaagggaccagtacgaaaacagtcatcaggtacaatggcactgtcacctggactccaccggcaaactacaaaagttcctgtaccatagatgtcacgtttttcccatttgaccttcagaactgttccatgaaatttggttcttggacttatgatggatcacaggttgatataattctagaggaccaagatgtagacaagagagatttttttgataatggagaatgggagattgtgagtgcaacagggagcaaaggaaacagaaccgacagctgttgctggttgttgaagattggaaattcatagcccaggttcttgatcggatgtttctgtggacttttcttttcgtttcaattgttggatctcttgggctttttgttcctgttatttataaatgggcaaatatattaataccagttcatattggaaatgcaaataagtgaagcctcccaagggactgaagt

SEQ ID NO: 117506 - DNA, 755 bp, Homo sapiens
  Payload ID: 2946
  Gene Symbol: CHRNA5
  Gene Name: cholinergic receptor, nicotinic, alpha 5 (neuronal)
  ENST ID: ENST00000559576
  CDS Start-End: 1-170
tgacactgtcaattatggtaaccgtcttcgctatcaacattcatcatcgttcttcctcaacacataatgccatggcgcctttggtccgcaagatatttcttcacacgcttcccaaactgctttgcatgagaagtcatgtagacaggttgttgaagattggaaattcatagcccaggttcttgatcggatgtttctgtggacttttcttttcgtttcaattgttggatctcttgggctttttgttcctgttatttataaatgggcaaatatattaataccagttcatattggaaatgcaaataagtgaagcctcccaagggactgaagtatacatttagttaacacacatatatctgatggcacctataaaattatgaaaatgtaagttatgtgttaaatttagtgcaagctttaacagactaagttgctaacctcaatttatgttaacagatgatccatttgaacagttggctgtatgactgaagtaataactgatgagatacatttgatcttgtaaaaatagcaaaatattatctgaactggactagtgaaaaatctagtatttgtatcctggcaaataatactaatttataatccacagtaaagttcatcctttgactgtgctggagaattccagttgtatttgaagactgattttaaaacttttctgcatttggtaaaggtatgtaaactttcctgtactcactgagtaacagctaatctttaatataatattatactgctatatttaaaaa

SEQ ID NO: 117507 - DNA, 1051 bp, Homo sapiens
  Payload ID: 2946
  Gene Symbol: CHRNA5
  Gene Name: cholinergic receptor, nicotinic, alpha 5 (neuronal)
  ENST ID: ENST00000559554
  CDS Start-End: 150-632
cgggagctgtggcgcggagcggcccctctgctgcgtctgccctcgttttgtctcacgactcacactcagtgctccattccccaagagttcgcgttccccgcgcggcggtcgagaggcggctgcccgcggtcccgcgcgggcgcggggcgatggcggcgcgggggtcagggccccgcgcgctccgcctgctgctcttggtccagctggtcgcggggcgctgcggtctagcgggcgcggcgggcggcgcgcagagaggattatctgaaccttcttctattgcaaaacatgaagatagtttgcttaaggatttatttcaagactacgaaagatgggttcgtcctgtggaacacctgaatgacaaaataaaaataaaatttggacttgcaatatctcaattggtggatgtggatgagaaaaatcagttaatgacaacaaacgtctggttgaaacaggaatggatagatgtaaaattaagatggaaccctgatgactatggtggaataaaagttatacgtgttccttcagactctgtctggacaccagacatcgttttgtttgataatgcagatggacgttttgaagggaccagtacgaaaacagtcatcaggttgttgaagattggaaattcatagcccaggttcttgatcggatgtttctgtggacttttcttttcgtttcaattgttggatctcttgggctttttgttcctgttatttataaatgggcaaatatattaataccagttcatattggaaatgcaaataagtgaagcctcccaagggactgaagtatacatttagttaacacacatatatctgatggcacctataaaattatgaaaatgtaagttatgtgttaaatttagtgcaagctttaacagactaagttgctaacctcaatttatgttaacagatgatccatttgaacagttggctgtatgactgaagtaataactgatgagatacatttgatcttgtaaaaatagcaaaatattatctgaactggactagtgaaaaatctagtatttgtatcctggcaaataatactaatt

SEQ ID NO: 117508 - DNA, 2400 bp, Homo sapiens
  Payload ID: 2947
  Gene Symbol: CHRNA6
  Gene Name: cholinergic receptor, nicotinic, alpha 6 (neuronal)
  Uniprot ID: Q15825
  ENST ID: ENST00000276410
  CDS Start-End: 357-1841
agaaagatctcagccactcacaggtgttcatcctcccggggtcctgtctgccccagcatttcttttctgcttttcttcccctttcttgcatgaagagacatctaggctgtcaggaaatgtgatgactcatctgacatcagatcgaatcttttttattcgcccttcatgtctgcctcagtctctgatcctggtaataaccgtgtgaagtcccggggatgttttgatttctgagaagacacacacggattgcagtgggcttctgatgatgtcaaggttggatgcatgtggctgactgatagctctttgttttccacaatcctttgcctaggaaaaaggaatccaagtgtgttttaaccatgctgaccagcaaggggcagggattccttcatgggggcttgtgtctctggctgtgtgtgttcacacctttctttaaaggctgtgtgggctgtgcaactgaggagaggctcttccacaaactgttttctcattacaaccagttcatcaggcctgtggaaaacgtttccgaccctgtcacggtacactttgaagtggccatcacccagctggccaacgtggatgaagtaaaccagatcatggaaaccaatttgtggctgcgtcacatctggaatgattataaattgcgctgggatccaatggaatatgatggcattgagactcttcgcgttcctgcagataagatttggaagcccgacattgttctctataacaatgctgttggtgacttccaagtagaaggcaaaacaaaagctcttcttaaatacaatggcatgataacctggactccaccagctatttttaagagttcctgccctatggatatcacctttttcccttttgatcatcaaaactgttccctaaaatttggttcctggacgtatgacaaagctgaaattgatcttctaatcattggatcaaaagtggatatgaatgatttttgggaaaacagtgaatgggaaatcattgatgcctctggctacaaacatgacatcaaatacaactgttgtgaagagatatacacagatataacctattctttctacattagaagattgccgatgttttacacgattaatctgatcatcccttgtctctttatttcatttctaaccgtgttggtcttttaccttccttcggactgtggtgaaaaagtgacgctttgtatttcagtcctgctttctctgactgtgtttttgctggtcatcacagaaaccatcccatccacatctctggtggtcccactggtgggtgagtacctgctgttcaccatgatctttgtcacactgtccatcgtggtgactgtgtttgtgttgaacatacactaccgcaccccaaccacgcacacaatgcccaggtgggtgaagacagttttcctgaagctgctgccccaggtcctgctgatgaggtggcctctggacaagacaaggggcacaggctctgatgcagtgcccagaggccttgccaggaggcctgccaaaggcaagcttgcaagccatggggaacccagacatcttaaagaatgcttccattgtcacaaatcaaatgagcttgccacaagcaagagaagattaagtcatcagccattacagtgggtggtggaaaattcggagcactcgcctgaagttgaagatgtgattaacagtgttcagttcatagcagaaaacatgaagagccacaatgaaaccaaggaggtagaagatgactggaaatacgtggccatggtggtggacagagtatttctttgggtatttataattgtctgtgtatttggaactgcagggctatttctacagccactacttgggaacacaggaaaatcttaaaatgtattttcttttatgttcagaaatttacagacaccatatttgttctgcattccctgccacaaggaaaggaaagcaaaggcttcccacccaagtcccccatctgctaaaactgatggctacatggaaaaagaggactttcttgcacattaggaagcagaatatcctccagtgtagcacagggggagaagtgagaagtgttatgacattagtgccctgattgggcagcacccacggctacagtatcaggtcaggtttctcgtgtctgtgtgtttggcttctaaagacaagaatgacttacaatacagcctaattatgtaattaacatcaagccacactaaaaagttctgctgtacctccagtggatgctgtttctcagtattatgacatgtgacaggtgaactctgggaattggaccatgcaacatttgtgaactgtttgcaacactttgtgaactattgcatccttgatttcttgtgcatgtctctgtaatgtaactcaccctcctcagcattatttgatacactgattgttagttttaaaaaaaaaaaaaaaaaaa

SEQ ID NO: 117509 - DNA, 1872 bp, Homo sapiens
  Payload ID: 2947
  Gene Symbol: CHRNA6
  Gene Name: cholinergic receptor, nicotinic, alpha 6 (neuronal)
  Uniprot ID: Q15825
  ENST ID: ENST00000534622
  CDS Start-End: 181-1620
agtctctgatcctggtaataaccgtgtgaagtcccggggatgttttgatttctgagaagacacacacggattgcagtgggcttctgatgatgtcaaggttggatgcatgtggctgactgatagctctttgttttccacaatcctttgcctaggaaaaaggaatccaagtgtgttttaaccatgctgaccagcaaggggcagggattccttcatgggggcttgtgtctctggctgtgtgtgttcacacctttctttaaaggctgtgtgggctgtgcaactgaggagaggctcttccacaaactgttttctcattacaaccagttcatcaggcctgtggaaaacgtttccgaccctgtcacggtacactttgaagtggccatcacccagctggccaacgtgatctggaatgattataaattgcgctgggatccaatggaatatgatggcattgagactcttcgcgttcctgcagataagatttggaagcccgacattgttctctataacaatgctgttggtgacttccaagtagaaggcaaaacaaaagctcttcttaaatacaatggcatgataacctggactccaccagctatttttaagagttcctgccctatggatatcacctttttcccttttgatcatcaaaactgttccctaaaatttggttcctggacgtatgacaaagctgaaattgatcttctaatcattggatcaaaagtggatatgaatgatttttgggaaaacagtgaatgggaaatcattgatgcctctggctacaaacatgacatcaaatacaactgttgtgaagagatatacacagatataacctattctttctacattagaagattgccgatgttttacacgattaatctgatcatcccttgtctctttatttcatttctaaccgtgttggtcttttaccttccttcggactgtggtgaaaaagtgacgctttgtatttcagtcctgctttctctgactgtgtttttgctggtcatcacagaaaccatcccatccacatctctggtggtcccactggtgggtgagtacctgctgttcaccatgatctttgtcacactgtccatcgtggtgactgtgtttgtgttgaacatacactaccgcaccccaaccacgcacacaatgcccaggtgggtgaagacagttttcctgaagctgctgccccaggtcctgctgatgaggtggcctctggacaagacaaggggcacaggctctgatgcagtgcccagaggccttgccaggaggcctgccaaaggcaagcttgcaagccatggggaacccagacatcttaaagaatgcttccattgtcacaaatcaaatgagcttgccacaagcaagagaagattaagtcatcagccattacagtgggtggtggaaaattcggagcactcgcctgaagttgaagatgtgattaacagtgttcagttcatagcagaaaacatgaagagccacaatgaaaccaaggaggtagaagatgactggaaatacgtggccatggtggtggacagagtatttctttgggtatttataattgtctgtgtatttggaactgcagggctatttctacagccactacttgggaacacaggaaaatcttaaaatgtattttcttttatgttcagaaatttacagacaccatatttgttctgcattccctgccacaaggaaaggaaagcaaaggcttcccacccaagtcccccatctgctaaaactgatggctacatggaaaaagaggactttcttgcacattaggaagcagaatatcctccagtgtagcacagggggagaagtgagaagtgttatgacattagtgccctgattgggcagcacccacggctacagtatcaggtc

SEQ ID NO: 117510 - DNA, 551 bp, Homo sapiens
  Payload ID: 2947
  Gene Symbol: CHRNA6
  Gene Name: cholinergic receptor, nicotinic, alpha 6 (neuronal)
  ENST ID: ENST00000533810
  CDS Start-End: 219-551
aagtacccagggacacaaacactgcggaaggccgcagggacctctgcctaggaaagccaggctgtgtgggctgtgcaactgaggagaggctcttccacaaactgttttctcattacaaccagttcatcaggcctgtggaaaacgtttccgaccctgtcacggtacactttgaagtggccatcacccagctggccaacgtggatgaagtaaaccagatcatggaaaccaatttgtggctgcgtcacatctggaatgattataaattgcgctgggatccaatggaatatgatggcattgagactcttcgcgttcctgcagataagatttggaagcccgacattgttctctataacaatgctgttggtgacttccaagtagaaggcaaaacaaaagctcttcttaaatacaatggcatgataacctggactccaccagctatttttaagagttcctgccctatggatatcacctttttcccttttgatcatcaaaactgttccctaaaatttggttcctggacgtatgacaaagctgaaattgatcttctaatc

SEQ ID NO: 117511 - DNA, 5669 bp, Homo sapiens
  Payload ID: 2948
  Gene Symbol: CHRNA7
  Gene Name: cholinergic receptor, nicotinic, alpha 7 (neuronal)
  Uniprot ID: P36544
  ENST ID: ENST00000306901
  CDS Start-End: 98-1606
gagccgagcggcgaggtgcctctgtggccgcaggcgcaggcccgggcgacagccgagacgtggagcgcgccggctcgctgcagctccgggactcaacatgcgctgctcgccgggaggcgtctggctggcgctggccgcgtcgctcctgcacgtgtccctgcaaggcgagttccagaggaagctttacaaggagctggtcaagaactacaatcccttggagaggcccgtggccaatgactcgcaaccactcaccgtctacttctccctgagcctcctgcagatcatggacgtggatgagaagaaccaagttttaaccaccaacatttggctgcaaatgtcttggacagatcactatttacagtggaatgtgtcagaatatccaggggtgaagactgttcgtttcccagatggccagatttggaaaccagacattcttctctataacagtgctgatgagcgctttgacgccacattccacactaacgtgttggtgaattcttctgggcattgccagtacctgcctccaggcatattcaagagttcctgctacatcgatgtacgctggtttccctttgatgtgcagcactgcaaactgaagtttgggtcctggtcttacggaggctggtccttggatctgcagatgcaggaggcagatatcagtggctatatccccaatggagaatgggacctagtgggaatccccggcaagaggagtgaaaggttctatgagtgctgcaaagagccctaccccgatgtcaccttcacagtgaccatgcgccgcaggacgctctactatggcctcaacctgctgatcccctgtgtgctcatctccgccctcgccctgctggtgttcctgcttcctgcagattccggggagaagatttccctggggataacagtcttactctctcttaccgtcttcatgctgctcgtggctgagatcatgcccgcaacatccgattcggtaccattgatagcccagtacttcgccagcaccatgatcatcgtgggcctctcggtggtggtgacagtgatcgtgctgcagtaccaccaccacgaccccgacgggggcaagatgcccaagtggaccagagtcatccttctgaactggtgcgcgtggttcctgcgaatgaagaggcccggggaggacaaggtgcgcccggcctgccagcacaagcagcggcgctgcagcctggccagtgtggagatgagcgccgtggcgccgccgcccgccagcaacgggaacctgctgtacatcggcttccgcggcctggacggcgtgcactgtgtcccgacccccgactctggggtagtgtgtggccgcatggcctgctcccccacgcacgatgagcacctcctgcacggcgggcaaccccccgagggggacccggacttggccaagatcctggaggaggtccgctacattgccaaccgcttccgctgccaggacgaaagcgaggcggtctgcagcgagtggaagttcgccgcctgtgtggtggaccgcctgtgcctcatggccttctcggtcttcaccatcatctgcaccatcggcatcctgatgtcggctcccaacttcgtggaggccgtgtccaaagactttgcgtaaccacgcctggttctgtacatgtggaaaactcacagatgggcaaggcctttggcttggcgagatttgggggtgctaatccaggacagcattacacgccacaactccagtgttcccttctggctgtcagtcgtgttgcttacggtttctttgttactttaggtagtagaatctcagcactttgtttcatattctcagatgggctgatagatatccttggcacatccgtaccatcggtcagcagggccactgagtagtcattttgcccattagcccactgcctggaaagcccttcggagagctccccatggctcctcaccaccgagacagttggttttgcatgtctgcatgaaggtctacctgaaaattcaacatttgctttttgcttgtgtacaaacccagattgaagctaaaataaaccagactcactaaatcctttccaataattgactggtggaaggaaaacaaaaaacaaaaactaaaaacctcttagcttttctgcaattcaactttttatttttatttttatttctatcaaagacggtagagagaaacagcttgatgctgtttctacattaaaaaaaaaaaaaaaagacagactgttggtcttactaaggatgtttttaccagcctgcctgacttctgcaaacctaccctgtcaaggagatcaaagggacgcaggtttctgtttattctgaacaagggccaggccccgcggagtgtctttggtggatcccagataactcctaggtgctgctctcagacactgaggagttgagcaaatctgttctattctgcagaacccacaggacaaataagagttctactagaattaacagcccaaaagaatagctacagctaagtgaagccacttacgtgggctttaaaaaaataatgtgttagctgattcacatgcactggagttaattagtcttagaaatgtgtgcatccatacaaatgcacaacataaagtgaacatattcctaggccctttctgcctgtgtcagggccaggaagtagaggctgggaactcttctggtccccagtatggcaggcgccagggaggggatggtgtggcccatcccttctctggatacctggccagtggcaggcagcagggaggagctggccgaccctcagtgactgacaagccagcaattctgagttctggcctttgggagtctgcctgctccaagccagtccaccccagctgcagccccaaaagctggctcaaagtccttgggtggattcactggagatgggcaacttaaaacaagagaaactttaatttttaaacctaagtgatgatacagctcttcccttagattatcgcccaggctggagtgcagtggcatgatctcagctcactgcaagctccacctcctgggttcatgccattctcctgcctcagcctccccccgagtaactgggaatacaggcgcccgccaccatgcctggctaattttttgtatttttagtagagatagggtttcatcatgttagccaggatggtctcattcttattctttaatgagatcagagggtaattcaccaagaaagacctctcctgttccattgtgtcatccaacaactgctcagagctcaaaattatagaaggcttctgagcccctagagatttttaatttgcttctaatccctgaggtgggaacatcatgagggaagatttgattttcagagttaaataaattgtatgtgcttttccagccatctggctcactcatttctgggtaatgcacatgactttgtttgcactggaggaagatggaagcttgcgtgtgtgcggtgtgtgtgtgtgtgtaagtgtgaggtaccttgtgtgtgacaagagacctcacttacgagaaagttggtggatcaggacattccagcctcaggcggcttggagcaggatcattcctcagcaggcattccttccacatgctatggatgaaccatgcacaagattttcggtttttttttttttttctgttacagtgtctttagaaacaagtagaagtgttttgatatataaaaggaatgcttcatttcttatcattatcccaaaattgatccctcccacatttttgctttaaaaagaaacctttttggttttgtattttatacaggaacacaaaatgcaaacaagttgtgcatattttggactctcaaataacttctctgtcctttaataaagtaataataaggaatagatgtgcacatagttagaaaagtatgagtggttaaaaacaacagtctcccatactgcctgttttctctctcagaggggaccactaatgagcttctaagggcatttctagaaaggaagaaaagaagataagaggccaaagaaggagggacgggggttatggagagagaccttccctttccagcactaacgctctgtgaagggcgctgcaccttgcattcttcatgtggtgttttgtcttagaggtcgtcccataataacatataaagatctacctcattcctcctagtagctgcttagcattccattatctcagcggactatcatttatttgaatagccttttattggtgaacatatggatacttccagtttttatttttatatacaaatctataattggcatacttgtacatacatcttgacatagttttgtgactaaaacggtataaattccaacttagaaatggaattgctgggtttaaggctacatgtatttaaaattttgatagctattgccagattatcttctagaaactgatcgaaggatgtaactccatcaagagtacaataaaaggcccaatttctcagctttctataatagcactgggtattttcaaacttaatgtttttcccaatataattggtgaaacatgatatttacgaatattattctgattttggtttattttgtgtataaaatgggacatcttttaaaatttttttgtagttttaattttgatacatttatatattttacccagttcctaattgggttatttggctttttcttaatttgctcatgcactttgggacatttttgtcttatgtctttaaaatatttttatcatttgtctttcgatgttatttattgatttccttatttattggcatagagtttaaatttttatgttgtcaatttgtgagtatttttctttgtcgatcgtgggatttgtttccagtttttaaaagccttcctcattctgagattataaatagacttactcgcattttcttctgaaactttatggttttattggtttaccttcacatcttcagactccctggaattcatttgttgcaggacatgagggaaaaatccatactttttcctcgaaatggtggtcagcagtatcaataaatatgtaataatgcatttctaaaatacagtcatagtgttttccccagttgttcaaaatgcagccttatttgtaaactaaatttctttaagtgtttggttctgtttctgttctatttatctctatgaatgcctttcatttctaaagcattattcatactaatatcagtattttcaagtcaacactcccatcaactctgaatctctctctcatatgaatcttttttcaattagagtcacaatgaatttacagattgagtcttcctattcaaaagcatgaaatcttgtgtttaagtctaattttatgtaacttagtagtgttttatgattttgttcactaaggtgctttgaatttatagtttatttctagatgttttatcatttggctatcattttcaatagaatgatttattccactttattttctattttatcccattgtataagaaagtagttggtttttatgtatgaatgttataatcaaccacaaattgtgattcctacttgtttctaaggtatacttttgacttctcctttccaatgtgtctcttatttctttcttgtatctagttgatttgagatcagtgttgagtcacagtgattcaggtggcatgcttatcttgttcgtgacatcagtgggacgttttaatgtctcagcgtttaacttgtatgaagacatgtattttccttgccataataaaaaagtatctgtgtgttctcaaa

SEQ ID NO: 117512 - DNA, 1788 bp, Homo sapiens
  Payload ID: 2948
  Gene Symbol: CHRNA7
  Gene Name: cholinergic receptor, nicotinic, alpha 7 (neuronal)
  ENST ID: ENST00000437966
  CDS Start-End: 40-348
cgtggagcgcgccggctcgctgcagctccgggactcaacatgcgctgctcgccgggaggcgtctggctggcgctggccgcgtcgctcctgcacgtgtccctgcaaggcgagttccagaggaagctttacaaggagctggtcaagaactacaatcccttggagaggcccgtggccaatgactcgcaaccactcaccgtctacttctccctgagcctcctgcagatcatggacgtggatgagaagaaccaagttttaaccaccaacatttggctgcaaatggcatattcaagagttcctgctacatcgatgtacgctggtttccctttgatgtgcagcactgcaaactgaagtttgggtcctggtcttacggaggctggtccttggatctgcagatgcaggaggcagatatcagtggctatatccccaatggagaatgggacctagtgggaatccccggcaagaggagtgaaaggttctatgagtgctgcaaagagccctaccccgatgtcaccttcacagtgaccatgcgccgcaggacgctctactatggcctcaacctgctgatcccctgtgtgctcatctccgccctcgccctgctggtgttcctgcttcctgcagattccggggagaagatttccctggggataacagtcttactctctcttaccgtcttcatgctgctcgtggctgagatcatgcccgcaacatccgattcggtaccattgatagcccagtacttcgccagcaccatgatcatcgtgggcctctcggtggtggtgacagtgatcgtgctgcagtaccaccaccacgaccccgacgggggcaagatgcccaagtggaccagagtcatccttctgaactggtgcgcgtggttcctgcgaatgaagaggcccggggaggacaaggtgcgcccggcctgccagcacaagcagcggcgctgcagcctggccagtgtggagatgagcgccgtggcgccgccgcccgccagcaacgggaacctgctgtacatcggcttccgcggcctggacggcgtgcactgtgtcccgacccccgactctggggtagtgtgtggccgcatggcctgctcccccacgcacgatgagcacctcctgcacggcgggcaaccccccgagggggacccggacttggccaagatcctggaggaggtccgctacattgccaaccgcttccgctgccaggacgaaagcgaggcggtctgcagcgagtggaagttcgccgcctgtgtggtggaccgcctgtgcctcatggccttctcggtcttcaccatcatctgcaccatcggcatcctgatgtcggctcccaacttcgtggaggccgtgtccaaagactttgcgtaaccacgcctggttctgtacatgtggaaaactcacagatgggcaaggcctttggcttggcgagatttgggggtgctaatccaggacagcattacacgccacaactccagtgttcccttctggctgtcagtcgtgttgcttacggtttctttgttactttaggtagtagaatctcagcactttgtttcatattctcagatgggctgatagatatccttggcacatccgtaccatcggtcagcagggccactgagtagtcattttgcccattagcccactgcctggaaagcccttcggagagctccccatggctcctcaccaccgagacagttggttttgcatgtctgcatgaaggtctacctgaaaattcaacatttgctttttgcttgtgtacaaacccagattgaagctaaaataaaccagactcactaaa

SEQ ID NO: 117513 - DNA, 2071 bp, Homo sapiens
  Payload ID: 2948
  Gene Symbol: CHRNA7
  Gene Name: cholinergic receptor, nicotinic, alpha 7 (neuronal)
  ENST ID: ENST00000455693
  CDS Start-End: 105-1613
ggcgcgcgagccgagcggcgaggtgcctctgtggccgcaggcgcaggcccgggcgacagccgagacgtggagcgcgccggctcgctgcagctccgggactcaacatgcgctgctcgccgggaggcgtctggctggcgctggccgcgtcgctcctgcacgtgtccctgcaaggcgagttccagaggaagctttacaaggagctggtcaagaactacaatcccttggagaggcccgtggccaatgactcgcaaccactcaccgtctacttctccctgagcctcctgcagatcatggacgtggatgagaagaaccaagttttaaccaccaacatttggctgcaaatgtcttggacagatcactatttacagtggaatgtgtcagaatatccaggggtgaagactgttcgtttcccagatggccagatttggaaaccagacattcttctctataacagtgctgatgagcgctttgacgccacattccacactaacgtgttggtgaattcttctgggcattgccagtacctgcctccaggcatattcaagagttcctgctacatcgatgtacgctggtttccctttgatgtgcagcactgcaaactgaagtttgggtcctggtcttacggaggctggtccttggatctgcagatgcaggaggcagatatcagtggctatatccccaatggagaatgggacctagtgggaatccccggcaagaggagtgaaaggttctatgagtgctgcaaagagccctaccccgatgtcaccttcacagtgaccatgcgccgcaggacgctctactatggcctcaacctgctgatcccctgtgtgctcatctccgccctcgccctgctggtgttcctgcttcctgcagattccggggagaagatttccctggggataacagtcttactctctcttaccgtcttcatgctgctcgtggctgagatcatgcccgcaacatccgattcggtaccattgatagcccagtacttcgccagcaccatgatcatcgtgggcctctcggtggtggtgacggtgatcgtgctgcagtaccaccaccacgaccccgacgggggcaagatgcccaagtggaccagagtcatccttctgaactggtgcgcgtggttcctgcgaatgaagaggcccggggaggacaaggtgcgcccggcctgccagcacaagcagcggcgctgcagcctggccagtgtggagatgagcgccgtggcgccgccgcccgccagcaacgggaacctgctgtacatcggcttccgcggcctggacggcgtgcactgtgtcccgacccccgactctggggtagtgtgtggccgcatggcctgctcccccacgcacgatgagcacctcctgcacggcgggcaaccccccgagggggacccggacttggccaagatcctggaggaggtccgctacattgccaaccgcttccgctgccaggacgaaagcgaggcggtctgcagcgagtggaagttcgccgcctgtgtggtggaccgcctgtgcctcatggccttctcggtcttcaccatcatctgcaccatcggcatcctgatgtcggctcccaacttcgtggaggccgtgtccaaagactttgcgtaaccacgcctggttctgtacatgtggaaaactcacagatgggcaaggcctttggcttggcgagatttgggggtgctaatccaggacagcattacacgccacaactccagtgttcccttctggctgtcagtcgtgttgcttacggtttctttgttactttaggtagtagaatctcagcactttgtttcatattctcagatgggctgatagatatccttggcacatccgtaccatcggtcagcagggccactgagtagtcattttgcccattagcccactgcctggaaagcccttcggagagctccccatggctcctcaccaccgagacagttggttttgcatgtctgcatgaaggtctacctgaaaattcaacatttgctttttgcttgtgtacaaacccagattgaagctaaaataaaccagactcactaaatcctttccaataattgactggtggaagg

SEQ ID NO: 117514 - DNA, 2093 bp, Homo sapiens
  Payload ID: 2948
  Gene Symbol: CHRNA7
  Gene Name: cholinergic receptor, nicotinic, alpha 7 (neuronal)
  Uniprot ID: P36544
  ENST ID: ENST00000454250
  CDS Start-End: 108-1703
aaaggcgcgcgagccgagcggcgaggtgcctctgtggccgcaggcgcaggcccgggcgacagccgagacgtggagcgcgccggctcgctgcagctccgggactcaacatgcgctgctcgccgggaggcgtctggctggcgctggccgcgtcgctcctgcacggtaaagccactgcctccccgccctccactcctccgtgggatcccgggcacatcccgggcgcctctgtgcgccccgcgcctgggccagtgtccctgcaaggcgagttccagaggaagctttacaaggagctggtcaagaactacaatcccttggagaggcccgtggccaatgactcgcaaccactcaccgtctacttctccctgagcctcctgcagatcatggacgtggatgagaagaaccaagttttaaccaccaacatttggctgcaaatgtcttggacagatcactatttacagtggaatgtgtcagaatatccaggggtgaagactgttcgtttcccagatggccagatttggaaaccagacattcttctctataacagtgctgatgagcgctttgacgccacattccacactaacgtgttggtgaattcttctgggcattgccagtacctgcctccaggcatattcaagagttcctgctacatcgatgtacgctggtttccctttgatgtgcagcactgcaaactgaagtttgggtcctggtcttacggaggctggtccttggatctgcagatgcaggaggcagatatcagtggctatatccccaatggagaatgggacctagtgggaatccccggcaagaggagtgaaaggttctatgagtgctgcaaagagccctaccccgatgtcaccttcacagtgaccatgcgccgcaggacgctctactatggcctcaacctgctgatcccctgtgtgctcatctccgccctcgccctgctggtgttcctgcttcctgcagattccggggagaagatttccctggggataacagtcttactctctcttaccgtcttcatgctgctcgtggctgagatcatgcccgcaacatccgattcggtaccattgatagcccagtacttcgccagcaccatgatcatcgtgggcctctcggtggtggtgacagtgatcgtgctgcagtaccaccaccacgaccccgacgggggcaagatgcccaagtggaccagagtcatccttctgaactggtgcgcgtggttcctgcgaatgaagaggcccggggaggacaaggtgcgcccggcctgccagcacaagcagcggcgctgcagcctggccagtgtggagatgagcgccgtggcgccgccgcccgccagcaacgggaacctgctgtacatcggcttccgcggcctggacggcgtgcactgtgtcccgacccccgactctggggtagtgtgtggccgcatggcctgctcccccacgcacgatgagcacctcctgcacggcgggcaaccccccgagggggacccggacttggccaagatcctggaggaggtccgctacattgccaaccgcttccgctgccaggacgaaagcgaggcggtctgcagcgagtggaagttcgccgcctgtgtggtggaccgcctgtgcctcatggccttctcggtcttcaccatcatctgcaccatcggcatcctgatgtcggctcccaacttcgtggaggccgtgtccaaagactttgcgtaaccacgcctggttctgtacatgtggaaaactcacagatgggcaaggcctttggcttggcgagatttgggggtgctaatccaggacagcattacacgccacaactccagtgttcccttctggctgtcagtcgtgttgcttacggtttctttgttactttaggtagtagaatctcagcactttgtttcatattctcagatgggctgatagatatccttggcacatccgtaccatcggtcagcagggccactgagtagtcattttgcccattagcccactgcctggaaagcccttcggagagctccccatggctcctcaccaccgagacagttggttttgcatgtctgcatgaaggtctacctgaaaattcaacatttgctttttgcttgtgta

SEQ ID NO: 117515 - DNA, 2276 bp, Homo sapiens
  Payload ID: 2949
  Gene Symbol: CHRNA9
  Gene Name: cholinergic receptor, nicotinic, alpha 9 (neuronal)
  Uniprot ID: Q9UGM1
  ENST ID: ENST00000310169
  CDS Start-End: 140-1579
atgcaatgcaagcctgagctctcccgccataaggctgcagcggtgtgggctccttgtgcccagatcctttgtattcatagggggaagtggaagaccacgctgcctgactgagactttattatagaggctcaggaaaaagatgaactggtcccattcctgcatctccttttgctggatctactttgctgcttccagactgagagctgcagagacggcagatggaaaatatgctcagaagttgtttaatgacctttttgaagattattctaatgctcttcgtccagtggaagatacagataaagtcctgaatgtgaccctgcagattacgctctctcagattaaggatatggatgaaagaaaccaaattctgactgcttatttgtggatccgccaaatctggcacgatgcctatctcacgtgggaccgagatcagtacgatggcctagactccatcaggatccccagtgacctcgtgtggaggccagacatcgtcttatataacaaggctgatgatgaatcttcagagcctgtgaacaccaatgtggtcctgcggtatgatgggctgatcacctgggatgcaccggccatcaccaaaagctcctgtgtggtggatgtcacctacttcccttttgacaaccagcagtgcaacctgacttttggttcctggacctacaatggcaatcaggtggacatattcaacgccttggacagcggagatctctctgacttcattgaagatgtggaatgggaggtccatggcatgcccgctgtgaagaatgtgatctcctatggctgctgctctgagccttacccggatgtcacattcaccctccttctgaagaggaggtcctcgttctatatcgtcaacctcctcatcccatgcgtcctcatatcttttctggctcctctgagtttttatctcccagcagcctccggagaaaaggtctccctgggagtgaccatcctgttggccatgactgtatttcagctaatggtggcagaaatcatgccggcctcagaaaatgtgcccctgataggtaaatactacatagccacgatggccctgatcacagcctccactgcgttgaccatcatggtgatgaatatccacttctgtggggccgaggcccggccggtgccacactgggccagggtggtcatcctgaaatacatgtccagggtcttgtttgtctatgatgtgggtgaaagctgcctcagcccgcaccacagtagagagcgggaccacctcacgaaagtttatagcaaactcccagagtctaacctgaaagcagccaggaacaaagacctttccagaaagaaggacatgaacaaacgcttaaagaacgacctgggctgccagggtaagaaccctcaggaggccgagagttactgtgcacagtacaaagtgctgacgaggaatattgagtacatcgccaagtgcctcaaagaccacaaggccaccaattccaaggggagtgaatggaagaaggtggcgaaagtcatagaccgattcttcatgtggatttttttcattatggtgtttgtgatgactattttgatcatagcaagagcggattagtcacagatattggctttgctatctgggtagaaattaatacaattccctgtgatctattccaatgttcttccaagatttttgttcatctataatttaggggttatgttgtctgtgctttttatttttagcttcaaatgaatgtcgaagctatctgctctgttaaattaagcagaagaaccaaaatttcaagggtaggaagatggaagaaatagggaaagagcccttttatagcccaccgtagtggtgggtgactggcctctagtttatataattatttacctctttggcagtacagataacaaaatacactttactggtaaaatttaaaacaaaaaaggcaaaacaaaacaaactcattttccccttagttcccattaaaatatgcatttgaaaaatgaaatagtcatatatatattagtgtgatttaagtctcaatggtaccttattcaggcatagtgcatttgaagtcatatctcaaatagtggaataaaaggttttgtcccatgtaaagaaagtctaagcatcagctgtttaatggggaaaagaactttcttcataatggtgatgtcgtatatgttggttatgttttatataaacccaaaagatgaagtcattcctgcatttaccctttgattaaaatatgatagatgaagctgttcctgcatttagtcttgtattaaaataaggtgattagcaa

SEQ ID NO: 117516 - DNA, 2557 bp, Homo sapiens
  Payload ID: 2950
  Gene Symbol: CHRNB1
  Gene Name: cholinergic receptor, nicotinic, beta 1 (muscle)
  Uniprot ID: P11230
  ENST ID: ENST00000306071
  CDS Start-End: 68-1573
gtcacttcccctgtgctggcggtcccagcggctctctgagcgaagtcactgagcgagccgccaggctatgaccccaggggctctgctgatgctgctgggggcgctgggggcgccgctcgccccaggcgtccgcggctcggaggcggagggtcgactccgggagaaacttttctctggctatgatagctccgtgcggccagcgcgggaggtgggagaccgtgtcagggtcagcgttggtctcatcctggcgcaactcatcagcctgaacgagaaggatgaagagatgagcacaaaggtgtacttagacctggagtggactgactacaggctgagctgggaccctgcggagcacgacggcatcgattcgctccgcatcacggcggaatccgtgtggctccctgacgtggtgctactgaacaacaatgatgggaattttgacgtggctctggacattagcgtcgtggtgtcctccgacggctccgtgcgttggcaacccccgggcatctatcgcagcagctgcagcatccaggtcacctacttccccttcgactggcagaattgcactatggtgttcagctcctacagctacgacagctcggaggtcagcctgcagacaggcctgggtcctgacgggcaagggcatcaggaaatccacattcatgaagggactttcattgagaatggccagtgggagattatccacaagccctctcggctaatccagcctccaggcgatcctaggggagggagggaaggacagcgccaggaagtcatcttctacctcatcatccgccgcaagcctctcttctacctggtcaacgtcattgccccatgcatcctcatcactcttctggccatcttcgtcttctacctgccaccagatgcaggagagaagatggggctctcaatctttgccctgctgacccttactgtgttcctgctgctgctggctgacaaagtacctgagacctcactatcagtacccattattatcaagtacctcatgtttaccatggtcctcgtcaccttctcagtcatccttagtgtcgtggttctcaacctgcaccaccgctcaccccacacccaccaaatgcccctttgggtccgtcagatcttcattcacaaacttccgctgtacctgcgtctaaaaaggcccaaacccgagagagacctgatgccggagccccctcactgttcttctccaggaagtggctggggtcggggaacagatgaatatttcatccggaagccgccaagtgattttctcttccccaaacccaataggttccagcctgaactgtctgcccctgatctgcggcgatttatcgatggtccaaaccgggctgtggccctgcttccggagctacgggaggtcgtctcctctatcagctacatcgctcgacagctgcaggaacaggaggaccacgatgcgctgaaggaggactggcagtttgtggccatggtagtggaccgcctcttcctgtggactttcatcatcttcaccagcgttgggaccctagtcatcttcctggacgccacgtaccacttgccccctccagacccctttccttgaagactggagggttgagacccaggccccctgccagttgaagtgagagtttggtgatactgtcaagccctatccttctctgcctcttaactccttcacgaggaatctgggcctcttatttcgtttctggggactgcattggactgagggctgggtaggcaggtgtcttggacccacctgaaatgcagtatcatctgatttactctttgggatcttgaagaagctcttttgggtatcaacacctaggtcgccagtgaaatagaacacagaacaggaactagattataagccttatgaggtcaagaaatgtgacttggccgggcgcggtggctcacgcctgtaatcccagcactttgggaggccaaggcgggcggatcacctgaggtcgggagtttgagaccagcccgaccaacatggagaaaccctgtctctactaaaaatacaaaattagccaggtgtggtggtacatgcctgtaatcccagctactagggaggctgaggcaggagaatcactcgaacccgggaggcagaggttgcagtgagtcaagatcacgccattgcactccagcctgggcaacaagagcgaaactccatctcaaaaaaaaaaaagtgtcttgttcactgcagcatgcccagtgccacgcacaggtgctgacctatagtaagtgcttaacatttgttgaataggggaaagaaatttccggaagtaaatacagcaattaataatgtttataagctgggcatggtcgctcaggccagtaatcccagtgacttaggaggctgaggtgggaggattacttgaaacccacagtttgagaccagcctgggcaacatagtgagaccctgtctctaaaaaaataaaaatagaaataaagtagtgcttattgtttgcatgttgggtcttgtggtcgttttctttttacctttctgtaatttattatgttttgtaatgtgtactatctctgggattaaaaaaagttatttcta

SEQ ID NO: 117517 - DNA, 1623 bp, Homo sapiens
  Payload ID: 2950
  Gene Symbol: CHRNB1
  Gene Name: cholinergic receptor, nicotinic, beta 1 (muscle)
  Uniprot ID: P11230
  ENST ID: ENST00000536404
  CDS Start-End: 131-1420
cctgggacgagaccaggctgagatggaccagcctttggtgaagattggatcgaaatcagaccaatggacaagctctggccgtgggtggtggacgggcctggagtagaactggaacgagaaggatgaagagatgagcacaaaggtgtacttagacctggagtggactgactacaggctgagctgggaccctgcggagcacgacggcatcgattcgctccgcatcacggcggaatccgtgtggctccctgacgtggtgctactgaacaacaatgatgggaattttgacgtggctctggacattagcgtcgtggtgtcctccgacggctccgtgcgttggcaacccccgggcatctatcgcagcagctgcagcatccaggtcacctacttccccttcgactggcagaattgcactatggtgttcagctcctacagctacgacagctcggaggtcagcctgcagacaggcctgggtcctgacgggcaagggcatcaggaaatccacattcatgaagggactttcattgagaatggccagtgggagattatccacaagccctctcggctaatccagcctccaggcgatcctaggggagggagggaaggacagcgccaggaagtcatcttctacctcatcatccgccgcaagcctctcttctacctggtcaacgtcattgccccatgcatcctcatcactcttctggccatcttcgtcttctacctgccaccagatgcaggagagaagatggggctctcaatctttgccctgctgacccttactgtgttcctgctgctgctggctgacaaagtacctgagacctcactatcagtacccattattatcaagtacctcatgtttaccatggtcctcgtcaccttctcagtcatccttagtgtcgtggttctcaacctgcaccaccgctcaccccacacccaccaaatgcccctttgggtccgtcagatcttcattcacaaacttccgctgtacctgcgtctaaaaaggcccaaacccgagagagacctgatgccggagccccctcactgttcttctccaggaagtggctggggtcggggaacagatgaatatttcatccggaagccgccaagtgattttctcttccccaaacccaataggttccagcctgaactgtctgcccctgatctgcggcgatttatcgatggtccaaaccgggctgtggccctgcttccggagctacgggaggtcgtctcctctatcagctacatcgctcgacagctgcaggaacaggaggaccacgatgcgctgaaggaggactggcagtttgtggccatggtagtggaccgcctcttcctgtggactttcatcatcttcaccagcgttgggaccctagtcatcttcctggacgccacgtaccacttgccccctccagacccctttccttgaagactggagggttgagacccaggccccctgccagttgaagtgagagtttggtgatactgtcaagccctatccttctctgcctcttaactccttcacgaggaatctgggcctcttatttcgtttctggggactgcattggactgagggctgggtaggcaggtgtcttggacccacctgaaatgcagtatcatctgatttactct

SEQ ID NO: 117518 - DNA, 1837 bp, Homo sapiens
  Payload ID: 2950
  Gene Symbol: CHRNB1
  Gene Name: cholinergic receptor, nicotinic, beta 1 (muscle)
  ENST ID: ENST00000576360
  CDS Start-End: 103-1245
cagcctttggtgaagattggatcgaaatcagaccaatggacaagctctggccgtgggtggtggacgggcctggagtagaactggaacgagaaggatgaagagatgagcacaaaggtgtacttagacctggagtggactgactacaggctgagctgggaccctgcggagcacgacggcatcgattcgctccgcatcacggcggaatccgtgtggctccctgacgtggtgctactgaacaacaatgatgggaattttgacgtggctctggacattagcgtcgtggtgtcctccgacggctccgtgcgttggcaacccccgggcatctatcgcagcagctgcagcatccaggtcacctacttccccttcgactggcagaattgcactatggtgttcagctcctacagctacgacagctcggaggtcagcctgcagacaggcctgggtcctgacgggcaagggcatcaggaaatccacattcatgaagggactttcattgagaatggccagtgggagattatccacaagccctctcggctaatccagcctccaggcgatcctaggggagggagggaaggacagcgccaggaagtcatcttctacctcatcatccgccgcaagcctctcttctacctggtcaacgtcattgccccatgcatcctcatcactcttctggccatcttcgtcttctacctgccaccagatgcagtcatccttagtgtcgtggttctcaacctgcaccaccgctcaccccacacccaccaaatgcccctttgggtccgtcagatcttcattcacaaacttccgctgtacctgcgtctaaaaaggcccaaacccgagagagacctgatgccggagccccctcactgttcttctccaggaagtggctggggtcggggaacagatgaatatttcatccggaagccgccaagtgattttctcttccccaaacccaataggttccagcctgaactgtctgcccctgatctgcggcgatttatcgatggtccaaaccgggctgtggccctgcttccggagctacgggaggtcgtctcctctatcagctacatcgctcgacagctgcaggaacaggaggaccacgatgcgctgaaggaggactggcagtttgtggccatggtagtggaccgcctcttcctgtggactttcatcatcttcaccagcgttgggaccctagtcatcttcctggacgccacgtaccacttgccccctccagacccctttccttgaagactggagggttgagacccaggccccctgccagttgaagtgagagtttggtgatactgtcaagccctatccttctctgcctcttaactccttcacgaggaatctgggcctcttatttcgtttctggggactgcattggactgagggctgggtaggcaggtgtcttggacccacctgaaatgcagtatcatctgatttactctttgggatcttgaagaagctcttttgggtatcaacacctaggtcgccagtgaaatagaacacagaacaggaactagattataagccttatgaggtcaagaaatgtgacttggccgggcgcggtggctcacgcctgtaatcccagcactttgggaggccaaggcgggcggatcacctgaggtcgggagtttgagaccagcccgaccaacatggagaaaccctgtctctactaaaaatacaaaattagccaggtgtggtggtacatgcctgtaatcccagctactagggaggctgaggcaggagaatcactcgaacccgggaggcagaggttgcagtgagtcaagatcacgccattgcactccagcctgggcaacaagagcgaaactccatc

SEQ ID NO: 117519 - DNA, 947 bp, Homo sapiens
  Payload ID: 2950
  Gene Symbol: CHRNB1
  Gene Name: cholinergic receptor, nicotinic, beta 1 (muscle)
  ENST ID: ENST00000570557
  CDS Start-End: 1-947
ggccagcgcgggaggtgggagaccgtgtcagggtcagcgttggtctcatcctggcgcaactcatcagcctgaacgagaaggatgaagagatgagcacaaaggtgtacttagacctggagtggactgactacaggctgagctgggaccctgcggagcacgacggcatcgattcgctccgcatcacggcggaatccgtgtggctccctgacgtggtgctactgaacaacaatgatgggaattttgacgtggctctggacattagcgtcgtggtgtcctccgacggctccgtgcgttggcaacccccgggcatctatcgcagcagctgcagcatccaggtcacctacttccccttcgactggcagaattgcactatggtgttcagctcctacagctacgacagctcggaggtcagcctgcagacaggcctgggtcctgacgggcaagggcatcaggaaatccacattcatgaagggactttcattggagagaagatggggctctcaatctttgccctgctgacccttactgtgttcctgctgctgctggctgacaaagtacctgagacctcactatcagtacccattattatcaagtacctcatgtttaccatggtcctcgtcaccttctcagtcatccttagtgtcgtggttctcaacctgcaccaccgctcaccccacacccaccaaatgcccctttgggtccgtcagatcttcattcacaaacttccgctgtacctgcgtctaaaaaggcccaaacccgagagagacctgatgccggagccccctcactgttcttctccaggaagtggctggggtcggggaacagatgaatatttcatccggaagccgccaagtgattttctcttccccaaacccaataggttccagcctgaactgtctgcccctgatctgcggcgatttatcgatggtccaaaccgggctgtggcc

SEQ ID NO: 117520 - DNA, 539 bp, Homo sapiens
  Payload ID: 2950
  Gene Symbol: CHRNB1
  Gene Name: cholinergic receptor, nicotinic, beta 1 (muscle)
  ENST ID: ENST00000572857
  CDS Start-End: 65-539
acttcccctgtgctggcggtcccagcggctctctgagcgaagtcactgagcgagccgccaggctatgaccccaggggctctgctgatgctgctgggggcgctgggggcgccgctcgccccaggcgtccgcggctcggaggcggagggtcgactccgggagaaacttttctctggctatgatagctccgtgcggccagcgcgggaggtgggagaccgtgtcagggtcagcgttggtctcatcctggcgcaactcatcagcctgaacgagaaggatgaagagatgagcacaaaggtgtacttagacctggctgttcttgaatgcgggggctcgagccatccaccagcctcggggggaacctccacaagtgctgagattacagccgagtggactgactacaggctgagctgggaccctgcggagcacgacggcatcgattcgctccgcatcacggcggaatccgtgtggctccctgacgtggtgctactgaacaacaatgatgggaattttgacgtggctctggacattagcgtcgtggtgt

SEQ ID NO: 117521 - DNA, 1095 bp, Homo sapiens
  Payload ID: 2950
  Gene Symbol: CHRNB1
  Gene Name: cholinergic receptor, nicotinic, beta 1 (muscle)
  ENST ID: ENST00000575379
  CDS Start-End: 376-489
actttgaggggaggtgggaactaaaacagaggcggtggaagaagttgcacaaggctagagagatcactgctggagggaaaagcatgatgggctctcgggttttgagaactggcaagttgttggaggcagctggagcggggcctgggtcgccggcactggctgtctttgcgtttgggcgtggccagtcactcctcttccaggttccagcctgaactgtctgcccctgatctgcggcgatttatcgatggtccaaaccgggctgtggccctgcttccggagctacgggaggtcgtctcctctatcagctacatcgctcgacagctgcaggaacaggaggaccacgatgcgctgaaggaggactggcagtttgtggccatggtagtggaccgcctcttcctgtggactttcatcatcttcaccagcgttgggaccctagtcatcttcctggacgccacgtaccacttgccccctccagacccctttccttgaagactggagggttgagacccaggccccctgccagttgaagtgagagtttggtgatactgtcaagccctatccttctctgcctcttaactccttcacgaggaatctgggcctcttatttcgtttctggggactgcattggactgagggctgggtaggcaggtgtcttggacccacctgaaatgcagtatcatctgatttactctttgggatcttgaagaagctcttttgggtatcaacacctaggtcgccagtgaaatagaacacagaacaggaactagattataagccttatgaggtcaagaaatgtgacttggccgggcgcggtggctcacgcctgtaatcccagcactttgggaggccaaggcgggcggatcacctgaggtcgggagtttgagaccagcccgaccaacatggagaaaccctgtctctactaaaaatacaaaattagccaggtgtggtggtacatgcctgtaatcccagctactagggaggctgaggcaggagaatcactcgaacccgggaggcagaggttgcagtgagtcaagatcacgccattgcactccagcctgggcaacaagagcgaaactccatctcaaaaaaaaaaaa

SEQ ID NO: 117522 - DNA, 5867 bp, Homo sapiens
  Payload ID: 2951
  Gene Symbol: CHRNB2
  Gene Name: cholinergic receptor, nicotinic, beta 2 (neuronal)
  Uniprot ID: P17787
  ENST ID: ENST00000368476
  CDS Start-End: 265-1773
ctcctccccctcaccgtcccaattgtattccctggaagagcagccggaaaagcctccgcctgctcataccaggataggcaagaagctggtttctcctcgcagccggctccctgaggcccaggaaccaccgcggcggccggcaccacctggacccagctccaggcgggcgcggcttcagcaccacggacagcgccccacccgcggccctccccccggcggcgcgctccagccggtgtaggcgaggcagcgagctatgcccgcggcatggcccggcgctgcggccccgtggcgctgctccttggcttcggcctcctccggctgtgctcaggggtgtggggtacggatacagaggagcggctggtggagcatctcctggatccttcccgctacaacaagcttatccgcccagccaccaatggctctgagctggtgacagtacagcttatggtgtcactggcccagctcatcagtgtgcatgagcgggagcagatcatgaccaccaatgtctggctgacccaggagtgggaagattatcgcctcacctggaagcctgaagagtttgacaacatgaagaaagttcggctcccttccaaacacatctggctcccagatgtggtcctgtacaacaatgctgacggcatgtacgaggtgtccttctattccaatgccgtggtctcctatgatggcagcatcttctggctgccgcctgccatctacaagagcgcatgcaagattgaagtaaagcacttcccatttgaccagcagaactgcaccatgaagttccgttcgtggacctacgaccgcacagagatcgacttggtgctgaagagtgaggtggccagcctggacgacttcacacctagtggtgagtgggacatcgtggcgctgccgggccggcgcaacgagaaccccgacgactctacgtacgtggacatcacgtatgacttcatcattcgccgcaagccgctcttctacaccatcaacctcatcatcccctgtgtgctcatcacctcgctagccatccttgtcttctacctgccatccgactgtggcgagaagatgacgttgtgcatctcagtgctgctggcgctcacggtcttcctgctgctcatctccaagatcgtgcctcccacctccctcgacgtgccgctcgtcggcaagtacctcatgttcaccatggtgcttgtcaccttctccatcgtcaccagcgtgtgcgtgctcaacgtgcaccaccgctcgcccaccacgcacaccatggcgccctgggtgaaggtcgtcttcctggagaagctgcccgcgctgctcttcatgcagcagccacgccatcattgcgcccgtcagcgcctgcgcctgcggcgacgccagcgtgagcgcgagggcgctggagccctcttcttccgcgaagccccaggggccgactcctgcacgtgcttcgtcaaccgcgcgtcggtgcaggggttggccggggccttcggggctgagcctgcaccagtggcgggccccgggcgctcaggggagccgtgtggctgtggcctccgggaggcggtggacggcgtgcgcttcatcgcagaccacatgcggagcgaggacgatgaccagagcgtgagtgaggactggaagtacgtcgccatggtgatcgaccgcctcttcctctggatctttgtctttgtctgtgtctttggcaccatcggcatgttcctgcagcctctcttccagaactacaccaccaccaccttcctccactcagaccactcagcccccagctccaagtgaggcccttcctcatctccatgctctttcaccctgccaccctctgctgcacagtagtgttgggtggaggatggacgagtgagctaccaggaagaggggcgctgcccccacagatccatccttttgcttcatctggagtccctcctcccccacgcctccatccacacacagcagctccaacctggaggctggaccaactgctttgttttggctgctctccatctcttgtaccagcccaggcaatagtgttgaggaggggagcaaggctgctaagtggaagacagagatggcagagccatccaccctgaggagtgatgggcaaggggccaggaaggggacaggattgtctgctgcctccaagtcatgggagaagaggggtataggacaaggggtggaagggcaggagctcacaccgcaccgggctggcctgacacaatggtagctctgaagggaggggaagagagaggcctgggtgtgacctgacacctgccgctgcttgagtggacagcagctggactgggtgggccccacagtggtcagcgattcctgccaagtagggtttagccgggccccatggtcacagacccctgggggaggcttccagctcagtcccacagccccttgcttctaagggatccagagacctgctccagatcctctttccccactgaagaattctgcaccctctggacttccctcttcttccttcctttctcaggctcaaggtgtggggggcaaggctgagtattaggggagcttctgagttctgaatctttgggtgacctgcttggagtctcaggtccaaatacttgaaatctgtgagaagtccaagttcatgggcttttggaactggaagaactttgtacagccatggattccaacataagccatgttgcagatgaagaaactgacccacacggtgagacaagcacaggtgggtctgactcttcctccctgccctgagatccatctgtcgagtgccctgttttttccccactttgaactgactggttactctaaggaagtgaactgaggatgttagctttaagccaacccagcctctttgtccacagcagagctgaggtgaacagctggaaccctgctacatccgtgctgctccagtctgttctgctcatggctccatccttctggctgtcactcttcctcttccccttcccaaccaaacctgagcagctttgaagcagaacttgggaaggacagggctgctgctgccagcgacacctcagaaagcatagcctcggcttcctgccccatgtgtccctggaagctgtaccctgactctgcttccagaggccagcagatggtgggttacagacgggtcagcctgccaagtgcacctgagggacctgacctgacacaagccattttgtccctagagcccagctgggactcctgcttctctaggcagggcagagggaggagacacagcacaggcacagagcatgggacagggacccccgagtctggattcaagtcctggccctgctagtaactcatgtgagccagcttgagcaagtcccttcatcttgctagagctcagcttccttgcctataaaacgtaggtggcaatgccctcttcctgaggttgctgggaggataaggcagtgcttgtgaaaaagtctagcgctgtacctggcacagagtagatgcttcatgaatgttgagtctgacaggcaactggagctggtgagaatggggtcccctgactgtcatgccagcctccctcccaggcccactcttcccccctcttccctgaggaaaccaagtctcccttatcaggaagagctgggggagctgggaggaacattacaggaacaccagagggagtctagcgggtgggcaggcttctctctgcagccccctcagcagtttcattccattcctgggctgaacccttgccctggccctgcctcccttctgggtcagcacctcctgacacaggtgtgtgctcagggaccccaggctctagtcctgtactggctgtggaagcctatcactgggacaggaagccagtggctgcaggagacaggcctcagcgcatctcgtctgtcaggatgggctcacggacaccttttcttggtagcagggagtgtctctgcactatggaaactttccctcttctagagcggattgggagttgcctgtattatgcctgaaccctccttgaactcatggtcctggggaaggcgtcttggaaccagaaacagcaacaggaaaggagcctccctctgaagggtaggatgccggcctgaggccctccctcttggctctcccagggcctgggctaccccgaggccccagcagctgctgctgtggctgtacttgcttttaatatttcccatacatggctgttgtccaagttaagtcaccaaatggtgctagaggggatggcagagagcagcttgtccagctcctctccatgacccggttaacacacgagtaaacaggcctagagcttgtctgctgtttgacctcttttaagacccggctgtgctgcatctacaaaatgaagatgacagagctagccgaggtcttcagcaaggaagaaaggggtcagtgtatatgaaagggttacctgggcagtgtcattccctccatctctgtacgcagccctttgggaaccatcacaataaggaagaggtgagggcagaggtgaaggatccactgcccaggcaaggtgctaccatgtggtgggagagtgtgaaccctcaagtgcactgggaagctttggggaaccacagtctcttccacccttgggtcgtgtgtcgtcctcttctcttgatgtcagggaagcccctatgcctccttcccgtggtggggctatctctgcagagaatcgggtgcccagcttaatgctgggcaaggactggaggaagctccagatctggaggtggcagagatactggatggaaacctggagcaagggtttgggaggggaagtgaggaaacaggttgagactatctccatcagagatggcaaggccacaggtgatctgagaactatttttgtctgaaaagaaggcatgcacaggctctctgcttttgacaggtggcgttgcagtgggaggaaggcagcttcctggcggggagatagaaatactagaacagctggtaccaagttattgaaaatttaaaagcaaacaagacacagcagcccccaggtggtgtgttctactgaggaaggctacggcagaggaagggcaagaccgtttcccccaatggtcttgaaacggaagaggaaacagggagggctctttggatggtttggggacctggggctgtttgtatcccagtattagctcctgttactaagggtctgctctgcgccaggtcctcagcatgcgttgtctttattccgcgtgacaatcctatgggaaggggcctccacctacgtaacagaaatgcggctcagaaagaccaagtgacagctagtgagtagtgctgggcctgaaccccaaagtccacactcttgctatagccgctgaggcaggcagaagagctccttgggaggaaagtaaggggcattcaaagccttctctgaatcactccccaagccagagtagacctggttccagttgtcccccccttgtttccgggcagagtcaggcaggtgtcataccatccctccccgcccaaccagtgctggccagactcccattcaccgaccttgactagacagcgaacagccaccttttagtattcatcccaacaggtccaggcggtcagtgtgatagccacgcagttcctaagggactgtaggtctaggaatcattaggacactcactcagccaccctcgatgcccccatcttccccacactgcccttggcctccccgctctgcacgcctggagtatttgcactggtctagcctactccaggtcagactcattaggaactcaagattctcgtaaagaaagttgtttccaaagttgtcttgtcactctatttgggggttgggagagagcccgtgggggccagcgttggcgaatacaggaaaaagggagaatgctggagaaactggactcgtgagagcttaaagacatcacaagaatccaaagaaaaagtgagtggtgaca

SEQ ID NO: 117523 - DNA, 2294 bp, Homo sapiens
  Payload ID: 2952
  Gene Symbol: CHRNB3
  Gene Name: cholinergic receptor, nicotinic, beta 3 (neuronal)
  Uniprot ID: Q05901
  ENST ID: ENST00000289957
  CDS Start-End: 129-1505
tgttgctgtcctcttgggttccacttcggattttgaacccctgtattttcttttcaaaacccccttttccagtggaaatgctctgttgttaaaaaggaagaaactgtctttctgaaactgacatcacgatgctcccagattttatgctggttctcatcgtccttggcatcccttcctcagccaccacaggtttcaactcaatcgccgaaaatgaagatgccctcctcagacatttgttccaaggttatcagaaatgggtccgccctgtattacattctaatgacaccataaaagtatattttggattgaaaatatcccagcttgtagatgtggatgaaaagaatcagctgatgacaaccaatgtgtggctcaaacaggaatggacagaccacaagttacgctggaatcctgatgattatggtgggatccattccattaaagttccatcagaatctctgtggcttcctgacatagttctctttgaaaatgctgacggccgcttcgaaggctccctgatgaccaaggtcatcgtgaaatcaaacggaactgttgtctggacccctcccgccagctacaaaagctcctgcaccatggacgtcacgtttttcccgttcgaccgacagaactgctccatgaagtttggatcctggacttatgatggcaccatggttgacctcattttgatcaatgaaaatgtcgacagaaaagacttcttcgataacggagaatgggaaatactgaacgcaaaggggatgaaggggaacagaagggacggcgtgtactcctatccctttatcacgtattccttcgtcctgagacgcctgcctttattctataccctctttctcatcatcccctgcctggggctgtctttcctaacagttcttgtgttctatttaccttcggatgaaggagaaaaactttcattatccacatcggtcttggtttctctgacagttttccttttagtgattgaagaaatcatcccatcgtcttccaaagtcattcctctcattggagagtacctgctgttcatcatgatttttgtgaccctgtccatcattgttaccgtgtttgtcattaacgttcaccacagatcttcttccacgtaccaccccatggccccctgggttaagaggctctttctgcagaaacttccaaaattactttgcatgaaagatcatgtggatcgctactcatccccagagaaagaggagagtcaaccagtagtgaaaggcaaagtcctcgaaaaaaagaaacagaaacagcttagtgatggagaaaaagttctagttgcttttttggaaaaagctgctgattccattagatacatttcgagacatgtgaagaaagaacattttatcagccaggtagtacaagactggaaatttgtagctcaagttcttgaccgaatcttcctgtggctctttctgatagtgtcagtaacaggctcggttctgatttttacccctgctttgaagatgtggctacatagttaccattaggaatttaaaagacataagactaaattacaccttagacctgacatctggctatcacacagacagaatccaaatgcatgtgcttgttctacgaaccccgaatgcgttgtctttgtggaaatggaacatctcctcatgggagaaactctggtaaatgtgctcatttgtggttgccatgagagtgagctgcttttaaagaaagtggagcctcctcagacccctgccttggctttcccagacattcagggagggatcataggtccaggcttgagctcacatgtggccagagtgcacaaaaagctgttgctacttggtggaggaacacctcctagaagcagcaggcctcggtggtgggggaggggggattcacctggaattaaggaagtctcggtgtcgagctatctgtgtgggcagagcctggatctcccaccctgcactggcctccttggtggttttgtctgagctgcaaactggggccgtgttatgcttgttagcaatgggccaggcaaatctcaacaagggtttggggattacactggcaggatagctggcactgcacacttaacaataacacagattccaagttgcctggcctaccgaagcaggtgttattcatggtttattcccagcatgataaggctttcagatggtgaaactggagcccactgtgagctgtgacttcctttaaggtcatgcataccaaaataactcacaatagaaacaaagccctttgctaccagaagtggattcattaatacccattatcttttcctagtaaactagtgtacagaa

SEQ ID NO: 117524 - DNA, 554 bp, Homo sapiens
  Payload ID: 2952
  Gene Symbol: CHRNB3
  Gene Name: cholinergic receptor, nicotinic, beta 3 (neuronal)
  ENST ID: ENST00000534391
  CDS Start-End: 527-554
acactcggcgagaggggttgagattgttttattccactccaggtgttgctgtcctcttgggttccacttcggattttgaacccctgtattttcttttcaaaacccccttttccagtggaaatgctctgttgttaaaaaggaagaaactgtctttctgaaactgacatcacgatgctcccagattttatgctggttctcatcgtccttggcatcccttcctcagacggaaagtgcaccttctgacagtggtaacacaggtggagatgtatgctgtgcgtgaaagagcagagctgcttgctgcccctggatcttggtgaggagcaggattcctgtaccttcacagggagcacagctgcccaccacaggtttcaactcaatcgccgaaaatgaagatgccctcctcagacatttgttccaaggttatcagaaatgggtccgccctgtattacattctaatgacaccataaaagtatattttggattgaaaatatcccagcttgtagatgtggatgaaaagaatcagctgatgacaaccaatgtgtggctcaaacagg

SEQ ID NO: 117525 - DNA, 2623 bp, Homo sapiens
  Payload ID: 2953
  Gene Symbol: CHRNB4
  Gene Name: cholinergic receptor, nicotinic, beta 4 (neuronal)
  Uniprot ID: P30926
  ENST ID: ENST00000261751
  CDS Start-End: 113-1609
ccgccagcaaacctcgggggccaggaccggcgctcactcgaccgcgcggctcacgggtgccctgtgaccccacagcggagctcgcggcggctgccacccggccccgccggccatgaggcgcgcgccttccctggtccttttcttcctggtcgccctttgcgggcgcgggaactgccgcgtggccaatgcggaggaaaagctgatggacgaccttctgaacaaaacccgttacaataacctgatccgcccagccaccagctcctcacagctcatctccatcaagctgcagctctccctggcccagcttatcagcgtgaatgagcgagagcagatcatgaccaccaatgtctggctgaaacaggaatggactgattaccgcctgacctggaacagctcccgctacgagggtgtgaacatcctgaggatccctgcaaagcgcatctggttgcctgacatcgtgctttacaacaacgccgacgggacctatgaggtgtctgtctacaccaacttgatagtccggtccaacggcagcgtcctgtggctgccccctgccatctacaagagcgcctgcaagattgaggtgaagtactttcccttcgaccagcagaactgcaccctcaagttccgctcctggacctatgaccacacggagatagacatggtcctcatgacgcccacagccagcatggatgactttactcccagtggtgagtgggacatagtggccctcccagggagaaggacagtgaacccacaagaccccagctacgtggacgtgacttacgacttcatcatcaagcgcaagcctctgttctacaccatcaacctcatcatcccctgcgtgctcaccaccttgctggccatcctcgtcttctacctgccatccgactgcggcgagaagatgacactgtgcatctcagtgctgctggcactgacattcttcctgctgctcatctccaagatcgtgccacccacctccctcgatgtgcctctcatcggcaagtacctcatgttcaccatggtgctggtcaccttctccatcgtcaccagcgtctgtgtgctcaatgtgcaccaccgctcgcccagcacccacaccatggcaccctgggtcaagcgctgcttcctgcacaagctgcctaccttcctcttcatgaagcgccctggccccgacagcagcccggccagagccttcccgcccagcaagtcatgcgtgaccaagcccgaggccaccgccacctccaccagcccctccaacttctatgggaactccatgtactttgtgaaccccgcctctgcagcttccaagtctccagccggctctaccccggtggctatccccagggatttctggctgcggtcctctgggaggttccgacaggatgtgcaggaggcattagaaggtgtcagcttcatcgcccagcacatgaagaatgacgatgaagaccagagtgtcgttgaggactggaagtacgtggctatggtggtggaccggctgttcctgtgggtgttcatgtttgtgtgcgtcctgggcactgtggggctcttcctaccgcccctcttccagacccatgcagcttctgaggggccctacgctgcccagcgtgactgagggccccctgggttgtggggtgagaggatgtgagtggccgggtgggcactttgctgcttctttctgggttgtggctgatgaggccctaagtaaatatgtgagcattggccatcaaccccatcaaaccagccacagccgtggaacaggcaaggatgggggcctgggctgtcctctctgaatgccttggagggatcccaggaagccccagtaggagggagcttcagacagttcaattctggcctgtcttccttccctgcaccgggcaatggggataaagatgacttcgtagcagcacctactatgcttcaggcatggtgccggcctgcctctccatcaccatctctctccacttccccttgtccagttcctcacacacttctagattcttcccagctcagaggcttggcatttgccatatcatcatctttttttttttcttttaaacggagtcttgctatatcgcccaggctcaagtgattctcctgcctcaacctcccaagtagctgggattacagaaagccgccaccgtgcccagctaatttttgtatttttgttggccaggctgatttcgaactcctgacctcaaatgacccacctgcctcggcctcccaaagtgctaggattacaagtgtgagccactatgcctggccttccctatcttctacctgaaccttcttcctcttcccccagggcttcccaagctctttccacagccacatcagtcagggcatggctccaatccattctttgctccaatgtcacctcctctgagaggccttccctaaccacccaatcattctaaagcagcctccctacagtcacgttaccctgcctccttcctcgagcactcctgtgtacctgtcgctcttatctggtggcatgtatgtcatccacagctcacccactagagtgtgagctccatgagaacagggacctgctccttcacattcgtggtagtatccccagggcctaggacagagcttggcacacagtaggtgctcaataaatgtttgt

SEQ ID NO: 117526 - DNA, 1355 bp, Homo sapiens
  Payload ID: 2953
  Gene Symbol: CHRNB4
  Gene Name: cholinergic receptor, nicotinic, beta 4 (neuronal)
  Uniprot ID: P30926
  ENST ID: ENST00000412074
  CDS Start-End: 113-808
ccgccagcaaacctcgggggccaggaccggcgctcactcgaccgcgcggctcacgggtgccctgtgaccccacagcggagctcgcggcggctgccacccggccccgccggccatgaggcgcgcgccttccctggtccttttcttcctggtcgccctttgcgggcgcgggaactgccgcgtggccaatgcggaggaaaagctgatggacgaccttctgaacaaaacccgttacaataacctgatccgcccagccaccagctcctcacagctcatctccatcaagctgcagctctccctggcccagcttatcagcgtgaatgagcgagagcagatcatgaccaccaatgtctggctgaaacaggaatggactgattaccgcctgacctggaacagctcccgctacgagggtgtgaacatcctgaggatccctgcaaagcgcatctggttgcctgacatcgtgctttacaacaagtcgttgaggactggaagtacgtggctatggtggtggaccggctgttcctgtgggtgttcatgtttgtgtgcgtcctgggcactgtggggctcttcctaccgcccctcttccagacccatgcagcttctgaggggccctacgctgcccagcgtgactgagggccccctgggttgtggggtgagaggatgtgagtggccgggtgggcactttgctgcttctttctgggttgtggctgatgaggccctaagtaaatatgtgagcattggccatcaaccccatcaaaccagccacagccgtggaacaggcaaggatgggggcctgggctgtcctctctgaatgccttggagggatcccaggaagccccagtaggagggagcttcagacagttcaattctggcctgtcttccttccctgcaccgggcaatggggataaagatgacttcgtagcagcacctactatgcttcaggcatggtgccggcctgcctctccatcaccatctctctccacttccccttgtccagttcctcacacacttctagattcttcccagctcagaggcttggcatttgccatatcatcatctttttttttttcttttaaacggagtcttgctatatcgcccaggctcaagtgattctcctgcctcaacctcccaagtagctgggattacagaaagccgccaccgtgcccagctaatttttgtatttttgttggccaggctgatttcgaactcctgacctcaaatgacccacctgcctcggcctcccaaagtgctaggattacaagtgtgagccactatgcctggccttccctatcttctacctgaaccttcttcctcttcccccagggcttcccaagctctttccacagccacatcagtca

SEQ ID NO: 117527 - DNA, 2080 bp, Homo sapiens
  Payload ID: 2953
  Gene Symbol: CHRNB4
  Gene Name: cholinergic receptor, nicotinic, beta 4 (neuronal)
  ENST ID: ENST00000559849
  CDS Start-End: 872-1072
agacctgatgggaaagcagaggactgagccaaggcccaggtgatatagaaataaacaagaggctaggcgtggtggctcacacctgtaatcccagcacttgggaaggccaaggtgttgtgcagctggtggaggaggttgccatttacagtaaaggaaacattggctttttgacatcttatcttctacagcgtttgccaatgagtgctgcaggaattccctgtatatctgggtgctcccaacatccctgttgtgaaacgaaggagagttcatcataaaagtttttagcagcaaatttttttttttgctttgtgttactttattctacaagtgatttttatttacttacttgcacaaatttatggggcatgtgtgaaattttgttacgtgtatataatgcatagtgatcaagtcagtatttaggctgtccatctcatgagtgtagaacatttttgtttaaccctagtcaccctactatgctatcaatcattgaatttattccttttttttttttttttttgagacagagacttactctcttgcccaggctggagtgcagtggtgcagtctcagctcactgcaacctccacctcccgggttcaagcaattctcctgcctcagcctcccaagtagctgggactacagggtctcgctctgttgctcgagctggagtgtggtagcaccatcgtggctcactgcagccttgacctcccctggatcaagcgatcctcctacctcagcctcccaagtggctgggaccaatagatggaaagtcgtggagtcaccaggccggaagtgccgtggaggaaactcactccaatctgctgcatgaagagaggattctctgagactgagcaagctccagatttggcagatgggcggtagtttgctggccccagctccagatcatattgtattatggaactgccgcgtggccaatgcggaggaaaagctgatggacgaccttctgaacaaaacccgttacaataacctgatccgcccagccaccagctcctcacagctcatctccatcaagctgcagctctccctggcccagcttatcagcgtgggttagaactccgtccctggaagaagctctgggggaacattcacaaggggagagtgcagggcgctgtgtccagccaggggaaagagaccaccaagggggctgaccctcctctggccagaatgagcgagagcagatcatgaccaccaatgtctggctgaaacaggaatggactgattaccgcctgacctggaacagctcccgctacgagggtgtgaacatcctgaggatccctgcaaagcgcatctggttgcctgacatcgtgctttacaacaagtgagtggcagggttggtggaggcctggtgacagccaggccagggcagcaggcccagccctaagagtcatccaggcctgagtccaaccctgagccccatctctgctttacccagccttccaggccatcaagctagaagagaaacagagcgccgacgggacctatgaggtgtctgtctacaccaacttgatagtccggtccaacggcagcgtcctgtggctgccccctgccatctacaagagcgcctgcaagattgaggtgaagtactttcccttcgaccagcagaactgcaccctcaagttccgctcctggacctatgaccacacggagatagacatggtcctcatgacgcccacagccagcatggatgactttactcccagtggtgagtgggacatagtggccctcccagggagaaggacagtgaacccacaagaccccagctacgtggacgtgacttacgacttcatcatcaagcgcaagcctctgttctacaccatcaacctcatcatcccctgcgtgctcaccaccttgctggccatcctcgtcttctacctgccatccgactgcggcgagaagatgacactgtgcatctcagtgctgctggcactgacattcttcctgctgctcatctccaagatcgtgccacccacctccctcgatgtgcctctcatcggcaagtacctcatgttcaccatggtgctggtcaccttctccatcgtcaccagcgtctgtgtgctca

SEQ ID NO: 117528 - DNA, 2112 bp, Homo sapiens
  Payload ID: 2954
  Gene Symbol: CHRND
  Gene Name: cholinergic receptor, nicotinic, delta (muscle)
  Uniprot ID: Q07001
  ENST ID: ENST00000258385
  CDS Start-End: 33-1586
gggcagatgcacgtcccagtcagagggatgggatggaggggccagtgctgacactggggctgctggctgccctggcggtgtgtggcagctgggggctgaacgaggaggagcggctgatccggcacctgtttcaagagaagggctacaacaaggagctccggcccgtggcacacaaagaggagagtgtggacgttgccctggccctcacactctccaacctcatctccctgaaagaagttgaggagaccctcactaccaatgtgtggatagagcacggctggacagacaaccggctgaagtggaatgctgaagaatttggaaacatcagtgtcctgcgcctccccccggacatggtgtggctcccagagattgtgctggagaacaacaatgacggctccttccagatctcctactcctgcaacgtgcttgtctaccactacggcttcgtgtactggctgccacctgccatcttccgctcctcctgccccatctctgtcacctatttccccttcgactggcagaactgctccctcaagttcagttccctcaagtatacggccaaagagatcaccctgagcctgaaacaggatgccaaggagaaccgcacctaccccgtggagtggatcatcattgatcctgaaggcttcacagagaacggggagtgggagatagtccaccggccggccagggtcaacgtggaccccagagcccctctggacagccccagccgccaggacatcaccttctacctcatcatccgccgcaagcccctcttctacatcatcaacatcctggtgccctgcgtgctcatctccttcatggtcaacctggtcttctacctaccggctgacagtggtgagaagacatcagtggccatctcggtgctcctggctcagtctgtcttcctgctgctcatctccaagcgtctgcctgccacatccatggccatcccccttatcggcaagttcctgctcttcggcatggtgctggtcaccatggttgtggtgatctgtgtcatcgtgctcaacatccacttccgaacacccagcacccatgtgctgtctgagggggtcaagaagctcttcctggagaccctgccggagctcctgcacatgtcccgcccagcagaggatggacccagccctggggccctggtgcggaggagcagctccctgggatacatctccaaggccgaggagtacttcctgctcaagtcccgcagtgacctcatgttcgagaagcagtcagagcggcatgggctggccaggcgcctcaccactgcacgccggcccccagcaagctctgagcaggcccagcaggaactcttcaatgagctgaagccagctgtggatggggcaaacttcattgttaaccacatgagggaccagaacaattacaatgaggagaaagacagctggaaccgagtggcccgcacagtggaccgcctctgcctgtttgtggtgacgcctgtcatggtggtgggcacagcctggatcttcctgcagggcgtttacaaccagccaccaccccagccttttcctggggacccctactcctacaacgtgcaggacaagcgcttcatctagggtgggcctgttggggagccaggagacagcagggtctgagagaggagccacagtccctaatgacacccactcctagccctgaggctcgtgcccctcagactggggaagagtccaaggaagggagggagcagccactcctcaatgctcaatggctcccctgaaatcaagacaggggccacccgagatggtctgagggtggacatcggctacagtgggtgggcaggacgatttggggggaggcccgaggctggctcaggggccagggaggaggccactcagggtggcctcagggggagagctctgataggggtgagacagatagggccccttctctgcttctcctcccccaaggtgtggggtagagcaggcaggaatctgcgccttcactctctggcccctccagcctccctcttcctacctacccttcaacctcaggcttctgaggcctcacctgggactgaggttgaggacacctccctccctccagaccccagagtatcctttcctagctctttctgccttgacc

SEQ ID NO: 117529 - DNA, 735 bp, Homo sapiens
  Payload ID: 2954
  Gene Symbol: CHRND
  Gene Name: cholinergic receptor, nicotinic, delta (muscle)
  ENST ID: ENST00000412233
  CDS Start-End: 29-544
agatgcacgtcccagtcagagggatgggatggaggggccagtgctgacactggggctgctggctgccctggcggtgtgtggcagctgggggctgaacgaggaggagcggctgatccggcacctgtttcaagagaagggctacaacaaggagctccggcccgtggcacacaaagaggagagtgtggacgttgccctggccctcacactctccaacctcatctccctgaaagaagttgaggagaccctcactaccaatgtgtggatagagcacggctggacagacaaccggctgaagtggaatgctgaagaatttggaaacatcagtgtcctgcgcctccccccggacatggtgtggctcccagagattgtgctggagaacaacaatgacggctccttccagatctcctactcctgcaacgtgcttgtctaccactacggcttcgtgtactggctgccacctgccatcttccgctcctcctgccccatctctgtcacctatttccccttcgactggcagaactgctccctcaagttcaggtggtgagaagacatcagtggccatctcggtgctcctggctcagtctgtcttcctgctgctcatctccaagcgtctgcctgccacatccatggccatcccccttatcggcaagttcctgctcttcggcatggtgctggtcaccatggttgtggtgatctgtgtcatcgtgctcaacatccacttccgaacacccagca

SEQ ID NO: 117530 - DNA, 572 bp, Homo sapiens
  Payload ID: 2954
  Gene Symbol: CHRND
  Gene Name: cholinergic receptor, nicotinic, delta (muscle)
  ENST ID: ENST00000449596
  CDS Start-End: 57-572
attccacagccctgtagacaggaggggcagatgcacgtcccagtcagagggatgggatggaggggccagtgctgacactggggctgctggctgccctggcggtgtgtggcagctgggggctgaacgaggaggagcggctgatccggcacctgtttcaagagaagggctacaacaaggagctccggcccgtggcacacaaagaggagagtgtggacgttgccctggccctcacactctccaacctcatctccctgggctggacagacaaccggctgaagtggaatgctgaagaatttggaaacatcagtgtcctgcgcctccccccggacatggtgtggctcccagagattgtgctggagaacaacaatgacggctccttccagatctcctactcctgcaacgtgcttgtctaccactacggcttcgtgtactggctgccacctgccatcttccgctcctcctgccccatctctgtcacctatttccccttcgactggcagaactgctccctcaagttcagttccctcaagtatacggccaaagagatcaccctgagcctgaaacaggatgcc

SEQ ID NO: 117531 - DNA, 3022 bp, Homo sapiens
  Payload ID: 2954
  Gene Symbol: CHRND
  Gene Name: cholinergic receptor, nicotinic, delta (muscle)
  ENST ID: ENST00000441621
  CDS Start-End: 224-931
tccgagctgcggggagtcccagcctgggatctttgcctcatgtccttgggctcctgccctggctggcccgtcccccaccgccatgaggtgtcagattgtgtttccggctgcctcttcccgttgaccccctcctcccccaacacctgtcccctctcccgcccaccctcattccacagccctgtagacaggaggggcagatgcacgtcccagtcagagggatgggatggaggggccagtgctgacactggggctgctggctgccctggcggtgtgtggcagctgggggctgaacgaggaggagcggctgatccggcacctgtttcaagagaagggctacaacaaggagctccggcccgtggcacacaaagaggagagtgtggacgttgccctggccctcacactctccaacctcatctccctgaaagaagttgaggagaccctcactaccaatgtgtggatagagcacggctggacagacaaccggctgaagtggaatgctgaagaatttggaaacatcagtgtcctgcgcctccccccggacatggtgtggctcccagagattgtgctggagaacaacaatgacggctccttccagatctcctactcctgcaacgtgcttgtctaccactacggcttcgtgtactggctgccacctgccatcttccgctcctcctgccccatctctgtcacctatttccccttcgactggcagaactgctccctcaagttcagagaacggggagtgggagatagtccaccggccggccagggtcaacgtggaccccagagcccctctggacagccccagccgccaggacatcaccttctacctcatcatccgccgcaagcccctcttctacatcatcaacatcctggtgccctgcgtgctcatctccttcatggtcaacctggtcttctacctaccggctgacagtggtgagaagacatcagtggccatctcggtgctcctggctcagtctgtcttcctgctgctcatctccaagcgtctgcctgccacatccatggccatcccccttatcggcaagttcctgctcttcggcatggtgctggtcaccatggttgtggtgatctgtgtcatcgtgctcaacatccacttccgaacacccagcacccatgtgctgtctgagggggtcaagaagctcttcctggagaccctgccggagctcctgcacatgtcccgcccagcagaggatggacccagccctggggccctggtgcggaggagcagctccctgggatacatctccaaggccgaggagtacttcctgctcaagtcccgcagtgacctcatgttcgagaagcagtcagagcggcatgggctggccaggcgcctcaccactgcacgccggcccccagcaagctctgagcaggcccagcaggaactcttcaatgagctgaagccagctgtggatggggcaaacttcattgttaaccacatgagggaccagaacaattacaatgaggagaaagacagctggaaccgagtggcccgcacagtggaccgcctctgcctgtttgtggtgacgcctgtcatggtggtgggcacagcctggatcttcctgcagggcgtttacaaccagccaccaccccagccttttcctggggacccctactcctacaacgtgcaggacaagcgcttcatctagggtgggcctgttggggagccaggagacagcagggtctgagagaggagccacagtccctaatgacacccactcctagccctgaggctcgtgcccctcagactggggaagagtccaaggaagggagggagcagccactcctcaatgctcaatggctcccctgaaatcaagacaggggccacccgagatggtctgagggtggacatcggctacagtgggtgggcaggacgatttggggggaggcccgaggctggctcaggggccagggaggaggccactcagggtggcctcagggggagagctctgataggggtgagacagatagggccccttctctgcttctcctcccccaaggtgtggggtagagcaggcaggaatctgcgccttcactctctggcccctccagcctccctcttcctacctacccttcaacctcaggcttctgaggcctcacctgggactgaggttgaggacacctccctccctccagaccccagagtatcctttcctagctctttctgccttgacctctctgcctaggtccctttgggaagttgaggactggagtggaaaggtcaggatcgacatccacaaagacttggggtcagcctgaggttgcacacacaatcctagaggaccagaacgcagcacctctccccaaagggtccctgccccccagcacctactcctctccaaattagggttgtcatgcattatttggggcatacatattctaaaaaatcattcgttgtttctctgaaatttgtcccctatttttatttgctaaatctagcaaccctatcccaaaggcagcctccactcaatcttatcctgagggccaaaggccaaggctgcaggaattgggagacaagggtctgtttgtatggtggtccacctccaagatggccccagtgatgcccagtattcacacccttgtgcagtcccctcactctgtaccagggtgggtctgggtaaccaatagaatgaggcagaagtgatggtacctcacttcccagatttggttaggaaagacactatggcctctttcttgctcattagccctcattctcacatcagttggatctctcactttggggaagccagctggcatgttaaggagccctatggagaggcccacatggcaaggaactaaggcctcctgccaacagccacgtgagtgaatgtggaagtggatcctctgccccagtagggccttcggatgagatcacagcccagtagacatcttatgtgcagccccatgaaagtccctaagccagaaccaccagctaagtgactcctggattcctgacccccagaaactgtgtgagataataaatgtgtgttgttttaagtgacaa

SEQ ID NO: 117532 - DNA, 1580 bp, Homo sapiens
  Payload ID: 2954
  Gene Symbol: CHRND
  Gene Name: cholinergic receptor, nicotinic, delta (muscle)
  ENST ID: ENST00000446616
  CDS Start-End: 26-352
tgcacgtcccagtcagagggatgggatggaggggccagtgctgacactggggctgctggctgccctggcggtgtgtggcagctgggggctgaacgaggaggagcggctgatccggcacctgtttcaagagaagggctacaacaaggagctccggcccgtggcacacaaagaggagagtgtggacgttgccctggccctcacactctccaacctcatctccctgaaagaagttgaggagaccctcactaccaatgtgtggatagagcacggctggacagacaaccggctgaagtggaatgctgaagaatttggaaacatcagtgtcctgcgcctccccccggacatgcaatgacggctccttccagatctcctactcctgcaacgtgcttgtctaccactacggcttcgtgtactggctgccacctgccatcttccgctcctcctgccccatctctgtcacctatttccccttcgactggcagaactgctccctcaagttcagttccctcaagtatacggccaaagagatcaccctgagcctgaaacaggatgccaaggagaaccgcacctaccccgtggagtggatcatcattgatcctgaaggcttcacagagaacggggagtgggagatagtccaccggccggccagggtcaacgtggaccccagagcccctctggacagccccagccgccaggacatcaccttctacctcatcatccgccgcaagcccctcttctacatcatcaacatcctggtgccctgcgtgctcatctccttcatggtcaacctggtcttctacctaccggctgacagtggtgagaagacatcagtggccatctcggtgctcctggctcagtctgtcttcctgctgctcatctccaagcgtctgcctgccacatccatggccatcccccttatcggcaagttcctgctcttcggcatggtgctggtcaccatggttgtggtgatctgtgtcatcgtgctcaacatccacttccgaacacccagcacccatgtgctgtctgagggggtcaagaagctcttcctggagaccctgccggagctcctgcacatgtcccgcccagcagaggatggacccagccctggggccctggtgcggaggagcagctccctgggatacatctccaaggccgaggagtacttcctgctcaagtcccgcagtgacctcatgttcgagaagcagtcagagcggcatgggctggccaggcgcctcaccactgcacgccggcccccagcaagctctgagcaggcccagcaggaactcttcaatgagctgaagccagctgtggatggggcaaacttcattgttaaccacatgagggaccagaacaattacaatgaggagaaagacagctggaaccgagtggcccgcacagtggaccgcctctgcctgtttgtggtgacgcctgtcatggtggtgggcacagcctggatcttcctgcagggcgtttacaaccagccaccaccccagccttttcctggggacccctactcctacaacgtgcaggacaagcgcttcatctagggtgggcctgttggggagccaggagacagcagg

SEQ ID NO: 117533 - DNA, 2918 bp, Homo sapiens
  Payload ID: 2954
  Gene Symbol: CHRND
  Gene Name: cholinergic receptor, nicotinic, delta (muscle)
  Uniprot ID: Q07001
  ENST ID: ENST00000543200
  CDS Start-End: 57-1565
attccacagccctgtagacaggaggggcagatgcacgtcccagtcagagggatgggatggaggggccagtgctgacactggggctgctggctgccctggcggtgtgtggcagctgggggctgaacgaggaggagcggctgatccggcacctgtttcaagagaagggctacaacaaggagctccggcccgtggcacacaaagaggagagtgtggacgttgccctggccctcacactctccaacctcatctccctgggctggacagacaaccggctgaagtggaatgctgaagaatttggaaacatcagtgtcctgcgcctccccccggacatggtgtggctcccagagattgtgctggagaacaacaatgacggctccttccagatctcctactcctgcaacgtgcttgtctaccactacggcttcgtgtactggctgccacctgccatcttccgctcctcctgccccatctctgtcacctatttccccttcgactggcagaactgctccctcaagttcagttccctcaagtatacggccaaagagatcaccctgagcctgaaacaggatgccaaggagaaccgcacctaccccgtggagtggatcatcattgatcctgaaggcttcacagagaacggggagtgggagatagtccaccggccggccagggtcaacgtggaccccagagcccctctggacagccccagccgccaggacatcaccttctacctcatcatccgccgcaagcccctcttctacatcatcaacatcctggtgccctgcgtgctcatctccttcatggtcaacctggtcttctacctaccggctgacagtggtgagaagacatcagtggccatctcggtgctcctggctcagtctgtcttcctgctgctcatctccaagcgtctgcctgccacatccatggccatcccccttatcggcaagttcctgctcttcggcatggtgctggtcaccatggttgtggtgatctgtgtcatcgtgctcaacatccacttccgaacacccagcacccatgtgctgtctgagggggtcaagaagctcttcctggagaccctgccggagctcctgcacatgtcccgcccagcagaggatggacccagccctggggccctggtgcggaggagcagctccctgggatacatctccaaggccgaggagtacttcctgctcaagtcccgcagtgacctcatgttcgagaagcagtcagagcggcatgggctggccaggcgcctcaccactgcacgccggcccccagcaagctctgagcaggcccagcaggaactcttcaatgagctgaagccagctgtggatggggcaaacttcattgttaaccacatgagggaccagaacaattacaatgaggagaaagacagctggaaccgagtggcccgcacagtggaccgcctctgcctgtttgtggtgacgcctgtcatggtggtgggcacagcctggatcttcctgcagggcgtttacaaccagccaccaccccagccttttcctggggacccctactcctacaacgtgcaggacaagcgcttcatctagggtgggcctgttggggagccaggagacagcagggtctgagagaggagccacagtccctaatgacacccactcctagccctgaggctcgtgcccctcagactggggaagagtccaaggaagggagggagcagccactcctcaatgctcaatggctcccctgaaatcaagacaggggccacccgagatggtctgagggtggacatcggctacagtgggtgggcaggacgatttggggggaggcccgaggctggctcaggggccagggaggaggccactcagggtggcctcagggggagagctctgataggggtgagacagatagggccccttctctgcttctcctcccccaaggtgtggggtagagcaggcaggaatctgcgccttcactctctggcccctccagcctccctcttcctacctacccttcaacctcaggcttctgaggcctcacctgggactgaggttgaggacacctccctccctccagaccccagagtatcctttcctagctctttctgccttgacctctctgcctaggtccctttgggaagttgaggactggagtggaaaggtcaggatcgacatccacaaagacttggggtcagcctgaggttgcacacacaatcctagaggaccagaacgcagcacctctccccaaagggtccctgccccccagcacctactcctctccaaattagggttgtcatgcattatttggggcatacatattctaaaaaatcattcgttgtttctctgaaatttgtcccctatttttatttgctaaatctagcaaccctatcccaaaggcagcctccactcaatcttatcctgagggccaaaggccaaggctgcaggaattgggagacaagggtctgtttgtatggtggtccacctccaagatggccccagtgatgcccagtattcacacccttgtgcagtcccctcactctgtaccagggtgggtctgggtaaccaatagaatgaggcagaagtgatggtacctcacttcccagatttggttaggaaagacactatggcctctttcttgctcattagccctcattctcacatcagttggatctctcactttggggaagccagctggcatgttaaggagccctatggagaggcccacatggcaaggaactaaggcctcctgccaacagccacgtgagtgaatgtggaagtggatcctctgccccagtagggccttcggatgagatcacagcccagtagacatcttatgtgcagccccatgaaagtccctaagccagaaccaccagctaagtgactcctggattcctgacccccagaaactgtgtgagataataaatgtgtgttgttttaagtgac

SEQ ID NO: 117534 - DNA, 2455 bp, Homo sapiens
  Payload ID: 2955
  Gene Symbol: CHRNE
  Gene Name: cholinergic receptor, nicotinic, epsilon (muscle)
  Uniprot ID: Q04844
  ENST ID: ENST00000293780
  CDS Start-End: 12-1493
cacgcagcaggatggcaagggctccgcttggggtcctgctcctcttggggcttctcggcaggggtgtggggaagaacgaggaactgcgtctttatcaccatctcttcaacaactatgacccaggaagccggccagtgcgggagcctgaggatactgtcaccatcagcctcaaggtcaccctgacgaatctcatctcactgaatgaaaaagaggagactctcaccactagcgtctggattggaatcgattggcaggattaccgactcaactacagcaaggacgactttgggggtatagaaaccctgcgagtcccttcagaactcgtgtggctgccagagattgtgctggaaaacaatattgatggccagttcggagtggcctacgacgccaacgtgctcgtctacgagggcggctccgtgacgtggctgcctccggccatctaccgcagcgtctgcgcagtggaggtcacctacttccccttcgattggcagaactgttcgcttattttccgctctcagacgtacaatgccgaagaggtggagttcacttttgccgtagacaacgacggcaagaccatcaacaagatcgacatcgacacagaggcctatactgagaacggcgagtgggccatcgacttctgcccgggggtgatccgccgccaccacggtggcgccaccgacggcccaggggagactgacgtcatctactcgctcatcatccgccggaagccgctcttctacgtcattaacatcatcgtgccctgtgtgctcatctcgggcctggtgctgctcgcctacttcctgccggcgcaggccggcggccagaaatgcacggtctccatcaacgtcctgctcgcccagaccgtcttcttgttcctcattgcccagaaaatcccagagacttctctgagcgtgccgctcctgggcaggttccttattttcgtcatggtggtcgccacgctcattgtcatgaattgcgtcatcgtgctcaacgtgtcccagcggacgcccaccacccacgccatgtccccgcggctgcgccacgttctcctggagctgctgccgcgcctcctgggctccccgccgccgcccgaggccccccgggccgcctcgcccccaaggcgggcgtcgtcggtgggcttattgctccgcgcggaggagctgatactgaaaaagccacggagcgagctcgtgtttgaggggcagaggcaccggcaggggacctggacggctgccttctgccagagcctgggcgccgccgcccccgaggtccgctgctgtgtggatgccgtgaacttcgtggccgagagcacgagagatcaggaggccaccggcgaggaagtgtccgactgggtgcgcatggggaatgcccttgacaacatctgcttctgggccgctctggtgctcttcagcgtgggctccagcctcatcttcctcggggcctacttcaaccgagtgcctgatctcccctacgcgccgtgtatccagccttagctcgcaccgacttcaatttcccacccatctccagtaggaaattgattttgaaaaagtaggctgccgccaccacggcattatgatcccttccccctgctgatcaatctgcagtttgtgaacttcacaagaatggtgtgtgcccgttccctggcgtgtgtaggcctggccgcagtccaggggtcagcaggaggaaagggttcacataggctctcaggtgccagtcttccagaaagcaaggactgcccttcattcagccttgctgacctcccagcctttctaaggctcagccccacgggactctggtggctgccagcttgtgagctatctatctatattcatttcatagccaaacaggagacccctttgcaggacttgcacacagggaggctgtagccaggaaaccctcttcttccctggtctggctctgctggagcgggtgggaaccaaacaccttcagtgctggtggccctcaggcccacaggtttaaggctgaggctgccctgacccttccacagtcatttcttctaggttttcttggcccagcactgcccatcccaccccatgaggctcactcattgcagatcccagcccaccctgcccctttcttccccaccctggaggctctctctgcctagtctacagtactgacagaaagcaaggacatgcggcctgcatggtgggagctggttgaattgtctttattaacaaacaggatatccaaggccactacattgaggaggggtggggggggagggagaagggttacttgctgctcacactatatacagatgcaagcaaggggcgtggagagtgagggctccctgctccctccctccaccggggaagggcatgggctagaagaggagaggggggtcgggaatggggggaatgttttggctggcggggtcccccctccattccctggagtttgggggaaggggaatcattaaagtgctttcaga

SEQ ID NO: 117535 - DNA, 1398 bp, Homo sapiens
  Payload ID: 2956
  Gene Symbol: CHRNG
  Gene Name: cholinergic receptor, nicotinic, gamma (muscle)
  Uniprot ID: P07510
  ENST ID: ENST00000389492
  CDS Start-End: 1-1398
atgcatgggggccaggggccgctgctcctcctgctgctgctggctgtctgcctgggggcccagggccggaaccaggaggagcgcctgctcgcagacctgatgcaaaactacgaccccaacctgcggcccgcggaacgagactcggatgtggtcaatgtcagcctgaagctaaccctcaccaacctcatctccctgaacgagcgagaggaagccctcaccaccaatgtctggatagagatgcagtggtgcgactatcgcctgcgctgggatccgcgagactacgaaggcctgtgggtgctgagggtgccgtccaccatggtgtggcggccggatatcgtgctggagaacaagtcccagacttacagcaccaatgagattgatctgcagctgagtcaggaagatggccagaccatcgagtggattttcattgaccctgaggccttcacagagaatggggagtgggccatccagcaccgaccagccaagatgctcctggacccagcggcgccagcccaggaagcaggccaccagaaggtggtgttctacctgctcatccagcgcaagcccctcttctacgtcatcaacatcatcgccccctgtgtgctcatctcctctgtcgccatcctcatccacttccttcctgccaaggctgggggccagaagtgtaccgtcgccatcaacgtgctcctggcccagactgtcttcctcttccttgtggccaagaaggtgcctgaaacctcccaggcggtgccactcatcagcaagtacctgaccttcctcctggtggtgaccatcctcattgtcgtgaatgctgtggttgtgctcaatgtctccttgcggtctccacacacacactccatggcccgaggggtccgcaaggtgttcctgaggctcttgccccagctgctgaggatgcacgttcgcccgctggccccggcagctgtgcaggacacccagtcccggctacagaatggctcctcgggatggtcgatcacaactggggaggaggtggccctctgcctgcctcgcagtgaactcctcttccagcagtggcagcggcaagggctggtggcggcagcgctggagaagctagagaaaggcccggagttagggctgagccagttctgtggcagcctgaagcaggctgccccagccatccaggcctgtgtggaagcctgcaacctcattgcctgtgcccggcaccagcagagtcactttgacaatgggaatgaggagtggttcctggtgggccgagtgctggaccgcgtctgcttcctggccatgctctcgctcttcatctgtggcacagctggcatcttcctcatggcccactacaaccgggtgccggccctgccattccctggagatccacgcccctacctgccctcaccagactga

SEQ ID NO: 117536 - DNA, 2262 bp, Homo sapiens
  Payload ID: 2956
  Gene Symbol: CHRNG
  Gene Name: cholinergic receptor, nicotinic, gamma (muscle)
  Uniprot ID: P07510
  ENST ID: ENST00000389494
  CDS Start-End: 22-1575
actgcagagagctgaggcaccatgcatgggggccaggggccgctgctcctcctgctgctgctggctgtctgcctgggggcccagggccggaaccaggaggagcgcctgctcgcagacctgatgcaaaactacgaccccaacctgcggcccgcggaacgagactcggatgtggtcaatgtcagcctgaagctaaccctcaccaacctcatctccctgaacgagcgagaggaagccctcaccaccaatgtctggatagagatgcagtggtgcgactatcgcctgcgctgggatccgcgagactacgaaggcctgtgggtgctgagggtgccgtccaccatggtgtggcggccggatatcgtgctggagaacaacgtggacggtgtcttcgaggtggccctctactgcaatgtgctcgtgtcccctgacggctgtatctactggctgccgcctgccatcttccgttccgcctgctctatctcagtcacctacttccccttcgactggcagaactgctcccttatcttccagtcccagacttacagcaccaatgagattgatctgcagctgagtcaggaagatggccagaccatcgagtggattttcattgaccctgaggccttcacagagaatggggagtgggccatccagcaccgaccagccaagatgctcctggacccagcggcgccagcccaggaagcaggccaccagaaggtggtgttctacctgctcatccagcgcaagcccctcttctacgtcatcaacatcatcgccccctgtgtgctcatctcctctgtcgccatcctcatccacttccttcctgccaaggctgggggccagaagtgtaccgtcgccatcaacgtgctcctggcccagactgtcttcctcttccttgtggccaagaaggtgcctgaaacctcccaggcggtgccactcatcagcaagtacctgaccttcctcctggtggtgaccatcctcattgtcgtgaatgctgtggttgtgctcaatgtctccttgcggtctccacacacacactccatggcccgaggggtccgcaaggtgttcctgaggctcttgccccagctgctgaggatgcacgttcgcccgctggccccggcagctgtgcaggacacccagtcccggctacagaatggctcctcgggatggtcgatcacaactggggaggaggtggccctctgcctgcctcgcagtgaactcctcttccagcagtggcagcggcaagggctggtggcggcagcgctggagaagctagagaaaggcccggagttagggctgagccagttctgtggcagcctgaagcaggctgccccagccatccaggcctgtgtggaagcctgcaacctcattgcctgtgcccggcaccagcagagtcactttgacaatgggaatgaggagtggttcctggtgggccgagtgctggaccgcgtctgcttcctggccatgctctcgctcttcatctgtggcacagctggcatcttcctcatggcccactacaaccgggtgccggccctgccattccctggagatccacgcccctacctgccctcaccagactgagccaaccaaccactgtggggcatgtgggagtcacacacgtgggtcacactgagtcttatcagccacgttctcctactgaggtcctaagtgtgctctttgggaagtgcccttcaggactgtgtgagccaaacagccctgagaaaagctggggaaacagtctgagctggagtccgagagtggttgggggtgggccgtggctagtgtcctgctgcagtcagcacacacgtgggattggctagctcatcctggcaccagccacccctccactcagtgcactcccctcacttaggcaaagcattattcattcccatcagtctgaagcccgaaggactgttttgtataataccttcggacttgggactggctccccttttacaagttctccctgaaagagggcagtcacaagaggtgtgaagagtagcagccgatgctctctccaaagcagggcagcagcccataccagctggcatctcccccccgtgccttctgggtacaataagcacccaattctcaacagccccagtggcctttccattcatgtgcatttttctgccactgaccacaagacgatttcctgagttttgtaatcctcttttttttttttttttttttagtttttgatgtgttgttgttgttttgtttagttttgagatagagcctcactcttgtcatgcaagttggagtgga

SEQ ID NO: 117537 - DNA, 1739 bp, Homo sapiens
  Payload ID: 2957
  Gene Symbol: CHAD
  Gene Name: chondroadherin
  Uniprot ID: O15335
  ENST ID: ENST00000258969
  CDS Start-End: 94-1173
aaagagggcggcagacccgagcgcctaggactcgccgctgcccgcgccccgccgccgctgctgcccccagccccggccccaggcgtcccagccatggtccgcccaatgctcttgctcagcctcggcctcctggctggtctgctgccggcgctggccgcctgcccccagaactgccactgccacagcgacctgcagcacgtcatctgcgacaaggtggggctgcagaagatccccaaggtgtcagagaagaccaagctgctcaacctacagcgcaacaacttcccggtgctggctgccaattcgttccgggccatgccgaacctcgtgtcattgcacctgcagcactgccagatccgcgaggtggccgccggtgccttccgcggcctcaagcaacttatctacttgtacctgtcccataacgacatccgcgtgctgcgcgcaggtgccttcgacgacctgaccgagctgacctacctctacctggaccacaacaaggtcactgagctgccccgggggttgctctccccgctggtcaacctcttcatcttgcagctcaacaacaacaagatccgtgagctgcgcgcaggcgccttccagggagccaaggacctgcgctggctctacctgtcggaaaacgcgttgagctccctgcagcccggggccctggacgacgtggagaacctcgccaaattccacgtggacaggaaccagctgtccagctacccctcagctgccctgagcaagctacgggtggtggaggagctgaagctgtcccacaaccccctgaaaagcatcccggacaatgccttccagtcctttggcagatacctggagaccctctggctggacaacaccaacctggagaagttctcagatggtgccttcctgggtgtaaccacgctgaaacacgtccatttggagaacaaccgcttgaaccagctaccctccaacttccccttcgacagcctggagaccctcgcccttaccaataacccctggaagtgtacctgccagctccggggccttcggcggtggctggaagccaaggcctcccgcccagatgccacctgtgcctcacctgccaagttcaagggccagcacatccgtgacacggacgccttccgcagctgcaagttccccaccaagaggtccaagaaagctggccgccattaaacaggtgggggccaggttctgacccagccagtcctggtgactggcctctgccttccaccggagagactactgaccttctcacctccacccataccttctccccacagcctctgctgatgcacagagctgcctacacctagacacgtcctggcagggggcctcgggcactccactaccaacccagctccacccagcagtgtcctggggagaaggaaggctgagcctctccccagccttcatgccttccccaccctccagctcctcttggagaagctgttgctgagaccccccccccaagtcaatcagaaccacaacaggttggtcatcaggatggccaccctcccaggatcatccttcctctgttcctctttccctgccacgtggaaacaatcatcagatccttgccccaccccttgcttccagaaagggttttaaagcccatgccccaactctgccagcccccacctgccaggacgttctagcaggacatcggtgctttgctgtccatcttcccatgctgcaatttcttcctgagatttctataaatataaatgtatgtatgtatt

SEQ ID NO: 117538 - DNA, 1789 bp, Homo sapiens
  Payload ID: 2957
  Gene Symbol: CHAD
  Gene Name: chondroadherin
  Uniprot ID: O15335
  ENST ID: ENST00000508540
  CDS Start-End: 154-1233
ggcctcgatgctccacgtaggagctggctcggctgccggctgcggtcagggccaccgtataaagagggcggcagacccgagcgcctaggactcgccgctgcccgcgccccgccgccgctgctgcccccagccccggccccaggcgtcccagccatggtccgcccaatgctcttgctcagcctcggcctcctggctggtctgctgccggcgctggccgcctgcccccagaactgccactgccacagcgacctgcagcacgtcatctgcgacaaggtggggctgcagaagatccccaaggtgtcagagaagaccaagctgctcaacctacagcgcaacaacttcccggtgctggctgccaattcgttccgggccatgccgaacctcgtgtcattgcacctgcagcactgccagatccgcgaggtggccgccggtgccttccgcggcctcaagcaacttatctacttgtacctgtcccataacgacatccgcgtgctgcgcgcaggtgccttcgacgacctgaccgagctgacctacctctacctggaccacaacaaggtcactgagctgccccgggggttgctctccccgctggtcaacctcttcatcttgcagctcaacaacaacaagatccgtgagctgcgcgcaggcgccttccagggagccaaggacctgcgctggctctacctgtcggaaaacgcgttgagctccctgcagcccggggccctggacgacgtggagaacctcgccaaattccacgtggacaggaaccagctgtccagctacccctcagctgccctgagcaagctacgggtggtggaggagctgaagctgtcccacaaccccctgaaaagcatcccggacaatgccttccagtcctttggcagatacctggagaccctctggctggacaacaccaacctggagaagttctcagatggtgccttcctgggtgtaaccacgctgaaacacgtccatttggagaacaaccgcttgaaccagctaccctccaacttccccttcgacagcctggagaccctcgcccttaccaataacccctggaagtgtacctgccagctccggggccttcggcggtggctggaagccaaggcctcccgcccagatgccacctgtgcctcacctgccaagttcaagggccagcacatccgtgacacggacgccttccgcagctgcaagttccccaccaagaggtccaagaaagctggccgccattaaacaggttctgacccagccagtcctggtgactggcctctgccttccaccggagagactactgaccttctcacctccacccataccttctccccacagcctctgctgatgcacagagctgcctacacctagacacgtcctggcagggggcctcgggcactccactaccaacccagctccacccagcagtgtcctggggagaaggaaggctgagcctctccccagccttcatgccttccccaccctccagctcctcttggagaagctgttgctgagaccccccccccaagtcaatcagaaccacaacaggttggtcatcaggatggccaccctcccaggatcatccttcctctgttcctctttccctgccacgtggaaacaatcatcagatccttgccccaccccttgcttccagaaagggttttaaagcccatgccccaactctgccagcccccacctgccaggacgttctagcaggacatcggtgctttgctgtccatcttcccatgctgcaatttcttcctgagatttctataaatataaatgtatgtatgtatta

SEQ ID NO: 117539 - DNA, 594 bp, Homo sapiens
  Payload ID: 2957
  Gene Symbol: CHAD
  Gene Name: chondroadherin
  ENST ID: ENST00000506187
  CDS Start-End: 1-128
aggcctcccgcccagatgccacctgtgcctcacctgccaagttcaagggccagcacatccgtgacacggacgccttccgcagctgcaagttccccaccaagaggtccaagaaagctggccgccattaaacagcctctgctgatgcacagagctgcctacacctagacacgtcctggcagggggcctcgggcactccactaccaacccagctccacccagcagtgtcctggggagaaggaaggctgagcctctccccagccttcatgccttccccaccctccagctcctcttggagaagctgttgctgagaccccccccccaagtcaatcagaaccacaacaggttggtcatcaggatggccaccctcccaggatcatccttcctctgttcctctttccctgccacgtggaaacaatcatcagatccttgccccaccccttgcttccagaaagggttttaaagcccatgccccaactctgccagcccccacctgccaggacgttctagcaggacatcggtgctttgctgtccatcttcccatgctgcaatttcttcctgagatttctataaatataaatgtatgtatgtattata

SEQ ID NO: 117540 - DNA, 2533 bp, Homo sapiens
  Payload ID: 2958
  Gene Symbol: CHADL
  Gene Name: chondroadherin-like
  Uniprot ID: Q6NUI6
  ENST ID: ENST00000216241
  CDS Start-End: 54-2342
gacagcctgtccctgcgctgcgcctccaggctggaccagcagttccaggcggcatggaggggccccggagctccacccatgtccccttggtgctgccgcttcttgtacttctgctgctggccccggctaggcaggccgccgcccagcgctgcccacaggcctgcatctgtgacaactccaggcgacacgttgcctgccggtaccagaacctcactgaggtgccagacgccatccctgagctgacccagcggctggacctgcagggcaatttgctgaaggtgatccccgcagccgccttccagggcgtgcctcacctcacacacctggacctgcgccactgcgaggtggagctggtggccgagggcgccttccgtggcctgggccgcctgctcctgctcaacctggcctccaaccacctgcgtgagctgccccaggaggcgctggacgggctgggctcgttgcggcggctggagctggaggggaacgcactggaggagctgcggccggggacgttcggggcactgggtgcgctggccacgctaaacctggcccacaacgccctggtttacctgcccgccatggccttccaggggctactgcgcgtccgctggctgcggctgtcgcacaacgcgctcagcgtgctggcccccgaggccctggctggcctgcccgccctgagacggctcagcctacaccacaacgagctccaggctctgcccgggcctgtcttgtcccaggcccgcggcctggcccgtctggagctgggccacaacccgctcacctacgcgggcgaggaggacgggctggcgctgcccggcctgcgggagctgctgctggacggcggggccctgcaggccctgggtcccagggccttcgcacactgtccgcgcctgcacaccctcgacctccgcgggaaccagctagacaccctgcccccgctgcagggcccgggccagctgcgccggctgcggctgcaggggaatccgctgtggtgcggctgccaggcgcggcccctactcgagtggctggcgcgggcgcgcgtgcgctcggacggcgcgtgccaggggccgcggcgcctgcggggcgaggctctggacgccctgcggccctgggacctgcgctgccctggggacgcggcgcaggaagaggaagagctggaagagcgggctgtggccgggccccgcgcccctccgcgcggccctccgcgcggccccggggaggagcgggcagtcgcgccttgccctcgcgcctgcgtgtgcgtccccgagtcccggcacagcagctgcgagggctgcggcctgcaggcggtgccccgcggcttccccagcgacacccagctcctggacctgaggcggaaccacttcccctcggtgccccgagcggccttccccggcctgggccacctggtgtcgctgcacctgcagcactgcggcatcgcggagctggaagcgggcgccctggccgggctgggccgcctgatctacctgtacctctccgacaaccagctcgcaggcctcagcgctgctgcccttgaaggggctccccgcctcggctacctgtacctagaacgcaaccgtttcctgcaggtgccaggggctgccctgcgcgccctgcccagcctcttctccctgcacctgcaggacaacgctgtggaccgcctggcacctggggacctggggagaacacgggccttgcgctgggtctacctgagtggaaaccgcatcaccgaagtgtcccttggggcgctgggcccagctcgggagctggagaagctgcacctggacaggaatcagctgcgagaggtgcccactggggccttggaggggctgcctgccctcctggagctgcagctctcgggcaacccactcagggccttgcgtgacggagccttccagcctgtgggcaggtcgctgcagcacctcttcctgaacagcagtggcctggagcagatttgtcctggggccttttcaggcctggggcccgggctccagagcctgcacctgcagaagaaccagcttcgggccctgcctgccctgcccagtctcagccagctggagctcatcgacctcagcagcaatcccttccactgtgactgccagctgcttccgctgcacaggtggcttactgggctgaacctgcgggtgggggccacctgcgccacccctcccaatgcccgtggccagagggtgaaggctgcagctgctgtctttgaagactgcccgggctgggctgccagaaaggccaagcggacaccagcctccaggcccagtgccaggagaacccccatcaaaggaagacagtgtggagcagataaggtggggaaggagaagggtcgtctctgagcacggagcaggctggtcctgccttgacccagcccggtggctcttactctcgccaggaacaggctccgacgagatcttcctggcaccctgagggtcgtcctccagcaggggcttcttggacccctgtctgaggggtcgcgtcttagtgggcgggattcttttccctttgaataaaaatggattcaaaccca

SEQ ID NO: 117541 - DNA, 2248 bp, Homo sapiens
  Payload ID: 2958
  Gene Symbol: CHADL
  Gene Name: chondroadherin-like
  ENST ID: ENST00000417999
  CDS Start-End: 1-2054
ggccccggagctccacccatgtccccttggtgctgccgcttcttgtacttctgctgctggccccggctaggcaggccgccgcccagcgctgcccacaggcctgcatctgtgacaactccaggcgacacgttgcctgccggtaccagaacctcactgaggtgccagacgccatccctgagctgacccagcggctggacctgcagggcaatttgctgaaggtgatccccgcagccgccttccagggcgtgcctcacctcacacacctggacctgcgccactgcgaggtggagctggtggccgagggcgccttccgtggcctgggccgcctgctcctgctcaacctggcctccaaccacctgcgtgagctgccccaggaggcgctggacgggctgggctcgttgcggcggctggagctggaggggaacgcactggaggagctgcggccggggacgttcggggcactgggtgcgctggccacgctaaacctggcccacaacgccctggtttacctgcccgccatggccttccaggggctactgcgcgtccgctggctgcggctgtcgcacaacgcgctcagcgtgctggcccccgaggccctggctggcctgcccgccctgagacggctcagcctacaccacaacgagctccaggctctgcccgggcctgtcttgtcccaggcccgcggcctggcccgtctggagctgggccacaacccgctcacctacgcgggcgaggaggacgggctggcgctgcccggcctgcgggagctgctgctggacggcggggccctgcaggccctgggtcccagggccttcgcacactgtccgcgcctgcacaccctcgacctccgcgggaaccagctagacaccctgcccccgctgcagggcccgggccagctgcgccggctgcggctgcaggggaatccgctgtggtgcggctgccaggcgcggcccctactcgagtggctggcgcgggcgcgcgtgcgctcggacggcgcgtgccaggggccgcggcgcctgcggggcgaggctctggacgccctgcggccctgggacctgcgctgccctggggacgcggcgcaggaagaggaagagctggaagagcgggctgtggccgggccccgcgcccctccgcgcggccctccgcgcggccccggggaggagcgggcagtcgcgccttgccctcgcgcctgcgtgtgcgtccccgagtcccggcacagcagctgcgagggctgcggcctgcaggcggtgccccgcggcttccccagcgacacccagctcctggacctgaggcggaaccacttcccctcggtgccccgagcggccttccccggcctgggccacctggtgtcgctgcacctgcagcactgcggcatcgcggagctggaagcgggcgccctggccgggctgggccgcctgatctacctgtacctctccgacaaccagctcgcaggcctcagcgctgctgcccttgaaggggctccccgcctcggctacctgtacctagaacgcaaccgtttcctgcaggtgccaggggctgccctgcgcgccctgcccagcctcttctccctgcacctgcaggacaacgctgtggaccgcctggcacctggggacctggggagaacacgggccttgcgctgggtctacctgagtggaaaccgcatcaccgaagtgtcccttggggcgctgggcccagctcgggagctggagaagctgcacctggacaggaatcagctgcgagaggtgcccactggggccttggaggggctgcctgccctcctggagctgcagctctcgggcaacccactcagggccttgcgtgacggagccttccagcctgtgggcaggtcgctgcagcacctcttcctgaacagcagtggcctggagcagatttgtcctggggccttttcaggcctggggcccgggctccagagcctgcacctgcagaagaaccagcttcgggccctgcctgccctgcccagtgccaggagaacccccatcaaaggaagacagtgtggagcagataaggtggggaaggagaagggtcgtctctgagcacggagcaggctggtcctgccttgacccagcccggtggctcttactctcgccaggaacaggctccgacgagatcttcctggcaccctgagggtcgtcctccagcaggggcttcttggacccctgtctgaggggtcgcgtcttagtgggcgggattcttttccctttgaataaaaatggattcaaacccagca

SEQ ID NO: 117542 - DNA, 758 bp, Homo sapiens
  Payload ID: 2958
  Gene Symbol: CHADL
  Gene Name: chondroadherin-like
  ENST ID: ENST00000455425
  CDS Start-End: 1-758
agttccaggcggcatggaggggtgagtctttgggcccgatggtgcaaggggggattcagagcagctcagtggcctcaggacaacgctgtggaccgcctggcacctggggacctggggagaacacgggccttgcgctgggtctacctgagtggaaaccgcatcaccgaagtgtcccttggggcgctgggcccagctcgggagctggagaagctgcacctggacaggaatcagctgcgagaggtgcccactggggccttggaggggctgcctgccctcctggagctgcagctctcgggcaacccactcagggccttgcgtgacggagccttccagcctgtgggcaggtcgctgcagcacctcttcctgaacagcagtggcctggagcagatttgtcctggggccttttcaggcctggggcccgggctccagagcctgcacctgcagaagaaccagcttcgggccctgcctgccctgcccagtctcagccagctggagctcatcgacctcagcagcaatcccttccactgtgactgccagctgcttccgctgcacaggtggcttactgggctgaacctgcgggtgggggccacctgcgccacccctcccaatgcccgtggccagagggtgaaggctgcagctgctgtctttgaagactgcccgggctgggctgccagaaaggccaagcggacaccagcctccaggcccagtgccaggagaacccccatcaaaggaagacagtgtggagcagataaggttgg

SEQ ID NO: 117543 - DNA, 3013 bp, Homo sapiens
  Payload ID: 2959
  Gene Symbol: CHPF
  Gene Name: chondroitin polymerizing factor
  Uniprot ID: Q8IZ52
  ENST ID: ENST00000243776
  CDS Start-End: 250-2577
cggccgcggctgaggctccagtgccgagcgcaagaaccctgcgcagcccagagcagctgctggaggggaatcgaggcgcggctccggggattcggctcgggccgctggctctgctctgcggggagggagcgggcccgcccgcggggcccgagccctccggatccgccccctccccggtcccgccccctcggagactcctctggctgctctgggggttcgccggggccggggacccgcggtccgggcgccatgcgggcatcgctgctgctgtcggtgctgcggcccgcagggcccgtggccgtgggcatctccctgggcttcaccctgagcctgctcagcgtcacctgggtggaggagccgtgcggcccaggcccgccccaacctggagactctgagctgccgccgcgcggcaacaccaacgcggcgcgccggcccaactcggtgcagcccggagcggagcgcgagaagcccggggccggcgaaggcgccggggagaattgggagccgcgcgtcttgccctaccaccctgcacagcccggccaggccgccaaaaaggccgtcaggacccgctacatcagcacggagctgggcatcaggcagaggctgctggtggcggtgctgacctctcagaccacgctgcccacgctgggcgtggccgtgaaccgcacgctggggcaccggctggagcgtgtggtgttcctgacgggcgcacggggccgccgggccccacctggcatggcagtggtgacgctaggcgaggagcgacccattggacacctgcacctggcgctgcgccacctgctggagcagcacggcgacgactttgactggttcttcctggtgcctgacaccacctacaccgaggcgcacggcctggcacgcctaactggccacctcagcctggcctccgccgcccacctgtacctgggccggccccaggacttcatcggcggagagcccacccccggccgctactgccacggaggctttggggtgctgctgtcgcgcatgctgctgcaacaactgcgcccccacctggaaggctgccgcaacgacatcgtcagtgcgcgccctgacgagtggctgggtcgctgcattctcgatgccaccggggtgggctgcactggtgaccacgagggggtgcactatagccatctggagctgagccctggggagccagtgcaggagggggaccctcatttccgaagtgccctgacagcccaccctgtgcgtgaccctgtgcacatgtaccagctgcacaaagctttcgcccgagctgaactggaacgcacgtaccaggagatccaggagttacagtgggagatccagaataccagccatctggccgttgatggggaccaggcagctgcttggcccgtgggtattccagcaccatcccgcccggcctcccgctttgaggtgctgcgctgggactacttcacggagcagcacgctttctcctgcgccgatggctcaccccgctgcccactgcgtggggctgaccgggctgatgtggccgatgttctggggacagctctagaggagctgaaccgccgctaccacccggccttgcggctccagaagcagcagctggtgaatggctaccgacgctttgatccggcccggggtatggaatacacgctggacttgcagctggaggcactgaccccccagggaggccgccggcccctcactcgccgagtgcagctgctccggccgctgagccgcgtggagatcttgcctgtgccctatgtcactgaggcctcacgtctcactgtgctgctgcctctagctgcggctgagcgtgacctggcccctggcttcttggaggcctttgccactgcagcactggagcctggtgatgctgcggcagccctgaccctgctgctactgtatgagccgcgccaggcccagcgcgtggcccatgcagatgtcttcgcacctgtcaaggcccacgtggcagagctggagcggcgtttccccggtgcccgggtgccatggctcagtgtgcagacagccgcaccctcaccactgcgcctcatggatctactctccaagaagcacccgctggacacactgttcctgctggccgggccagacacggtgctcacgcctgacttcctgaaccgctgccgcatgcatgccatctccggctggcaggccttctttcccatgcatttccaagccttccacccagctgtggccccaccacaagggcctgggcccccagagctgggccgtgacactggccgctttgatcgccaggcagccagcgaggcctgcttctacaactccgactatgtggcagcccgtgggcgcctggcggcagcctcagaacaagaagaggagctgctggagagcctggatgtgtacgagctgttcctccacttctccagtctgcatgtgctgcgggcggtggagccggcgctgctgcagcgctaccgggcccagacgtgcagcgcgaggctcagtgaggacctgtaccaccgctgcctccagagcgtgcttgagggcctcggctcccgaacccagctggccatgctactctttgaacaggagcagggcaacagcacctgaccccaccctgtccccgtgggccgtggcatggccacaccccaccccacttctcccccaaaaccagagccacctgccagcctcgctgggcagggctggccgtagccagaccccaagctggcccactggtcccctctctggctctgtgggtccctgggctctggacaagcactgggggacgtgcccccagagccacccacttctcatcccaaacccagtttccctgccccctgacgctgctgattcgggctgtggcctccacgtatttatgcagtacagtctgcctgacgccagccctgcctctgggccctgggggctgggctgtagaagagttgttggggaaggagggagctgaggagggggcatctcccaacttctcccttttggaccctgccgaagctccctgcctttaataaactggccaagtgtggacttgtga

SEQ ID NO: 117544 - DNA, 1079 bp, Homo sapiens
  Payload ID: 2959
  Gene Symbol: CHPF
  Gene Name: chondroitin polymerizing factor
  ENST ID: ENST00000373891
  CDS Start-End: 36-932
gttcgccggggccggggacccgcggtccgggcgccatgcgggcatcgctgctgctgtcggtgctgcggcccgcagggcccgtggccgtgggcatctccctgggcttcaccctgagcctgctcagcgtcacctgggtggaggagccgtgcggcccaggcccgccccaacctggagactctgagctgccgccgcgcggcaacaccaacgcggcgcgccggcccaactcggtgcagcccggagcggagcgcgagaagcccggggccggcgaaggcgccggggagaattgggagccgcgcgtcttgccctaccaccctgcacagcccggccaggccgccaaaaaggccgtcaggacccgctacatcagcacggagctgggcatcaggcagaggctgctggtggcggtgctgacctctcagaccacgctgcccacgctgggcgtggccgtgaaccgcacgctggggcaccggctggagcgtgtggtgttcctgacgggcgcacggggccgccgggccccacctggcatggcagtggtgacgctaggcgaggagcgacccattggacacctgcacctggcgctgcgccacctgctggagcagcacggcgacgactttgactggttcttcctggtgcctgacaccacctacaccgaggcgcacggcctggcacgcctaactggccacctcagcctggcctccgccgcccacctgtacctgggccggccccaggacttcatcggcggagagcccacccccggccgctactgccacggaggctttggggtgctgctgtcgcgcatgctgctgcaacaactgcgcccccacctggaaggctgccgcaacgacatcgtcagtgcgcgccctgacgagtggctgggtcgctgcattctcgatgccaccggggtgggctgcactggtgaccacgaggtgggatgataagctatcccactgatacctccttgtcatgttcaaatccctctgagaggcaaagggatgttggagatacaggtctgcttttccatgccaattcggacatttattttctatctctgtgacccccagtaaattactaaatatcctggg

SEQ ID NO: 117545 - DNA, 2634 bp, Homo sapiens
  Payload ID: 2959
  Gene Symbol: CHPF
  Gene Name: chondroitin polymerizing factor
  Uniprot ID: Q8IZ52
  ENST ID: ENST00000535926
  CDS Start-End: 358-2199
aacttccgatggccctgccttcccgagagccgtggggccagtccgagactttctctgggccctatcccggcctgggctgaacttactggactgtgtcctaaaccggctcgacccgatggcgccccagagatcctactagctccctggctgggctgctggtgttagagaaatgacttatatatagggacccgctacatcagcacggagctgggcatcaggcagaggctgctggtggcggtgctgacctctcagaccacgctgcccacgctgggcgtggccgtgaaccgcacgctggggcaccggctggagcgtgtggtgttcctgacgggcgcacggggccgccgggccccacctggcatggcagtggtgacgctaggcgaggagcgacccattggacacctgcacctggcgctgcgccacctgctggagcagcacggcgacgactttgactggttcttcctggtgcctgacaccacctacaccgaggcgcacggcctggcacgcctaactggccacctcagcctggcctccgccgcccacctgtacctgggccggccccaggacttcatcggcggagagcccacccccggccgctactgccacggaggctttggggtgctgctgtcgcgcatgctgctgcaacaactgcgcccccacctggaaggctgccgcaacgacatcgtcagtgcgcgccctgacgagtggctgggtcgctgcattctcgatgccaccggggtgggctgcactggtgaccacgagggggtgcactatagccatctggagctgagccctggggagccagtgcaggagggggaccctcatttccgaagtgccctgacagcccaccctgtgcgtgaccctgtgcacatgtaccagctgcacaaagctttcgcccgagctgaactggaacgcacgtaccaggagatccaggagttacagtgggagatccagaataccagccatctggccgttgatggggaccaggcagctgcttggcccgtgggtattccagcaccatcccgcccggcctcccgctttgaggtgctgcgctgggactacttcacggagcagcacgctttctcctgcgccgatggctcaccccgctgcccactgcgtggggctgaccgggctgatgtggccgatgttctggggacagctctagaggagctgaaccgccgctaccacccggccttgcggctccagaagcagcagctggtgaatggctaccgacgctttgatccggcccggggtatggaatacacgctggacttgcagctggaggcactgaccccccagggaggccgccggcccctcactcgccgagtgcagctgctccggccgctgagccgcgtggagatcttgcctgtgccctatgtcactgaggcctcacgtctcactgtgctgctgcctctagctgcggctgagcgtgacctggcccctggcttcttggaggcctttgccactgcagcactggagcctggtgatgctgcggcagccctgaccctgctgctactgtatgagccgcgccaggcccagcgcgtggcccatgcagatgtcttcgcacctgtcaaggcccacgtggcagagctggagcggcgtttccccggtgcccgggtgccatggctcagtgtgcagacagccgcaccctcaccactgcgcctcatggatctactctccaagaagcacccgctggacacactgttcctgctggccgggccagacacggtgctcacgcctgacttcctgaaccgctgccgcatgcatgccatctccggctggcaggccttctttcccatgcatttccaagccttccacccagctgtggccccaccacaagggcctgggcccccagagctgggccgtgacactggccgctttgatcgccaggcagccagcgaggcctgcttctacaactccgactatgtggcagcccgtgggcgcctggcggcagcctcagaacaagaagaggagctgctggagagcctggatgtgtacgagctgttcctccacttctccagtctgcatgtgctgcgggcggtggagccggcgctgctgcagcgctaccgggcccagacgtgcagcgcgaggctcagtgaggacctgtaccaccgctgcctccagagcgtgcttgagggcctcggctcccgaacccagctggccatgctactctttgaacaggagcagggcaacagcacctgaccccaccctgtccccgtgggccgtggcatggccacaccccaccccacttctcccccaaaaccagagccacctgccagcctcgctgggcagggctggccgtagccagaccccaagctggcccactggtcccctctctggctctgtgggtccctgggctctggacaagcactgggggacgtgcccccagagccacccacttctcatcccaaacccagtttccctgccccctgacgctgctgattcgggctgtggcctccacgtatttatgcagtacagtctgcctgacgccagccctgcctctgggccctgggggctgggctgtagaagagttgttggggaaggagggagctgaggagggggcatctcccaacttctcccttttggaccctgccgaagctccctgcctttaataaactggccaagtgtggacttgtg

SEQ ID NO: 117546 - DNA, 3978 bp, Homo sapiens
  Payload ID: 2960
  Gene Symbol: CHPF2
  Gene Name: chondroitin polymerizing factor 2
  Uniprot ID: Q9P2E5
  ENST ID: ENST00000035307
  CDS Start-End: 1514-3832
aggggctgtgaggtggcagcggctgcagcggcggagccggcgcctcagcgggcactggggtctgttcccccttccccgtccctgctccctgccaggcgcgtgcgggacgccgctcttggtccccacgcctccgccccgccccctcccgggacgccgggagaccccggccgtcctttatccggtgtccgccggcccccggccctgaaacccgggcctcctccccgagggccttgggcgtccctcctggtcctgcgctcgcggcctcgatgctgtctctggcgcggcctccgctcccgccgactggcctgagaacgaggtctgtgccccagtctcccagccgcgacctccgaccccgcctcgcagaacgacccgagctggtctcccgagcccccttctcagcagcccggtgacgtggccagtttatttctgttttgagacgaacggcgaagactcgcgtcgggtcttcgttctagggctagacttggtctctgatcgccgagaggtagcgcaggggctgtgggcccccggcaggggtcctgtcggaagctggccgcgcttctgtttgcgttcccaggaccctggcattgtctctagttgctgcttgtgctctctctttgcttttggtttgcttcatttggcccctggggccctggtaaaaccaggcaccgaatcgctcgcacacagagttccagtccccgcctgctgtctcctcagcagctggggttccgaggagaatgccctgcaagatggctccatcggccatggcgctcctgagaggctgtcagtgctgagtcaccgatctacctcattcgggtgggcagaacttatgtgtgccatgcgagtggctccagaccgctcctgagtgggaggaggggttcctgtagccgttgcgtcttctcaaacacggggagcagagtagaaagaggctctggccccttcccttgtgcccaccgggcctgccgcagtggctcagcagccccttcagtagcccgcctgaggaccgatgccagaggcaggcattcttccggaaaggcccactgaggcaggctccggctcctctggttggggctgttgttttgatggatcgtgtgcttttcccttacctcttatcacttgctgtcatctgttgacttaggcccagtctgcagatgtgtgtagtgttcctttttgggttagctttggcagtattgagttttacttcctcctctttttagtggaagacagaccataatcccagtgtgagtgaaattgattgtttcatttattaccgttttggctgggggttagttccgacaccttcacagttgaagagcaggcagaaggagttgtgaagacaggacaatcttcttggggatgctggtcctggaagccagcgggcctcgctctgtctttggcctcattgaccccaggttctctggttaaaactgaaagcctactactggcctggtgcccatcaatccattgatccttgaggctgtgcccctggggcacccacctggcagggcctaccaccatgcgactgagctccctgttggctctgctgcggccagcgcttcccctcatcttagggctgtctctggggtgcagcctgagcctcctgcgggtttcctggatccagggggagggagaagatccctgtgtcgaggctgtaggggagcgaggagggccacagaatccagattccagagctcggctagaccaaagtgatgaagacttcaaaccccggattgtcccctactacagggaccccaacaagccctacaagaaggtgctcaggactcggtacatccagacagagctgggctcccgtgagcggttgctggtggctgtcctgacctcccgagctacactgtccactttggccgtggctgtgaaccgtacggtggcccatcacttccctcggttactctacttcactgggcagcggggggcccgggctccagcagggatgcaggtggtgtctcatggggatgagcggcccgcctggctcatgtcagagaccctgcgccaccttcacacacactttggggccgactacgactggttcttcatcatgcaggatgacacatatgtgcaggccccccgcctggcagcccttgctggccacctcagcatcaaccaagacctgtacttaggccgggcagaggagttcattggcgcaggcgagcaggcccggtactgtcatgggggctttggctacctgttgtcacggagtctcctgcttcgtctgcggccacatctggatggctgccgaggagacattctcagtgcccgtcctgacgagtggcttggacgctgcctcattgactctctgggcgtcggctgtgtctcacagcaccaggggcagcagtatcgctcatttgaactggccaaaaatagggaccctgagaaggaagggagctcggctttcctgagtgccttcgccgtgcaccctgtctccgaaggtaccctcatgtaccggctccacaaacgcttcagcgctctggagttggagcgggcttacagtgaaatagaacaactgcaggctcagatccggaacctgaccgtgctgacccccgaaggggaggcagggctgagctggcccgttgggctccctgctcctttcacaccacactctcgctttgaggtgctgggctgggactacttcacagagcagcacaccttctcctgtgcagatggggctcccaagtgcccactacagggggctagcagggcggacgtgggtgatgcgttggagactgccctggagcagctcaatcggcgctatcagccccgcctgcgcttccagaagcagcgactgctcaacggctatcggcgcttcgacccagcacggggcatggagtacaccctggacctgctgttggaatgtgtgacacagcgtgggcaccggcgggccctggctcgcagggtcagcctgctgcggccactgagccgggtggaaatcctacctatgccctatgtcactgaggccacccgagtgcagctggtgctgccactcctggtggctgaagctgctgcagccccggctttcctcgaggcctttgcagccaatgtcctggagccacgagaacatgcattgctcaccctgttgctggtctacgggccacgagaaggtggccgtggagctccagacccatttcttggggtgaaggctgcagcagcggagttagagcgacggtaccctgggacgaggctggcctggctcgctgtgcgagcagaggccccttcccaggtgcgactcatggacgtggtctcgaagaagcaccctgtggacactctcttcttccttaccaccgtgtggacaaggcctgggcccgaagtcctcaaccgctgtcgcatgaatgccatctctggctggcaggccttctttccagtccatttccaggagttcaatcctgccctgtcaccacagagatcacccccagggcccccgggggctggccctgaccccccctcccctcctggtgctgacccctcccggggggctcctataggggggagatttgaccggcaggcttctgcggagggctgcttctacaacgctgactacctggcggcccgagcccggctggcaggtgaactggcaggccaggaagaggaggaagccctggaggggctggaggtgatggatgttttcctccggttctcagggctccacctctttcgggccgtagagccagggctggtgcagaagttctccctgcgagactgcagcccacggctcagtgaagaactctaccaccgctgccgcctcagcaacctggaggggctagggggccgtgcccagctggctatggctctctttgagcaggagcaggccaatagcacttagcccgcctgggggccctaacctcattacctttcctttgtctgcctcagccccaggaagggcaaggcaagatggtggacagatagagaattgttgctgtattttttaaatatgaaaatgttattaaacatgtcttctgccaaactgtt

SEQ ID NO: 117547 - DNA, 2709 bp, Homo sapiens
  Payload ID: 2960
  Gene Symbol: CHPF2
  Gene Name: chondroitin polymerizing factor 2
  ENST ID: ENST00000495645
  CDS Start-End: 277-2571
agctgcggacaggggctgtgaggtggcagcggctgcagcggcggagccggcgcctcagcgggcactggggtctgttcccccttccccgtccctgctccctgccaggcgcgtgcgggacgccgctcttggtccccacgcctccgccccgccccctcccgggacgccgggagaccccggccgtcctttatccggtgtccgccggcccccggccctgaaacccgggcctcctccccgagggccttgggcgtccctcctggtcctgcgctcgcggcctcgatgctgtctctggcgcggcctccgctcccgccgactggcctgagaacgagcctgagcctcctgcgggtttcctggatccagggggagggagaagatccctgtgtcgaggctgtaggggagcgaggagggccacagaatccagattccagagctcggctagaccaaagtgatgaagacttcaaaccccggattgtcccctactacagggaccccaacaagccctacaagaaggtgctcaggactcggtacatccagacagagctgggctcccgtgagcggttgctggtggctgtcctgacctcccgagctacactgtccactttggccgtggctgtgaaccgtacggtggcccatcacttccctcggttactctacttcactgggcagcggggggcccgggctccagcagggatgcaggtggtgtctcatggggatgagcggcccgcctggctcatgtcagagaccctgcgccaccttcacacacactttggggccgactacgactggttcttcatcatgcaggatgacacatatgtgcaggccccccgcctggcagcccttgctggccacctcagcatcaaccaagacctgtacttaggccgggcagaggagttcattggcgcaggcgagcaggcccggtactgtcatgggggctttggctacctgttgtcacggagtctcctgcttcgtctgcggccacatctggatggctgccgaggagacattctcagtgcccgtcctgacgagtggcttggacgctgcctcattgactctctgggcgtcggctgtgtctcacagcaccaggggcagcagtatcgctcatttgaactggccaaaaatagggaccctgagaaggaagggagctcggctttcctgagtgccttcgccgtgcaccctgtctccgaaggtaccctcatgtaccggctccacaaacgcttcagcgctctggagttggagcgggcttacagtgaaatagaacaactgcaggctcagatccggaacctgaccgtgctgacccccgaaggggaggcagggctgagctggcccgttgggctccctgctcctttcacaccacactctcgctttgaggtgctgggctgggactacttcacagagcagcacaccttctcctgtgcagatggggctcccaagtgcccactacagggggctagcagggcggacgtgggtgatgcgttggagactgccctggagcagctcaatcggcgctatcagccccgcctgcgcttccagaagcagcgactgctcaacggctatcggcgcttcgacccagcacggggcatggagtacaccctggacctgctgttggaatgtgtgacacagcgtgggcaccggcgggccctggctcgcagggtcagcctgctgcggccactgagccgggtggaaatcctacctatgccctatgtcactgaggccacccgagtgcagctggtgctgccactcctggtggctgaagctgctgcagccccggctttcctcgaggcctttgcagccaatgtcctggagccacgagaacatgcattgctcaccctgttgctggtctacgggccacgagaaggtggccgtggagctccagacccatttcttggggtgaaggctgcagcagcggagttagagcgacggtaccctgggacgaggctggcctggctcgctgtgcgagcagaggccccttcccaggtgcgactcatggacgtggtctcgaagaagcaccctgtggacactctcttcttccttaccaccgtgtggacaaggcctgggcccgaagtcctcaaccgctgtcgcatgaatgccatctctggctggcaggccttctttccagtccatttccaggagttcaatcctgccctgtcaccacagagatcacccccagggcccccgggggctggccctgaccccccctcccctcctggtgctgacccctcccggggggctcctataggggggagatttgaccggcaggcttctgcggagggctgcttctacaacgctgactacctggcggcccgagcccggctggcaggtgaactggcaggccaggaagaggaggaagccctggaggggctggaggtgatggatgttttcctccggttctcagggctccacctctttcgggccgtagagccagggctggtgcagaagttctccctgcgagactgcagcccacggctcagtgaagaactctaccaccgctgccgcctcagcaacctggaggggctagggggccgtgcccagctggctatggctctctttgagcaggagcaggccaatagcacttagcccgcctgggggccctaacctcattacctttcctttgtctgcctcagccccaggaagggcaaggcaagatggtggacagatagagaattgttgctgtattttttaaatatgaaaatgttattaaacatgtcttctgcc

SEQ ID NO: 117548 - DNA, 548 bp, Homo sapiens
  Payload ID: 2960
  Gene Symbol: CHPF2
  Gene Name: chondroitin polymerizing factor 2
  ENST ID: ENST00000482173
  CDS Start-End: 277-548
agctgcggacaggggctgtgaggtggcagcggctgcagcggcggagccggcgcctcagcgggcactggggtctgttcccccttccccgtccctgctccctgccaggcgcgtgcgggacgccgctcttggtccccacgcctccgccccgccccctcccgggacgccgggagaccccggccgtcctttatccggtgtccgccggcccccggccctgaaacccgggcctcctccccgagggccttgggcgtccctcctggtcctgcgctcgcggcctcgatgctgtctctggcgcggcctccgctcccgccgactggcctgagaacgaggactcggtacatccagacagagctgggctcccgtgagcggttgctggtggctgtcctgacctcccgagctacactgtccactttggccgtggctgtgaaccgtacggtggcccatcacttccctcggttactctacttcactgggcagcggggggcccgggctccagcagggatgcaggtggtgtctcatggggatgagcggcccgcctggctcatgtcaga

SEQ ID NO: 117549 - DNA, 782 bp, Homo sapiens
  Payload ID: 2960
  Gene Symbol: CHPF2
  Gene Name: chondroitin polymerizing factor 2
  ENST ID: ENST00000465601
  CDS Start-End: 1-372
tgtcatgggggctttggctacctgttgtcacggagtctcctgcttcgtctgcggccacatctggatggctgccgaggagacattctcagtgcccgtcctgacgagtggcttggacgctgcctcattgactctctgggcgtcggctgtgtctcacagcaccaggggcagcagtatcgctcatttgaactggccaaaaatagggaccctgagaaggaagggagctcggctttcctgagtgccttcgccgtgcaccctgtctccgaaggtaccctcatgtaccggctccacaaacgcttcagcgctctggagttggagcgggcttacagtgaaatagaacaactgcagaactgtcccaagaaagcccaagggtagaagggagaattctcaagttgaacgtcaggcttggcagaggtggagtgtagatgaaaacaaaggtgtgattatgaagaggatgtgagtcctttgggtgtaggagagaaaggctgttgagcttctatttcaagatacttttacctgtgcaaaaagcacattttccacctccttctcatggcatttgtgtaaggctcagatccggaacctgaccgtgctgacccccgaaggggaggcagggctgagctggcccgttgggctccctgctcctttcacaccacactctcgctttgaggtgctgggctgggactacttcacagagcagcacaccttctcctgtgcagatggggctcccaagtgcccactacagggggctagcagggcggacgtgggtgatgcgttggagactgccc

SEQ ID NO: 117550 - DNA, 3872 bp, Homo sapiens
  Payload ID: 2961
  Gene Symbol: CSGALNACT1
  Gene Name: chondroitin sulfate N-acetylgalactosaminyltransferase 1
  Uniprot ID: Q8TDX6
  ENST ID: ENST00000332246
  CDS Start-End: 655-2253
ctccttaggtggaaaccctgggagtagagtactgacagcaaagaccgggaaagaccatacgtccccgggcaggggtgacaacaggtgtcatctttttgatctcgtgtgtggctgccttcctatttcaaggaaagacgccaaggtaattttgacccagaggagcaatgatgtagccacctcctaaccttcccttcttgaacccccagttatgccaggatttactagagagtgtcaactcaaccagcaagcggctccttcggcttaacttgtggttggaggagagaacctttgtggggctgcgttctcttagcagtgctcagaagtgacttgcctgagggtggaccagaagaaaggaaaggtcccctcttgctgttggctgcacatcaggaaggctgtgatgggaatgaaggtgaaaacttggagatttcacttcagtcattgcttctgcctgcaagatcatcctttaaaagtagagaagctgctctgtgtggtggttaactccaagaggcagaactcgttctagaaggaaatggatgcaagcagctccgggggccccaaacgcatgcttcctgtggtctagcccagggaagcccttccgtgggggccccggctttgagggatgccaccggttctggacgcatggctgattcctgaatgatgatggttcgccgggggctgcttgcgtggatttcccgggtggtggttttgctggtgctcctctgctgtgctatctctgtcctgtacatgttggcctgcaccccaaaaggtgacgaggagcagctggcactgcccagggccaacagccccacggggaaggaggggtaccaggccgtccttcaggagtgggaggagcagcaccgcaactacgtgagcagcctgaagcggcagatcgcacagctcaaggaggagctgcaggagaggagtgagcagctcaggaatgggcagtaccaagccagcgatgctgctggcctgggtctggacaggagccccccagagaaaacccaggccgacctcctggccttcctgcactcgcaggtggacaaggcagaggtgaatgctggcgtcaagctggccacagagtatgcagcagtgcctttcgatagctttactctacagaaggtgtaccagctggagactggccttacccgccaccccgaggagaagcctgtgaggaaggacaagcgggatgagttggtggaagccattgaatcagccttggagaccctgaacagtcctgcagagaacagccccaatcaccgtccttacacggcctctgatttcatagaagggatctaccgaacagaaagggacaaagggacattgtatgagctcaccttcaaaggggaccacaaacacgaattcaaacggctcatcttatttcgaccattcggccccatcatgaaagtgaaaaatgaaaagctcaacatggccaacacgcttatcaatgttatcgtgcctctagcaaaaagggtggacaagttccggcagttcatgcagaatttcagggagatgtgcattgagcaggatgggagagtccatctcactgttgtttactttgggaaagaagaaataaatgaagtcaaaggaatacttgaaaacacttccaaagctgccaacttcaggaactttaccttcatccagctgaatggagaattttctcggggaaagggacttgatgttggagcccgcttctggaagggaagcaacgtccttctctttttctgtgatgtggacatctacttcacatctgaattcctcaatacgtgtaggctgaatacacagccagggaagaaggtattttatccagttcttttcagtcagtacaatcctggcataatatacggccaccatgatgcagtccctcccttggaacagcagctggtcataaagaaggaaactggattttggagagactttggatttgggatgacgtgtcagtatcggtcagacttcatcaatataggtgggtttgatctggacatcaaaggctggggcggagaggatgtgcacctttatcgcaagtatctccacagcaacctcatagtggtacggacgcctgtgcgaggactcttccacctctggcatgagaagcgctgcatggacgagctgacccccgagcagtacaagatgtgcatgcagtccaaggccatgaacgaggcatcccacggccagctgggcatgctggtgttcaggcacgagatagaggctcaccttcgcaaacagaaacagaagacaagtagcaaaaaaacatgaactcccagagaaggattgtgggagacactttttctttccttttgcaattactgaaagtggctgcaacagagaaaagacttccataaaggacgacaaaagaattggactgatgggtcagagatgagaaagcctccgatttctctctgttgggctttttacaacagaaatcaaaatctccgctttgcctgcaaaagtaacccagttgcaccctgtgaagtgtctgacaaaggcagaatgcttgtgagattataagcctaatggtgtggaggttttgatggtgtttacaacacactgagacctgttgttttgtgtgctcattgaaatattcatgatttaagagcagttttgtaaaaaattcattagcatgaaaggcaagcatatttctcctcatatgaatgagcctatcagcagggctctagtttctaggaatgctaaaatatcagaaggcaggagaggagataggcttattatgatactagtgagtacattaagtaaaataaaatggaccagaaaagaaaagaaaccataaatatcgtgtcatattttccccaagattaaccaaaaataatctgcttatctttttggttgtccttttaactgtctccgtttttttcttttatttaaaaatgcactttttttcccttgtgagttatagtctgcttatttaattaccactttgcaagccttacaagagagcacaagttggcctacatttttatattttttaagaagatactttgagatgcattatgagaactttcagttcaaagcatcaaattgatgccatatccaaggacatgccaaatgctgattctgtcaggcactgaatgtcaggcattgagacatagggaaggaatggtttgtactaatacagacgtacagatactttctctgaagagtattttcgaagaggagcaactgaacactggaggaaaagaaaatgacactttctgctttacagaaaaggaaactcattcagactggtgatatcgtgatgtacctaaaagtcagaaaccacattttctcctcagaagtagggaccgctttcttacctgtttaaataaaccaaagtataccgtgtgaaccaaacaatctcttttcaaaacagggtgctcctcctggcttctggcttccataagaagaaatggagaaaaaaatatatatatatatattgtgaaagatcaatccatctgccagaatctagtgggatggaagtttttgctacatgttatccaccccaggccaggtggaagtaactgaattattttttaaattaagcagttctactcgatcaccaagatgcttctgaaaattgcattttattaccatttcaaactattttttaaaaataaatacagttaacatagagtggtttcttcattcatgtgaaaattattagccagcaccagatgcatgagctaattatctctttgagtccttgcttctgtttgctcacagtaaactcattgtttaaaagcttcaagaacattcaagctgttggtgtgttaaaaaatgcattgtattgatttgtactggtagtttatgaaatttaattaaaacacaggccatgaatggaaggtggtattgcacagctaataaaatatgatttgtggatatga

SEQ ID NO: 117551 - DNA, 3962 bp, Homo sapiens
  Payload ID: 2961
  Gene Symbol: CSGALNACT1
  Gene Name: chondroitin sulfate N-acetylgalactosaminyltransferase 1
  Uniprot ID: Q8TDX6
  ENST ID: ENST00000397998
  CDS Start-End: 458-1351
gggcttgttctgggatccgcagccttgctcaggctgtgcattggtgtggccccgaattgcacggagctgccttcctatttcaaggaaagacgccaaggtaattttgacccagaggagcaatgatgtagccacctcctaaccttcccttcttgaacccccaggtcccctcttgctgttggctgcacatcaggaaggctgtgatgggaatgaaggtgaaaacttggagatttcacttcagtcattgcttctgcctgcaagatcatcctttaaaagtagagaagctgctctgtgtggtggttaactccaagaggcagaactcgttctagaaggaaatggatgcaagcagctccgggggccccaaacgcatgcttcctgtggtctagcccagggaagcccttccgtgggggccccggctttgagggatgccaccggttctggacgcatggctgattcctgaatgatgatggttcgccgggggctgcttgcgtggatttcccgggtggtggttttgctggtgctcctctgctgtgctatctctgtcctgtacatgttggcctgcaccccaaaaggtgacgaggagcagctggcactgcccagggccaacagccccacggggaaggaggggtaccaggccgtccttcaggagtgggaggagcagcaccgcaactacgtgagcagcctgaagcggcagatcgcacagctcaaggaggagctgcaggagaggagtgagcagctcaggaatgggcagtaccaagccagcgatgctgctggcctgggtctggacaggagccccccagagaaaacccaggccgacctcctggccttcctgcactcgcaggtggacaaggcagaggtgaatgctggcgtcaagctggccacagagtatgcagcagtgcctttcgatagctttactctacagaaggtgtaccagctggagactggccttacccgccaccccgaggagaagcctgtgaggaaggacaagcgggatgagttggtggaagccattgaatcagccttggagaccctgaacagtcctgcagagaacagccccaatcaccgtccttacacggcctctgatttcatagaagggatctaccgaacagaaagggacaaagggacattgtatgagctcaccttcaaaggggaccacaaacacgaattcaaacggctcatcttatttcgaccattcggccccatcatgaaagtgaaaaatgaaaagctcaacatggccaacacgcttatcaatgttatcgtgcctctagcaaaaagggtggacaagttccggcagttcatgcagaatttcaggcctgctgatgaagtttttagatgtgtgcctttaagcccttgattgtgcggtgttggatcttagaagctgtgatggctcagatgcacatattggctgaggataaccagctaagtgatttcaccagcttgttttaaacatagaaaatcctactgtctaattataaatcttgaaagatcaagctgattttttatttctttttttttgagatggagtcttactctgtcacccaggctggagtgcagtggcacgaactctgctcactgcaaccttcacctcccaggttcagggagatgtgcattgagcaggatgggagagtccatctcactgttgtttactttgggaaagaagaaataaatgaagtcaaaggaatacttgaaaacacttccaaagctgccaacttcaggaactttaccttcatccagctgaatggagaattttctcggggaaagggacttgatgttggagcccgcttctggaagggaagcaacgtccttctctttttctgtgatgtggacatctacttcacatctgaattcctcaatacgtgtaggctgaatacacagccagggaagaaggtattttatccagttcttttcagtcagtacaatcctggcataatatacggccaccatgatgcagtccctcccttggaacagcagctggtcataaagaaggaaactggattttggagagactttggatttgggatgacgtgtcagtatcggtcagacttcatcaatataggtgggtttgatctggacatcaaaggctggggcggagaggatgtgcacctttatcgcaagtatctccacagcaacctcatagtggtacggacgcctgtgcgaggactcttccacctctggcatgagaagcgctgcatggacgagctgacccccgagcagtacaagatgtgcatgcagtccaaggccatgaacgaggcatcccacggccagctgggcatgctggtgttcaggcacgagatagaggctcaccttcgcaaacagaaacagaagacaagtagcaaaaaaacatgaactcccagagaaggattgtgggagacactttttctttccttttgcaattactgaaagtggctgcaacagagaaaagacttccataaaggacgacaaaagaattggactgatgggtcagagatgagaaagcctccgatttctctctgttgggctttttacaacagaaatcaaaatctccgctttgcctgcaaaagtaacccagttgcaccctgtgaagtgtctgacaaaggcagaatgcttgtgagattataagcctaatggtgtggaggttttgatggtgtttacaacacactgagacctgttgttttgtgtgctcattgaaatattcatgatttaagagcagttttgtaaaaaattcattagcatgaaaggcaagcatatttctcctcatatgaatgagcctatcagcagggctctagtttctaggaatgctaaaatatcagaaggcaggagaggagataggcttattatgatactagtgagtacattaagtaaaataaaatggaccagaaaagaaaagaaaccataaatatcgtgtcatattttccccaagattaaccaaaaataatctgcttatctttttggttgtccttttaactgtctccgtttttttcttttatttaaaaatgcactttttttcccttgtgagttatagtctgcttatttaattaccactttgcaagccttacaagagagcacaagttggcctacatttttatattttttaagaagatactttgagatgcattatgagaactttcagttcaaagcatcaaattgatgccatatccaaggacatgccaaatgctgattctgtcaggcactgaatgtcaggcattgagacatagggaaggaatggtttgtactaatacagacgtacagatactttctctgaagagtattttcgaagaggagcaactgaacactggaggaaaagaaaatgacactttctgctttacagaaaaggaaactcattcagactggtgatatcgtgatgtacctaaaagtcagaaaccacattttctcctcagaagtagggaccgctttcttacctgtttaaataaaccaaagtataccgtgtgaaccaaacaatctcttttcaaaacagggtgctcctcctggcttctggcttccataagaagaaatggagaaaaaaatatatatatatatattgtgaaagatcaatccatctgccagaatctagtgggatggaagtttttgctacatgttatccaccccaggccaggtggaagtaactgaattattttttaaattaagcagttctactcgatcaccaagatgcttctgaaaattgcattttattaccatttcaaactattttttaaaaataaatacagttaacatagagtggtttcttcattcatgtgaaaattattagccagcaccagatgcatgagctaattatctctttgagtccttgcttctgtttgctcacagtaaactcattgtttaaaagcttcaagaacattcaagctgttggtgtgttaaaaaatgcattgtattgatttgtactggtagtttatgaaatttaattaaaacacaggccatgaatggaaggtggtattgcacagctaataaaatatgatttgtggatatga

SEQ ID NO: 117552 - DNA, 4232 bp, Homo sapiens
  Payload ID: 2961
  Gene Symbol: CSGALNACT1
  Gene Name: chondroitin sulfate N-acetylgalactosaminyltransferase 1
  Uniprot ID: Q8TDX6
  ENST ID: ENST00000454498
  CDS Start-End: 1015-2613
agatgcgctcggtcctcaccagcggcgttgtgcggcgaaccctgcggtgcttcgggaaggcggtcgttcctccctgctcccaccgttttccagcgtgtgcgctcttaccttctctggggaaaaaaggaaattttttattttttaacatttcatttcatgaaaccgttttttttaagtggtggcgctgaacacagtccttgcagaggggggcagcactttccctcctgaccccaacctggaaaccccagtgtgacttcagcgctgtcagagcattggaagcagagctgcgagttaggaagcggctcgctggcagctgggcacgtttctttcctgcgagatcggcttttttgatttgctctttttcacatgaaaatgttcagcttcatttttagacacctttagacatggttatcactgtttaaagccttgatttttttttaaacaaatagtttgcattttattcattgaaacagggagagaacaaataccatcctgctttttgggctgccttcctatttcaaggaaagacgccaaggtaattttgacccagaggagcaatgatgtagccacctcctaaccttcccttcttgaacccccagacataaagggagcagtaggcataaaatgtggggagctgaccatctgccggtccggtcctgaccttccactagtagtgagaccaatccagctcttgctgctgctgtggctttgtgaggaggtcccctcttgctgttggctgcacatcaggaaggctgtgatgggaatgaaggtgaaaacttggagatttcacttcagtcattgcttctgcctgcaagatcatcctttaaaagtagagaagctgctctgtgtggtggttaactccaagaggcagaactcgttctagaaggaaatggatgcaagcagctccgggggccccaaacgcatgcttcctgtggtctagcccagggaagcccttccgtgggggccccggctttgagggatgccaccggttctggacgcatggctgattcctgaatgatgatggttcgccgggggctgcttgcgtggatttcccgggtggtggttttgctggtgctcctctgctgtgctatctctgtcctgtacatgttggcctgcaccccaaaaggtgacgaggagcagctggcactgcccagggccaacagccccacggggaaggaggggtaccaggccgtccttcaggagtgggaggagcagcaccgcaactacgtgagcagcctgaagcggcagatcgcacagctcaaggaggagctgcaggagaggagtgagcagctcaggaatgggcagtaccaagccagcgatgctgctggcctgggtctggacaggagccccccagagaaaacccaggccgacctcctggccttcctgcactcgcaggtggacaaggcagaggtgaatgctggcgtcaagctggccacagagtatgcagcagtgcctttcgatagctttactctacagaaggtgtaccagctggagactggccttacccgccaccccgaggagaagcctgtgaggaaggacaagcgggatgagttggtggaagccattgaatcagccttggagaccctgaacagtcctgcagagaacagccccaatcaccgtccttacacggcctctgatttcatagaagggatctaccgaacagaaagggacaaagggacattgtatgagctcaccttcaaaggggaccacaaacacgaattcaaacggctcatcttatttcgaccattcggccccatcatgaaagtgaaaaatgaaaagctcaacatggccaacacgcttatcaatgttatcgtgcctctagcaaaaagggtggacaagttccggcagttcatgcagaatttcagggagatgtgcattgagcaggatgggagagtccatctcactgttgtttactttgggaaagaagaaataaatgaagtcaaaggaatacttgaaaacacttccaaagctgccaacttcaggaactttaccttcatccagctgaatggagaattttctcggggaaagggacttgatgttggagcccgcttctggaagggaagcaacgtccttctctttttctgtgatgtggacatctacttcacatctgaattcctcaatacgtgtaggctgaatacacagccagggaagaaggtattttatccagttcttttcagtcagtacaatcctggcataatatacggccaccatgatgcagtccctcccttggaacagcagctggtcataaagaaggaaactggattttggagagactttggatttgggatgacgtgtcagtatcggtcagacttcatcaatataggtgggtttgatctggacatcaaaggctggggcggagaggatgtgcacctttatcgcaagtatctccacagcaacctcatagtggtacggacgcctgtgcgaggactcttccacctctggcatgagaagcgctgcatggacgagctgacccccgagcagtacaagatgtgcatgcagtccaaggccatgaacgaggcatcccacggccagctgggcatgctggtgttcaggcacgagatagaggctcaccttcgcaaacagaaacagaagacaagtagcaaaaaaacatgaactcccagagaaggattgtgggagacactttttctttccttttgcaattactgaaagtggctgcaacagagaaaagacttccataaaggacgacaaaagaattggactgatgggtcagagatgagaaagcctccgatttctctctgttgggctttttacaacagaaatcaaaatctccgctttgcctgcaaaagtaacccagttgcaccctgtgaagtgtctgacaaaggcagaatgcttgtgagattataagcctaatggtgtggaggttttgatggtgtttacaacacactgagacctgttgttttgtgtgctcattgaaatattcatgatttaagagcagttttgtaaaaaattcattagcatgaaaggcaagcatatttctcctcatatgaatgagcctatcagcagggctctagtttctaggaatgctaaaatatcagaaggcaggagaggagataggcttattatgatactagtgagtacattaagtaaaataaaatggaccagaaaagaaaagaaaccataaatatcgtgtcatattttccccaagattaaccaaaaataatctgcttatctttttggttgtccttttaactgtctccgtttttttcttttatttaaaaatgcactttttttcccttgtgagttatagtctgcttatttaattaccactttgcaagccttacaagagagcacaagttggcctacatttttatattttttaagaagatactttgagatgcattatgagaactttcagttcaaagcatcaaattgatgccatatccaaggacatgccaaatgctgattctgtcaggcactgaatgtcaggcattgagacatagggaaggaatggtttgtactaatacagacgtacagatactttctctgaagagtattttcgaagaggagcaactgaacactggaggaaaagaaaatgacactttctgctttacagaaaaggaaactcattcagactggtgatatcgtgatgtacctaaaagtcagaaaccacattttctcctcagaagtagggaccgctttcttacctgtttaaataaaccaaagtataccgtgtgaaccaaacaatctcttttcaaaacagggtgctcctcctggcttctggcttccataagaagaaatggagaaaaaaatatatatatatatattgtgaaagatcaatccatctgccagaatctagtgggatggaagtttttgctacatgttatccaccccaggccaggtggaagtaactgaattattttttaaattaagcagttctactcgatcaccaagatgcttctgaaaattgcattttattaccatttcaaactattttttaaaaataaatacagttaacatagagtggtttcttcattcatgtgaaaattattagccagcaccagatgcatgagctaattatctctttgagtccttgcttctgtttgctcacagtaaactcattgtttaaaagcttcaagaacattcaagctgttggtgtgttaaaaaatgcattgtattgatttgtactggtagtttatgaaatttaattaaaacacaggccatgaatggaaggtggtattgcacagctaataaaatatgatttgtggatatga

SEQ ID NO: 117553 - DNA, 554 bp, Homo sapiens
  Payload ID: 2961
  Gene Symbol: CSGALNACT1
  Gene Name: chondroitin sulfate N-acetylgalactosaminyltransferase 1
  ENST ID: ENST00000524213
  CDS Start-End: 512-554
aggctccgcggctgccggagcgggaggtggagccgagtccgcggcggccgcgcaggagggaaagttcagcgacggcggcagcggccggagccgggccgggcagctagcagggcgcttcggctgccttcctatttcaaggaaagacgccaaggtaattttgacccagaggagcaatgatgtagccacctcctaaccttcccttcttgaacccccaggtcccctcttgctgttggctgcacatcaggaaggctgtgatgggaatgaaggtgaaaacttggagatttcacttcagtcattgcttctgcctgcaagatcatcctttaaaagtagagaagctgctctgtgtggtggttaactccaagaggcagaactcgttctagaaggaaatggatgcaagcagctccgggggccccaaacgcatgcttcctgtggtctagcccagggaagcccttccgtgggggccccggctttgagggatgccaccggttctggacgcatggctgattcctgaatgatgatggttcgccgggggctgcttgcgtggatttcccggg

SEQ ID NO: 117554 - DNA, 792 bp, Homo sapiens
  Payload ID: 2961
  Gene Symbol: CSGALNACT1
  Gene Name: chondroitin sulfate N-acetylgalactosaminyltransferase 1
  ENST ID: ENST00000523262
  CDS Start-End: 481-792
ggcctcccagtggccgtcaggggtccctgcagacatcgcttacccacagtggtgcggtgtgagagttacaggggttcctgaccttcgctctgccttcctatttcaaggaaagacgccaaggtaattttgacccagaggagcaatgatgtagccacctcctaaccttcccttcttgaacccccaggtcccctcttgctgttggctgcacatcaggaaggctgtgatgggaatgaaggtgaaaacttggagatttcacttcagtcattgcttctgcctgcaagatcatcctttaaaagtagagaagctgctctgtgtggtggttaactccaagaggcagaactcgttctagaaggaaatggatgcaagcagctccgggggccccaaacgcatgcttcctgtggtctagcccagggaagcccttccgtgggggccccggctttgagggatgccaccggttctggacgcatggctgattcctgaatgatgatggttcgccgggggctgcttgcgtggatttcccgggtggtggttttgctggtgctcctctgctgtgctatctctgtcctgtacatgttggcctgcaccccaaaaggtgacgaggagcagctggcactgcccagggccaacagccccacggggaaggaggggtaccaggccgtccttcaggagtgggaggagcagcaccgcaactacgtgagcagcctgaagcggcagatcgcacagctcaaggaggagctgcaggagaggagtgagcagctcaggaatgggcagtaccaagccagcgatgctgct

SEQ ID NO: 117555 - DNA, 2352 bp, Homo sapiens
  Payload ID: 2961
  Gene Symbol: CSGALNACT1
  Gene Name: chondroitin sulfate N-acetylgalactosaminyltransferase 1
  Uniprot ID: Q8TDX6
  ENST ID: ENST00000519222
  CDS Start-End: 1160-2053
attctgcttttatctagttgacacatcggtttcctccattgatattcctaaaaggaagggacggctggggcccgttgtcactccctgcaaggcgcaatctccaggcaggggcagggcaggtctgggggcttcacgccccccagggagcgggtcacccggtgggactcgcgcccgccctctccttgggtgtcgtgttccctgggacgcgcccaccgttctccctggggagcgggaggctccaggcgcggctggggcgctgtgggcagatgcgctcggtcctcaccagcggcgttgtgcggcgaaccctgcggtgcttcgggaaggcggtcgttcctccctgctcccaccgttttccagcgtgtgcgctcttaccttctctggggaaaaaaggaaattttttattttttaacatttcatttcatgaaaccgttttttttaagtggtggcgctgaacacagtccttgcagaggggggcagcactttccctcctgaccccaacctggaaaccccagtgtgacttcagcgctgtcagagcattggaagcagagctgcgagttaggaagcggctcgctggcagctgggcacgtttctttcctgcgagatcggcttttttgatttgctctttttcacatgaaaatgttcagcttcatttttagacacctttagacatggttatcactgtttaaagccttgatttttttttaaacaaatagtttgcattttattcattgaaacagggagagaacaaataccatcctgctttttgggctgccttcctatttcaaggaaagacgccaaggtaattttgacccagaggagcaatgatgtagccacctcctaaccttcccttcttgaacccccaggtcccctcttgctgttggctgcacatcaggaaggctgtgatgggaatgaaggtgaaaacttggagatttcacttcagtcattgcttctgcctgcaagatcatcctttaaaagtagagaagctgctctgtgtggtggttaactccaagaggcagaactcgttctagaaggaaatggatgcaagcagctccgggggccccaaacgcatgcttcctgtggtctagcccagggaagcccttccgtgggggccccggctttgagggatgccaccggttctggacgcatggctgattcctgaatgatgatggttcgccgggggctgcttgcgtggatttcccgggtggtggttttgctggtgctcctctgctgtgctatctctgtcctgtacatgttggcctgcaccccaaaaggtgacgaggagcagctggcactgcccagggccaacagccccacggggaaggaggggtaccaggccgtccttcaggagtgggaggagcagcaccgcaactacgtgagcagcctgaagcggcagatcgcacagctcaaggaggagctgcaggagaggagtgagcagctcaggaatgggcagtaccaagccagcgatgctgctggcctgggtctggacaggagccccccagagaaaacccaggccgacctcctggccttcctgcactcgcaggtggacaaggcagaggtgaatgctggcgtcaagctggccacagagtatgcagcagtgcctttcgatagctttactctacagaaggtgtaccagctggagactggccttacccgccaccccgaggagaagcctgtgaggaaggacaagcgggatgagttggtggaagccattgaatcagccttggagaccctgaacagtcctgcagagaacagccccaatcaccgtccttacacggcctctgatttcatagaagggatctaccgaacagaaagggacaaagggacattgtatgagctcaccttcaaaggggaccacaaacacgaattcaaacggctcatcttatttcgaccattcggccccatcatgaaagtgaaaaatgaaaagctcaacatggccaacacgcttatcaatgttatcgtgcctctagcaaaaagggtggacaagttccggcagttcatgcagaatttcaggcctgctgatgaagtttttagatgtgtgcctttaagcccttgattgtgcggtgttggatcttagaagctgtgatggctcagatgcacatattggctgaggataaccagctaagtgatttcaccagcttgttttaaacatagaaaatcctactgtctaattataaatcttgaaagatcaagctgattttttatttctttttttttgagatggagtcttactctgtcacccaggctggagtgcagtggcacgaactctgctcactgcaaccttcacctcccaggttcagggagatgtgcattgagcaggatgggagagtccatctcactgttgtttactttggg

SEQ ID NO: 117556 - DNA, 646 bp, Homo sapiens
  Payload ID: 2961
  Gene Symbol: CSGALNACT1
  Gene Name: chondroitin sulfate N-acetylgalactosaminyltransferase 1
  ENST ID: ENST00000520003
  CDS Start-End: 486-646
agatgcgctcggtcctcaccagcggcgttgtgcggcgaaccctgcggtgcttcgggaaggcggtcgttcctccctgctcccaccgttttccagcctgccttcctatttcaaggaaagacgccaaggtaattttgacccagaggagcaatgatgtagccacctcctaaccttcccttcttgaacccccaggtcccctcttgctgttggctgcacatcaggaaggctgtgatgggaatgaaggtgaaaacttggagatttcacttcagtcattgcttctgcctgcaagatcatcctttaaaagtagagaagctgctctgtgtggtggttaactccaagaggcagaactcgttctagaaggaaatggatgcaagcagctccgggggccccaaacgcatgcttcctgtggtctagcccagggaagcccttccgtgggggccccggctttgagggatgccaccggttctggacgcatggctgattcctgaatgatgatggttcgccgggggctgcttgcgtggatttcccgggtggtggttttgctggtgctcctctgctgtgctatctctgtcctgtacatgttggcctgcaccccaaaaggtgacgaggagcagctggcactgcccagggccaacagccccacggggaa

SEQ ID NO: 117557 - DNA, 766 bp, Homo sapiens
  Payload ID: 2961
  Gene Symbol: CSGALNACT1
  Gene Name: chondroitin sulfate N-acetylgalactosaminyltransferase 1
  ENST ID: ENST00000517494
  CDS Start-End: 477-766
gcctgcctgtgtgtgctggaggtggcggtggatcttttattacccaacactccacttgcctttttagcctttcctctccctcttctctcctggcctcccagtggccgtcaggggtccctgcagacatcgcttacccacagtggtgcggtgtgagagttacaggggttcctgaccttcgctgtcccctcttgctgttggctgcacatcaggaaggctgtgatgggaatgaaggtgaaaacttggagatttcacttcagtcattgcttctgcctgcaagatcatcctttaaaagtagagaagctgctctgtgtggtggttaactccaagaggcagaactcgttctagaaggaaatggatgcaagcagctccgggggccccaaacgcatgcttcctgtggtctagcccagggaagcccttccgtgggggccccggctttgagggatgccaccggttctggacgcatggctgattcctgaatgatgatggttcgccgggggctgcttgcgtggatttcccgggtggtggttttgctggtgctcctctgctgtgctatctctgtcctgtacatgttggcctgcaccccaaaaggtgacgaggagcagctggcactgcccagggccaacagccccacggggaaggaggggtaccaggccgtccttcaggagtgggaggagcagcaccgcaactacgtgagcagcctgaagcggcagatcgcacagctcaaggaggagctgcaggagaggagtgagcagctcaggaatgggca

SEQ ID NO: 117558 - DNA, 1990 bp, Homo sapiens
  Payload ID: 2961
  Gene Symbol: CSGALNACT1
  Gene Name: chondroitin sulfate N-acetylgalactosaminyltransferase 1
  Uniprot ID: Q8TDX6
  ENST ID: ENST00000522854
  CDS Start-End: 392-1990
ctgccttcctatttcaaggaaagacgccaaggtaattttgacccagaggagcaatgatgtagccacctcctaaccttcccttcttgaacccccaggtcccctcttgctgttggctgcacatcaggaaggctgtgatgggaatgaaggtgaaaacttggagatttcacttcagtcattgcttctgcctgcaagatcatcctttaaaagtagagaagctgctctgtgtggtggttaactccaagaggcagaactcgttctagaaggaaatggatgcaagcagctccgggggccccaaacgcatgcttcctgtggtctagcccagggaagcccttccgtgggggccccggctttgagggatgccaccggttctggacgcatggctgattcctgaatgatgatggttcgccgggggctgcttgcgtggatttcccgggtggtggttttgctggtgctcctctgctgtgctatctctgtcctgtacatgttggcctgcaccccaaaaggtgacgaggagcagctggcactgcccagggccaacagccccacggggaaggaggggtaccaggccgtccttcaggagtgggaggagcagcaccgcaactacgtgagcagcctgaagcggcagatcgcacagctcaaggaggagctgcaggagaggagtgagcagctcaggaatgggcagtaccaagccagcgatgctgctggcctgggtctggacaggagccccccagagaaaacccaggccgacctcctggccttcctgcactcgcaggtggacaaggcagaggtgaatgctggcgtcaagctggccacagagtatgcagcagtgcctttcgatagctttactctacagaaggtgtaccagctggagactggccttacccgccaccccgaggagaagcctgtgaggaaggacaagcgggatgagttggtggaagccattgaatcagccttggagaccctgaacagtcctgcagagaacagccccaatcaccgtccttacacggcctctgatttcatagaagggatctaccgaacagaaagggacaaagggacattgtatgagctcaccttcaaaggggaccacaaacacgaattcaaacggctcatcttatttcgaccattcggccccatcatgaaagtgaaaaatgaaaagctcaacatggccaacacgcttatcaatgttatcgtgcctctagcaaaaagggtggacaagttccggcagttcatgcagaatttcagggagatgtgcattgagcaggatgggagagtccatctcactgttgtttactttgggaaagaagaaataaatgaagtcaaaggaatacttgaaaacacttccaaagctgccaacttcaggaactttaccttcatccagctgaatggagaattttctcggggaaagggacttgatgttggagcccgcttctggaagggaagcaacgtccttctctttttctgtgatgtggacatctacttcacatctgaattcctcaatacgtgtaggctgaatacacagccagggaagaaggtattttatccagttcttttcagtcagtacaatcctggcataatatacggccaccatgatgcagtccctcccttggaacagcagctggtcataaagaaggaaactggattttggagagactttggatttgggatgacgtgtcagtatcggtcagacttcatcaatataggtgggtttgatctggacatcaaaggctggggcggagaggatgtgcacctttatcgcaagtatctccacagcaacctcatagtggtacggacgcctgtgcgaggactcttccacctctggcatgagaagcgctgcatggacgagctgacccccgagcagtacaagatgtgcatgcagtccaaggccatgaacgaggcatcccacggccagctgggcatgctggtgttcaggcacgagatagaggctcaccttcgcaaacagaaacagaagacaagtagcaaaaaaacatga

SEQ ID NO: 117559 - DNA, 3730 bp, Homo sapiens
  Payload ID: 2962
  Gene Symbol: CSGALNACT2
  Gene Name: chondroitin sulfate N-acetylgalactosaminyltransferase 2
  Uniprot ID: Q8N6G5
  ENST ID: ENST00000374466
  CDS Start-End: 336-1964
cggcggcgggcccaaggcgtgaggcgccgcccgggtgtccccgcggcgcaggaggcggtggagcgcagagcgggcgagcgcgaaaaatcactaccaatataatggattttatatatcagattgctttattctggatatcatggtaacaatacagaaagtatacataatttcccatttctgcaagtagtcatgactgctgaagaaagaaaaacttaaagctacggcagaattattttatggaaattctgattttgtttttaatttttgataactttttactaaaggtatgaacacacaaagagcttattttgttaggcaaatacacattaataagaatgcctagaagaggactgattcttcacacccggacccactggttgctgttgggccttgctttgctctgcagtttggtattatttatgtacctcctggaatgtgccccccagactgatggaaatgcatctcttcctggtgttgttggggaaaattatggtaaagagtattatcaagccctcctacaggaacaagaagaacattatcagaccagggcaaccagtctgaaacgccaaattgcccaactaaaacaagaattacaagaaatgagtgagaagatgcggtcactgcaagaaagaaggaatgtaggggctaatggcataggctatcagagcaacaaagagcaagcacctagtgatcttttagagtttcttcattcccaaattgacaaagctgaagttagcataggggccaaactacccagtgagtatggggtcattccctttgaaagttttaccttaatgaaagtatttcaattggaaatgggtctcactcgccatcctgaagaaaagccagttagaaaagacaaacgagatgaattggtggaagttattgaagcgggcttggaggtcattaataatcctgatgaagatgatgaacaagaagatgaggagggtccccttggagagaaactgatatttaatgaaaatgacttcgtagaaggttattatcgcactgagagagataagggcacacagtatgaactcttttttaagaaagcagaccttacggaatatagacatgtgaccctcttccgcccttttggacctctcatgaaagtgaagagtgagatgattgacatcactagatcaattattaatatcattgtgccacttgctgaaagaactgaagcatttgtacaatttatgcagaacttcagggatgtttgtattcatcaagacaagaagattcatctcacagtggtgtattttggtaaagaaggactgtctaaagtcaagtctatcctagaatctgtcaccagtgagtctaattttcacaattacaccttggtctcattgaatgaagaatttaatcgtggacgaggactaaatgtgggtgcccgagcttgggacaagggagaggtcttgatgtttttctgtgatgttgatatctatttctcagccgaattccttaacagctgccggttaaatgctgagccaggtaagaaggtgttttaccctgtggtgttcagtctttacaatcctgccattgtttatgccaaccaggaagtgccaccacctgtggagcagcagctggttcacaaaaaggattctggcttttggcgagattttggctttggaatgacttgtcagtatcgttcagatttcctgaccattggtggatttgacatggaagtgaaaggttggggtggagaagatgttcatctttatcgaaaatacttacatggtgacctcattgtgattcggactccggttcctggtcttttccacctctggcatgaaaagcgctgtgctgatgagctgacccccgagcagtaccgcatgtgcatccagtctaaagccatgaatgaggcctctcactcccacctgggaatgctggtcttcagggaggaaatagagacgcatcttcataaacaggcatacaggacaaacagtgaagctgttggttgaaatcataattaatgcgttactgtatgaaccacaaaacagcactatttatttagccttacttctacttccagatgcagtgcctcttttggagaagacatgtttatttttcatgttctttctgacattactttagcaattcaacttgatgtgagaagaaaaaacaaatgtttcaacacaaaatctctgttttgtgagaatactgcactatggaataattgacaaattgaaatctcatatttgtcccaaaagttgttttgagttagttctacctggtgcccatgttctgattgtgtgtgggattgcatggtgtcctgattgcatctaggtggagcggatggaatgtgctgggccactgttgggtggagagcagcacattcttacagaggagatggagcgttatgagcatagtatgtggataggtatcttcacctgcccgcccctgagtcagcctccttgacttgatagcttgaagaatccttttccactgaaatagaggataattaattgacacatctgaaatccccaatcaatcaatcaagagaaaggtagaactaaaaactccttaacttactgttgcttacacccctgaaagtctgtttttaagcaaatgggtaatagtagaaaataggttagaatctatggcttgattaaaaatatgttattacattatcatgttcaggattaggattagtagtcagttgctgtaaactattttgaacaaacagaaaagaacacggaaacatttttaacagagcatttaattatgttggaatacaggatcctagctctgtctgggaacattagtttatttgagccagctctatcagggtcttcccatggtggttcagaatagatgagcatagcatggttttgtttgtttttgctttcaattttctaatttggcatggatccatatgtatttactatcctttttctaatatattaatatatgctacatttgtatttgcattactataatactttgagttgaaaaagagtttcattgtggagagaaaaagcaaatggtatgccacaagatcactctgatttgagaaaagggaggaggggaagatagtctgaatggaaatctgaaatacggaatgttttagagaaatatgtcacttgcatatagaatgttttaattgaggtataaattaatgagacaaagtgaaaaagaaattatattcagataggactgcactacattatttgtcacacatggatctgttaccatcaggtcaattcctagtatgcataaattttttaacccttttaaaagagacctatgttgaaaacccctgaaaattcactgaagaaaaatcattactctttttctcagtaaatcatatcatctgaaatattacaaatttcaaatttctaggtgctatattaattcaatattacaataactcttacctaattattcttacaagttttaagttgtggtagtttagtgatttttttaaaagatgtgtgaaatgttctctgcaaaataattcaggccactgtctccttttatatattattataattatttattatgaagaccagtgaattacgatatttaaagtgagagaacttaattatttgcaaaggtaagttacagcttgttttttgagagaatcaaatgagtttacttttgttcctgttgtttttaactagctttaagtttaaagatggaagctaagcaatggaaatgctatacgtttttgacatttattaaatggtaccaataaagtattttattaccaaaagttaaatgaaaa

SEQ ID NO: 117560 - DNA, 8290 bp, Homo sapiens
  Payload ID: 2963
  Gene Symbol: CSPG4
  Gene Name: chondroitin sulfate proteoglycan 4
  Uniprot ID: Q6UVK1
  ENST ID: ENST00000308508
  CDS Start-End: 94-7062
gcgcccaggagcagagccgcgctcgctccactcagctcccagctcccaggactccgctggctcctcgcaagtcctgccgcccagcccgccgggatgcagtccgggccgcggcccccacttccagcccccggcctggccttggctttgaccctgactatgttggccagacttgcatccgcggcttccttcttcggtgagaaccacctggaggtgcctgtggccacggctctgaccgacatagacctgcagctgcagttctccacgtcccagcccgaagccctccttctcctggcagcaggcccagctgaccacctcctgctgcagctctactctggacgcctgcaggtcagacttgttctgggccaggaggagctgaggctgcagactccagcagagacgctgctgagtgactccatcccccacactgtggtgctgactgtcgtagagggctgggccacgttgtcagtcgatgggtttctgaacgcctcctcagcagtcccaggagcccccctagaggtcccctatgggctctttgttgggggcactgggacccttggcctgccctacctgaggggaaccagccgacccctgaggggttgcctccatgcagccaccctcaatggccgcagcctcctccggcctctgacccccgatgtgcatgagggctgtgctgaagagttttctgccagtgatgatgtggccctgggcttctctgggccccactctctggctgccttccctgcctggggcactcaggacgaaggaaccctagagtttacactcaccacacagagccggcaggcacccttggccttccaggcagggggccggcgtggggacttcatctatgtggacatatttgagggccacctgcgggccgtggtggagaagggccagggtaccgtattgctccacaacagtgtgcctgtggccgatgggcagccccatgaggtcagtgtccacatcaatgctcaccggctggaaatctccgtggaccagtaccctacgcatacttcgaaccgaggagtcctcagctacctggagccacggggcagtctccttctcggggggctggatgcagaggcctctcgtcacctccaggaacaccgcctgggcctgacaccagaggccaccaatgcctccctgctgggctgcatggaagacctcagtgtcaatggccagaggcgggggctgcgggaagctttgctgacgcgcaacatggcagccggctgcaggctggaggaggaggagtatgaggacgatgcctatggacattatgaagctttctccaccctggcccctgaggcttggccagccatggagctgcctgagccatgcgtgcctgagccagggctgcctcctgtctttgccaatttcacccagctgctgactatcagcccactggtggtggccgaggggggcacagcctggcttgagtggaggcatgtgcagcccacgctggacctgatggaggctgagctgcgcaaatcccaggtgctgttcagcgtgacccgaggggcacgccatggcgagctcgagctggacatcccgggagcccaggcacgaaaaatgttcaccctcctggacgtggtgaaccgcaaggcccgcttcatccacgatggctctgaggacacctccgaccagctggtgctggaggtgtcggtgacggctcgggtgcccatgccctcatgccttcggaggggccaaacatacctcctgcccatccaggtcaaccctgtcaatgacccaccccacatcatcttcccacatggcagcctcatggtgatcctggaacacacgcagaagccgctggggcctgaggttttccaggcctatgacccggactctgcctgtgagggcctcaccttccaggtccttggcacctcctctggcctccccgtggagcgccgagaccagcctggggagccggcgaccgagttctcctgccgggagttggaggccggcagcctagtctatgtccaccgcggtggtcctgcacaggacttgacgttccgggtcagcgatggactgcaggccagccccccggccacgctgaaggtggtggccatccggccggccatacagatccaccgcagcacagggttgcgactggcccaaggctctgccatgcccatcttgcccgccaacctgtcggtggagaccaatgccgtggggcaggatgtgagcgtgctgttccgcgtcactggggccctgcagtttggggagctgcagaagcagggggcaggtggggtggagggtgctgagtggtgggccacacaggcgttccaccagcgggatgtggagcagggccgcgtgaggtacctgagcactgacccacagcaccacgcttacgacaccgtggagaacctggccctggaggtgcaggtgggccaggagatcctgagcaatctgtccttcccagtgaccatccagagagccactgtgtggatgctgcggctggagccactgcacactcagaacacccagcaggagaccctcaccacagcccacctggaggccaccctggaggaggcaggcccaagccccccaaccttccattatgaggtggttcaggctcccaggaaaggcaaccttcaactacagggcacaaggctgtcagatggccagggcttcacccaggatgacatacaggctggccgggtgacctatggggccacagcacgtgcctcagaggcagtcgaggacaccttccgtttccgtgtcacagctccaccatatttctccccactctataccttccccatccacattggtggtgacccagatgcgcctgtcctcaccaatgtcctcctcgtggtgcctgagggtggtgagggtgtcctctctgctgaccacctctttgtcaagagtctcaacagtgccagctacctctatgaggtcatggagcggccccgccatgggaggttggcttggcgtgggacacaggacaagaccactatggtgacatccttcaccaatgaagacctgttgcgtggccggctggtctaccagcatgatgactccgagaccacagaagatgatatcccatttgttgctacccgccagggcgagagcagtggtgacatggcctgggaggaggtacggggtgtcttccgagtggccatccagcccgtgaatgaccacgcccctgtgcagaccatcagccggatcttccatgtggcccggggtgggcggcggctgctgactacagacgacgtggccttcagcgatgctgactcgggctttgctgacgcccagctggtgcttacccgcaaggacctcctctttggcagtatcgtggccgtagatgagcccacgcggcccatctaccgcttcacccaggaggacctcaggaagaggcgagtactgttcgtgcactcaggggctgaccgtggctggatccagctgcaggtgtccgacgggcaacaccaggccactgcgctgctggaggtgcaggcctcggaaccctacctccgtgtggccaacggctccagccttgtggtccctcaaggaggccagggcaccatcgacacggccgtgctccacctggacaccaacctcgacatccgcagtggggatgaggtccactaccacgtcacagctggccctcgctggggacagctagtccgggctggtcagccagccacagccttctcccagcaggacctgctggatggggccgttctctatagccacaatggcagcctcagcccccgcgacaccatggccttctccgtggaagcagggccagtgcacacggatgccaccctacaagtgaccattgccctagagggcccactggccccactgaagctggtccggcacaagaagatctacgtcttccagggagaggcagctgagatcagaagggaccagctggaggcagcccaggaggcagtgccacctgcagacatcgtattctcagtgaagagcccaccgagtgccggctacctggtgatggtgtcgcgtggcgccttggcagatgagccacccagcctggaccctgtgcagagcttctcccaggaggcagtggacacaggcagggtcctgtacctgcactcccgccctgaggcctggagcgatgccttctcgctggatgtggcctcaggcctgggtgctcccctcgagggcgtccttgtggagctggaggtgctgcccgctgccatcccactagaggcgcaaaacttcagcgtccctgagggtggcagcctcaccctggcccctccactgctccgtgtctccgggccctacttccccactctcctgggcctcagcctgcaggtgctggagccaccccagcatggagccctgcagaaggaggacggacctcaagccaggaccctcagcgccttctcctggagaatggtggaagagcagctgatccgctacgtgcatgacgggagcgagacactgacagacagttttgtcctgatggctaatgcctccgagatggatcgccagagccatcctgtggccttcactgtcactgtcctgcctgtcaatgaccaaccccccatcctcactacaaacacaggcctgcagatgtgggagggggccactgcgcccatccctgcggaggctctgaggagcacggacggcgactctgggtctgaggatctggtctacaccatcgagcagcccagcaacgggcgggtagtgctgcggggggcgccgggcactgaggtgcgcagcttcacgcaggcccagctggacggcgggctcgtgctgttctcacacagaggaaccctggatggaggcttccgcttccgcctctctgacggcgagcacacttcccccggacacttcttccgagtgacggcccagaagcaagtgctcctctcgctgaagggcagccagacactgactgtctgcccagggtccgtccagccactcagcagtcagaccctcagggccagctccagcgcaggcactgacccccagctcctgctctaccgtgtggtgcggggcccccagctaggccggctgttccacgcccagcaggacagcacaggggaggccctggtgaacttcactcaggcagaggtctacgctgggaatattctgtatgagcatgagatgccccccgagcccttttgggaggcccatgataccctagagctccagctgtcctcgccgcctgcccgggacgtggccgccacccttgctgtggctgtgtcttttgaggctgcctgtccccagcgccccagccacctctggaagaacaaaggtctctgggtccccgagggccagcgggccaggatcaccgtggctgctctggatgcctccaatctcttggccagcgttccatcaccccagcgctcagagcatgatgtgctcttccaggtcacacagttccccagccggggccagctgttggtgtccgaggagcccctccatgctgggcagccccacttcctgcagtcccagctggctgcagggcagctagtgtatgcccacggcggtgggggcacccagcaggatggcttccactttcgtgcccacctccaggggccagcaggggcctccgtggctggaccccaaacctcagaggcctttgccatcacggtgagggatgtaaatgagcggccccctcagccacaggcctctgtcccactccggctcacccgaggctctcgtgcccccatctcccgggcccagctgagtgtggtggacccagactcagctcctggggagattgagtacgaggtccagcgggcaccccacaacggcttcctcagcctggtgggtggtggcctggggcccgtgacccgcttcacgcaagccgatgtggattcagggcggctggccttcgtggccaacgggagcagcgtggcaggcatcttccagctgagcatgtctgatggggccagcccacccctgcccatgtccctggctgtggacatcctaccatccgccatcgaggtgcagctgcgggcacccctggaggtgccccaagctttggggcgctcctcactgagccagcagcagctccgggtggtttcagatcgggaggagccagaggcagcataccgcctcatccagggaccccagtatgggcatctcctggtgggcgggcggcccacctcggccttcagccaattccagatagaccagggcgaggtggtctttgccttcaccaacttctcctcctctcatgaccacttcagagtcctggcactggctaggggtgtcaatgcatcagccgtagtgaacgtcactgtgagggctctgctgcatgtgtgggcaggtgggccatggccccagggtgccaccctgcgcctggaccccaccgtcctagatgctggcgagctggccaaccgcacaggcagtgtgccgcgcttccgcctcctggagggaccccggcatggccgcgtggtccgcgtgccccgagccaggacggagcccgggggcagccagctggtggagcagttcactcagcaggaccttgaggacgggaggctggggctggaggtgggcaggccagaggggagggcccccggccccgcaggtgacagtctcactctggagctgtgggcacagggcgtcccgcctgctgtggcctccctggactttgccactgagccttacaatgctgcccggccctacagcgtggccctgctcagtgtccccgaggccgcccggacggaagcagggaagccagagagcagcacccccacaggcgagccaggccccatggcatccagccctgagcccgctgtggccaagggaggcttcctgagcttccttgaggccaacatgttcagcgtcatcatccccatgtgcctggtacttctgctcctggcgctcatcctgcccctgctcttctacctccgaaaacgcaacaagacgggcaagcatgacgtccaggtcctgactgccaagccccgcaacggcctggctggtgacaccgagacctttcgcaaggtggagccaggccaggccatcccgctcacagctgtgcctggccaggggccccctccaggaggccagcctgacccagagctgctgcagttctgccggacacccaaccctgcccttaagaatggccagtactgggtgtgaggcctggcctgggcccagatgctgatcgggccagggacaggcttgcccatgtcccgggccccattgcttccatgcctggtgctgtctgagtatccccagagcaagagagacctggagacaccaggggtggagggtcctgggagatagtcccaggggtccgggacagagtggagtcaagagctggaacctccctcagctcactccgagcctggagaactgcaggggccaaggtggaggcaggcttaagttcagtcctcctgccctggagctggtttgggctgtcaaaaccagggtaacctcctacatgggtcatgactctgggtcctgggtctgtgaccttgggtaagtcgcgcctgacccaggctgctaagagggcaaggagaaggaagtaccctggggagggaagggacagaggaagctattcctggcttttccactccaacccaggccaccctttgtctctgccccagagttgagaaaaaaacttcctcccctggttttttagggagatggtatcccctggagtagagggcaagaggagagagcgcctccagtctagaaggcataagccaataggataatatattcagggtgcagggtgggtaggttgctctggggatgggtttatttaagggagattgcaaggaagctatttaacatggtgctgagctagccaggactgatggagcccctgggggtgtgggatggaggagggtctgcagccagttcattcccagggccccatcttgatgggccaagggctaaacatgcatgtgtcagtggctttggagcaggttaggctggggctcatcgagggtctcaggccgaggccactgcggtgccagtgcccccctgaggactagggcaggcagctgggggcacttggttccatggagcctggataaacagtgctttggaggctctggacagctgtgtggtgtttgtgtcttaactatgcactgggcccttgtctgcgtcggcttgcatacagagggcccctggggtcggccctccggcctggcctcagccagtgggatggacagggccaggcaggcctctgaacttccacctcctggggcctcccagacctcctgtgcccccacctgtgtgggcaggtgggccagtcttcgggtgatgggaccaaaccccttcagttcagtagagaaaggctaggtcctctacaaagagctgcaagacaaaaattaaaataaatgctccccaccctaga

SEQ ID NO: 117561 - DNA, 4080 bp, Homo sapiens
  Payload ID: 2964
  Gene Symbol: CSPG5
  Gene Name: chondroitin sulfate proteoglycan 5 (neuroglycan C)
  Uniprot ID: O95196
  ENST ID: ENST00000264723
  CDS Start-End: 2100-3719
agatacttaaataattaacaaaatatatttaaaatgagtgggagaacttcctccattaaaccctgttgaaaatgtgtgagtggttgtcatgccccagacatcaaggaacccatccatgaggtcttcccacacagactggcctcaggaagggaaggaggaggtaggccgctctgacagccacaacccgagttgaggaaacaagcaaaggaacacagagagtctacatacagtaaaaggtgacaggagttaagctgcacacaagggaagcagagatgggttggaggcagttaagggtgcgttgctgcctctgtggctgaggtgagtgcaaagccctacatggtcccctgtttagagaaggctattgtttcaaacatattttacttggtccccggaggcagcatgaaactatgaaagaaagagccttaccccttttttcaaggctctccagaccacagttctgggatgggtgtgggtggttgccattcgttcatttatgcctgtctgatatggagcctccctctgttaccagccctgtgcactcaagtgccttgcagtccagtgaggaataactgtagataagatgagatgatgggcattaagtgtaactgctgagaagccttcatagagggaaaggtgataagaactgagtttttctggcatgaggagtttaccaggcaggagaggtggagacgctaggctaggcaaataggctgcagccatagttctgctgagaaacaggttttgaaccaaggcaactccatctggagatatgtatcagaaagattaggagatagaatctccatcttggtcacttatttggtcttctaagacagcaatgggaccgtctcttaaatactggagttgtcctatctccttgggctgataccctgaactgtcatttgggtgagtaacacattaaggggtagacggtcggtttgggggaataaactaagtaactaggttgcggttcctcctgccgactaagcagacctcctggtgcgtggtcttgggttgccctgtgagccctgaagctgtgaatgggccccacagatcactctaaagccaagcatccatgtgtgcccggctggggatctagacccccctggtctacccaggaacctgagttttggtggtctgagacacctgggggacgacgtatcccggagaagggaccaggattaaaggccgctccccaggctgcccggagactagaaggaaggcgaggtagccgcagtcccagggagggtcttaccccttgctcccgggatgcgttatggcgggcctggctgtgcgagatctaggctagtggctttggctgcgaacggattagatctgatccgattagagcctgggcggtcggcttcgcccccttgccaggctctgccaacgcccgcccctccctcgtggagacccggagacctccctgagagccttcccgcccggaacacgggattggtgcagaatccgagaggctccatgcgccccgggcctggcttgtttccacagtgggggctcgtgcttccgccccctgcggctcttctggaccccgccccgaccctgcgggtaactgggcccgcgacgtccccgcctccgtgcttgccgcgtggcgggtgggttcctccgggtcggggccccgtgccgcctgttcacctggggcgggaccgtggccccatcccacaggtctcccgcccgtgcacctgccgcctaacgccgcgcgccgcgccgtgcgcctgcctcgcgctccccgtccgcctgccccgcactccccgtccgtgtgtctcctagtccccagcgaggggtctgtctgttcccctggcaggctgaccaaggggccggcgtcaccgctacgtgcggcggggccggcgcggcgggcggggtgagggcggcgctgagcgcagcggcggcagcggcggcgcgggaggcggggaggcgcggcgcgccggggacagcggcggacggcggcggcggcggcatgcggctcctcgcgctgcccatcgtgggctgaggcggccgcagaaccggcgggaggcgcggcggccgggcgagccgagggcgcagccagccgggcggaccgcggacagcggtcggggcgccgcgccatggggcgagccgggggcgggggcccgggccgggggccgccgccactgctgctgtttctgggggccgcgctggtcctggcctctggggccgtgccggcgcgtgaggcgggcagcgcggttgaggccgaagagctggtgaagggcagcccggcgtgggagccgcctgccaacgacacgcgggaagaagccggcccaccagcggctggggaagatgaggcgtcgtggacggcgcccggtggcgagctggccgggccagaagaggtgctgcaggagtcggctgcggtgaccggcaccgcctggctggaagctgacagcccaggcctgggaggagtgaccgcagaggcgggcagcggcgatgcccaggcccttccagctacgctccaggctccccacgaggtcctcgggcagtcaatcatgccccctgccattcctgaggctacagaggccagcgggccaccctcccccacccccggcgacaagctgagcccagcttctgaactccccaaggagagccccttggaggtttggctgaacctggggggcagcacacccgaccctcaagggccagagctgacttacccatttcagggcaccctggagccccaaccggcatcagatatcattgacatcgactacttcgaaggactggatggtgagggtcgtggcgcagatctggggagcttcccagggtcaccaggaacctcagagaaccaccctgatactgagggagagaccccttcctggagcctgcttgacttatacgatgatttcacccccttcgatgaatctgatttctaccccaccacatccttttatgatgacttggatgaagaggaggaggaagaggaggatgacaaagatgcagtaggaggtggagacctagaagatgaaaatgagcttctagtgcccactgggaagcctggtctggggcccgggacaggccagcccaccagtcggtggcatgctgtccctccacagcacactctggggtcggtccccggcagcagcatcgccctcaggccccgcccaggagagccaggcagggacttggcctccagtgaaaatggcactgagtgccgcagtggctttgtgcggcataacggctcctgccggtcagtgtgcgacctcttcccaagttactgtcacaatggcggccagtgctacctggtggagaacataggggccttctgcaggtgcaacacgcaggactacatctggcacaaggggatgcgctgcgagtccatcatcaccgacttccaggtgatgtgcgtggccgtgggctcggctgccctcgtcctgctcctgctcttcatgatgacggtgttctttgccaagaagctctacctgctcaagacggagaataccaagctgcgtaggaccaacaaattccggaccccatctgagctccacaatgataacttctccctctccaccattgccgagggctctcacccaaatgatgatcctagtgctccccacaaaatccaggaggttctcaagtcctgcctgaaagaggaggagtcatttaacatccagaactccatgtcgcccaaacttgagggtggcaaaggtgaccaggctgacttggatgtgaactgtcttcagaataatttaacctaaagcagagcaagaagagaggaagcgggggtagtgggtggggggtaggggaagaaacattatctcctcttgtacagagtctatttcttgtaaccatttgttaaactcttttctttttctgatctcatggcatgcttttatgtattttgtacaggaggcaaaaaaatacttaaaataagcaaagaaactgaacagaattgcatacattgggttgttttttctgtgctgtctgtacattgcttctgctgctgtgatttctaaacctgtgctgttattcaactgacttttttttgtactttgacccacgtttttttgaaataccagtaaaaaacaaagttcttgaaataaaactttttaaaaagtt

SEQ ID NO: 117562 - DNA, 4161 bp, Homo sapiens
  Payload ID: 2964
  Gene Symbol: CSPG5
  Gene Name: chondroitin sulfate proteoglycan 5 (neuroglycan C)
  Uniprot ID: O95196
  ENST ID: ENST00000383738
  CDS Start-End: 2100-3800
agatacttaaataattaacaaaatatatttaaaatgagtgggagaacttcctccattaaaccctgttgaaaatgtgtgagtggttgtcatgccccagacatcaaggaacccatccatgaggtcttcccacacagactggcctcaggaagggaaggaggaggtaggccgctctgacagccacaacccgagttgaggaaacaagcaaaggaacacagagagtctacatacagtaaaaggtgacaggagttaagctgcacacaagggaagcagagatgggttggaggcagttaagggtgcgttgctgcctctgtggctgaggtgagtgcaaagccctacatggtcccctgtttagagaaggctattgtttcaaacatattttacttggtccccggaggcagcatgaaactatgaaagaaagagccttaccccttttttcaaggctctccagaccacagttctgggatgggtgtgggtggttgccattcgttcatttatgcctgtctgatatggagcctccctctgttaccagccctgtgcactcaagtgccttgcagtccagtgaggaataactgtagataagatgagatgatgggcattaagtgtaactgctgagaagccttcatagagggaaaggtgataagaactgagtttttctggcatgaggagtttaccaggcaggagaggtggagacgctaggctaggcaaataggctgcagccatagttctgctgagaaacaggttttgaaccaaggcaactccatctggagatatgtatcagaaagattaggagatagaatctccatcttggtcacttatttggtcttctaagacagcaatgggaccgtctcttaaatactggagttgtcctatctccttgggctgataccctgaactgtcatttgggtgagtaacacattaaggggtagacggtcggtttgggggaataaactaagtaactaggttgcggttcctcctgccgactaagcagacctcctggtgcgtggtcttgggttgccctgtgagccctgaagctgtgaatgggccccacagatcactctaaagccaagcatccatgtgtgcccggctggggatctagacccccctggtctacccaggaacctgagttttggtggtctgagacacctgggggacgacgtatcccggagaagggaccaggattaaaggccgctccccaggctgcccggagactagaaggaaggcgaggtagccgcagtcccagggagggtcttaccccttgctcccgggatgcgttatggcgggcctggctgtgcgagatctaggctagtggctttggctgcgaacggattagatctgatccgattagagcctgggcggtcggcttcgcccccttgccaggctctgccaacgcccgcccctccctcgtggagacccggagacctccctgagagccttcccgcccggaacacgggattggtgcagaatccgagaggctccatgcgccccgggcctggcttgtttccacagtgggggctcgtgcttccgccccctgcggctcttctggaccccgccccgaccctgcgggtaactgggcccgcgacgtccccgcctccgtgcttgccgcgtggcgggtgggttcctccgggtcggggccccgtgccgcctgttcacctggggcgggaccgtggccccatcccacaggtctcccgcccgtgcacctgccgcctaacgccgcgcgccgcgccgtgcgcctgcctcgcgctccccgtccgcctgccccgcactccccgtccgtgtgtctcctagtccccagcgaggggtctgtctgttcccctggcaggctgaccaaggggccggcgtcaccgctacgtgcggcggggccggcgcggcgggcggggtgagggcggcgctgagcgcagcggcggcagcggcggcgcgggaggcggggaggcgcggcgcgccggggacagcggcggacggcggcggcggcggcatgcggctcctcgcgctgcccatcgtgggctgaggcggccgcagaaccggcgggaggcgcggcggccgggcgagccgagggcgcagccagccgggcggaccgcggacagcggtcggggcgccgcgccatggggcgagccgggggcgggggcccgggccgggggccgccgccactgctgctgtttctgggggccgcgctggtcctggcctctggggccgtgccggcgcgtgaggcgggcagcgcggttgaggccgaagagctggtgaagggcagcccggcgtgggagccgcctgccaacgacacgcgggaagaagccggcccaccagcggctggggaagatgaggcgtcgtggacggcgcccggtggcgagctggccgggccagaagaggtgctgcaggagtcggctgcggtgaccggcaccgcctggctggaagctgacagcccaggcctgggaggagtgaccgcagaggcgggcagcggcgatgcccaggcccttccagctacgctccaggctccccacgaggtcctcgggcagtcaatcatgccccctgccattcctgaggctacagaggccagcgggccaccctcccccacccccggcgacaagctgagcccagcttctgaactccccaaggagagccccttggaggtttggctgaacctggggggcagcacacccgaccctcaagggccagagctgacttacccatttcagggcaccctggagccccaaccggcatcagatatcattgacatcgactacttcgaaggactggatggtgagggtcgtggcgcagatctggggagcttcccagggtcaccaggaacctcagagaaccaccctgatactgagggagagaccccttcctggagcctgcttgacttatacgatgatttcacccccttcgatgaatctgatttctaccccaccacatccttttatgatgacttggatgaagaggaggaggaagaggaggatgacaaagatgcagtaggaggtggagacctagaagatgaaaatgagcttctagtgcccactgggaagcctggtctggggcccgggacaggccagcccaccagtcggtggcatgctgtccctccacagcacactctggggtcggtccccggcagcagcatcgccctcaggccccgcccaggagagccaggcagggacttggcctccagtgaaaatggcactgagtgccgcagtggctttgtgcggcataacggctcctgccggtcagtgtgcgacctcttcccaagttactgtcacaatggcggccagtgctacctggtggagaacataggggccttctgcaggtgcaacacgcaggactacatctggcacaaggggatgcgctgcgagtccatcatcaccgacttccaggtgatgtgcgtggccgtgggctcggctgccctcgtcctgctcctgctcttcatgatgacggtgttctttgccaagaagctctacctgctcaagacggagaataccaagctgcgtaggaccaacaaattccggaccccatctgagctccacaatgataacttctccctctccaccattgccgagggctctcacccaaatgtaaggaaactttgcaacactccccgtacctcctccccccatgcccgtgccttggctcactatgataacgttatctgtcaggatgatcctagtgctccccacaaaatccaggaggttctcaagtcctgcctgaaagaggaggagtcatttaacatccagaactccatgtcgcccaaacttgagggtggcaaaggtgaccaggctgacttggatgtgaactgtcttcagaataatttaacctaaagcagagcaagaagagaggaagcgggggtagtgggtggggggtaggggaagaaacattatctcctcttgtacagagtctatttcttgtaaccatttgttaaactcttttctttttctgatctcatggcatgcttttatgtattttgtacaggaggcaaaaaaatacttaaaataagcaaagaaactgaacagaattgcatacattgggttgttttttctgtgctgtctgtacattgcttctgctgctgtgatttctaaacctgtgctgttattcaactgacttttttttgtactttgacccacgtttttttgaaataccagtaaaaaacaaagttcttgaaataaaactttttaaaaagtt

SEQ ID NO: 117563 - DNA, 2089 bp, Homo sapiens
  Payload ID: 2964
  Gene Symbol: CSPG5
  Gene Name: chondroitin sulfate proteoglycan 5 (neuroglycan C)
  Uniprot ID: O95196
  ENST ID: ENST00000456150
  CDS Start-End: 523-1728
gtgtgatcctcgtcttgggggcagactccgggacggggcttagaggtaccgggtggctggggtcacactggggcggtggggtctgagggtggcgaggtctgggttgaccaggtctaggcgagcgggcctgaccggggcgggccggggctccagggctcctcagcgcgccgccctgacgtcccgccccttgccctcccgcccgcagcgcgtgaggcgggcagcgcggttgaggccgaagagctggtgaagggcagcccggcgtgggagccgcctgccaacgacacgcgggaagaagccggcccaccagcggctggggaagatgaggcgtcgtggacggcgcccggtggcgagctggccgggccagaagaggtgctgcaggagtcggctgcggtgaccggcaccgcctggctggaagctgacagcccaggcctgggaggagtgaccgcagaggcgggcagcggcgatgcccaggcccttccagctacgctccaggctccccacgaggtcctcgggcagtcaatcatgccccctgccattcctgaggctacagaggccagcgggccaccctcccccacccccggcgacaagctgagcccagcttctgaactccccaaggagagccccttggaggtttggctgaacctggggggcagcacacccgaccctcaagggccagagctgacttacccatttcagggcaccctggagccccaaccggcatcagatatcattgacatcgactacttcgaaggactggatggtgagggtcgtggcgcagatctggggagcttcccagggtcaccaggaacctcagagaaccaccctgatactgagggagagaccccttcctggagcctgcttgacttatacgatgatttcacccccttcgatgaatctgatttctaccccaccacatccttttatgatgacttggatgaagaggaggaggaagaggaggatgacaaagatgcagtaggaggtggagacctagaagatgaaaatgagcttctagtgcccactgggaagcctggtctggggcccgggacaggccagcccaccagtcggtggcatgctgtccctccacagcacactctggggtcggtccccggcagcagcatcgccctcaggccccgcccaggagagccaggcagggacttggcctccagtgaaaatggcactgagtgccgcagtggctttgtgcggcataacggctcctgccggtcagtgtgcgacctcttcccaagttactgtcacaatggcggccagtgctacctggtggagaacataggggccttctgcaggtgcaacacgcaggactacatctggcacaaggggatgcgctgcgagtccatcatcaccgacttccaggtgatgtgcgtggccgtgggctcggctgccctcgtcctgctcctgctcttcatgatgacggtgttctttgccaagaagctctacctgctcaagacggagaataccaagctgcgtaggaccaacaaattccggaccccatctgagctccacaatgataacttctccctctccaccattgccgagggctctcacccaaatgatgatcctagtgctccccacaaaatccaggaggttctcaagtcctgcctgaaagaggaggagtcatttaacatccagaactccatgtcgcccaaacttgagggtggcaaaggtgaccaggctgacttggatgtgaactgtcttcagaataatttaacctaaagcagagcaagaagagaggaagcgggggtagtgggtggggggtaggggaagaaacattatctcctcttgtacagagtctatttcttgtaaccatttgttaaactcttttctttttctgatctcatggcatgcttttatgtattttgtacaggaggcaaaaaaatacttaaaataagcaaagaaactgaacagaattgcatacattgggttgttttttctgtgctgtctgtacattgcttctgctgctgtgatttctaaacctgtgctgttattcaactgacttttttttgtactttgacccacgtttttttgaaataccagtaaaaaacaaagttcttgaaataaaactttttaaaaagtt

SEQ ID NO: 117564 - DNA, 2073 bp, Homo sapiens
  Payload ID: 2964
  Gene Symbol: CSPG5
  Gene Name: chondroitin sulfate proteoglycan 5 (neuroglycan C)
  ENST ID: ENST00000610462
  CDS Start-End: 177-1610
ggggaggcgcggcgcgccggggacagcggcggacggcggcggcggcggcatgcggctcctcgcgctgcccatcgtgggctgaggcggccgcagaaccggcgggaggcgcggcggccgggcgagccgagggcgcagccagccgggcggaccgcggacagcggtcggggcgccgcgccatggggcgagccgggggcgggggcccgggccgggggccgccgccactgctgctgtttctgggggccgcgctggtcctggcctctggggccgtgccggcgcgtgaggcgggcagcgcggttgaggccgaagagctggtgaagggcagcccggcgtgggagccgcctgccaacgacacgcgggaagaagccggcccaccagcggctggggaagatgaggcgtcgtggacggcgcccggtggcgagctggccgggccagaagaggtgctgcaggagtcggctgcggtgaccggcaccgcctggctggaagctgacagcccaggcctgggaggagtgaccgcagaggcgggcagcggcgatgcccaggcccttccagctacgctccaggctccccacgaggtcctcgggcagtcaatcatgccccctgccattcctgaggctacagaggccagcgggccaccctcccccacccccggcgacaagctgagcccagcttctgaactccccaaggagagccccttggaggtttggctgaacctggggggcagcacacccgaccctcaagggccagagctgacttacccatttcagggcaccctggagccccaaccggcatcagatatcattgacatcgactacttcgaaggactggatggtgagggtcgtggcgcagatctggggagcttcccagggtcaccaggaacctcagagaaccaccctgatactgagggagagaccccttcctggagcctgcttgacttatacgatgatttcacccccttcgatgaatctgatttctaccccaccacatccttttatgatgacttggatgaagaggaggaggaagaggaggatgacaaagatgcagtaggaggtggagacctagaagatgaaaatgagcttctagtgcccactgggaagcctggtctggggcccgggacaggccagcccaccagtcggtggcatgctgtccctccacagcacactctggggtcggtccccggcagcagcatcgccctcaggccccgcccaggagagccaggcagggacttggcctccagtgaaaatggcactgagtgccgcagtggctttgtgcggcataacggctcctgccggtcagtgtgcgacctcttcccaagttactgtcacaatggcggccagtgctacctggtggagaacataggggccttctgcaggtgcaacacgcaggactacatctggcacaaggggatgcgctgcgagtccatcatcaccgacttccaggtgatgtgcgtggccgtgggctcggctgccctcgtcctgctcctgctcttcatgatgacggtgttctttgccaagaagctctacctgctcaagacggagaataccaagctgcgtaggaccaagatgatcctagtgctccccacaaaatccaggaggttctcaagtcctgcctgaaagaggaggagtcatttaacatccagaactccatgtcgcccaaacttgagggtggcaaaggtgaccaggctgacttggatgtgaactgtcttcagaataatttaacctaaagcagagcaagaagagaggaagcgggggtagtgggtggggggtaggggaagaaacattatctcctcttgtacagagtctatttcttgtaaccatttgttaaactcttttctttttctgatctcatggcatgcttttatgtattttgtacaggaggcaaaaaaatacttaaaataagcaaagaaactgaacagaattgcatacattgggttgttttttctgtgctgtctgtacattgcttctgctgctgtgatttctaaacctgtgctgttattcaactgacttttttttgtactttgacccacgtttttttgaaataccagtaaaaaacaaagttcttgaaataaaacttttt

SEQ ID NO: 117565 - DNA, 4550 bp, Homo sapiens
  Payload ID: 2965
  Gene Symbol: CHSY1
  Gene Name: chondroitin sulfate synthase 1
  Uniprot ID: Q86X52
  ENST ID: ENST00000254190
  CDS Start-End: 477-2885
ggcgagctaagccggaggatgtgcagctgcggcggcggcgccggctacgaagaggacggggacaggcgccgtgcgaaccgagcccagccagccggaggacgcgggcagggcgggacgggagcccggactcgtctgccgccgccgtcgtcgccgtcgtgccggccccgcgtccccgcgcgcgagcgggaggagccgccgccacctcgcgcccgagccgccgctagcgcgcgccgggcatggtcccctcttaaaggcgcaggccgcggcggcgggggcgggcgtgcggaacaaagcgccggcgcggggcctgcgggcggctcgggggccgcgatgggcgcggcgggcccgcggcggcggcggcgctgcccgggccgggcctcgcggcgctagggcgggctggcctccgcgggcgggggcagcgggctgagggcgcgcggagcctgcggcggcggcccggcgggcggagcggcgcgggcatggccgcgcgcggccggcgcgcctggctcagcgtgctgctcgggctcgtcctgggcttcgtgctggcctcgcggctcgtcctgccccgggcttccgagctgaagcgagcgggcccacggcgccgcgccagccccgagggctgccggtccgggcaggcggcggcttcccaggccggcggggcgcgcggcgatgcgcgcggggcgcagctctggccgcccggctcggacccagatggcggcccgcgcgacaggaactttctcttcgtgggagtcatgaccgcccagaaatacctgcagactcgggccgtggccgcctacagaacatggtccaagacaattcctgggaaagttcagttcttctcaagtgagggttctgacacatctgtaccaattccagtagtgccactacggggtgtggacgactcctacccgccccagaagaagtccttcatgatgctcaagtacatgcacgaccactacttggacaagtatgaatggtttatgagagcagatgatgacgtgtacatcaaaggagaccgtctggagaacttcctgaggagtttgaacagcagcgagcccctctttcttgggcagacaggcctgggcaccacggaagaaatgggaaaactggccctggagcctggtgagaacttctgcatgggggggcctggcgtgatcatgagccgggaggtgcttcggagaatggtgccgcacattggcaagtgtctccgggagatgtacaccacccatgaggacgtggaggtgggaaggtgtgtccggaggtttgcaggggtgcagtgtgtctggtcttatgagatgcagcagcttttttatgagaattacgagcagaacaaaaaggggtacattagagatctccataacagtaaaattcaccaagctatcacattacaccccaacaaaaacccaccctaccagtacaggctccacagctacatgctgagccgcaagatatccgagctccgccatcgcacaatacagctgcaccgcgaaattgtcctgatgagcaaatacagcaacacagaaattcataaagaggacctccagctgggaatccctccctccttcatgaggtttcagccccgccagcgagaggagattctggaatgggagtttctgactggaaaatacttgtattcggcagttgacggccagccccctcgaagaggaatggactccgcccagagggaagccttggacgacattgtcatgcaggtcatggagatgatcaatgccaacgccaagaccagagggcgcatcattgacttcaaagagatccagtacggctaccgccgggtgaaccccatgtatggggctgagtacatcctggacctgctgcttctgtacaaaaagcacaaagggaagaaaatgacggtccctgtgaggaggcacgcgtatttacagcagactttcagcaaaatccagtttgtggagcatgaggagctggatgcacaagagttggccaagagaatcaatcaggaatctggatccttgtcctttctctcaaactccctgaagaagctcgtcccctttcagctccctgggtcgaagagtgagcacaaagaacccaaagataaaaagataaacatactgattcctttgtctgggcgtttcgacatgtttgtgagatttatgggaaactttgagaagacgtgtcttatccccaatcagaacgtcaagctcgtggttctgcttttcaattctgactccaaccctgacaaggccaaacaagttgaactgatgagagattaccgcattaagtaccctaaagccgacatgcagattttgcctgtgtctggagagttttcaagagccctggccctggaagtaggatcctcccagtttaacaatgaatctttgctcttcttctgcgacgtcgacctcgtgtttactacagaattccttcagcgatgtcgagcaaatacagttctgggccaacaaatatattttccaatcatcttcagccagtatgacccaaagattgtttatagtgggaaagttcccagtgacaaccattttgcctttactcagaaaactggcttctggagaaactatgggtttggcatcacgtgtatttataagggagatcttgtccgagtgggtggctttgatgtttccatccaaggctgggggctggaggatgtggaccttttcaacaaggttgtccaggcaggtttgaagacgtttaggagccaggaagtaggagtagtccacgtccaccatcctgtcttttgtgatcccaatcttgaccccaaacagtacaaaatgtgcttggggtccaaagcatcgacctatgggtccacccagcagctggctgagatgtggctggaaaaaaatgatccaagttacagtaaaagcagcaataataatggctcagtgaggacagcctaatgtccagctttgctggaaaagacgtttttaattatctaatttatttttcaaaaattttttgtatgatcagtttttgaagtccgtatacaaggatatattttacaagtggttttcttacataggactcctttaagattgagctttctgaacaagaaggtgatcagtgtttgcctttgaacacatcttcttgctgaacattatgtagcagacctgcttaactttgacttgaaatgtacctgatgaacaaaacttttttaaaaaaatgttttcttttgagaccctttgctccagtcctatggcagaaaacgtgaacattcctgcaaagtattattgtaacaaaacactgtaactctggtaaatgttctgttgtgattgttaacattccacagattctaccttttgtgttttgttttttttttttacaattgttttaaagccatttcatgttccagttgtaagataaggaaatgtgataatagctgtttcatcattgtcttcaggagagctttccagagttgatcatttcctctcatggtactctgctcagcatggccacgtaggttttttgtttgttttgttttgttctttttttgagacggagtctcactctgttacccaggctggaatgcagtggcgcaatcttggctcactttaacctccacttccctggttcaagcaattcccctgcctttgcctcccgagtagctgggattacaggcacacaccaccacgcccagctagtttttttgtatttttagtagagacggggtttcaccatgcaagcccagctggccacgtaggttttaaagcaaggggcgtgaagaaggcacagtgaggtatgtggctgttctcgtggtagttcattcggcctaaatagacctggcattaaatttcaagaaggatttggcattttctcttcttgacccttctctttaaagggtaaaatattaatgtttagaatgacaaagatgaattattacaataaatctgatgtacacagactgaaacatacacacatacaccctaatcaaaacgttggggaaaaatgtatttggttttgttcctttcatcctgtctgtgttatgtgggtggagatggttttcattctttcattactgttttgttttatcctttgtatctgaaatacctttaatttatttaatatctgttgttcagagctctgccatttcttgagtacctgttagttagtattatttatgtgtatcgggagtgtgtttagtctgttttatttgcagtaaaccgatctccaaagatttccttttggaaacgctttttcccctccttaatttttatattccttactgttttactaaatattaagtgttctttgacaattttggtgctcatgtgttttggggacaaaagtgaaatgaatctgtcattataccagaaagttaaattctcagatcaaatgtgccttaataaatttgttttcatttagatttcaaacagtgatagacttgccattttaatacacgtcattggagggctgcgtatttgtaaatagcctgatgctcatttggaaaaataaaccagtgaacaatatttttctattgtacttttcgaaccattttgtctcattattcctgttttagctgaagaattgtattacatttggagagtaaaaaacttaaacacgattca

SEQ ID NO: 117566 - DNA, 3850 bp, Homo sapiens
  Payload ID: 2966
  Gene Symbol: CHSY3
  Gene Name: chondroitin sulfate synthase 3
  Uniprot ID: Q70JA7
  ENST ID: ENST00000305031
  CDS Start-End: 359-3007
gggtggcagcctaggagcggacgcgttgccgccgccgctgctcctcctcctcctcctgcagctcctccagctgccgctgctgccgccgctgccgccaccgccgccgccgggagaagtttcactcccgacccttgctcggagccccggcccagagctgagcgggagcccggcaggcagctgcagcccgcggcagtcgaggcgtccgcggcgcttcgacctccagccggtgtcggcgcctaggcggccggctgcggccgcggctgggggcgcaaaggcggaggaggggcgggtgtgagccggggaaaccgcgtgccgcgccgcgacagcccagcgagcgtccgcgcccgggacagccgcgatggctgtgcgctctcgccgcccgtggatgagcgtggcattagggctggtgctgggcttcaccgccgcgtcctggctcatcgcccccagggtggcggagctgagcgagaggaagagacgtggctccagcctctgctcctactacggtcgctctgctgctggcccccgcgccggcgctcagcagccgctcccccagccccagtcccgaccacggcaggagcagtcgccgccccccgcgcgccaggatctccaggggccaccgctgcccgaggcagcacccgggatcaccagttttcgaagcagcccctggcagcagccacctccgctgcagcagcggcggcgaggacgcgagcctgagggcgcgacggggcttcccggtgctccagcggccgagggggagcccgaggaggaggacgggggcgcggctgggcagcggagagacggccggccggggagtagccacaacggcagcggggacgggggcgctgccgccccgagcgcccgaccccgggacttcctgtacgtgggggtgatgaccgcgcagaagtacctgggcagccgcgcgctggccgcgcagcggacctgggcgcgtttcatcccgggccgcgtggagttcttttccagccagcagccccccaacgccggccagcccccgccacccctgcctgtcatcgcgctaccgggtgtggacgactcctatcctccccagaaaaagtccttcatgatgatcaagtacatgcacgaccactacctggacaagtatgagtggttcatgcgcgccgacgacgatgtctacatcaaaggtgataaattagaagagtttcttagatcgctaaacagcagtaagcctctctacctgggacagactggcctggggaatattgaagagcttggaaagctgggactggagcctggggaaaacttctgtatgggaggacctggcatgatctttagccgagaagttctcaggaggatggtgccacatattggtgaatgccttagagaaatgtacacgactcatgaggatgtggaagtaggaagatgcgttcgccgttttggtgggactcagtgtgtctggtcttacgagatgcaacaactgttccatgaaaattatgaacacaatcggaagggttacatccaagaccttcacaatagcaaaatccatgcagccataacacttcatcccaacaaaaggcctgcataccaatacaggctgcataattacatgctcagccgcaaaatttctgaacttcgctaccgcaccatccagctccacagggaaagtgccctgatgagcaagctcagtaacacagaagtgagcaaagaggaccagcagctgggagtgataccttctttcaaccacttccagcctcgggagagaaatgaagtgatagaatgggagttcctgacagggaagcttctatactcagcagctgagaaccagccccctcgacagagcctcagtagcattttaagaacagcactggatgataccgtcctacaggtgatggagatgatcaatgagaatgccaagagcagaggacggctcattgacttcaaggaaattcagtatggctaccgcagagttaaccccatgcacggggtggagtacattttggatttactccttttatacaaaagacacaagggaaggaaactgactgtgccagtgagacgtcatgcctatcttcagcagttgttcagcaagcctttcttcagagagaccgaagagctagatgtcaacagtcttgtggagagtattaacagtgaaactcagtcattctcctttatatctaattctttaaagatattatcttcttttcaaggtgccaaagaaatgggagggcacaatgaaaagaaagtacacattctcgttcctctcatcggaaggtatgacattttcttgagattcatggagaactttgaaaacatgtgtcttatcccaaagcagaatgtaaagttggtcattatccttttcagtagggattctggccaagactccagcaagcatattgagctgataaaagggtaccagaacaagtaccccaaagcagaaatgaccctgatcccaatgaagggagagttttccagaggtcttggtcttgaaatggcttctgcccagtttgacaatgacactttgctgctattttgtgatgttgacttgatcttcagagaagattttctccaacgatgtagagacaatacaattcagggacaacaggtgtactatcccatcatctttagccagtatgacccaaaggtaacaaacgggggaaatcctcccactgatgattacttcatattctcaaaaaagactggattttggagagactatggatatggcatcacctgtatttacaaaagtgatcttctaggtgcaggtggatttgatacctcaatacaaggctggggactagaagatgtagatctctacaataaagtcattctatctggcttaaggccattcagaagccaagaagtaggagtggtgcatattttccatccagttcattgtgatcctaacttggaccctaagcagtataagatgtgcttaggatccaaggcaagtactttcgcctcaaccatgcaactggctgaactctggcttgaaaaacatttaggtgtcaggtacaatcgaactctctcctgacagtccaggcaacacattttgccttttttaaggggagtttacctcattgttggttgttgttatttttattgtattattgttattttattattattattgttataattttattttgttgtcctggtcttaaactactcttggttgtcttcctaagggtgtttgttgacctcaagcaagaagagtctgcagttcactgatgtttcagatttctactgaagtcaatatgttattacttttatataactttatttgagattgagttaaatcatagcaatcaaatgacttttgaaacgcattcatcacaagagacagcttagaagaatgttctcttggggcttaaagatgcaatatcgacttttatttggtttctcaaattcaatgtgatacaaatatttactggtgaaaggtaccacaaaagtgctttatgcttcctatggggaagggactctgtaacataaacttgagttttgtaatttatacaaggacttaaatatataaacaataattttcttcatctttagaatttttaaagtaaatgaatacctatgattgtatgtttattttttaaaaaaagttttaaaaattgaggagttttgttccacaagcaaccggtactggctaccctggtcttatgacaattatgagctcctcacaactgtctgctataaatgcgaatgaactttattttctcaaggaaatatgatttaattaaatattcatgtacattttagaagctttatgaaacaatgtccttcatttgctggcaagaagataaaatatgacagaacctgtttatttaaaataaaacacaggtatagcagtattctttttcaaaaacactga

SEQ ID NO: 117567 - DNA, 2548 bp, Homo sapiens
  Payload ID: 2967
  Gene Symbol: CHODL
  Gene Name: chondrolectin
  Uniprot ID: Q9H9P2
  ENST ID: ENST00000299295
  CDS Start-End: 392-1213
gctgctgctgtgatccaggaccagggcgcaccggctcagcctctcacttgtcagaggccggggaagagaagcaaagcgcaacggtgtggtccaagccggggcttctgcttcgcctctaggacatacacgggaccccctaacttcagtcccccaaacgcgcaccctcgaagtcttgaactccagccccgcacatccacgcgcggcacaggcgcggcaggcggcaggtcccggccgaaggcgatgcgcgcagggggtcgggcagctgggctcgggcggcgggagtagggcccggcagggaggcagggaggctgcagagtcagagtcgcgggctgcgccctgggcagaggccgccctcgctccacgcaacacctgctgctgccaccgcgccgcgatgagccgcgtggtctcgctgctgctgggcgccgcgctgctctgcggccacggagccttctgccgccgcgtggtcagcggccaaaaggtgtgttttgctgacttcaagcatccctgctacaaaatggcctacttccatgaactgtccagccgagtgagctttcaggaggcacgcctggcttgtgagagtgagggaggagtcctcctcagccttgagaatgaagcagaacagaagttaatagagagcatgttgcaaaacctgacaaaacccgggacagggatttctgatggtgatttctggatagggctttggaggaatggagatgggcaaacatctggtgcctgcccagatctctaccagtggtctgatggaagcaattcccagtaccgaaactggtacacagatgaaccttcctgcggaagtgaaaagtgtgttgtgatgtatcaccaaccaactgccaatcctggccttgggggtccctacctttaccagtggaatgatgacaggtgtaacatgaagcacaattatatttgcaagtatgaaccagagattaatccaacagcccctgtagaaaagccttatcttacaaatcaaccaggagacacccatcagaatgtggttgttactgaagcaggtataattcccaatctaatttatgttgttataccaacaatacccctgctcttactgatactggttgcttttggaacctgttgtttccagatgctgcataaaagtaaaggaagaacaaaaactagtccaaaccagtctacactgtggatttcaaagagtaccagaaaagaaagtggcatggaagtataataactcattgacttggttccagaattttgtaattctggatctgtataaggaatggcatcagaacaatagcttggaatggcttgaaatcacaaaggatctgcaagatgaactgtaagctcccccttgaggcaaatattaaagtaatttttatatgtctattatttcatttaaagaatatgctgtgctaataatggagtgagacatgcttattttgctaaaggatgcacccaaacttcaaacttcaagcaaatgaaatggacaatgcagataaagttgttatcaacacgtcgggagtatgtgtgttagaagcaattccttttatttctttcacctttcataagttgttatctagtcaatgtaatgtatattgtattgaaatttacagtgtgcaaaagtattttacctttgcataagtgtttgataaaaatgaactgttctaatatttatttttatggcatctcatttttcaatacatgctcttttgattaaagaaacttattactgttgtcaactgaattcacacacacacaaatatagtaccatagaaaaagtttgttttctcgaaataattcatctttcagcttctctgcttttggtcaatgtctaggaaatctcttcagaaataagaagctatttcattaagtgtgatataaacctcctcaaacattttacttagaggcaaggattgtctaatttcaattgtgcaagacatgtgccttataattatttttagcttaaaattaaacagattttgtaataatgtaactttgttaataggtgcataaacactaatgcagtcaatttgaacaaaagaagtgacatacacaatataaatcatatgtcttcacacgttgcctatataatgagaagcagctctctgagggttctgaaatcaatgtggtccctctcttgcccactaaacaaagatggttgttcggggtttgggattgacactggaggcagatagttgcaaagttagtctaaggtttccctagctgtatttagcctctgactatattagtatacaaagaggtcatgtggttgagaccaggtgaatagtcactatcagtgtggagacaagcacagcacacagacattttaggaaggaaaggaactacgaaatcgtgtgaaaatgggttggaacccatcagtgatcgcatattcattgatgagggtttgcttgagatagaaaatggtggctcctttctgtcttatctcctagtttcttcaatgcttacgccttgttcttctcaagagaaagttgtaactctctggtcttcatatgtccctgtgctccttttaaccaaataaagagttcttgtttctgaagaatga

SEQ ID NO: 117568 - DNA, 1974 bp, Homo sapiens
  Payload ID: 2967
  Gene Symbol: CHODL
  Gene Name: chondrolectin
  ENST ID: ENST00000338326
  CDS Start-End: 52-762
ttttcaggccaaaaggtgtgttttgctgacttcaagcatccctgctacaaaatggcctacttccatgaactgtccagccgagtgagctttcaggaggcacgcctggcttgtgagagtgagggaggagtcctcctcagccttgagaatgaagcagaacagaagttaatagagagcatgttgcaaaacctgacaaaacccgggacagggatttctgatggtgatttctggatagggctttggaggaatggagatgggcaaacatctggtgcctgcccagatctctaccagtggtctgatggaagcaattcccagtaccgaaactggtacacagatgaaccttcctgcggaagtgaaaagtgtgttgtgatgtatcaccaaccaactgccaatcctggccttgggggtccctacctttaccagtggaatgatgacaggtgtaacatgaagcacaattatatttgcaagtatgaaccagagattaatccaacagcccctgtagaaaagccttatcttacaaatcaaccaggagacacccatcagaatgtggttgttactgaagcagtaaaggaagaacaaaaactagtccaaaccagtctacactgtggatttcaaagagtaccagaaaagaaagtggcatggaagtataataactcattgacttggttccagaattttgtaattctggatctgtataaggaatggcatcagaacaatagcttggaatggcttgaaatcacaaaggatctgcaagatgaactgtaagctcccccttgaggcaaatattaaagtaatttttatatgtctattatttcatttaaagaatatgctgtgctaataatggagtgagacatgcttattttgctaaaggatgcacccaaacttcaaacttcaagcaaatgaaatggacaatgcagataaagttgttatcaacacgtcgggagtatgtgtgttagaagcaattccttttatttctttcacctttcataagttgttatctagtcaatgtaatgtatattgtattgaaatttacagtgtgcaaaagtattttacctttgcataagtgtttgataaaaatgaactgttctaatatttatttttatggcatctcatttttcaatacatgctcttttgattaaagaaacttattactgttgtcaactgaattcacacacacacaaatatagtaccatagaaaaagtttgttttctcgaaataattcatctttcagcttctctgcttttggtcaatgtctaggaaatctcttcagaaataagaagctatttcattaagtgtgatataaacctcctcaaacattttacttagaggcaaggattgtctaatttcaattgtgcaagacatgtgccttataattatttttagcttaaaattaaacagattttgtaataatgtaactttgttaataggtgcataaacactaatgcagtcaatttgaacaaaagaagtgacatacacaatataaatcatatgtcttcacacgttgcctatataatgagaagcagctctctgagggttctgaaatcaatgtggtccctctcttgcccactaaacaaagatggttgttcggggtttgggattgacactggaggcagatagttgcaaagttagtctaaggtttccctagctgtatttagcctctgactatattagtatacaaagaggtcatgtggttgagaccaggtgaatagtcactatcagtgtggagacaagcacagcacacagacattttaggaaggaaaggaactacgaaatcgtgtgaaaatgggttggaacccatcagtgatcgcatattcattgatgagggtttgcttgagatagaaaatggtggctcctttctgtcttatctcctagtttcttcaatgcttacgccttgttcttctcaagagaaagttgtaactctctggtcttcatatgtccctgtgctccttttaaccaaataaagagttcttgtttctg

SEQ ID NO: 117569 - DNA, 2239 bp, Homo sapiens
  Payload ID: 2967
  Gene Symbol: CHODL
  Gene Name: chondrolectin
  Uniprot ID: Q9H9P2
  ENST ID: ENST00000400127
  CDS Start-End: 206-904
gcttgaagatggcagatcgtgggacttctcagcctccataattgagtgagccaattccctgaatacaacaagaagatgcccatctgtagaccaggaggtggtccctccccagaaactggatgggccagcacgttgattctgaacttctagcctccagaactgccaaaaggtgtgttttgctgacttcaagcatccctgctacaaaatggcctacttccatgaactgtccagccgagtgagctttcaggaggcacgcctggcttgtgagagtgagggaggagtcctcctcagccttgagaatgaagcagaacagaagttaatagagagcatgttgcaaaacctgacaaaacccgggacagggatttctgatggtgatttctggatagggctttggaggaatggagatgggcaaacatctggtgcctgcccagatctctaccagtggtctgatggaagcaattcccagtaccgaaactggtacacagatgaaccttcctgcggaagtgaaaagtgtgttgtgatgtatcaccaaccaactgccaatcctggccttgggggtccctacctttaccagtggaatgatgacaggtgtaacatgaagcacaattatatttgcaagtatgaaccagagattaatccaacagcccctgtagaaaagccttatcttacaaatcaaccaggagacacccatcagaatgtggttgttactgaagcaggtataattcccaatctaatttatgttgttataccaacaatacccctgctcttactgatactggttgcttttggaacctgttgtttccagatgctgcataaaagtaaaggaagaacaaaaactagtccaaaccagtctacactgtggatttcaaagagtaccagaaaagaaagtggcatggaagtataataactcattgacttggttccagaattttgtaattctggatctgtataaggaatggcatcagaacaatagcttggaatggcttgaaatcacaaaggatctgcaagatgaactgtaagctcccccttgaggcaaatattaaagtaatttttatatgtctattatttcatttaaagaatatgctgtgctaataatggagtgagacatgcttattttgctaaaggatgcacccaaacttcaaacttcaagcaaatgaaatggacaatgcagataaagttgttatcaacacgtcgggagtatgtgtgttagaagcaattccttttatttctttcacctttcataagttgttatctagtcaatgtaatgtatattgtattgaaatttacagtgtgcaaaagtattttacctttgcataagtgtttgataaaaatgaactgttctaatatttatttttatggcatctcatttttcaatacatgctcttttgattaaagaaacttattactgttgtcaactgaattcacacacacacaaatatagtaccatagaaaaagtttgttttctcgaaataattcatctttcagcttctctgcttttggtcaatgtctaggaaatctcttcagaaataagaagctatttcattaagtgtgatataaacctcctcaaacattttacttagaggcaaggattgtctaatttcaattgtgcaagacatgtgccttataattatttttagcttaaaattaaacagattttgtaataatgtaactttgttaataggtgcataaacactaatgcagtcaatttgaacaaaagaagtgacatacacaatataaatcatatgtcttcacacgttgcctatataatgagaagcagctctctgagggttctgaaatcaatgtggtccctctcttgcccactaaacaaagatggttgttcggggtttgggattgacactggaggcagatagttgcaaagttagtctaaggtttccctagctgtatttagcctctgactatattagtatacaaagaggtcatgtggttgagaccaggtgaatagtcactatcagtgtggagacaagcacagcacacagacattttaggaaggaaaggaactacgaaatcgtgtgaaaatgggttggaacccatcagtgatcgcatattcattgatgagggtttgcttgagatagaaaatggtggctcctttctgtcttatctcctagtttcttcaatgcttacgccttgttcttctcaagagaaagttgtaactctctggtcttcatatgtccctgtgctccttttaaccaaataaagagttcttgtttctgaagaatga

SEQ ID NO: 117570 - DNA, 2421 bp, Homo sapiens
  Payload ID: 2967
  Gene Symbol: CHODL
  Gene Name: chondrolectin
  Uniprot ID: Q9H9P2
  ENST ID: ENST00000400128
  CDS Start-End: 388-1086
ctgtggtgtttttcccccgctcctctggctgccttcctgatggatctctgtggtcccaggcaggaatggcctgcttggggacccagcgagctcccaaggcctttcctgctgcttcctctatccctgtgttttgcttggctctctaaattgactcagctccaggacatcaggaccccaggttctctggtcttgggactctgagacttgcaccaggaatcctgcccaggctctcaggcctttggactcagactgagctacttcactggctttcctggttctccagcttgaagatggcagatcgtgggacttctcagcctccataattgagtgagccaattccctggccaaaaggtgtgttttgctgacttcaagcatccctgctacaaaatggcctacttccatgaactgtccagccgagtgagctttcaggaggcacgcctggcttgtgagagtgagggaggagtcctcctcagccttgagaatgaagcagaacagaagttaatagagagcatgttgcaaaacctgacaaaacccgggacagggatttctgatggtgatttctggatagggctttggaggaatggagatgggcaaacatctggtgcctgcccagatctctaccagtggtctgatggaagcaattcccagtaccgaaactggtacacagatgaaccttcctgcggaagtgaaaagtgtgttgtgatgtatcaccaaccaactgccaatcctggccttgggggtccctacctttaccagtggaatgatgacaggtgtaacatgaagcacaattatatttgcaagtatgaaccagagattaatccaacagcccctgtagaaaagccttatcttacaaatcaaccaggagacacccatcagaatgtggttgttactgaagcaggtataattcccaatctaatttatgttgttataccaacaatacccctgctcttactgatactggttgcttttggaacctgttgtttccagatgctgcataaaagtaaaggaagaacaaaaactagtccaaaccagtctacactgtggatttcaaagagtaccagaaaagaaagtggcatggaagtataataactcattgacttggttccagaattttgtaattctggatctgtataaggaatggcatcagaacaatagcttggaatggcttgaaatcacaaaggatctgcaagatgaactgtaagctcccccttgaggcaaatattaaagtaatttttatatgtctattatttcatttaaagaatatgctgtgctaataatggagtgagacatgcttattttgctaaaggatgcacccaaacttcaaacttcaagcaaatgaaatggacaatgcagataaagttgttatcaacacgtcgggagtatgtgtgttagaagcaattccttttatttctttcacctttcataagttgttatctagtcaatgtaatgtatattgtattgaaatttacagtgtgcaaaagtattttacctttgcataagtgtttgataaaaatgaactgttctaatatttatttttatggcatctcatttttcaatacatgctcttttgattaaagaaacttattactgttgtcaactgaattcacacacacacaaatatagtaccatagaaaaagtttgttttctcgaaataattcatctttcagcttctctgcttttggtcaatgtctaggaaatctcttcagaaataagaagctatttcattaagtgtgatataaacctcctcaaacattttacttagaggcaaggattgtctaatttcaattgtgcaagacatgtgccttataattatttttagcttaaaattaaacagattttgtaataatgtaactttgttaataggtgcataaacactaatgcagtcaatttgaacaaaagaagtgacatacacaatataaatcatatgtcttcacacgttgcctatataatgagaagcagctctctgagggttctgaaatcaatgtggtccctctcttgcccactaaacaaagatggttgttcggggtttgggattgacactggaggcagatagttgcaaagttagtctaaggtttccctagctgtatttagcctctgactatattagtatacaaagaggtcatgtggttgagaccaggtgaatagtcactatcagtgtggagacaagcacagcacacagacattttaggaaggaaaggaactacgaaatcgtgtgaaaatgggttggaacccatcagtgatcgcatattcattgatgagggtttgcttgagatagaaaatggtggctcctttctgtcttatctcctagtttcttcaatgcttacgccttgttcttctcaagagaaagttgtaactctctggtcttcatatgtccctgtgctccttttaaccaaataaagagttcttgtttctgaagaatga

SEQ ID NO: 117571 - DNA, 2036 bp, Homo sapiens
  Payload ID: 2967
  Gene Symbol: CHODL
  Gene Name: chondrolectin
  ENST ID: ENST00000400131
  CDS Start-End: 106-816
gcttgaagatggcagatcgtgggacttctcagcctccataattgagtgagccaattccctggccaaaaggtgtgttttgctgacttcaagcatccctgctacaaaatggcctacttccatgaactgtccagccgagtgagctttcaggaggcacgcctggcttgtgagagtgagggaggagtcctcctcagccttgagaatgaagcagaacagaagttaatagagagcatgttgcaaaacctgacaaaacccgggacagggatttctgatggtgatttctggatagggctttggaggaatggagatgggcaaacatctggtgcctgcccagatctctaccagtggtctgatggaagcaattcccagtaccgaaactggtacacagatgaaccttcctgcggaagtgaaaagtgtgttgtgatgtatcaccaaccaactgccaatcctggccttgggggtccctacctttaccagtggaatgatgacaggtgtaacatgaagcacaattatatttgcaagtatgaaccagagattaatccaacagcccctgtagaaaagccttatcttacaaatcaaccaggagacacccatcagaatgtggttgttactgaagcagtaaaggaagaacaaaaactagtccaaaccagtctacactgtggatttcaaagagtaccagaaaagaaagtggcatggaagtataataactcattgacttggttccagaattttgtaattctggatctgtataaggaatggcatcagaacaatagcttggaatggcttgaaatcacaaaggatctgcaagatgaactgtaagctcccccttgaggcaaatattaaagtaatttttatatgtctattatttcatttaaagaatatgctgtgctaataatggagtgagacatgcttattttgctaaaggatgcacccaaacttcaaacttcaagcaaatgaaatggacaatgcagataaagttgttatcaacacgtcgggagtatgtgtgttagaagcaattccttttatttctttcacctttcataagttgttatctagtcaatgtaatgtatattgtattgaaatttacagtgtgcaaaagtattttacctttgcataagtgtttgataaaaatgaactgttctaatatttatttttatggcatctcatttttcaatacatgctcttttgattaaagaaacttattactgttgtcaactgaattcacacacacacaaatatagtaccatagaaaaagtttgttttctcgaaataattcatctttcagcttctctgcttttggtcaatgtctaggaaatctcttcagaaataagaagctatttcattaagtgtgatataaacctcctcaaacattttacttagaggcaaggattgtctaatttcaattgtgcaagacatgtgccttataattatttttagcttaaaattaaacagattttgtaataatgtaactttgttaataggtgcataaacactaatgcagtcaatttgaacaaaagaagtgacatacacaatataaatcatatgtcttcacacgttgcctatataatgagaagcagctctctgagggttctgaaatcaatgtggtccctctcttgcccactaaacaaagatggttgttcggggtttgggattgacactggaggcagatagttgcaaagttagtctaaggtttccctagctgtatttagcctctgactatattagtatacaaagaggtcatgtggttgagaccaggtgaatagtcactatcagtgtggagacaagcacagcacacagacattttaggaaggaaaggaactacgaaatcgtgtgaaaatgggttggaacccatcagtgatcgcatattcattgatgagggtttgcttgagatagaaaatggtggctcctttctgtcttatctcctagtttcttcaatgcttacgccttgttcttctcaagagaaagttgtaactctctggtcttcatatgtccctgtgctccttttaaccaaataaagagttcttgtttctgaagaatga

SEQ ID NO: 117572 - DNA, 2136 bp, Homo sapiens
  Payload ID: 2967
  Gene Symbol: CHODL
  Gene Name: chondrolectin
  ENST ID: ENST00000400135
  CDS Start-End: 206-916
gcttgaagatggcagatcgtgggacttctcagcctccataattgagtgagccaattccctgaatacaacaagaagatgcccatctgtagaccaggaggtggtccctccccagaaactggatgggccagcacgttgattctgaacttctagcctccagaactgccaaaaggtgtgttttgctgacttcaagcatccctgctacaaaatggcctacttccatgaactgtccagccgagtgagctttcaggaggcacgcctggcttgtgagagtgagggaggagtcctcctcagccttgagaatgaagcagaacagaagttaatagagagcatgttgcaaaacctgacaaaacccgggacagggatttctgatggtgatttctggatagggctttggaggaatggagatgggcaaacatctggtgcctgcccagatctctaccagtggtctgatggaagcaattcccagtaccgaaactggtacacagatgaaccttcctgcggaagtgaaaagtgtgttgtgatgtatcaccaaccaactgccaatcctggccttgggggtccctacctttaccagtggaatgatgacaggtgtaacatgaagcacaattatatttgcaagtatgaaccagagattaatccaacagcccctgtagaaaagccttatcttacaaatcaaccaggagacacccatcagaatgtggttgttactgaagcagtaaaggaagaacaaaaactagtccaaaccagtctacactgtggatttcaaagagtaccagaaaagaaagtggcatggaagtataataactcattgacttggttccagaattttgtaattctggatctgtataaggaatggcatcagaacaatagcttggaatggcttgaaatcacaaaggatctgcaagatgaactgtaagctcccccttgaggcaaatattaaagtaatttttatatgtctattatttcatttaaagaatatgctgtgctaataatggagtgagacatgcttattttgctaaaggatgcacccaaacttcaaacttcaagcaaatgaaatggacaatgcagataaagttgttatcaacacgtcgggagtatgtgtgttagaagcaattccttttatttctttcacctttcataagttgttatctagtcaatgtaatgtatattgtattgaaatttacagtgtgcaaaagtattttacctttgcataagtgtttgataaaaatgaactgttctaatatttatttttatggcatctcatttttcaatacatgctcttttgattaaagaaacttattactgttgtcaactgaattcacacacacacaaatatagtaccatagaaaaagtttgttttctcgaaataattcatctttcagcttctctgcttttggtcaatgtctaggaaatctcttcagaaataagaagctatttcattaagtgtgatataaacctcctcaaacattttacttagaggcaaggattgtctaatttcaattgtgcaagacatgtgccttataattatttttagcttaaaattaaacagattttgtaataatgtaactttgttaataggtgcataaacactaatgcagtcaatttgaacaaaagaagtgacatacacaatataaatcatatgtcttcacacgttgcctatataatgagaagcagctctctgagggttctgaaatcaatgtggtccctctcttgcccactaaacaaagatggttgttcggggtttgggattgacactggaggcagatagttgcaaagttagtctaaggtttccctagctgtatttagcctctgactatattagtatacaaagaggtcatgtggttgagaccaggtgaatagtcactatcagtgtggagacaagcacagcacacagacattttaggaaggaaaggaactacgaaatcgtgtgaaaatgggttggaacccatcagtgatcgcatattcattgatgagggtttgcttgagatagaaaatggtggctcctttctgtcttatctcctagtttcttcaatgcttacgccttgttcttctcaagagaaagttgtaactctctggtcttcatatgtccctgtgctccttttaaccaaataaagagttcttgtttctgaagaatga

SEQ ID NO: 117573 - DNA, 1637 bp, Homo sapiens
  Payload ID: 2967
  Gene Symbol: CHODL
  Gene Name: chondrolectin
  Uniprot ID: Q9H9P2
  ENST ID: ENST00000543733
  CDS Start-End: 74-838
gcacactgcgttccaagttggggacttcccagaaaatgaagtcagctggagttgggccgaggtatacttggtaatgactgcaggttcggcacacagccaaaaggtgtgttttgctgacttcaagcatccctgctacaaaatggcctacttccatgaactgtccagccgagtgagctttcaggaggcacgcctggcttgtgagagtgagggaggagtcctcctcagccttgagaatgaagcagaacagaagttaatagagagcatgttgcaaaacctgacaaaacccgggacagggatttctgatggtgatttctggatagggctttggaggaatggagatgggcaaacatctggtgcctgcccagatctctaccagtggtctgatggaagcaattcccagtaccgaaactggtacacagatgaaccttcctgcggaagtgaaaagtgtgttgtgatgtatcaccaaccaactgccaatcctggccttgggggtccctacctttaccagtggaatgatgacaggtgtaacatgaagcacaattatatttgcaagtatgaaccagagattaatccaacagcccctgtagaaaagccttatcttacaaatcaaccaggagacacccatcagaatgtggttgttactgaagcaggtataattcccaatctaatttatgttgttataccaacaatacccctgctcttactgatactggttgcttttggaacctgttgtttccagatgctgcataaaagtaaaggaagaacaaaaactagtccaaaccagtctacactgtggatttcaaagagtaccagaaaagaaagtggcatggaagtataataactcattgacttggttccagaattttgtaattctggatctgtataaggaatggcatcagaacaatagcttggaatggcttgaaatcacaaaggatctgcaagatgaactgtaagctcccccttgaggcaaatattaaagtaatttttatatgtctattatttcatttaaagaatatgctgtgctaataatggagtgagacatgcttattttgctaaaggatgcacccaaacttcaaacttcaagcaaatgaaatggacaatgcagataaagttgttatcaacacgtcgggagtatgtgtgttagaagcaattccttttatttctttcacctttcataagttgttatctagtcaatgtaatgtatattgtattgaaatttacagtgtgcaaaagtattttacctttgcataagtgtttgataaaaatgaactgttctaatatttatttttatggcatctcatttttcaatacatgctcttttgattaaagaaacttattactgttgtcaactgaattcacacacacacaaatatagtaccatagaaaaagtttgttttctcgaaataattcatctttcagcttctctgcttttggtcaatgtctaggaaatctcttcagaaataagaagctatttcattaagtgtgatataaacctcctcaaacattttacttagaggcaaggattgtctaatttcaattgtgcaagacatgtgccttataattatttttagcttaaaattaaacagattttgtaataatgtaactttgttaataggtgcataaacactaatgcagtc

SEQ ID NO: 117574 - DNA, 630 bp, Homo sapiens
  Payload ID: 2968
  Gene Symbol: CSAG1
  Gene Name: chondrosarcoma associated gene 1
  ENST ID: ENST00000361211
  CDS Start-End: 77-160
cttcctggatggggatccagatggaggtggagggttgatttgggaagcagagcacagcagcccaaatttgcttgtaatgtcggcgactacagtttctagcctgctggcctgccttcactgtcctgggggaagctcggggagaccaggtggactggagtagactgtacagagacactggtctggtgaagatgtccaggaaaccacgagcctccagcccattttccaacaaccacccatcaacaccaaagaggttcccaagacaacccagaagggaaaagggacccgtcaaggaagttccaggaacaaaaggctctccctaaaagaccaccgcttcaaaaaaacctgaggaatggagtgggccaacactatccagccactctgaccagccgaacgaggaactcaatcaaaatgcgccatagcaggaccacaagggcaaggagaccaccgccttctccagtgcttccttgggcagccagtaattcccaggcaaggccagagacttcaagtctatctgaaaagtctccagaagtctaaccccagataaatagccaacagggtgtagagtacgttttacaccccaaagggtatgccccatggtgatggaaataaaatgaacatgttgtaaaatga

SEQ ID NO: 117575 - DNA, 875 bp, Homo sapiens
  Payload ID: 2968
  Gene Symbol: CSAG1
  Gene Name: chondrosarcoma associated gene 1
  ENST ID: ENST00000370287
  CDS Start-End: 329-565
acttccctgggttcacagcaggggtggaactggattcttcctggatggggatccagatggaggtggagctgcaccccttgtagagaatggctgcgggtcccaggccaggagctccctgcagggcgggagctcccacgatcgtattgacctctggaagaagacagacactttcccacgggagctcctctccagccagagctacacttggcaaacctttggtcctaaatgatttattcactgaattgaagaaatacggtttacatatcttccaagtatatatgtagggttgatttgggaagcagagcacagcagcccaaatttgcttgtaatgtcggcgactacagcctgctggcctgccttcactgtcctgggggaagctcggggagaccaggtggactggagtagactgtacagagacactggtctggtgaagatgtccaggaaaccacgagcctccagcccattttccaacaaccacccatcaacaccaaagaggttcccaagacaacccagaagggaaaagggacccgtcaaggaagttccaggaacaaaaggctctccctaaaagaccaccgcttcaaaaaaacctgaggaatggagtgggccaacactatccagccactctgaccagccgaacgaggaactcaatcaaaatgcgccatagcaggaccacaagggcaaggagaccaccgccttctccagtgcttccttgggcagccagtaattcccaggcaaggccagagacttcaagtctatctgaaaagtctccagaagtctaaccccagataaatagccaacagggtgtagagtacgttttacaccccaaagggtatgccccatggtgatggaaataaaatgaacatgttgtaaaatga

SEQ ID NO: 117576 - DNA, 1037 bp, Homo sapiens
  Payload ID: 2968
  Gene Symbol: CSAG1
  Gene Name: chondrosarcoma associated gene 1
  Uniprot ID: Q6PB30
  ENST ID: ENST00000370291
  CDS Start-End: 281-502
atggggatccagatggaggtggagctgcaccccttgtagagaatggctgcgggtcccaggccaggagctccctgcagggcgggagctcccacgatcgtattgacctctggaagaagacagacactttcccacgggagctcctctccagccagagctacacttggcaaacctttggtcctaaatgatttattcactgaattgaagaaatacggtttacatatcttccaagtatatatggttgatttgggaagcagagcacagcagcccaaatttgcttgtaatgtcggcgactacagcctgctggcctgccttcactgtcctgggggaagctcggggagaccaggtggactggagtagactgtacagagacactggtctggtgaagatgtccaggaaaccacgagcctccagcccattttccaacaaccacccatcaacaccaaagaggcgaggaaggggaaagcatcctctcatccctggcccagaagccctatcaaagtgaatggcccacccaagctctgactcctaccctgtcctcccctggcacaacccccaccccagcctgtaccatttctctatgaaacccctgttctcacccctcctccatcctcttccccaaaccagtgccctcctgtgatctccctgttggctttccaggttcccaagacaacccagaagggaaaagggacccgtcaaggaagttccaggaacaaaaggctctccctaaaagaccaccgcttcaaaaaaacctgaggaatggagtgggccaacactatccagccactctgaccagccgaacgaggaactcaatcaaaatgcgccatagcaggaccacaagggcaaggagaccaccgccttctccagtgcttccttgggcagccagtaattcccaggcaaggccagagacttcaagtctatctgaaaagtctccagaagtctaaccccagataaatagccaacagggtgtagagtacgttttacaccccaaagggtatgccccatggtgatggaaataaaatgaacatgttgtaaaatga

SEQ ID NO: 117577 - DNA, 627 bp, Homo sapiens
  Payload ID: 2968
  Gene Symbol: CSAG1
  Gene Name: chondrosarcoma associated gene 1
  ENST ID: ENST00000452779
  CDS Start-End: 84-320
ctggattcttcctggatggggatccagatggaggtggagggttgatttgggaagcagagcacagcagcccaaatttgcttgtaatgtcggcgactacagcctgctggcctgccttcactgtcctgggggaagctcggggagaccaggtggactggagtagactgtacagagacactggtctggtgaagatgtccaggaaaccacgagcctccagcccattttccaacaaccacccatcaacaccaaagaggttcccaagacaacccagaagggaaaagggacccgtcaaggaagttccaggaacaaaaggctctccctaaaagaccaccgcttcaaaaaaacctgaggaatggagtgggccaacactatccagccactctgaccagccgaacgaggaactcaatcaaaatgcgccatagcaggaccacaagggcaaggagaccaccgccttctccagtgcttccttgggcagccagtaattcccaggcaaggccagagacttcaagtctatctgaaaagtctccagaagtctaaccccagataaatagccaacagggtgtagagtacgttttacaccccaaagggtatgccccatggtgatggaaataaaatgaacatgttgtaaaa

SEQ ID NO: 117578 - DNA, 3521 bp, Homo sapiens
  Payload ID: 2969
  Gene Symbol: CHRD
  Gene Name: chordin
  Uniprot ID: Q9H2X0
  ENST ID: ENST00000204604
  CDS Start-End: 247-3114
cccgggtcagcgcccgcccgcccgcgctcctcccggccgctcctcccgccccgcccggcccggcgccgactctgcggccgcccgacgagcccctcgcggcactgccccggccccggccccggccccggccccctcccgccgcaccgcccccggcccggccctccgccctccgcactcccgcctccctccctccgcccgctcccgcgccctcctccctccctcctccccagctgtcccgttcgcgtcatgccgagcctcccggccccgccggccccgctgctgctcctcgggctgctgctgctcggctcccggccggcccgcggcgccggcccagagccccccgtgctgcccatccgttctgagaaggagccgctgcccgttcggggagcggcaggctgcaccttcggcgggaaggtctatgccttggacgagacgtggcacccggacctaggggagccattcggggtgatgcgctgcgtgctgtgcgcctgcgaggcgcctcagtggggtcgccgtaccaggggccctggcagggtcagctgcaagaacatcaaaccagagtgcccaaccccggcctgtgggcagccgcgccagctgccgggacactgctgccagacctgcccccaggagcgcagcagttcggagcggcagccgagcggcctgtccttcgagtatccgcgggacccggagcatcgcagttatagcgaccgcggggagccaggcgctgaggagcgggcccgtggtgacggccacacggacttcgtggcgctgctgacagggccgaggtcgcaggcggtggcacgagcccgagtctcgctgctgcgctctagcctccgcttctctatctcctacaggcggctggaccgccctaccaggatccgcttctcagactccaatggcagtgtcctgtttgagcaccctgcagcccccacccaagatggcctggtctgtggggtgtggcgggcagtgcctcggttgtctctgcggctccttagggcagaacagctgcatgtggcacttgtgacactcactcacccttcaggggaggtctgggggcctctcatccggcaccgggccctggctgcagagaccttcagtgccatcctgactctagaaggccccccacagcagggcgtagggggcatcaccctgctcactctcagtgacacagaggactccttgcattttttgctgctcttccgagggctgctggaacccaggagtgggggactaacccaggttcccttgaggctccagattctacaccaggggcagctactgcgagaacttcaggccaatgtctcagcccaggaaccaggctttgctgaggtgctgcccaacctgacagtccaggagatggactggctggtgctgggggagctgcagatggccctggagtgggcaggcaggccagggctgcgcatcagtggacacattgctgccaggaagagctgcgacgtcctgcaaagtgtcctttgtggggctgatgccctgatcccagtccagacgggtgctgccggctcagccagcctcacgctgctaggaaatggctccctgatctatcaggtgcaagtggtagggacaagcagtgaggtggtggccatgacactggagaccaagcctcagcggagggatcagcgcactgtcctgtgccacatggctggactccagccaggaggacacacggccgtgggtatctgccctgggctgggtgcccgaggggctcatatgctgctgcagaatgagctcttcctgaacgtgggcaccaaggacttcccagacggagagcttcgggggcacgtggctgccctgccctactgtgggcatagcgcccgccatgacacgctgcccgtgcccctagcaggagccctggtgctaccccctgtgaagagccaagcagcagggcacgcctggctttccttggatacccactgtcacctgcactatgaagtgctgctggctgggcttggtggctcagaacaaggcactgtcactgcccacctccttgggcctcctggaacgccagggcctcggcggctgctgaagggattctatggctcagaggcccagggtgtggtgaaggacctggagccggaactgctgcggcacctggcaaaaggcatggcctccctgatgatcaccaccaagggtagccccagaggggagctccgagggcaggtgcacatagccaaccaatgtgaggttggcggactgcgcctggaggcggccggggccgagggggtgcgggcgctgggggctccggatacagcctctgctgcgccgcctgtggtgcctggtctcccggccctagcgcccgccaaacctggtggtcctgggcggccccgagaccccaacacatgcttcttcgaggggcagcagcgcccccacggggctcgctgggcgcccaactacgacccgctctgctcactctgcacctgccagagacgaacggtgatctgtgacccggtggtgtgcccaccgcccagctgcccacacccggtgcaggctcccgaccagtgctgccctgtttgccctgagaaacaagatgtcagagacttgccagggctgccaaggagccgggacccaggagagggctgctattttgatggtgaccggagctggcgggcagcgggtacgcggtggcaccccgttgtgcccccctttggcttaattaagtgtgctgtctgcacctgcaaggggggcactggagaggtgcactgtgagaaggtgcagtgtccccggctggcctgtgcccagcctgtgcgtgtcaaccccaccgactgctgcaaacagtgtccagtggggtcgggggcccacccccagctgggggaccccatgcaggctgatgggccccggggctgccgttttgctgggcagtggttcccagagagtcagagctggcacccctcagtgcccccttttggagagatgagctgtatcacctgcagatgtggggcaggggtgcctcactgtgagcgggatgactgttcactgccactgtcctgtggctcggggaaggagagtcgatgctgttcccgctgcacggcccaccggcggccagccccagagaccagaactgatccagagctggagaaagaagccgaaggctcttagggagcagccagagggccaagtgaccaagaggatggggcctgagctggggaaggggtggcatcgaggaccttcttgcattctcctgtgggaagcccagtgcctttgctcctctgtcctgcctctactcccacccccactacctctgggaaccacagctccacaagggggagaggcagctgggccagaccgaggtcacagccactccaagtcctgccctgccaccctcggcctctgtcctggaagccccacccctttcctcctgtacataatgtcactggcttgttgggatttttaatttatcttcactcagcaccaagggcccccgacactccactcctgctgcccctgagctgagcagagtcattattggagagttttgtatttattaaaacatttctttttcagtc

SEQ ID NO: 117579 - DNA, 3155 bp, Homo sapiens
  Payload ID: 2969
  Gene Symbol: CHRD
  Gene Name: chordin
  Uniprot ID: Q9H2X0
  ENST ID: ENST00000348986
  CDS Start-End: 1-2748
atgccgagcctcccggccccgccggccccgctgctgctcctcgggctgctgctgctcggctcccggccggcccgcggcgccggcccagagccccccgtgctgcccatccgttctgagaaggagccgctgcccgttcggggagcggcaggctgcaccttcggcgggaaggtctatgccttggacgagacgtggcacccggacctaggggagccattcggggtgatgcgctgcgtgctgtgcgcctgcgaggcgcctcagtggggtcgccgtaccaggggccctggcagggtcagctgcaagaacatcaaaccagagtgcccaaccccggcctgtgggcagccgcgccagctgccgggacactgctgccagacctgcccccaggagcgcagcagttcggagcggcagccgagcggcctgtccttcgagtatccgcgggacccggagcatcgcagttatagcgaccgcggggagccaggcgctgaggagcgggcccgtggtgacggccacacggacttcgtggcgctgctgacagggccgaggtcgcaggcggtggcacgagcccgagtctcgctgctgcgctctagcctccgcttctctatctcctacaggcggctggaccgccctaccaggatccgcttctcagactccaatggcagtgtcctgtttgagcaccctgcagcccccacccaagatggcctggtctgtggggtgtggcgggcagtgcctcggttgtctctgcggctccttagggcagaacagctgcatgtggcacttgtgacactcactcacccttcaggggaggtctgggggcctctcatccggcaccgggccctggctgcagagaccttcagtgccatcctgactctagaaggccccccacagcagggcgtagggggcatcaccctgctcactctcagtgacacagaggactccttgcattttttgctgctcttccgagggctgctggaacccaggagtgggggactaacccaggttcccttgaggctccagattctacaccaggggcagctactgcgagaacttcaggccaatgtctcagcccaggaaccaggctttgctgaggtgctgcccaacctgacagtccaggagatggactggctggtgctgggggagctgcagatggccctggagtgggcaggcaggccagggctgcgcatcagtggacacattgctgccaggaagagctgcgacgtcctgcaaagtgtcctttgtggggctgatgccctgatcccagtccagacgggtgctgccggctcagccagcctcacgctgctaggaaatggctccctgatctatcaggccgtgggtatctgccctgggctgggtgcccgaggggctcatatgctgctgcagaatgagctcttcctgaacgtgggcaccaaggacttcccagacggagagcttcgggggcacgtggctgccctgccctactgtgggcatagcgcccgccatgacacgctgcccgtgcccctagcaggagccctggtgctaccccctgtgaagagccaagcagcagggcacgcctggctttccttggatacccactgtcacctgcactatgaagtgctgctggctgggcttggtggctcagaacaaggcactgtcactgcccacctccttgggcctcctggaacgccagggcctcggcggctgctgaagggattctatggctcagaggcccagggtgtggtgaaggacctggagccggaactgctgcggcacctggcaaaaggcatggcctccctgatgatcaccaccaagggtagccccagaggggagctccgagggcaggtgcacatagccaaccaatgtgaggttggcggactgcgcctggaggcggccggggccgagggggtgcgggcgctgggggctccggatacagcctctgctgcgccgcctgtggtgcctggtctcccggccctagcgcccgccaaacctggtggtcctgggcggccccgagaccccaacacatgcttcttcgaggggcagcagcgcccccacggggctcgctgggcgcccaactacgacccgctctgctcactctgcacctgccagagacgaacggtgatctgtgacccggtggtgtgcccaccgcccagctgcccacacccggtgcaggctcccgaccagtgctgccctgtttgccctgagaaacaagatgtcagagacttgccagggctgccaaggagccgggacccaggagagggctgctattttgatggtgaccggagctggcgggcagcgggtacgcggtggcaccccgttgtgcccccctttggcttaattaagtgtgctgtctgcacctgcaaggggggcactggagaggtgcactgtgagaaggtgcagtgtccccggctggcctgtgcccagcctgtgcgtgtcaaccccaccgactgctgcaaacagtgtccagtggggtcgggggcccacccccagctgggggaccccatgcaggctgatgggccccggggctgccgttttgctgggcagtggttcccagagagtcagagctggcacccctcagtgcccccttttggagagatgagctgtatcacctgcagatgtggggcaggggtgcctcactgtgagcgggatgactgttcactgccactgtcctgtggctcggggaaggagagtcgatgctgttcccgctgcacggcccaccggcggccagccccagagaccagaactgatccagagctggagaaagaagccgaaggctcttagggagcagccagagggccaagtgaccaagaggatggggcctgagctggggaaggggtggcatcgaggaccttcttgcattctcctgtgggaagcccagtgcctttgctcctctgtcctgcctctactcccacccccactacctctgggaaccacagctccacaagggggagaggcagctgggccagaccgaggtcacagccactccaagtcctgccctgccaccctcggcctctgtcctggaagccccacccctttcctcctgtacataatgtcactggcttgttgggatttttaatttatcttcactcagcaccaagggcccccgacactccactcctgctgcccctgagctgagcagagtcattattggagagttttgtatttattaaaacatttctttttcagtc

SEQ ID NO: 117580 - DNA, 1252 bp, Homo sapiens
  Payload ID: 2969
  Gene Symbol: CHRD
  Gene Name: chordin
  Uniprot ID: Q9H2X0
  ENST ID: ENST00000356534
  CDS Start-End: 247-507
cccgggtcagcgcccgcccgcccgcgctcctcccggccgctcctcccgccccgcccggcccggcgccgactctgcggccgcccgacgagcccctcgcggcactgccccggccccggccccggccccggccccctcccgccgcaccgcccccggcccggccctccgccctccgcactcccgcctccctccctccgcccgctcccgcgccctcctccctccctcctccccagctgtcccgttcgcgtcatgccgagcctcccggccccgccggccccgctgctgctcctcgggctgctgctgctcggctcccggccggcccgcggcgccggcccagagccccccgtgctgcccatccgttctgagaaggagccgctgcccgttcggggagcggcaggctgcaccttcggcgggaaggtctatgccttggacgagacgtggcacccggacctaggggagccattcggggtgatgcgctgcgtgctgtgcgcctgcgaggcgggaccttgaggcccagagagatgaagtagcttgtctagggtcacgcagcttcctcagtggggtcgccgtaccaggggccctggcagggtcagctgcaagaacatcaaaccagagtgcccaaccccggcctgtgggcagccgcgccagctgccgggacactgctgccagacctgcccccaggagcgcagcagttcggagcggcagccgagcggcctgtccttcgagtatccgcgggacccggagcatcgcagttatagcgaccgcggggagccaggcgctgaggagcgggcccgtggtgacggccacacggacttcgtggcgctgctgacagggccgaggtcgcaggcggtggcacgagcccgagtctcgctgctgcgctctagcctccgcttctctatctcctacaggcggctggaccgccctaccaggatccgcttctcagactccaatggcagtgtcctgtttgagcaccctgcagcccccacccaagatggcctggtctgtggggtgtggcgggcagtgcctcggttgtctctgcggctccttagggcagaacagctgcatgtggcacttgtgacactcactcacccttcaggggaggtctgggggcctctcatccggcaccgggccctggctgcagagaccttcagtgccatcctgactctagaaggccccccacagcagggcgtagggggcatcaccctgctcactctcagtgacacagaggactccttgcattttttgctgctcttcc

SEQ ID NO: 117581 - DNA, 3492 bp, Homo sapiens
  Payload ID: 2969
  Gene Symbol: CHRD
  Gene Name: chordin
  Uniprot ID: Q9H2X0
  ENST ID: ENST00000420973
  CDS Start-End: 247-1299
cccgggtcagcgcccgcccgcccgcgctcctcccggccgctcctcccgccccgcccggcccggcgccgactctgcggccgcccgacgagcccctcgcggcactgccccggccccggccccggccccggccccctcccgccgcaccgcccccggcccggccctccgccctccgcactcccgcctccctccctccgcccgctcccgcgccctcctccctccctcctccccagctgtcccgttcgcgtcatgccgagcctcccggccccgccggccccgctgctgctcctcgggctgctgctgctcggctcccggccggcccgcggcgccggcccagagccccccgtgctgcccatccgttctgagaaggagccgctgcccgttcggggagcggcaggctgcaccttcggcgggaaggtctatgccttggacgagacgtggcacccggacctaggggagccattcggggtgatgcgctgcgtgctgtgcgcctgcgaggcgcctcagtggggtcgccgtaccaggggccctggcagggtcagctgcaagaacatcaaaccagagtgcccaaccccggcctgtgggcagccgcgccagctgccgggacactgctgccagacctgcccccaggagcgcagcagttcggagcggcagccgagcggcctgtccttcgagtatccgcgggacccggagcatcgcagttatagcgaccgcggggagccaggcgctgaggagcgggcccgtggtgacggccacacggacttcgtggcgctgctgacagggccgaggtcgcaggcggtggcacgagcccgagtctcgctgctgcgctctagcctccgcttctctatctcctacaggcggctggaccgccctaccaggatccgcttctcagactccaatggcagtgtcctgtttgagcaccctgcagcccccacccaagatggcctggtctgtggggtgtggcgggcagtgcctcggttgtctctgcggctccttagggcagaacagctgcatgtggcacttgtgacactcactcacccttcaggggaggtctgggggcctctcatccggcaccgggccctggctgcagagaccttcagtgccatcctgactctagaaggccccccacagcagggcgtagggggcatcaccctgctcactctcagtgacacagaggactccttgcattttttgctgctcttccgagggctgctggaacccaggagtggggattctacaccaggggcagctactgcgagaacttcaggccaatgtctcagcccaggaaccaggctttgctgaggtgctgcccaacctgacagtccaggagatggactggctggtgctgggggagctgcagatggccctggagtgggcaggcaggccagggctgcgcatcagtggacacattgctgccaggaagagctgcgacgtcctgcaaagtgtcctttgtggggctgatgccctgatcccagtccagacgggtgctgccggctcagccagcctcacgctgctaggaaatggctccctgatctatcaggtgcaagtggtagggacaagcagtgaggtggtggccatgacactggagaccaagcctcagcggagggatcagcgcactgtcctgtgccacatggctggactccagccaggaggacacacggccgtgggtatctgccctgggctgggtgcccgaggggctcatatgctgctgcagaatgagctcttcctgaacgtgggcaccaaggacttcccagacggagagcttcgggggcacgtggctgccctgccctactgtgggcatagcgcccgccatgacacgctgcccgtgcccctagcaggagccctggtgctaccccctgtgaagagccaagcagcagggcacgcctggctttccttggatacccactgtcacctgcactatgaagtgctgctggctgggcttggtggctcagaacaaggcactgtcactgcccacctccttgggcctcctggaacgccagggcctcggcggctgctgaagggattctatggctcagaggcccagggtgtggtgaaggacctggagccggaactgctgcggcacctggcaaaaggcatggcctccctgatgatcaccaccaagggtagccccagaggggagctccgagggcaggtgcacatagccaaccaatgtgaggttggcggactgcgcctggaggcggccggggccgagggggtgcgggcgctgggggctccggatacagcctctgctgcgccgcctgtggtgcctggtctcccggccctagcgcccgccaaacctggtggtcctgggcggccccgagaccccaacacatgcttcttcgaggggcagcagcgcccccacggggctcgctgggcgcccaactacgacccgctctgctcactctgcacctgccagagacgaacggtgatctgtgacccggtggtgtgcccaccgcccagctgcccacacccggtgcaggctcccgaccagtgctgccctgtttgccctgagaaacaagatgtcagagacttgccagggctgccaaggagccgggacccaggagagggctgctattttgatggtgaccggagctggcgggcagcgggtacgcggtggcaccccgttgtgcccccctttggcttaattaagtgtgctgtctgcacctgcaaggggggcactggagaggtgcactgtgagaaggtgcagtgtccccggctggcctgtgcccagcctgtgcgtgtcaaccccaccgactgctgcaaacagtgtccagtggggtcgggggcccacccccagctgggggaccccatgcaggctgatgggccccggggctgccgttttgctgggcagtggttcccagagagtcagagctggcacccctcagtgcccccttttggagagatgagctgtatcacctgcagatgtggggcaggggtgcctcactgtgagcgggatgactgttcactgccactgtcctgtggctcggggaaggagagtcgatgctgttcccgctgcacggcccaccggcggccagccccagagaccagaactgatccagagctggagaaagaagccgaaggctcttagggagcagccagagggccaagtgaccaagaggatggggcctgagctggggaaggggtggcatcgaggaccttcttgcattctcctgtgggaagcccagtgcctttgctcctctgtcctgcctctactcccacccccactacctctgggaaccacagctccacaagggggagaggcagctgggccagaccgaggtcacagccactccaagtcctgccctgccaccctcggcctctgtcctggaagccccacccctttcctcctgtacataatgtcactggcttgttgggatttttaatttatcttcactcagcaccaagggcccccgacactccactcctgctgcccctgagctgagcagagtcattattggagagttttgtatttattaaaacatttctttttcagtc

SEQ ID NO: 117582 - DNA, 3547 bp, Homo sapiens
  Payload ID: 2969
  Gene Symbol: CHRD
  Gene Name: chordin
  Uniprot ID: Q9H2X0
  ENST ID: ENST00000448472
  CDS Start-End: 247-531
cccgggtcagcgcccgcccgcccgcgctcctcccggccgctcctcccgccccgcccggcccggcgccgactctgcggccgcccgacgagcccctcgcggcactgccccggccccggccccggccccggccccctcccgccgcaccgcccccggcccggccctccgccctccgcactcccgcctccctccctccgcccgctcccgcgccctcctccctccctcctccccagctgtcccgttcgcgtcatgccgagcctcccggccccgccggccccgctgctgctcctcgggctgctgctgctcggctcccggccggcccgcggcgccggcccagagccccccgtgctgcccatccgttctgagaaggagccgctgcccgttcggggagcggcaggctgcaccttcggcgggaaggtctatgccttggacgagacgtggcacccggacctaggggagccattcggggtgatgcgctgcgtgctgtgcgcctgcgaggcgacagggaccttgaggcccagagagatgaagtagcttgtctagggtcacgcagcttcctcagtggggtcgccgtaccaggggccctggcagggtcagctgcaagaacatcaaaccagagtgcccaaccccggcctgtgggcagccgcgccagctgccgggacactgctgccagacctgcccccaggagcgcagcagttcggagcggcagccgagcggcctgtccttcgagtatccgcgggacccggagcatcgcagttatagcgaccgcggggagccaggcgctgaggagcgggcccgtggtgacggccacacggacttcgtggcgctgctgacagggccgaggtcgcaggcggtggcacgagcccgagtctcgctgctgcgctctagcctccgcttctctatctcctacaggcggctggaccgccctaccaggatccgcttctcagactccaatggcagtgtcctgtttgagcaccctgcagcccccacccaagatggcctggtctgtggggtgtggcgggcagtgcctcggttgtctctgcggctccttagggcagaacagctgcatgtggcacttgtgacactcactcacccttcaggggaggtctgggggcctctcatccggcaccgggccctggctgcagagaccttcagtgccatcctgactctagaaggccccccacagcagggcgtagggggcatcaccctgctcactctcagtgacacagaggactccttgcattttttgctgctcttccgagggctgctggaacccaggagtggggattctacaccaggggcagctactgcgagaacttcaggccaatgtctcagcccaggaaccaggctttgctgaggtgctgcccaacctgacagtccaggagatggactggctggtgctgggggagctgcagatggccctggagtgggcaggcaggccagggctgcgcatcagtggacacattgctgccaggaagagctgcgacgtcctgcaaagtgtcctttgtggggctgatgccctgatcccagtccagacgggtgctgccggctcagccagcctcacgctgctaggaaatggctccctgatctatcaggtgcaagtggtagggacaagcagtgaggtggtggccatgacactggagaccaagcctcagcggagggatcagcgcactgtcctgtgccacatggctggactccagccaggaggacacacggccgtgggtatctgccctgggctgggtgcccgaggggctcatatgctgctgcagaatgagctcttcctgaacgtgggcaccaaggacttcccagacggagagcttcgggggcacgtggctgccctgccctactgtgggcatagcgcccgccatgacacgctgcccgtgcccctagcaggagccctggtgctaccccctgtgaagagccaagcagcagggcacgcctggctttccttggatacccactgtcacctgcactatgaagtgctgctggctgggcttggtggctcagaacaaggcactgtcactgcccacctccttgggcctcctggaacgccagggcctcggcggctgctgaagggattctatggctcagaggcccagggtgtggtgaaggacctggagccggaactgctgcggcacctggcaaaaggcatggcctccctgatgatcaccaccaagggtagccccagaggggagctccgagggcaggtgcacatagccaaccaatgtgaggttggcggactgcgcctggaggcggccggggccgagggggtgcgggcgctgggggctccggatacagcctctgctgcgccgcctgtggtgcctggtctcccggccctagcgcccgccaaacctggtggtcctgggcggccccgagaccccaacacatgcttcttcgaggggcagcagcgcccccacggggctcgctgggcgcccaactacgacccgctctgctcactctgcacctgccagagacgaacggtgatctgtgacccggtggtgtgcccaccgcccagctgcccacacccggtgcaggctcccgaccagtgctgccctgtttgccctgagaaacaagatgtcagagacttgccagggctgccaaggagccgggacccaggagagggctgctattttgatggtgaccggagctggcgggcagcgggtacgcggtggcaccccgttgtgcccccctttggcttaattaagtgtgctgtctgcacctgcaaggggggcactggagaggtgcactgtgagaaggtgcagtgtccccggctggcctgtgcccagcctgtgcgtgtcaaccccaccgactgctgcaaacagtgtccagtggggtcgggggcccacccccagctgggggaccccatgcaggctgatgggccccggggctgccgttttgctgggcagtggttcccagagagtcagagctggcacccctcagtgcccccttttggagagatgagctgtatcacctgcagatgtggggcaggggtgcctcactgtgagcgggatgactgttcactgccactgtcctgtggctcggggaaggagagtcgatgctgttcccgctgcacggcccaccggcggccagccccagagaccagaactgatccagagctggagaaagaagccgaaggctcttagggagcagccagagggccaagtgaccaagaggatggggcctgagctggggaaggggtggcatcgaggaccttcttgcattctcctgtgggaagcccagtgcctttgctcctctgtcctgcctctactcccacccccactacctctgggaaccacagctccacaagggggagaggcagctgggccagaccgaggtcacagccactccaagtcctgccctgccaccctcggcctctgtcctggaagccccacccctttcctcctgtacataatgtcactggcttgttgggatttttaatttatcttcactcagcaccaagggcccccgacactccactcctgctgcccctgagctgagcagagtcattattggagagttttgtatttattaaaacatttctttttcagtc

SEQ ID NO: 117583 - DNA, 3384 bp, Homo sapiens
  Payload ID: 2969
  Gene Symbol: CHRD
  Gene Name: chordin
  ENST ID: ENST00000450923
  CDS Start-End: 113-2977
cccgccgcaccgcccccggcccggccctccgccctccgcactcccgcctccctccctccgcccgctcccgcgccctcctccctccctcctccccagctgtcccgttcgcgtcatgccgagcctcccggccccgccggccccgctgctgctcctcgggctgctgctgctcggctcccggccggcccgcggcgccggcccagagccccccgtgctgcccatccgttctgagaaggagccgctgcccgttcggggagcggcaggctgcaccttcggcgggaaggtctatgccttggacgagacgtggcacccggacctaggggagccattcggggtgatgcgctgcgtgctgtgcgcctgcgaggcgcctcagtggggtcgccgtaccaggggccctggcagggtcagctgcaagaacatcaaaccagagtgcccaaccccggcctgtgggcagccgcgccagctgccgggacactgctgccagacctgcccccaggagcgcagcagttcggagcggcagccgagcggcctgtccttcgagtatccgcgggacccggagcatcgcagttatagcgaccgcggggagccaggcgctgaggagcgggcccgtggtgacggccacacggacttcgtggcgctgctgacagggccgaggtcgcaggcggtggcacgagcccgagtctcgctgctgcgctctagcctccgcttctctatctcctacaggcggctggaccgccctaccaggatccgcttctcagactccaatggcagtgtcctgtttgagcaccctgcagcccccacccaagatggcctggtctgtggggtgtggcgggcagtgcctcggttgtctctgcggctccttagggcagaacagctgcatgtggcacttgtgacactcactcacccttcaggggaggtctgggggcctctcatccggcaccgggccctggctgcagagaccttcagtgccatcctgactctagaaggccccccacagcagggcgtagggggcatcaccctgctcactctcagtgacacagaggactccttgcattttttgctgctcttccgagggctgctggaacccaggagtgggggactaacccaggttcccttgaggctccagattctacaccaggggcagctactgcgagaacttcaggccaatgtctcagcccaggaaccaggctttgctgaggtgctgcccaacctgacagtccaggagatggactggctggtgctgggggagctgcagatggccctggagtgggcaggcaggccagggctgcgcatcagtggacacattgctgccaggaagagctgcgacgtcctgcaaagtgtcctttgtggggctgatgccctgatcccagtccagacgggtgctgccggctcagccagcctcacgctgctaggaaatggctccctgatctatcaggtgcaagtggtagggacaagcagtgaggtggtggccatgacactggagaccaagcctcagcggagggatcagcgcactgtcctgtgccacatggctggactccagccaggaggacacacggccgtgggtatctgccctgggctgggtgcccgaggggctcatatgctgctgcagaatgagctcttcctgaacgtgggcaccaaggacttcccagacggagagcttcgggggcacgtggctgccctgccctactgtgggcatagcgcccgccatgacacgctgcccgtgcccctagcaggagccctggtgctaccccctgtgaagagccaagcagcagggcacgcctggctttccttggatacccactgtcacctgcactatgaagtgctgctggctgggcttggtggctcagaacaaggcactgtcactgcccacctccttgggcctcctggaacgccagggcctcggcggctgctgaagggattctatggctcagaggcccagggtgtggtgaaggacctggagccggaactgctgcggcacctggcaaaaggcatggcctccctgatgatcaccaccaagggtagccccagaggggagctccgagggcaggtgcacatagccaaccaatgtgaggttggcggactgcgcctggaggcggccggggccgagggggtgcgggcgctgggggctccggatacagcctctgctgcgccgcctgtggtgcctggtctcccggccctagcgcccgccaaacctggtggtcctgggcggccccgagaccccaacacatgcttcttcgaggggcagcagcgcccccacggggctcgctgggcgcccaactacgacccgctctgctcactctgcacctgccagagacgaacggtgatctgtgacccggtggtgtgcccaccgcccagctgcccacacccggtgcaggctcccgaccagtgctgccctgtttgccctgagaaacaagatgtcagagacttgccagggctgccaaggagccgggacccaggagagggctgctattttgatggtgaccggagctggcgggcagcgggtacgcggtggcaccccgttgtgcccccctttggcttaattaagtgtgctgtctgcacctgcaaggggggcactggagaggtgcactgtgagaaggtgcagtgtccccggctggcctgtgcccagcctgtgcgtgtcaaccccaccgactgctgcaaacagtgtccagtggggtcgggggcccacccccagctgggggaccccatgcaggctgatgggccccggggctgccgttttgctgggcagtggttcccagagagtcagagctggcacccctcagtgcccccttttggagagatgagctgtatcacctgcagatgtggggcaggggtgcctcactgtgagcgggatgactgttcactgccactgtcctgtggctcggggaaggagagtcgatgctgttcccgctgcacggcccaccggcggcccccagagaccagaactgatccagagctggagaaagaagccgaaggctcttagggagcagccagagggccaagtgaccaagaggatggggcctgagctggggaaggggtggcatcgaggaccttcttgcattctcctgtgggaagcccagtgcctttgctcctctgtcctgcctctactcccacccccactacctctgggaaccacagctccacaagggggagaggcagctgggccagaccgaggtcacagccactccaagtcctgccctgccaccctcggcctctgtcctggaagccccacccctttcctcctgtacataatgtcactggcttgttgggatttttaatttatcttcactcagcaccaagggcccccgacactccactcctgctgcccctgagctgagcagagtcattattggagagttttgtatttattaaaacatttctttttcagtc

SEQ ID NO: 117584 - DNA, 1934 bp, Homo sapiens
  Payload ID: 2970
  Gene Symbol: CHRDL1
  Gene Name: chordin-like 1
  Uniprot ID: Q9BU40
  ENST ID: ENST00000372042
  CDS Start-End: 103-1479
cggacgagagcgccccggggagctcggagcgcgtgcacgcgtggcagacggagaaggccagtgcccagcttgaaggttctgtcaccttttgcagtggtccaaatgagaaaaaagtggaaaatgggaggcatgaaatacatcttttcgttgttgttctttcttttgctagaaggaggcaaaacagagcaagtaaaacattcagagacatattgcatgtttcaagacaagaagtacagagtgggtgagagatggcatccttacctggaaccttatgggttggtttactgcgtgaactgcatctgctcagagaatgggaatgtgctttgcagccgagtcagatgtccaaatgttcattgcctttctcctgtgcatattcctcatctgtgctgccctcgctgcccagaagactccttacccccagtgaacaataaggtgaccagcaagtcttgcgagtacaatgggacaacttaccaacatggagagctgttcgtagctgaagggctctttcagaatcggcaacccaatcaatgcacccagtgcagctgttcggagggaaacgtgtattgtggtctcaagacttgccccaaattaacctgtgccttcccagtctctgttccagattcctgctgccgggtatgcagaggagatggagaactgtcatgggaacattctgatggtgatatcttccggcaacctgccaacagagaagcaagacattcttaccaccgctctcactatgatcctccaccaagccgacaggctggaggtctgtcccgctttcctggggccagaagtcaccggggagctcttatggattcccagcaagcatcaggaaccattgtgcaaattgtcatcaataacaaacacaagcatggacaagtgtgtgtttccaatggaaagacctattctcatggcgagtcctggcacccaaacctccgggcatttggcattgtggagtgtgtgctatgtacttgtaatgtcaccaagcaagagtgtaagaaaatccactgccccaatcgatacccctgcaagtatcctcaaaaaatagacggaaaatgctgcaaggtgtgtccaggtaaaaaagcaaaagaagaacttccaggccaaagctttgacaataaaggctacttctgcggggaagaaacgatgcctgtgtatgagtctgtattcatggaggatggggagacaaccagaaaaatagcactggagactgagagaccacctcaggtagaggtccacgtttggactattcgaaagggcattctccagcacttccatattgagaagatctccaagaggatgtttgaggagcttcctcacttcaagctggtgaccagaacaaccctgagccagtggaagatcttcaccgaaggagaagctcagatcagccagatgtgttcaagtcgtgtatgcagaacagagcttgaagatttagtcaaggttttgtacctggagagatctgaaaagggccactgttaggcaagacagacagtattggatagggtaaagcaagaaaactcaagctgcagctggactgcaggcttattttgcttaagtcaacagtgccctaaaactccaaactcaaatgcagtcaattattcacgccatgcacagcataatttgctcctttgtgtggagtggtgtgtcagcccttgaacatctcctccaaagagactagaagagtcttaaattatatgtgggaggaggagggatagaacatcacaacactgctctagtttcttggagaatcacatttctttacaggttaaagacaaacaagaccccagggtttttatctagaaagttattcaagtgaaagaaagagaagggaattgcttagtaggagttctgcagtatagaacaattacttgtatgaaattatacctttgaattttagaatgtcatgtgttcttttaaaaaaattagctccccat

SEQ ID NO: 117585 - DNA, 3860 bp, Homo sapiens
  Payload ID: 2970
  Gene Symbol: CHRDL1
  Gene Name: chordin-like 1
  Uniprot ID: Q9BU40
  ENST ID: ENST00000372045
  CDS Start-End: 133-1485
gacggagaaggccagtgcccaggttagtgagcagtgcccggcgcccgcttccctcacctccttttccagcctttgcacagcttgaaggttctgtcaccttttgcagtggtccaaatgagaaaaaagtggaaaatgggaggcatgaaatacatcttttcgttgttgttctttcttttgctagaaggaggcaaaacagagcaagtaaaacattcagagacatattgcatgtttcaagacaagaagtacagagtgggtgagagatggcatccttacctggaaccttatgggttggtttactgcgtgaactgcatctgctcagagaatgggaatgtgctttgcagccgagtcagatgtccaaatgttcattgcctttctcctgtgcatattcctcatctgtgctgccctcgctgcccagactccttacccccagtgaacaataaggtgaccagcaagtcttgcgagtacaatgggacaacttaccaacatggagagctgttcgtagctgaagggctctttcagaatcggcaacccaatcaatgcacccagtgcagctgttcggagggaaacgtgtattgtggtctcaagacttgccccaaattaacctgtgccttcccagtctctgttccagattcctgctgccgggtatgcagaggagatggagaactgtcatgggaacattctgatggtgatatcttccggcaacctgccaacagagaagcaagacattcttaccaccgctctcactatgatcctccaccaagccgacaggctggaggtctgtcccgctttcctggggccagaagtcaccggggagctcttatggattcccagcaagcatcaggaaccattgtgcaaattgtcatcaataacaaacacaagcatggacaagtgtgtgtttccaatggaaagacctattctcatggcgagtcctggcacccaaacctccgggcatttggcattgtggagtgtgtgctatgtacttgtaatgtcaccaagcaagagtgtaagaaaatccactgccccaatcgatacccctgcaagtatcctcaaaaaatagacggaaaatgctgcaaggtgtgtccaggtaaaaaagcaaaagaacttccaggccaaagctttgacaataaaggctacttctgcggggaagaaacgatgcctgtgtatgagtctgtattcatggaggatggggagacaaccagaaaaatagcactggagactgagagaccacctcaggtagaggtccacgtttggactattcgaaagggcattctccagcacttccatattgagaagatctccaagaggatgtttgaggagcttcctcacttcaagctggtgaccagaacaaccctgagccagtggaagatcttcaccgaaggagaagctcagatcagccagatgtgttcaagtcgtgtatgcagaacagagcttgaagatttagtcaaggttttgtacctggagagatctgaaaagggccactgttaggcaagacagacagtattggatagggtaaagcaagaaaactcaagctgcagctggactgcaggcttattttgcttaagtcaacagtgccctaaaactccaaactcaaatgcagtcaattattcacgccatgcacagcataatttgctcctttgtgtggagtggtgtgtcagcccttgaacatctcctccaaagagactagaagagtcttaaattatatgtgggaggaggagggatagaacatcacaacactgctctagtttcttggagaatcacatttctttacaggttaaagacaaacaagaccccagggtttttatctagaaagttattcaagtgaaagaaagagaagggaattgcttagtaggagttctgcagtatagaacaattacttgtatgaaattatacctttgaattttagaatgtcatgtgttcttttaaaaaaattagctccccatcctccctcctcactccctccctccctccttctctctctctctctctctccctccctctctcacagacacacacacacacacacacacacacacacacacgcacgtccacactcacattaaacgaaagctttatttgaagcaaagctagccaagattctacgttacttttcccttgactggatcccaagtagcttggaagtttttgtgcccaggagagtaaataactgtgaacaagaggctctgcccttaggtctttgtggctgtttaagtcaccaacaatagagtcagggtaaagaataaaaacactttcatagcctcattcattcacttagaagtggtaataatttttccctaatgataccacttttcttttccccctgtacctatgggacttccagaaagaagttaaattgagtaaaatcatcagaaactgaatccatgtaagaaaaaataattgttgaagaaagaagttgatagaattcaaaaaggccatctttttgctttcacatcaataaaatttaccaagtaatagatcagtactcactaatatttttgagaccatagttgtctggtcagaaaaattatattaaattagtaaattctagaagctctttaaaagggaagttttccttcttctccaattataggagttgatttttactttgcaaagtggctcggtcctcatgagcatctgcatgttgactcttcagttaagaaaattgttgttcatttagggaggtggatattctgatgaagatctttatcctaaaccttcctactatccttgtcttattcatcaagcagatattttagtcaagaattccagagaaggctgctcctaaaatgtctacttgcagcccaataccagagcataaactatccattctggggtctggctttagaaatcatctttgtgggaagacctaattcttcacagcaaggatctcaggcatgccttctagatttgttccctctgaggggcaggaatgaactgtagaaatgttttaaggacccagaaaccccatatgtctcattccatgactataggtgagagaattctttcctaagagggtttgataccaataggggaaaatgtaaaatgttcagtctttatgacaacctggcataaaggagtcaattcttatgaaagagacacaagggccttatggccagggtttcttgggacaagactctcaccagcacatcacacacgttctccttggaagagagaagcagtacatcccggttgagaggtcacaaagcattagtttgtgtgtgtgtgtgtgtgtgtgtgtgtgtgtgtgtgtgtgtgtgtgtggtaaaggggggaaggtgttatgcggctgctccctccgtcccagaggtggcagtgattccataatgtggagactagtaactagatcctaaggcaaagaggtgtttctccttctggatgattcatcccaaagccttcccacccaggtgttctctgaaagcttagccttaagagaacacgcagagagtttccctagatatactcctgcctccaggtgctgggacacacctttgcaaaatgctgtgggaagcaggagctggggagctgtgttaagtcaaagtagaaaccctccagtgtttggtgttgtgtagagaataggacatagggtaaagaggccaagctgcctgtagttagtagagaagaatggatgtggttcttcttgtgtatttatttgtatcataaacacttggaacaacaaagaccataagcatcatttagcagttgtagccattttctagttaactcatgtaaacaagtaagagtaacataacagtattaccctttcactgttctcacaggacatgtacctaattatggtacttatttatgtagtcactgtatttctggatttttaaattaataaaaaagttaattttgaaaaatca

SEQ ID NO: 117586 - DNA, 2413 bp, Homo sapiens
  Payload ID: 2970
  Gene Symbol: CHRDL1
  Gene Name: chordin-like 1
  Uniprot ID: Q9BU40
  ENST ID: ENST00000394797
  CDS Start-End: 57-1427
gacggagaaggccagtgcccagcttgaaggttctgtcaccttttgcagtggtccaaatgagaaaaaagtggaaaatgggaggcatgaaatacatcttttcgttgttgttctttcttttgctagaaggaggcaaaacagagcaagtaaaacattcagagacatattgcatgtttcaagacaagaagtacagagtgggtgagagatggcatccttacctggaaccttatgggttggtttactgcgtgaactgcatctgctcagagaatgggaatgtgctttgcagccgagtcagatgtccaaatgttcattgcctttctcctgtgcatattcctcatctgtgctgccctcgctgcccagactccttacccccagtgaacaataaggtgaccagcaagtcttgcgagtacaatgggacaacttaccaacatggagagctgttcgtagctgaagggctctttcagaatcggcaacccaatcaatgcacccagtgcagctgttcggagggaaacgtgtattgtggtctcaagacttgccccaaattaacctgtgccttcccagtctctgttccagattcctgctgccgggtatgcagaggagatggagaactgtcatgggaacattctgatggtgatatcttccggcaacctgccaacagagaagcaagacattcttaccaccgctctcactatgatcctccaccaagccgacaggctggaggtctgtcccgctttcctggggccagaagtcaccggggagctcttatggattcccagcaagcatcaggaaccattgtgcaaattgtcatcaataacaaacacaagcatggacaagtgtgtgtttccaatggaaagacctattctcatggcgagtcctggcacccaaacctccgggcatttggcattgtggagtgtgtgctatgtacttgtaatgtcaccaagcaagagtgtaagaaaatccactgccccaatcgatacccctgcaagtatcctcaaaaaatagacggaaaatgctgcaaggtgtgtccaggtaaaaaagcaaaagaacttccaggccaaagctttgacaataaaggctacttctgcggggaagaaacgatgcctgtgtatgagtctgtattcatggaggatggggagacaaccagaaaaatagcactggagactgagagaccacctcaggtagaggtccacgtttggactattcgaaagggcattctccagcacttccatattgagaagatctccaagaggatgtttgaggagcttcctcacttcaagctggtgaccagaacaaccctgagccagtggaagatcttcaccgaaggagaagctcagatcagccagatgtgttcaagtcgtgtatgcagaacagagcttgaagatttagtcaaggttttgtacctggagagatctgaaaagggccactgttaggcaagacagacagtattggatagggtaaagcaagaaaactcaagctgcagctggactgcaggcttattttgcttaagtcaacagtgccctaaaactccaaactcaaatgcagtcaattattcacgccatgcacagcataatttgctcctttgtgtggagtggtgtgtcagcccttgaacatctcctccaaagagactagaagagtcttaaattatatgtgggaggaggagggatagaacatcacaacactgctctagtttcttggagaatcacatttctttacaggttaaagacaaacaagaccccagggtttttatctagaaagttattcaagtgaaagaaagagaagggaattgcttagtaggagttctgcagtatagaacaattacttgtatgaaattatacctttgaattttagaatgtcatgtgttcttttaaaaaaattagctccccatcctccctcctcactccctccctccctccttctctctctctctctctctccctccctctctcacagacacacacacacacacacacacacacacacacacgcacgtccacactcacattaaacgaaagctttatttgaagcaaagctagccaagattctacgttacttttcccttgactggatcccaagtagcttggaagtttttgtgcccaggagagtaaataactgtgaacaagaggctctgcccttaggtctttgtggctgtttaagtcaccaacaatagagtcagggtaaagaataaaaacactttcatagcctcattcattcacttagaagtggtaataatttttccctaatgataccacttttcttttccccctgtacctatgggacttccagaaagaagttaaattgagtaaaatcatcagaaactgaatccatgtaagaaaaaataattgttgaagaaagaagttgatagaattcaaaaaggccatctttttgctttcacatcaataaaatttaccaagtaata

SEQ ID NO: 117587 - DNA, 1658 bp, Homo sapiens
  Payload ID: 2970
  Gene Symbol: CHRDL1
  Gene Name: chordin-like 1
  Uniprot ID: Q9BU40
  ENST ID: ENST00000444321
  CDS Start-End: 111-1484
ccagacctcggacgagagcgccccggggagctcggagcgcgtgcacgcgtggcagacggagaaggccagtgcccagcttgaaggttctgtcaccttttgcagtggtccaaatgagaaaaaagtggaaaatgggaggcatgaaatacatcttttcgttgttgttctttcttttgctagaaggaggcaaaacagagcaagtaaaacattcagagacatattgcatgtttcaagacaagaagtacagagtgggtgagagatggcatccttacctggaaccttatgggttggtttactgcgtgaactgcatctgctcagagaatgggaatgtgctttgcagccgagtcagatgtccaaatgttcattgcctttctcctgtgcatattcctcatctgtgctgccctcgctgcccagactccttacccccagtgaacaataaggtgaccagcaagtcttgcgagtacaatgggacaacttaccaacatggagagctgttcgtagctgaagggctctttcagaatcggcaacccaatcaatgcacccagtgcagctgttcggagggaaacgtgtattgtggtctcaagacttgccccaaattaacctgtgccttcccagtctctgttccagattcctgctgccgggtatgcagaggagatggagaactgtcatgggaacattctgatggtgatatcttccggcaacctgccaacagagaagcaagacattcttaccaccgctctcactatgatcctccaccaagccgacaggctggaggtctgtcccgctttcctggggccagaagtcaccggggagctcttatggattcccagcaagcatcaggaaccattgtgcaaattgtcatcaataacaaacacaagcatggacaagtgtgtgtttccaatggaaagacctattctcatggcgagtcctggcacccaaacctccgggcatttggcattgtggagtgtgtgctatgtacttgtaatgtcaccaagcaagagtgtaagaaaatccactgccccaatcgatacccctgcaagtatcctcaaaaaatagacggaaaatgctgcaaggtgtgtccaggtaaaaaagcaaaagaagaacttccaggccaaagctttgacaataaaggctacttctgcggggaagaaacgatgcctgtgtatgagtctgtattcatggaggatggggagacaaccagaaaaatagcactggagactgagagaccacctcaggtagaggtccacgtttggactattcgaaagggcattctccagcacttccatattgagaagatctccaagaggatgtttgaggagcttcctcacttcaagctggtgaccagaacaaccctgagccagtggaagatcttcaccgaaggagaagctcagatcagccagatgtgttcaagtcgtgtatgcagaacagagcttgaagatttagtcaaggttttgtacctggagagatctgaaaagggccactgttaggcaagacagacagtattggatagggtaaagcaagaaaactcaagctgcagctggactgcaggcttattttgcttaagtcaacagtgccctaaaactccaaactcaaatgcagtcaattattcacgccatgcacagcataatttgctcctttgtgtggagtggtgtgtcagccct

SEQ ID NO: 117588 - DNA, 1537 bp, Homo sapiens
  Payload ID: 2970
  Gene Symbol: CHRDL1
  Gene Name: chordin-like 1
  Uniprot ID: Q9BU40
  ENST ID: ENST00000482160
  CDS Start-End: 111-1247
ccagacctcggacgagagcgccccggggagctcggagcgcgtgcacgcgtggcagacggagaaggccagtgcccagcttgaaggttctgtcaccttttgcagtggtccaaatgagaaaaaagtggaaaatgggaggcatgaaatacatcttttcgttgttgttctttcttttgctagaaggaggcaaaacagagcaagtaaaacattcagagacatattgcatgtttcaagacaagaagtacagagtgggtgagagatggcatccttacctggaaccttatgggttggtttactgcgtgaactgcatctgctcagagaatgggaatgtgctttgcagccgagtcagatgtccaaatgttcattgcctttctcctgtgcatattcctcatctgtgctgccctcgctgcccaggagatggagaactgtcatgggaacattctgatggtgatatcttccggcaacctgccaacagagaagcaagacattcttaccaccgctctcactatgatcctccaccaagccgacaggctggaggtctgtcccgctttcctggggccagaagtcaccggggagctcttatggattcccagcaagcatcaggaaccattgtgcaaattgtcatcaataacaaacacaagcatggacaagtgtgtgtttccaatggaaagacctattctcatggcgagtcctggcacccaaacctccgggcatttggcattgtggagtgtgtgctatgtacttgtaatgtcaccaagcaagagtgtaagaaaatccactgccccaatcgatacccctgcaagtatcctcaaaaaatagacggaaaatgctgcaaggtgtgtccaggtaaaaaagcaaaagaagaacttccaggccaaagctttgacaataaaggctacttctgcggggaagaaacgatgcctgtgtatgagtctgtattcatggaggatggggagacaaccagaaaaatagcactggagactgagagaccacctcaggtagaggtccacgtttggactattcgaaagggcattctccagcacttccatattgagaagatctccaagaggatgtttgaggagcttcctcacttcaagctggtgaccagaacaaccctgagccagtggaagatcttcaccgaaggagaagctcagatcagccagatgtgttcaagtcgtgtatgcagaacagagcttgaagatttagtcaaggttttgtacctggagagatctgaaaagggccactgttaggcaagacagacagtattggatagggtaaagcaagaaaactcaagctgcagctggactgcaggcttattttgcttaagtcaacagtgccctaaaactccaaactcaaatgcagtcaattattcacgccatgcacagcataatttgctcctttgtgtggagtggtgtgtcagcccttgaacatctcctccaaagagactagaagagtcttaaattatatgtgggaggaggagggatagaacatcacaacactgctctagtttcttggagaatcacatttctttacaggttaa

SEQ ID NO: 117589 - DNA, 1712 bp, Homo sapiens
  Payload ID: 2971
  Gene Symbol: CHRDL2
  Gene Name: chordin-like 2
  Uniprot ID: Q6WN34
  ENST ID: ENST00000263671
  CDS Start-End: 288-1643
ccctttctttgatcgcctctcccttctgctggaccttccttcgtctctccatctctccctcctttccccgcgttctctttccacctttctcttcttcccaccttagacctcccttcctgccctcctttcctgcccaccgctgcttcctggcccttctccgaccccgctctagcagcagacctcctggggtctgtgggttgatctgtggcccctgtgcctccgtgtccttttcgtctcccttcctcccgactccgctcccggaccagcggcctgaccctggggaaaggatggttcccgaggtgagggtcctctcctccttgctgggactcgcgctgctctggttccccctggactcccacgctcgagcccgcccagacatgttctgccttttccatgggaagagatactcccccggcgagagctggcacccctacttggagccacaaggcctgatgtactgcctgcgctgtacctgctcagagggcgcccatgtgagttgttaccgcctccactgtccgcctgtccactgcccccagcctgtgacggagccacagcaatgctgtcccaagtgtgtggaacctcacactccctctggactccgggccccaccaaagtcctgccagcacaacgggaccatgtaccaacacggagagatcttcagtgcccatgagctgttcccctcccgcctgcccaaccagtgtgtcctctgcagctgcacagagggccagatctactgcggcctcacaacctgccccgaaccaggctgcccagcacccctcccgctgccagactcctgctgccaggcctgcaaagatgaggcaagtgagcaatcggatgaagaggacagtgtgcagtcgctccatggggtgagacatcctcaggatccatgttccagtgatgctgggagaaagagaggcccgggcaccccagcccccactggcctcagcgcccctctgagcttcatccctcgccacttcagacccaagggagcaggcagcacaactgtcaagatcgtcctgaaggagaaacataagaaagcctgtgtgcatggcgggaagacgtactcccacggggaggtgtggcacccggccttccgtgccttcggccccttgccctgcatcctatgcacctgtgaggatggccgccaggactgccagcgtgtgacctgtcccaccgagtacccctgccgtcaccccgagaaagtggctgggaagtgctgcaagatttgcccagaggacaaagcagaccctggccacagtgagatcagttctaccaggtgtcccaaggcaccgggccgggtcctcgtccacacatcggtatccccaagcccagacaacctgcgtcgctttgccctggaacacgaggcctcggacttggtggagatctacctctggaagctggtaaaagatgaggaaactgaggctcagagaggtgaagtacctggcccaaggccacacagccagaatcttccacttgactcagatcaagaaagtcaggaagcaagacttccagaaagaggcacagcacttccgactgctcgctggcccccacgaaggtcactggaacgtcttcctagcccagaccctggagctgaaggtcacggccagtccagacaaagtgaccaagacataacaaagacctaacagttgcagatatgagctgtataattgttgttattatatattaataaataagaagttgcattaccctca

SEQ ID NO: 117590 - DNA, 1665 bp, Homo sapiens
  Payload ID: 2971
  Gene Symbol: CHRDL2
  Gene Name: chordin-like 2
  ENST ID: ENST00000376324
  CDS Start-End: 450-878
ggacaaataaaaaggaaacaagcatgattgtgagggcagaggagcgtgggactgagtcaggagactggtgctgtcatcgctgcctggtgactgacttgctgtgtggccctcaggtgtaacttaccctctctgggcctcatttgtctaatcataataattaacgctgataccatgatataaatctgtacagcatttcactgcttgattccctaactgccctgtgagataagcgttaaggctcagagacagtggcatgcccagtgttgcacagtaagtgtgtggtaaagccgagattcaaactcagaccttctggccccttgcctaggagagcatgcccagttgtctagcagattctcttttgcctgagtggcccagatgacatctcttttagagctagaaagaaggagaaatgagacagggtctttgggctggagcctcctgggactaacatggcactggtcggtttgccaggcccagacatgttctgccttttccatgggaagagatactcccccggcgagagctggcacccctacttggagccacaaggcctgatgtactgcctgcgctgtacctgctcagagaacctcacactccctctggactccgggccccaccaaagtcctgccagcacaacgggaccatgtaccaacacggagagatcttcagtgcccatgagctgttcccctcccgcctgcccaaccagtgtgtcctctgcagctgcacagagggccagatctactgcggcctcacaacctgccccgaaccaggctgcccagcacccctcccgctgccagactcctgctgccaggcctgcaaagatgaggcaagtgagcaatcggatgaagaggacagtgtgcagtcgctccatggggtgagacatcctcaggatccatgttccagtgatgctgggagaaagagaggcccgggcaccccagcccccactggcctcagcgcccctctgagcttcatccctcgccacttcagacccaagggagcaggcagcacaactgtcaagatcgtcctgaaggagaaacataagaaagcctgtgtgcatggcgggaagacgtactcccacggggaggtgtggcacccggccttccgtgccttcggccccttgccctgcatcctatgcacctgtgaggatggccgccaggactgccagcgtgtgacctgtcccaccgagtacccctgccgtcaccccgagaaagtggctgggaagtgctgcaagatttgcccagaggacaaagcagaccctggccacagtgagatcagttctaccaggtgtcccaaggcaccgggccgggtcctcgtccacacatcggtatccccaagcccagacaacctgcgtcgctttgccctggaacacgaggcctcggacttggtggagatctacctctggaagctggtaaaaggaatcttccacttgactcagatcaagaaagtcaggaagcaagacttccagaaagaggcacagcacttccgactgctcgctggcccccacgaaggtcactggaacgtcttcctagcccagaccctggagctgaaggtcacggccagtccagacaaagtgaccaagacataacaaagacctaacagttgcagatatgagctgtataattgttgttattatatattaataaataagaagttgcattaccctca

SEQ ID NO: 117591 - DNA, 1867 bp, Homo sapiens
  Payload ID: 2971
  Gene Symbol: CHRDL2
  Gene Name: chordin-like 2
  Uniprot ID: Q6WN34
  ENST ID: ENST00000376332
  CDS Start-End: 498-1787
gccgccgcgccgccgccgctgctgggaccgccgccccgccgggccccaggcccccgcggcccgaccccgagcccaccgagcagggggcgccggccgcctctagcccgcgcgcccgcaacacccgctggtcccgcgcgcctcgcccggcgctgcgcgctcggcagacgccggtcctctccctgctttctcctcctctccctctcaccttccccctttctttgatcgcctctcccttctgctggaccttccttcgtctctccatctctccctcctttccccgcgttctctttccacctttctcttcttcccaccttagacctcccttcctgccctcctttcctgcccaccgctgcttcctggcccttctccgaccccgctctagcagcagacctcctggggtctgtgggttgatctgtggcccctgtgcctccgtgtccttttcgtctcccttcctcccgactccgctcccggaccagcggcctgaccctggggaaaggatggttcccgaggtgagggtcctctcctccttgctgggactcgcgctgctctggttccccctggactcccacgctcgagcccgcccagacatgttctgccttttccatgggaagagatactcccccggcgagagctggcacccctacttggagccacaaggcctgatgtactgcctgcgctgtacctgctcagagggcgcccatgtgagttgttaccgcctccactgtccgcctgtccactgcccccagcctgtgacggagccacagcaatgctgtcccaagtgtgtggaacctcacactccctctggactccgggccccaccaaagtcctgccagcacaacgggaccatgtaccaacacggagagatcttcagtgcccatgagctgttcccctcccgcctgcccaaccagtgtgtcctctgcagctgcacagagggccagatctactgcggcctcacaacctgccccgaaccaggctgcccagcacccctcccgctgccagactcctgctgccaggcctgcaaagatgaggcaagtgagcaatcggatgaagaggacagtgtgcagtcgctccatggggtgagacatcctcaggatccatgttccagtgatgctgggagaaagagaggcccgggcaccccagcccccactggcctcagcgcccctctgagcttcatccctcgccacttcagacccaagggagcaggcagcacaactgtcaagatcgtcctgaaggagaaacataagaaagcctgtgtgcatggcgggaagacgtactcccacggggaggtgtggcacccggccttccgtgccttcggccccttgccctgcatcctatgcacctgtgaggatggccgccaggactgccagcgtgtgacctgtcccaccgagtacccctgccgtcaccccgagaaagtggctgggaagtgctgcaagatttgcccagaggacaaagcagaccctggccacagtgagatcagttctaccaggtgtcccaaggcaccgggccgggtcctcgtccacacatcggtatccccaagcccagacaacctgcgtcgctttgccctggaacacgaggcctcggacttggtggagatctacctctggaagctggtaaaaggaatcttccacttgactcagatcaagaaagtcaggaagcaagacttccagaaagaggcacagcacttccgactgctcgctggcccccacgaaggtcactggaacgtcttcctagcccagaccctggagctgaaggtcacggccagtccagacaaagtgaccaagacataacaaagacctaacagttgcagatatgagctgtataattgttgttattatatattaataaataagaagttgcattaccctca

SEQ ID NO: 117592 - DNA, 1219 bp, Homo sapiens
  Payload ID: 2971
  Gene Symbol: CHRDL2
  Gene Name: chordin-like 2
  ENST ID: ENST00000528789
  CDS Start-End: 295-1219
accttccccctttctttgatcgcctctcccttctgctggaccttccttcgtctctccatctctccctcctttccccgcgttctctttccacctttctcttcttcccaccttagacctcccttcctgccctcctttcctgcccaccgctgcttcctggcccttctccgaccccgctctagcagcagacctcctggggtctgtgggttgatctgtggcccctgtgcctccgtgtccttttcgtctcccttcctcccgactccgctcccggaccagcggcctgaccctggggaaaggatggttcccgaggtgagggtcctctcctccttgctgggactcgcgctgctctggttccccctggactcccacgctcgagcccgcccagacatgttctgccttttccatgggaagagatactcccccggcgagagctggcacccctacttggagccacaaggcctgatgtactgcctgcgctgtacctgctcagagggcgcccatgtgagttgttaccgcctccactgtccgcctgtccactgcccccagcctgtgacggagccacagcaatgctgtcccaagtgtgtggaacctcacactccctctggactccgggccccaccaaagtcctgccagcacaacgggaccatgtaccaacacggagagatcttcagtgcccatgagctgttcccctcccgcctgcccaaccagtgtgtcctctgcagctgcacagagggccagatctactgcggcctcacaacctgccccgaaccaggctgcccagcacccctcccgctgccagactcctgctgccaggcctgcaaagatgaggcaagtgagcaatcggatgaagaggacagtgtgcagtcgctccatggggtgagacatcctcaggatccatgttccagtgatgctgggagaaagagaggcccgggcaccccagcccccactggcctcagcgcccctctgagcttcatccctcgccacttcagacccaagggagcaggcagcacaactgtcaagatcgtcctgaaggagaaacataagaaagaggacaaagcagaccctggccacagtgagatcagttctaccaggtgtcccaaggcaccgggccgggtcctcgtccacacatcggtatccccaagcccagacaacctgcgtcgctttgccctggaacacgaggcctcggacttggtggagatctacctctggaagctggtaaaag

SEQ ID NO: 117593 - DNA, 1415 bp, Homo sapiens
  Payload ID: 2971
  Gene Symbol: CHRDL2
  Gene Name: chordin-like 2
  Uniprot ID: Q6WN34
  ENST ID: ENST00000534276
  CDS Start-End: 450-878
ggacaaataaaaaggaaacaagcatgattgtgagggcagaggagcgtgggactgagtcaggagactggtgctgtcatcgctgcctggtgactgacttgctgtgtggccctcaggtgtaacttaccctctctgggcctcatttgtctaatcataataattaacgctgataccatgatataaatctgtacagcatttcactgcttgattccctaactgccctgtgagataagcgttaaggctcagagacagtggcatgcccagtgttgcacagtaagtgtgtggtaaagccgagattcaaactcagaccttctggccccttgcctaggagagcatgcccagttgtctagcagattctcttttgcctgagtggcccagatgacatctcttttagagctagaaagaaggagaaatgagacagggtctttgggctggagcctcctgggactaacatggcactggtcggtttgccaggcccagacatgttctgccttttccatgggaagagatactcccccggcgagagctggcacccctacttggagccacaaggcctgatgtactgcctgcgctgtacctgctcagagggcgcccatgtgagttgttaccgcctccactgtccgcctgtccactgcccccagcctgtgacggagccacagcaatgctgtcccaagtgtgtggaacctcacactccctctggactccgggccccaccaaagtcctgccagcacaacgggaccatgtaccaacacggagagatcttcagtgcccatgagctgttcccctcccgcctgcccaaccagtgtgtcctctgcagctgcacaatgaggcaagtgagcaatcggatgaagaggacagtgtgcagtcgctccatggggtgagacatcctcaggatccatgttccagtgatgctgggagaaagagaggcccgggcaccccagcccccactggcctcagcgcccctctgagcttcatccctcgccacttcagacccaagggagcaggcagcacaactgtcaagatcgtcctgaaggagaaacataagaaagcctgtgtgcatggcgggaagacgtactcccacggggaggtgtggcacccggccttccgtgccttcggccccttgccctgcatcctatgcacctgtgaggatggccgccaggactgccagcgtgtgacctgtcccaccgagtacccctgccgtcaccccgagaaagtggctgggaagtgctgcaagatttgcccagaggacaaagcagaccctggccacagtgagatcagttctaccaggtgtcccaaggcaccgggccgggtcctcgtccacacatcggtatccccaagcccagacaacctgcgtcgctttgccctggaacacgaggcctcggacttggtggagatctacctctggaagctggtaaaag

SEQ ID NO: 117594 - DNA, 344 bp, Homo sapiens
  Payload ID: 2971
  Gene Symbol: CHRDL2
  Gene Name: chordin-like 2
  ENST ID: ENST00000529912
  CDS Start-End: 1-275
caggtgacaggagcaggatcagcaaagagaacagacagaagaaaacaggcttcactgtggaggcgacaggacgtcagggaaggggaatgacagggaatcttccacttgactcagatcaagaaagtcaggaagcaagacttccagaaagaggcacagcacttccgactgctcgctggcccccacgaaggtcactggaacgtcttcctagcccagaccctggagctgaaggtcacggccagtccagacaaagtgaccaagacataacaaagacctaacagttgcagatatgagctgtataattgttgttattatatattaataaataagaagttgcattaccctca

SEQ ID NO: 117595 - DNA, 669 bp, Homo sapiens
  Payload ID: 2971
  Gene Symbol: CHRDL2
  Gene Name: chordin-like 2
  ENST ID: ENST00000525413
  CDS Start-End: 1-533
gttccagtgatgctgggagaaagagaggcccgggcaccccagcccccactggcctcagcgcccctctgagcttcatccctcgccacttcagacccaagggagcaggcagcacaactgtcaagatcgtcctgaaggagaaacataagaaagcctgtgtgcatggcgggaagacgtactcccacggggaggtgtggcacccggccttccgtgccttcggccccttgccctgcatcctatgcacctgtgaggatggccgccaggactgccagcgtgtgacctgtcccaccgagtacccctgccgtcaccccgagaaagtggctgggaagtgctgcaagatttgcccagaggacaaagcagaccctggccacagtgagatcagttctaccaggtgtcccaaggcaccgggccgggtcctcgtccacacatcggtatccccaagcccagacaacctgcgtcgctttgccctggaacacgaggcctcggacttggtggagatctacctctggaagctggtcactggaacgtcttcctagcccagaccctggagctgaaggtcacggccagtccagacaaagtgaccaagacataacaaagacctaacagttgcagatatgagctgtataattgttgttattatatattaataaataagaagttgcattaccctca

SEQ ID NO: 117596 - DNA, 1321 bp, Homo sapiens
  Payload ID: 2971
  Gene Symbol: CHRDL2
  Gene Name: chordin-like 2
  Uniprot ID: Q6WN34
  ENST ID: ENST00000528471
  CDS Start-End: 450-731
ggacaaataaaaaggaaacaagcatgattgtgagggcagaggagcgtgggactgagtcaggagactggtgctgtcatcgctgcctggtgactgacttgctgtgtggccctcaggtgtaacttaccctctctgggcctcatttgtctaatcataataattaacgctgataccatgatataaatctgtacagcatttcactgcttgattccctaactgccctgtgagataagcgttaaggctcagagacagtggcatgcccagtgttgcacagtaagtgtgtggtaaagccgagattcaaactcagaccttctggccccttgcctaggagagcatgcccagttgtctagcagattctcttttgcctgagtggcccagatgacatctcttttagagctagaaagaaggagaaatgagacagggtctttgggctggagcctcctgggactaacatggcactggtcggtttgccaggcccagacatgttctgccttttccatgggaagagatactcccccggcgagagctggcacccctacttggagccacaaggcctgatgtactgcctgcgctgtacctgctcagagaacctcacactccctctggactccgggccccaccaaagtcctgccagcacaacgggaccatgtaccaacacggagagatcttcagtgcccatgagctgttcccctcccgcctgcccaaccagtgtgtcctctgcagctgcacaatgaggcaagtgagcaatcggatgaagaggacagtgtgcagtcgctccatggggtgagacatcctcaggatccatgttccagtgatgctgggagaaagagaggcccgggcaccccagcccccactggcctcagcgcccctctgagcttcatccctcgccacttcagacccaagggagcaggcagcacaactgtcaagatcgtcctgaaggagaaacataagaaagcctgtgtgcatggcgggaagacgtactcccacggggaggtgtggcacccggccttccgtgccttcggccccttgccctgcatcctatgcacctgtgaggatggccgccaggactgccagcgtgtgacctgtcccaccgagtacccctgccgtcaccccgagaaagtggctgggaagtgctgcaagatttgcccagaggacaaagcagaccctggccacagtgagatcagttctaccaggtgtcccaaggcaccgggccgggtcctcgtccacacatcggtatccccaagcccagacaacctgcgtcgctttgccctggaacacgaggcctcggacttggtggagatctacctctggaagctggtaaaag

SEQ ID NO: 117597 - DNA, 1691 bp, Homo sapiens
  Payload ID: 2971
  Gene Symbol: CHRDL2
  Gene Name: chordin-like 2
  ENST ID: ENST00000622063
  CDS Start-End: 846-1691
gccgccgcgccgccgccgctgctgggaccgccgccccgccgggccccaggcccccgcggcccgaccccgagcccaccgagcagggggcgccggccgcctctagcccgcgcgcccgcaacacccgctggtcccgcgcgcctcgcccggcgctgcgcgctcggcagacgccggtcctctccctgctttctcctcctctccctctcaccttccccctttctttgatcgcctctcccttctgctggaccttccttcgtctctccatctctccctcctttccccgcgttctctttccacctttctcttcttcccaccttagacctcccttcctgccctcctttcctgcccaccgctgcttcctggcccttctccgaccccgctctagcagcagacctcctggggtctgtgggttgatctgtggcccctgtgcctccgtgtccttttcgtctcccttcctcccgactccgctcccggaccagcggcctgaccctggggaaaggatggttcccgaggtgagggtcctctcctccttgctgggactcgcgctgctctggttccccctggactcccacgctcgagcccgcccagacatgttctgccttttccatgggaagagatactcccccggcgagagctggcacccctacttggagccacaaggcctgatgtactgcctgcgctgtacctgctcagagggcgcccatgtgagttgttaccgcctccactgtccgcctgtccactgcccccagcctgtgacggagccacagcaatgctgtcccaagtgtgtggaacctcacactccctctggactccgggccccaccaaagtcctgccagcacaacgggaccatgtaccaacacggagagatcttcagtgcccatgagctgttcccctcccgcctgcccaaccagtgtgtcctctgcagctgcacagagggccagatctactgcggcctcacaacctgccccgaaccaggctgcccagcacccctcccgctgccagactcctgctgccaggcctgcaaagctggctccagctggggcctgctatgctcagtcagtgactttcatccttcctgccatttgcagagacatcctcaggatccatgttccagtgatgctgggagaaagagaggcccgggcaccccagcccccactggcctcagcgcccctctgagcttcatccctcgccacttcagacccaagggagcaggcagcacaactgtcaagatcgtcctgaaggagaaacataagaaagcctgtgtgcatggcgggaagacgtactcccacggggaggtgtggcacccggccttccgtgccttcggccccttgccctgcatcctatgcacctgtgaggatggccgccaggactgccagcgtgtgacctgtcccaccgagtacccctgccgtcaccccgagaaagtggctgggaagtgctgcaagatttgcccagaggacaaagcagaccctggccacagtgagatcagttctaccaggtgtcccaaggcaccgggccgggtcctcgtccacacatcggtatccccaagcccagacaacctgcgtcgctttgccctggaacacgaggcctcggacttggtggagatctacctctggaagctggtaaaagacgtcttcctagcccagaccctggagctgaaggtcacggccagtccagacaaagtgaccaagacataa

SEQ ID NO: 117598 - DNA, 877 bp, Homo sapiens
  Payload ID: 2972
  Gene Symbol: CGB
  Gene Name: chorionic gonadotropin, beta polypeptide
  Uniprot ID: P01233
  ENST ID: ENST00000357383
  CDS Start-End: 363-860
agcacctttctcgggtcacggcctcctcctggctcccaggaccccaccataggcagaggcaggccttcctacaccctactccctgtgcctccagcctcgactagtccctagcactcgacgactgagtctctgaggtcacttcaccgtggtctccgcctcacccttggcgctggaccagtgagaggagagggctggggcgctccgctgagccactcctgcgcccccctggccttgtctacctcttgccccccgaggggttagtgtcgagctcaccccagcatcctatcacctcctggtggccttgccgcccccacaaccccgaggtataaagccaggtacacgaggcaggggacgcaccaaggatggagatgttccaggggctgctgctgttgctgctgctgagcatgggcgggacatgggcatccaaggagccgcttcggccacggtgccgccccatcaatgccaccctggctgtggagaaggagggctgccccgtgtgcatcaccgtcaacaccaccatctgtgccggctactgccccaccatgacccgcgtgctgcagggggtcctgccggccctgcctcaggtggtgtgcaactaccgcgatgtgcgcttcgagtccatccggctccctggctgcccgcgcggcgtgaaccccgtggtctcctacgccgtggctctcagctgtcaatgtgcactctgccgccgcagcaccactgactgcgggggtcccaaggaccaccccttgacctgtgatgacccccgcttccaggactcctcttcctcaaaggcccctccccccagccttccaagcccatcccgactcccggggccctcggacaccccgatcctcccacaataaaggcttctcaatccgca

SEQ ID NO: 117599 - DNA, 573 bp, Homo sapiens
  Payload ID: 2973
  Gene Symbol: CGB1
  Gene Name: chorionic gonadotropin, beta polypeptide 1
  Uniprot ID: A6NKQ9
  ENST ID: ENST00000301407
  CDS Start-End: 106-573
gtccaacacccctcactccctgtctcactcccccacggagactcaatttactttccatgtccacattcccagtgcttgcggaagatatcccgctaagagagagacatgtcaaagaggctgctgctgttgctgctgctgagcatgggcgggacatgggcatccaaggagccgcttcggccacggtgccgccccatcaatgccaccctggctgtggagaaggagggctgccccgtgtgcatcaccgtcaacaccaccatctgtgccggctactgccccaccatgacccgcgtgctgcagggggtcctgccggccctgcctcaggtggtgtgcaactaccgcgatgtgcgcttcgagtccatccggctccctggctgcccgcgcggcgtgaaccccgtggtctcctacgccgtggctctcagctgtcaatgtgcactctgccgccgcagcaccactgactgcgggggtcccaaggaccaccccttgacctgtgatgacccccgcttccaggactcctcttcctcaaaggcccctccccccagccttccaagtccatcccgtctcccggggccctag

SEQ ID NO: 117600 - DNA, 786 bp, Homo sapiens
  Payload ID: 2973
  Gene Symbol: CGB1
  Gene Name: chorionic gonadotropin, beta polypeptide 1
  ENST ID: ENST00000601167
  CDS Start-End: 398-786
ctggagggaggaaggggaactgcatctgagagagagcagccaattgggtccgctgactctggccaggttcccgtgccgcgtccaacacccctcactccctgtctcactcccccacggagactcaatttactttccatgtccacattcccagtgcttgcggaagatatcccgctaagagagagacatgtcaaaggtagggtagatccacatttccgggcaccaaagatggagatgttccaggaaagactgcagggcccctgggcaccttccacctccttccaggccatcactggcatgagaaggggcagacccgtgtgagctgtggaaggaggcctctttctggaggagcgtgacccccagtaagcttcagaggctgctgctgttgctgctgctgagcatgggcgggacatgggcatccaaggagccgcttcggccacggtgccgccccatcaatgccaccctggctgtggagaaggagggctgccccgtgtgcatcaccgtcaacaccaccatctgtgccggctactgccccaccatgacccgcgtgctgcagggggtcctgccggccctgcctcaggtggtgtgcaactaccgcgatgtgcgcttcgagtccatccggctccctggctgcccgcgcggcgtgaaccccgtggtctcctacgccgtggctctcagctgtcaatgtgcactctgccgccgcagcaccactgactgcgggggtcccaaggaccaccccttgacctgtgatgacccccgcttccaggactcctcttcctcaaaggcccc

SEQ ID NO: 117601 - DNA, 627 bp, Homo sapiens
  Payload ID: 2974
  Gene Symbol: CGB2
  Gene Name: chorionic gonadotropin, beta polypeptide 2
  ENST ID: ENST00000359342
  CDS Start-End: 119-610
gttcccgtgccgcgtccaacacccctcactccctgtctcactcccccacggagactcaatttactttccatgtccacatccccagtgcttgcggaagatatcccgctaagagagagacatgtcaaaggggctgctgctgttgctgctgctgagcatgggcgggacatgggcatccaaggagccgcttcggccacggtgccgccccatcaatgccaccctggctgtggagaaggagggctgccccgtgtgcatcaccgtcaacaccaccatctgtgccggctactgccccaccatgacccgcgtgctgcagggggtcctgccggccctgcctcaggtggtgtgcaactaccgcgatgtgcgcttcgagtccatccggctccctggctgcccgcgcggcgtgaaccccgtggtctcctacgccgtggctctcagctgtcaatgtgcactctgccgccgcagcaccactgactgcgggggtcccaaggaccaccccttgacctgtgatgacccccgcttccaggcctcctcttcctcaaaggcccctccccccagccttccaagcccatcccgactcccggggccctcagacaccccgatcctcccacaataaaggcttctcaatccgca

SEQ ID NO: 117602 - DNA, 775 bp, Homo sapiens
  Payload ID: 2974
  Gene Symbol: CGB2
  Gene Name: chorionic gonadotropin, beta polypeptide 2
  ENST ID: ENST00000474913
  CDS Start-End: 387-775
ctggagggaggaaggggaactgtatctgagagagagcagccaattgggtccgctgactccggccgggttcccgtgccgcgtccaacacccctcactccctgtctcactcccccacggagactcaatttactttccatgtccacatccccagtgcttgcggaagatatcccgctaagagagagacatgtcaaaggtagggtagatcgacatttccaggcaccaaagatggagatgttccaggaaagactgcagggcccctgggcaccttccacctgcttccaggccatcactggcatgagaaggggcagaccagtgtgagctgtggaaggaggcctctttctggaggagcgtgacccccagggctgctgctgttgctgctgctgagcatgggcgggacatgggcatccaaggagccgcttcggccacggtgccgccccatcaatgccaccctggctgtggagaaggagggctgccccgtgtgcatcaccgtcaacaccaccatctgtgccggctactgccccaccatgacccgcgtgctgcagggggtcctgccggccctgcctcaggtggtgtgcaactaccgcgatgtgcgcttcgagtccatccggctccctggctgcccgcgcggcgtgaaccccgtggtctcctacgccgtggctctcagctgtcaatgtgcactctgccgccgcagcaccactgactgcgggggtcccaaggaccaccccttgacctgtgatgacccccgcttccaggcctcctcttcctcaaaggcccc

SEQ ID NO: 117603 - DNA, 841 bp, Homo sapiens
  Payload ID: 2975
  Gene Symbol: CGB5
  Gene Name: chorionic gonadotropin, beta polypeptide 5
  Uniprot ID: P01233
  ENST ID: ENST00000301408
  CDS Start-End: 327-824
caggaccccaccataggcagaggcaggccttcctacaccctactccctgtgcctccaggctcgactagtccctagcactcgacgactgagtctctgagatcacttcaccgtggtctccgcctcacccttggcgctggaccagtgagaggagagggctggggcgctccgctgagccactcctgcgcccccctggccttgtctacctcttgccccccgaagggttagtgtcgagctcaccccagcatcctacaacctcctggtggccttgccgcccccacaaccccgaggtataaagccaggtacacgaggcaggggacgcaccaaggatggagatgttccaggggctgctgctgttgctgctgctgagcatgggcgggacatgggcatccaaggagccgcttcggccacggtgccgccccatcaatgccaccctggctgtggagaaggagggctgccccgtgtgcatcaccgtcaacaccaccatctgtgccggctactgccccaccatgacccgcgtgctgcagggggtcctgccggccctgcctcaggtggtgtgcaactaccgcgatgtgcgcttcgagtccatccggctccctggctgcccgcgcggcgtgaaccccgtggtctcctacgccgtggctctcagctgtcaatgtgcactctgccgccgcagcaccactgactgcgggggtcccaaggaccaccccttgacctgtgatgacccccgcttccaggactcctcttcctcaaaggcccctccccccagccttccaagtccatcccgactcccggggccctcggacaccccgatcctcccacaataaaggcttctcaatccgca

SEQ ID NO: 117604 - DNA, 918 bp, Homo sapiens
  Payload ID: 2976
  Gene Symbol: CGB7
  Gene Name: chorionic gonadotropin, beta polypeptide 7
  Uniprot ID: P01233
  ENST ID: ENST00000377280
  CDS Start-End: 405-902
tgcaggaatggctcaagtagaggagggttgaggcttcagtccagcacctttctcgggtcacggcctcctcctggttcccaagaccccaccataggcagaggcaggccttcctacaccctactctctgtgcctccagcctcgactagtccctagcactcgacgactgagtctcagaggtcacttcaccgtggtctccgcctcatccttggcgctagaccactgaggggagaggactggggtgctccgctgagccactcctgtgcctccctggccttgtctacttctcgccccccgaagggttagtgtccagctcactccagcatcctacaacctcctggtggccttgacgcccccacaaacccgaggtataaagccaggtacaccaggcaggggacgcaccaaggatggagatgttccaggggctgctgctgttgctgctgctgagcatgggcgggacatgggcatccagggagatgcttcggccacggtgccgccccatcaatgccaccctggctgtggagaaggagggctgccccgtgtgcatcaccgtcaacaccaccatctgtgccggctactgccccaccatgacccgcgtgctgcagggggtcctgccggccctgcctcaggtggtgtgcaactaccgcgatgtgcgcttcgagtccatccggctccctggctgcccgcgcggcgtgaaccccgtggtctcctacgccgtggctctcagctgtcaatgtgcactctgccgccgcagcaccactgactgcgggggtcccaaggaccaccccttgacctgtgatgacccccgcttccaggcctcctcttcctcaaaggcccctccccccagccttccaagtccatcccgactcccggggccctcagacaccccgatcctcccacaataaaggcttctcaatccgc

SEQ ID NO: 117605 - DNA, 1949 bp, Homo sapiens
  Payload ID: 2976
  Gene Symbol: CGB7
  Gene Name: chorionic gonadotropin, beta polypeptide 7
  Uniprot ID: P01233
  ENST ID: ENST00000596965
  CDS Start-End: 1436-1933
gcatccacgccaggccagaaggaccaggggctggaaactcgccttcagggctcctaagctgctgcggagctagacggcgggctgtgggctctaatcgcctgcacgaagaaccccgcgctgtctggcccacccttcacagtatccgaccggggcgtcctgaaccgccgccagctctatctgaccacctcggcgcgggactttcggttctatcccaagacggagccgtccggatacccccgcaaggactacctgacctactggagcttagaagagacgccccaactctggagtcacgacccgcagcggcagccctgtctctgctcttccaggccgcctcgagcgccgcacggcgggccatgtctccggctcaggaaacctacagctcctcgccgcacccgctccgccggctcgaccgcttccgcccgctggaggcgacttggggtggcccccactggaagcccctgccgggcatacacagcgtcccgaaagcctacagcaccgagaactcccgctcaggccgctgtaagccggggctagtgggagcctgccgggccagccccaccccagacacgccccctggcgtgggggcggagcagagctctgggcagccgctcactacgcggtgtcggacctaggtgggctcgcactcattaagtctatccgcagtgtggggacaggactagcccagacacgcccactcagctgcggctggatcgcggggaagggactaagtccagacaatgtcctccgaggctgcggccccgcgggcaggacacacctcctgcgggcctattcaataatcagttaaatcacctgaagcacacgcatttccggggaccgctccgggcatcctggcttgagggtagggtgggcggaggttcctaagggagaggtggggctcgggctgaatccctcgttggggggcatctgggtcaagtggcttccctggcagcacagtcacggggagaccctctctcactgggcagaagctaagtccgaagccgcgcccctcctgttaggttggactgtggtgcaggaatggctcaagtagaggagggttgaggcttcagtccagcacctttctcgggtcacggcctcctcctggttcccaagaccccaccataggcagaggcaggccttcctacaccctactctctgtgcctccagcctcgactagtccctagcactcgacgactgagtctcagaggtcacttcaccgtggtctccgcctcatccttggcgctagaccactgaggggagaggactggggtgctccgctgagccactcctgtgcctccctggccttgtctacttctcgccccccgaagggttagtgtccagctcactccagcatcctacaacctcctggtggccttgacgcccccacaaacccgaggtataaagccaggtacaccaggcaggggacgcaccaaggatggagatgttccaggggctgctgctgttgctgctgctgagcatgggcgggacatgggcatccagggagatgcttcggccacggtgccgccccatcaatgccaccctggctgtggagaaggagggctgccccgtgtgcatcaccgtcaacaccaccatctgtgccggctactgccccaccatgacccgcgtgctgcagggggtcctgccggccctgcctcaggtggtgtgcaactaccgcgatgtgcgcttcgagtccatccggctccctggctgcccgcgcggcgtgaaccccgtggtctcctacgccgtggctctcagctgtcaatgtgcactctgccgccgcagcaccactgactgcgggggtcccaaggaccaccccttgacctgtgatgacccccgcttccaggcctcctcttcctcaaaggcccctccccccagccttccaagtccatcccgactcccggggccctcagacaccccgatcctcccacaataaaggcttctcaatccgc

SEQ ID NO: 117606 - DNA, 3386 bp, Homo sapiens
  Payload ID: 2976
  Gene Symbol: CGB7
  Gene Name: chorionic gonadotropin, beta polypeptide 7
  Uniprot ID: P01233
  ENST ID: ENST00000597853
  CDS Start-End: 2873-3370
ctttcattggctggattggggtgggcgggttctgtcacctggggcaacagcaacaaaccagctcctgcttggctacagggagggggtggaaccatggccagtggcaccctggctgtgcgctgtggccccccgtggtctttcatctctgcaaccgagatgcctgaatcctggcccaactggcatctcaccagcagctacgttacccatggcattatcccacccgtacccttccccccgcccacggtgcaggtgggcagaccctaggctgaagccctgcggggcctggggacccagaaagatgggggctgagaaaaggggattgggagcttggactcctctctgaaggaggagggtcctggagtcctgggtctgagagaggaggcgccagggaatttggatgccagggactgcagaggaaagggctgggggccgactggaagaggtcagagtttggggtggggggtgatagggactcctgagtctttctagctgatgtgcggcgccttctctccagtccacggtcgcggaccctctacctccgactgcaaagcaggattctcgcatctgggctttcgacgaggtcctcagcagatgggagacaacctctggctcggcctacgtgcccaagacccatggcgggccctgcgcccagcccagagccccagagcctgcagaccccacgcggactgtggggatcaaggattcaggagaaaagctcagacaccgcagctgaaccctcctactgaccacaaagtaccagagcagcgagacgagggcgcagtacacttgctctcccggcccggacgcgcgcgcccccaaatacgtcgggccccagcccctcacaactctcggaccaccaccgcggggggccttcccaggtgtctgggtggaagccggcgctggcgagaccagcggagctccgggagcctggggcggggccagaaggaaatcacagctttggggcgtggctaaaggatctggggcgggatcgggaggttagaggagcgggaggaagggctgggcatccacgccaggccagaaggaccaggggctggaaactcgccttcagggctcctaagctgctgcggagctagacggcgggctgtgggtggggaggagactagaatattctgagacgtggtagggtgggagttaggagaggtaacctggagttgttgcccaagatgcagctcagctccagtggccacaccaagaaggcttgagaccgggggcagaaccagggggattttgtggtggctgggggcctgcatttgagttccttgaccagcaggagggcttggatttagggaggtgaggctgggaagggttcgggtatgagaaaggaagctgaagttccctggcgtgggtggcaggaagggctctgaccctggggcggggtgtgagggccgtggccgtcatggctgtcgaggccgaaggagagggattctgaactcgggacccaggacttgggatggggtatgaaatctatgtcttgggtatgcctcctcccccaatcttgctcaggctctaatcgcctgcacgaagaaccccgcgctgtctggcccacccttcacagtatccgaccggggcgtcctgaaccgccgccagctctatctgaccacctcggcgcgggactttcggttctatcccaagacggagccgtccggatacccccgcaaggactacctgacctactggagcttagaagagacgccccaactctggagtcacgacccgcagcggcagccctgtctctgctcttccaggccgcctcgagcgccgcacggcgggccatgtctccggctcaggaaacctacagctcctcgccgcacccgctccgccggctcgaccgcttccgcccgctggaggcgacttggggtggcccccactggaagcccctgccgggcatacacagcgtcccgaaagcctacagcaccgagaactcccgctcaggccgctgtaagccggggctagtgggagcctgccgggccagccccaccccagacacgccccctggcgtgggggcggagcagagctctgggcagccgctcactacgcggtgtcggacctaggtgggctcgcactcattaagtctatccgcagtgtggggacaggactagcccagacacgcccactcagctgcggctggatcgcggggaagggactaagtccagacaatgtcctccgaggctgcggccccgcgggcaggacacacctcctgcgggcctattcaataatcagttaaatcacctgaagcacacgcatttccggggaccgctccgggcatcctggcttgagggtagggtgggcggaggttcctaagggagaggtggggctcgggctgaatccctcgttggggggcatctgggtcaagtggcttccctggcagcacagtcacggggagaccctctctcactgggcagaagctaagtccgaagccgcgcccctcctgttaggttggactgtggtgcaggaatggctcaagtagaggagggttgaggcttcagtccagcacctttctcgggtcacggcctcctcctggttcccaagaccccaccataggcagaggcaggccttcctacaccctactctctgtgcctccagcctcgactagtccctagcactcgacgactgagtctcagaggtcacttcaccgtggtctccgcctcatccttggcgctagaccactgaggggagaggactggggtgctccgctgagccactcctgtgcctccctggccttgtctacttctcgccccccgaagggttagtgtccagctcactccagcatcctacaacctcctggtggccttgacgcccccacaaacccgaggtataaagccaggtacaccaggcaggggacgcaccaaggatggagatgttccaggggctgctgctgttgctgctgctgagcatgggcgggacatgggcatccagggagatgcttcggccacggtgccgccccatcaatgccaccctggctgtggagaaggagggctgccccgtgtgcatcaccgtcaacaccaccatctgtgccggctactgccccaccatgacccgcgtgctgcagggggtcctgccggccctgcctcaggtggtgtgcaactaccgcgatgtgcgcttcgagtccatccggctccctggctgcccgcgcggcgtgaaccccgtggtctcctacgccgtggctctcagctgtcaatgtgcactctgccgccgcagcaccactgactgcgggggtcccaaggaccaccccttgacctgtgatgacccccgcttccaggcctcctcttcctcaaaggcccctccccccagccttccaagtccatcccgactcccggggccctcagacaccccgatcctcccacaataaaggcttctcaatccgc

SEQ ID NO: 117607 - DNA, 882 bp, Homo sapiens
  Payload ID: 2977
  Gene Symbol: CGB8
  Gene Name: chorionic gonadotropin, beta polypeptide 8
  Uniprot ID: P01233
  ENST ID: ENST00000448456
  CDS Start-End: 368-865
agtccagcacctttctcgggtcacggcctcctcctggctcccaggaccccaccataggcagaggcaggccttcctacaccctactccctgtgcctccaggctcgactagtccctagcactcgacgactgagtctctgaggtcacttcaccgtggtctccgcctcacccttggcgctggaccagtgagaggagagggctggggcgctccgctgagccactcctgcgcccccctggccttgtctacctcttgccccccgaagggttagtgtcgagctcactccagcatcctacaacctcctggtggccttgccgcccccacaaccccgaggtttaaagccaggtacacgaggcaggggacacaccaaggatggagatgttccaggggctgctgctgttgctgctgctgagcatgggcgggacatgggcatccaaggagccgcttcggccacggtgccgccccatcaatgccaccctggctgtggagaaggagggctgccccgtgtgcatcaccgtcaacaccaccatctgtgccggctactgccccaccatgacccgcgtgctgcagggggtcctgccggccctgcctcaggtggtgtgcaactaccgcgatgtgcgcttcgagtccatccggctccctggctgcccgcgcggcgtgaaccccgtggtctcctacgccgtggctctcagctgtcaatgtgcactctgccgccgcagcaccactgactgcgggggtcccaaggaccaccccttgacctgtgatgacccccgcttccaggactcctcttcctcaaaggcccctccccccagccttccaagtccatcccgactcccggggccctcggacaccccgatcctcccacaataaaggcttctcaatccgca

SEQ ID NO: 117608 - DNA, 900 bp, Homo sapiens
  Payload ID: 2978
  Gene Symbol: CSH1
  Gene Name: chorionic somatomammotropin hormone 1 (placental lactogen)
  Uniprot ID: P0DML2
  ENST ID: ENST00000316193
  CDS Start-End: 143-796
atgtacacagaaacaggtggggtcaagcagggagagagaactggccagggtataaaaagggcccacaagagaccggctctaggatcccaaggcccaactccccgaaccactcagggtcctgtggacagctcacctagtggcaatggctccaggctcccggacgtccctgctcctggcttttgccctgctctgcctgccctggcttcaagaggctggtgccgtccaaaccgttcccttatccaggctttttgaccacgctatgctccaagcccatcgcgcgcaccagctggccattgacacctaccaggagtttgaagaaacctatatcccaaaggaccagaagtattcattcctgcatgactcccagacctccttctgcttctcagactctattccgacaccctccaacatggaggaaacgcaacagaaatccaatctagagctgctccgcatctccctgctgctcatcgagtcgtggctggagcccgtgcggttcctcaggagtatgttcgccaacaacctggtgtatgacacctcggacagcgatgactatcacctcctaaaggacctagaggaaggcatccaaacgctgatggggaggctggaagacggcagccgccggactgggcagatcctcaagcagacctacagcaagtttgacacaaactcgcacaaccatgacgcactgctcaagaactacgggctgctctactgcttcaggaaggacatggacaaggtcgagacattcctgcgcatggtgcagtgccgctctgtggagggcagctgtggcttctaggtgcccgagtagcatcctgtgacccctccccagtgcctctcctggccctgaaggtgccactccagtgcccaccagccttgtcctaataaaattaagttgtatca

SEQ ID NO: 117609 - DNA, 1073 bp, Homo sapiens
  Payload ID: 2978
  Gene Symbol: CSH1
  Gene Name: chorionic somatomammotropin hormone 1 (placental lactogen)
  ENST ID: ENST00000329882
  CDS Start-End: 72-842
accggctctaggatcccaaggcccaactccccgaaccactcagggtcctgtggacagctcacctagtggcaatggctccaggctcccggacgtccctgctcctggcttttgccctgctctgcctgccctggcttcaagaggctggtgccgtccaaaccgttcccttatccaggctttttgaccacgctatgctccaagcccatcgcgcgcaccagctggccattgacacctaccaggagtttgaagaaacctatatcccaaaggaccagaagtattcattcctgcatgactcccagacctccttctgcttctcagactctattccgacaccctccaacatggaggaaacgcaacagaaatccaatctagagctgctccgcatctccctgctgctcatcgagtcgtggctggagcccgtgcggttcctcaggagtatgttcgccaacaacctggtgtatgacacctcggacagcgatgactatcacctcctaaaggacctagaggaaggcatccaaacgctgatgggggtgagggtggcgccaggggtcaccaatcctggaaccccactggcttcgagggctgggggagagaaatactgctgccctctttttagcagtaaggcgctgacccaagagaactcaccttattcttcatttcgcctggtgaatcctccaggcctttctctacaccctgaaggggagggaggaaaatggataaatgagagagggagggaacagtgcccaagcgcttggcctctccttctcttccttcactttgcagaggctggaagacggcagccgccggactgggcagatcctcaagcagacctacagcaagtttgacacaaactcgcacaaccatgacgcactgctcaagaactacgggctgctctactgcttcaggaaggacatggacaaggtcgagacattcctgcgcatggtgcagtgccgctctgtggagggcagctgtggcttctaggtgcccgagtagcatcctgtgacccctccccagtgcctctcctggccctgaaggtgccactccagtgcccaccagccttgtcctaataaaattaa

SEQ ID NO: 117610 - DNA, 632 bp, Homo sapiens
  Payload ID: 2978
  Gene Symbol: CSH1
  Gene Name: chorionic somatomammotropin hormone 1 (placental lactogen)
  ENST ID: ENST00000453363
  CDS Start-End: 151-519
atgcataaatgtacacagaaacaggtggggtcaagcagggagagagaactggccagggtataaaaagggcccacaagagaccggctctaggatcccaaggcccaactccccgaaccactcagggtcctgtggacagctcacctagtggcaatggctccaggctcccggacgtccctgctcctggcttttgccctgctctgcctgccctggcttcaagaggctggtgccgtccaaaccgttcccttatccaggctttttgaccacgctatgctccaagcccatcgcgcgcaccagctggccattgacacctaccaggagtttaggctggaagacggcagccgccggactgggcagatcctcaagcagacctacagcaagtttgacacaaactcgcacaaccatgacgcactgctcaagaactacgggctgctctactgcttcaggaaggacatggacaaggtcgagacattcctgcgcatggtgcagtgccgctctgtggagggcagctgtggcttctaggtgcccgagtagcatcctgtgacccctccccagtgcctctcctggccctgaaggtgccactccagtgcccaccagccttgtcctaataaaattaagttgtatcatttcatctg

SEQ ID NO: 117611 - DNA, 580 bp, Homo sapiens
  Payload ID: 2978
  Gene Symbol: CSH1
  Gene Name: chorionic somatomammotropin hormone 1 (placental lactogen)
  ENST ID: ENST00000610991
  CDS Start-End: 166-552
atcccaaggcccaactccccgaaccactcagggtcctgtggacagctcacctagtggcaatggctccaggaagaaacctatatcccaaaggaccagaagtattcattcctgcatgactcccagacctccttctgcttctcagactctattccgacaccctccaacatggaggaaacgcaacagaaatccaatctagagctgctccgcatctccctgctgctcatcgagtcgtggctggagcccgtgcggttcctcaggagtatgttcgccaacaacctggtgtatgacacctcggacagcgatgactatcacctcctaaaggacctagaggaaggcatccaaacgctgatggggaggctggaagacggcagccgccggactgggcagatcctcaagcagacctacagcaagtttgacacaaactcgcacaaccatgacgcactgctcaagaactacgggctgctctactgcttcaggaaggacatggacaaggtcgagacattcctgcgcatggtgcagtgccgctctgtggagggcagctgtggcttctaggtgcccgagtagcatcctgtgacccctc

SEQ ID NO: 117612 - DNA, 598 bp, Homo sapiens
  Payload ID: 2979
  Gene Symbol: CSH2
  Gene Name: chorionic somatomammotropin hormone 2
  Uniprot ID: P0DML3
  ENST ID: ENST00000345366
  CDS Start-End: 116-484
cagggagagagaactggccagggtataaaaagggcccacaagagaccggctctaggatcccaaggcccaactccccgaaccactcagggtcctgtggacagctcacctagcggcaatggctgcaggctcccggacgtccctgctcctggcttttgccctgctctgcctgccctggcttcaagaggctggtgccgtccaaaccgttccgttatccaggctttttgaccacgctatgctccaagcccatcgcgcgcaccagctggccattgacacctaccaggagtttaggctggaagacggcagccgccggactgggcagatcctcaagcagacctacagcaagtttgacacaaactcacacaaccatgacgcactgctcaagaactacgggctgctctactgcttcaggaaggacatggacaaggtcgagacattcctgcgcatggtgcagtgccgctctgtagagggtagctgtggcttctaggtgcccgcgtggcatcctgtgaccgacccctccccagtgcctctcctggccctggaaggtgccactccagtgcccatcagccttgtcctaataaaattaagttgtatcatttca

SEQ ID NO: 117613 - DNA, 1173 bp, Homo sapiens
  Payload ID: 2979
  Gene Symbol: CSH2
  Gene Name: chorionic somatomammotropin hormone 2
  Uniprot ID: P0DML3
  ENST ID: ENST00000336844
  CDS Start-End: 153-656
ccatgcataaatgtacacagaaacaggtggggtcaagcagggagagagaactggccagggtataaaaagggcccacaagagaccggctctaggatcccaaggcccaactccccgaaccactcagggtcctgtggacagctcacctagcggcaatggctgcaggctcccggacgtccctgctcctggcttttgccctgctctgcctgccctggcttcaagaggctggtgccgtccaaaccgttccgttatccaggctttttgaccacgctatgctccaagcccatcgcgcgcaccagctggccattgacacctaccaggagtttgaagaaacctatatcccaaaggaccagaagtattcattcctgcatgactcccagacctccttctgcttctcagactctattccgacaccctccaacatggaggaaacgcaacagaaatccaatctagagctgctccgcatctccctgctgctcatcgagtcgtggctggagcccgtgcggttcctcaggagtatgttcgccaacaacctggtgtatgacacctcggacagcgatgactatcacctcctaaaggacctagaggaaggcatccaaacgctgatgggggtgagggtggcgccaggggtcgccaatcctggaaccccactggcttagagggctgggggagagaaacactgctgccctctttgtagcagtcaggcgctgacccaagagaactcaccttattcttcatttcgcctggtgaatcctccaggcccttctctacaccctgaaggggagggaggaaaatggatgaatgagagagggagggaacagtgcccaagcgcttggcctctccttctcttccttcactttgcagaggctggaagacggcagccgccggactgggcagatcctcaagcagacctacagcaagtttgacacaaactcacacaaccatgacgcactgctcaagaactacgggctgctctactgcttcaggaaggacatggacaaggtcgagacattcctgcgcatggtgcagtgccgctctgtagagggtagctgtggcttctaggtgcccgcgtggcatcctgtgaccgacccctccccagtgcctctcctggccctggaaggtgccactccagtgcccatcagccttgtcctaataaaattaagttgtatcatttca

SEQ ID NO: 117614 - DNA, 920 bp, Homo sapiens
  Payload ID: 2979
  Gene Symbol: CSH2
  Gene Name: chorionic somatomammotropin hormone 2
  Uniprot ID: P0DML3
  ENST ID: ENST00000392886
  CDS Start-End: 153-806
ccatgcataaatgtacacagaaacaggtggggtcaagcagggagagagaactggccagggtataaaaagggcccacaagagaccggctctaggatcccaaggcccaactccccgaaccactcagggtcctgtggacagctcacctagcggcaatggctgcaggctcccggacgtccctgctcctggcttttgccctgctctgcctgccctggcttcaagaggctggtgccgtccaaaccgttccgttatccaggctttttgaccacgctatgctccaagcccatcgcgcgcaccagctggccattgacacctaccaggagtttgaagaaacctatatcccaaaggaccagaagtattcattcctgcatgactcccagacctccttctgcttctcagactctattccgacaccctccaacatggaggaaacgcaacagaaatccaatctagagctgctccgcatctccctgctgctcatcgagtcgtggctggagcccgtgcggttcctcaggagtatgttcgccaacaacctggtgtatgacacctcggacagcgatgactatcacctcctaaaggacctagaggaaggcatccaaacgctgatggggaggctggaagacggcagccgccggactgggcagatcctcaagcagacctacagcaagtttgacacaaactcacacaaccatgacgcactgctcaagaactacgggctgctctactgcttcaggaaggacatggacaaggtcgagacattcctgcgcatggtgcagtgccgctctgtagagggtagctgtggcttctaggtgcccgcgtggcatcctgtgaccgacccctccccagtgcctctcctggccctggaaggtgccactccagtgcccatcagccttgtcctaataaaattaagttgtatcatttca

SEQ ID NO: 117615 - DNA, 749 bp, Homo sapiens
  Payload ID: 2979
  Gene Symbol: CSH2
  Gene Name: chorionic somatomammotropin hormone 2
  ENST ID: ENST00000560142
  CDS Start-End: 153-635
ccatgcataaatgtacacagaaacaggtggggtcaagcagggagagagaactggccagggtataaaaagggcccacaagagaccggctctaggatcccaaggcccaactccccgaaccactcagggtcctgtggacagctcacctagcggcaatggctgcaggctcccggacgtccctgctcctggcttttgccctgctctgcctgccctggcttcaagaggctgactctattccgacaccctccaacatggaggaaacgcaacagaaatccaatctagagctgctccgcatctccctgctgctcatcgagtcgtggctggagcccgtgcggttcctcaggagtatgttcgccaacaacctggtgtatgacacctcggacagcgatgactatcacctcctaaaggacctagaggaaggcatccaaacgctgatggggaggctggaagacggcagccgccggactgggcagatcctcaagcagacctacagcaagtttgacacaaactcacacaaccatgacgcactgctcaagaactacgggctgctctactgcttcaggaaggacatggacaaggtcgagacattcctgcgcatggtgcagtgccgctctgtagagggtagctgtggcttctaggtgcccgcgtggcatcctgtgaccgacccctccccagtgcctctcctggccctggaaggtgccactccagtgcccatcagccttgtcctaataaaattaagttgtatcatttca

SEQ ID NO: 117616 - DNA, 666 bp, Homo sapiens
  Payload ID: 2979
  Gene Symbol: CSH2
  Gene Name: chorionic somatomammotropin hormone 2
  ENST ID: ENST00000613718
  CDS Start-End: 169-555
aggatcccaaggcccaactccccgaaccactcagggtcctgtggacagctcacctagcggcaatggctgcaggaagaaacctatatcccaaaggaccagaagtattcattcctgcatgactcccagacctccttctgcttctcagactctattccgacaccctccaacatggaggaaacgcaacagaaatccaatctagagctgctccgcatctccctgctgctcatcgagtcgtggctggagcccgtgcggttcctcaggagtatgttcgccaacaacctggtgtatgacacctcggacagcgatgactatcacctcctaaaggacctagaggaaggcatccaaacgctgatggggaggctggaagacggcagccgccggactgggcagatcctcaagcagacctacagcaagtttgacacaaactcacacaaccatgacgcactgctcaagaactacgggctgctctactgcttcaggaaggacatggacaaggtcgagacattcctgcgcatggtgcagtgccgctctgtagagggtagctgtggcttctaggtgcccgcgtggcatcctgtgaccgacccctccccagtgcctctcctggccctggaaggtgccactccagtgcccatcagccttgtcctaataaaattaagttgtatcatt

SEQ ID NO: 117617 - DNA, 842 bp, Homo sapiens
  Payload ID: 2979
  Gene Symbol: CSH2
  Gene Name: chorionic somatomammotropin hormone 2
  ENST ID: ENST00000620751
  CDS Start-End: 63-731
aggatcccaaggcccaactccccgaaccactcagggtcctgtggacagctcacctagcggcaatggctgcaggctcccggacgtccctgctcctggcttttgccctgctctgcctgccctggcttcaagaggctggtgccgtccaaaccgttccgttatccaggctttttgaccacgctatgctccaagcccatcgcgcgcaccagctggccattgacacctaccaggagtttgtaagttcttggggaatggaaacctatatcccaaaggaccagaagtattcattcctgcatgactcccagacctccttctgcttctcagactctattccgacaccctccaacatggaggaaacgcaacagaaatccaatctagagctgctccgcatctccctgctgctcatcgagtcgtggctggagcccgtgcggttcctcaggagtatgttcgccaacaacctggtgtatgacacctcggacagcgatgactatcacctcctaaaggacctagaggaaggcatccaaacgctgatggggaggctggaagacggcagccgccggactgggcagatcctcaagcagacctacagcaagtttgacacaaactcacacaaccatgacgcactgctcaagaactacgggctgctctactgcttcaggaaggacatggacaaggtcgagacattcctgcgcatggtgcagtgccgctctgtagagggtagctgtggcttctaggtgcccgcgtggcatcctgtgaccgacccctccccagtgcctctcctggccctggaaggtgccactccagtgcccatcagccttgtcctaataaaattaagttgtatcatt

SEQ ID NO: 117618 - DNA, 739 bp, Homo sapiens
  Payload ID: 2980
  Gene Symbol: CSHL1
  Gene Name: chorionic somatomammotropin hormone-like 1
  ENST ID: ENST00000259003
  CDS Start-End: 146-628
ataaatgtgcacagaaacaggtgggggcaacagcgagagagaaggggccagggtataaaaagggcccacaagagaccagctccagcatcccaaggcccgactccccgcaccactcagggtcctgtggacagctcacctagcggcaatggctgcaggctcccggacgtccctgctcctggcttttgccctgctctgcctgccctggcttcaagaggctgactctattccgacatcctccaacatggaggaaacgcagcagaaatccaacttagagctgctccacatctccctgctgctcatcgagtcgcggctggagcccgtgcggttcctcaggagtaccttcaccaacaacctggtgtatgacacctcggacagcgatgactatcacctcctaaaggacctagaggaaggcatccaaatgctgatggggaggctggaagacggcagccacctgactgggcagaccctcaagcagacctacagcaagtttgacacaaactcgcacaaccatgacgcactgctcaagaactacgggctgctccactgcttcaggaaggacatggacaaggtcgagacattcctgcgcatggtgcagtgccgctctgtggagggcagctgtggcttctaggggcccgcgtggcatcctgtgacccctccccagtgcctctcctggccctgaaggtgccactccagtgcccaccagccttgtcttaataaaattaagttgtattgtttcatc

SEQ ID NO: 117619 - DNA, 669 bp, Homo sapiens
  Payload ID: 2980
  Gene Symbol: CSHL1
  Gene Name: chorionic somatomammotropin hormone-like 1
  Uniprot ID: Q14406
  ENST ID: ENST00000309894
  CDS Start-End: 1-669
atggctgcaggctcccggacgtccctgctcctggcttttgccctgctctgcctgccctggcttcaagaggctggtgccgtccaaaccgttcccttatccaggctttttaaagaggctatgctccaagcccatcgcgcacaccagctggccattgacacctaccaggagtttataagctcttggggaatggaagcctatatcacaaaggaacagaagtattcattcctgcatgactcccagacctccttctgcttctcagactctattccgacatcctccaacatggaggaaacgcagcagaaatccaacttagagctgctccacatctccctgctgctcatcgagtcgcggctggagcccgtgcggttcctcaggagtaccttcaccaacaacctggtgtatgacacctcggacagcgatgactatcacctcctaaaggacctagaggaaggcatccaaatgctgatggggaggctggaagacggcagccacctgactgggcagaccctcaagcagacctacagcaagtttgacacaaactcgcacaaccatgacgcactgctcaagaactacgggctgctccactgcttcaggaaggacatggacaaggtcgagacattcctgcgcatggtgcagtgccgctctgtggagggcagctgtggcttctag

SEQ ID NO: 117620 - DNA, 659 bp, Homo sapiens
  Payload ID: 2980
  Gene Symbol: CSHL1
  Gene Name: chorionic somatomammotropin hormone-like 1
  Uniprot ID: Q14406
  ENST ID: ENST00000346606
  CDS Start-End: 169-555
agcatcccaaggcccgactccccgcaccactcagggtcctgtggacagctcacctagcggcaatggctgcaggaagaagcctatatcacaaaggaacagaagtattcattcctgcatgactcccagacctccttctgcttctcagactctattccgacatcctccaacatggaggaaacgcagcagaaatccaacttagagctgctccacatctccctgctgctcatcgagtcgcggctggagcccgtgcggttcctcaggagtaccttcaccaacaacctggtgtatgacacctcggacagcgatgactatcacctcctaaaggacctagaggaaggcatccaaatgctgatggggaggctggaagacggcagccacctgactgggcagaccctcaagcagacctacagcaagtttgacacaaactcgcacaaccatgacgcactgctcaagaactacgggctgctccactgcttcaggaaggacatggacaaggtcgagacattcctgcgcatggtgcagtgccgctctgtggagggcagctgtggcttctaggggcccgcgtggcatcctgtgacccctccccagtgcctctcctggccctgaaggtgccactccagtgcccaccagccttgtcttaataaaattaagttgtattg

SEQ ID NO: 117621 - DNA, 823 bp, Homo sapiens
  Payload ID: 2980
  Gene Symbol: CSHL1
  Gene Name: chorionic somatomammotropin hormone-like 1
  ENST ID: ENST00000392824
  CDS Start-End: 63-716
aggatcccaaggcccaactccccgaaccactcagggtcctgtggacagctcacctagctgcaatggctacaggctcccggacgtccctgctcctggcttttgccctgctctgcctgccctggcttcaagaggctggtgccgtccaaaccgttcccttatccaggctttttaaagaggctatgctccaagcccatcgcgcacaccagctggccattgacacctaccaggagtttgaagaagcctatatcacaaaggaacagaagtattcattcctgcatgactcccagacctccttctgcttctcagactctattccgacatcctccaacatggaggaaacgcagcagaaatccaacttagagctgctccacatctccctgctgctcatcgagtcgcggctggagcccgtgcggttcctcaggagtaccttcaccaacaacctggtgtatgacacctcggacagcgatgactatcacctcctaaaggacctagaggaaggcatccaaatgctgatggggaggctggaagacggcagccacctgactgggcagaccctcaagcagacctacagcaagtttgacacaaactcgcacaaccatgacgcactgctcaagaactacgggctgctccactgcttcaggaaggacatggacaaggtcgagacattcctgcgcatggtgcagtgccgctctgtggagggcagctgtggcttctaggggcccgcgtggcatcctgtgacccctccccagtgcctctcctggccctgaaggtgccactccagtgcccaccagccttgtcttaataaaattaagttgtattgttt

SEQ ID NO: 117622 - DNA, 566 bp, Homo sapiens
  Payload ID: 2980
  Gene Symbol: CSHL1
  Gene Name: chorionic somatomammotropin hormone-like 1
  Uniprot ID: Q14406
  ENST ID: ENST00000438387
  CDS Start-End: 41-460
cgcaccactcagggtcctgtggacagctcacctagcggcaatggctgcagactctattccgacatcctccaacatggaggaaacgcagcagaaatccaacttagagctgctccacatctccctgctgctcatcgagtcgcggctggagcccgtgcggttcctcaggagtaccttcaccaacaacctggtgtatgacacctcggacagcgatgactatcacctcctaaaggacctagaggaaggcatccaaatgctgatggggaggctggaagacggcagccacctgactgggcagaccctcaagcagacctacagcaagtttgacacaaactcgcacaaccatgacgcactgctcaagaactacgggctgctccactgcttcaggaaggacatggacaaggtcgagacattcctgcgcatggtgcagtgccgctctgtggagggcagctgtggcttctaggggcccgcgtggcatcctgtgacccctccccagtgcctctcctggccctgaaggtgccactccagtgcccaccagccttgtcttaataaaattaagttgtattgtt

SEQ ID NO: 117623 - DNA, 973 bp, Homo sapiens
  Payload ID: 2980
  Gene Symbol: CSHL1
  Gene Name: chorionic somatomammotropin hormone-like 1
  ENST ID: ENST00000450719
  CDS Start-End: 239-742
gaaacaggtgggggcaacagcgagagagaaggggccagggtataaaaagggcccacaagagaccagctccagcatcccaaggcccgactccccgcaccactcagggtcctgtggacagctcacctagcggcaatggctgcaggaagaagcctatatcacaaaggaacagaagtattcattcctgcatgactcccagacctccttctgcttctcagactctattccgacatcctccaacatggaggaaacgcagcagaaatccaacttagagctgctccacatctccctgctgctcatcgagtcgcggctggagcccgtgcggttcctcaggagtaccttcaccaacaacctggtgtatgacacctcggacagcgatgactatcacctcctaaaggacctagaggaaggcatccaaatgctgatgggggtgagggtggcaccaggggtccccaatcctggaagcccactggcttcgagggctgggggagagaaacactgctgccctcttttcagcagtcaggcgctgacccaagagaactcaccttattcttcatttcccctcgtgaatcctccaggcctttctctacaccctgaaggggaaggaggaaaatggataaatgagagagggagggaacagtgcccaagcgcttggtctctccttctcttgcttcactttgcagaggctggaagacggcagccacctgactgggcagaccctcaagcagacctacagcaagtttgacacaaactcgcacaaccatgacgcactgctcaagaactacgggctgctccactgcttcaggaaggacatggacaaggtcgagacattcctgcgcatggtgcagtgccgctctgtggagggcagctgtggcttctaggggcccgcgtggcatcctgtgacccctccccagtgcctctcctggccctgaaggtgccactccagtgcccaccagccttgtcttaataaaattaa

SEQ ID NO: 117624 - DNA, 880 bp, Homo sapiens
  Payload ID: 2980
  Gene Symbol: CSHL1
  Gene Name: chorionic somatomammotropin hormone-like 1
  ENST ID: ENST00000561003
  CDS Start-End: 94-630
gtataaaaagggcccacaagagaccagctccagcatcccaaggcccgactccccgcaccactcagggtcctgtggacagctcacctagcggcaatggctgcagactctattccgacatcctccaacatggaggaaacgcagcagaaatccaacttagagctgctccacatctccctgctgctcatcgagtcgcggctggagcccgtgcggttcctcaggagtaccttcaccaacaacctggtgtatgacacctcggacagcgatgactatcacctcctaaaggacctagaggaaggcatccaaatgctgatgggggtgagggtggcaccaggggtccccaatcctggaagcccactggcttcgagggctgggggagagaaacactgctgccctcttttcagcagtcaggcgctgacccaagagaactcaccttattcttcatttcccctcgtgaatcctccaggcctttctctacaccctgaaggggaaggaggaaaatggataaatgagagagggagggaacagtgcccaagcgcttggtctctccttctcttgcttcactttgcagaggctggaagacggcagccacctgactgggcagaccctcaagcagacctacagcaagtttgacacaaactcgcacaaccatgacgcactgctcaagaactacgggctgctccactgcttcaggaaggacatggacaaggtcgagacattcctgcgcatggtgcagtgccgctctgtggagggcagctgtggcttctaggggcccgcgtggcatcctgtgacccctccccagtgcctctcctggccctgaaggtgccactccagtgcccaccagccttgtcttaataaaattaagttgtattgtttcatctga

SEQ ID NO: 117625 - DNA, 760 bp, Homo sapiens
  Payload ID: 2980
  Gene Symbol: CSHL1
  Gene Name: chorionic somatomammotropin hormone-like 1
  ENST ID: ENST00000611417
  CDS Start-End: 1-654
ttctccccaggctcccggacgtccctgctcctggcttttgccctgctctgcctgccctggcttcaagaggctggtgccgtccaaaccgttcccttatccaggctttttaaagaggctatgctccaagcccatcgcgcacaccagctggccattgacacctaccaggaggttgaagaagcctatatcacaaaggaacagaagtattcattcctgcatgactcccagacctccttctgcttctcagactctattccgacatcctccaacatggaggaaacgcagcagaaatccaacttagagctgctccacatctccctgctgctcatcgagtcgcggctggagcccgtgcggttcctcaggagtaccttcaccaacaacctggtgtatgacacctcggacagcgatgactatcacctcctaaaggacctagaggaaggcatccaaatgctgatggggaggctggaagacggcagccacctgactgggcagaccctcaagcagacctacagcaagtttgacacaaactcgcacaaccatgacgcactgctcaagaactacgggctgctccactgcttcaggaaggacatggacaaggtcgagacattcctgcgcatggtgcagtgccgctctgtggagggcagctgtggcttctaggggcccgcgtggcatcctgtgacccctccccagtgcctctcctggccctgaaggtgccactccagtgcccaccagccttgtcttaataaaattaagttgtattgtt

SEQ ID NO: 117626 - DNA, 5442 bp, Homo sapiens
  Payload ID: 2981
  Gene Symbol: CHM
  Gene Name: choroideremia (Rab escort protein 1)
  Uniprot ID: P24386
  ENST ID: ENST00000357749
  CDS Start-End: 31-1992
taatagtcacatgacacgtttcccgtcaagatggcggatactctcccttcggagtttgatgtgatcgtaatagggacgggtttgcctgaatccatcattgcagctgcatgttcaagaagtggccggagagttctgcatgttgattcaagaagctactatggaggaaactgggccagttttagcttttcaggactattgtcctggctaaaggaataccaggaaaacagtgacattgtaagtgacagtccagtgtggcaagaccagatccttgaaaatgaagaagccattgctcttagcaggaaggacaaaactattcaacatgtggaagtattttgttatgccagtcaggatttgcatgaagatgtcgaagaagctggtgcactgcagaaaaatcatgctcttgtgacatctgcaaactccacagaagctgcagattctgccttcctgcctacggaggatgagtcattaagcactatgagctgtgaaatgctcacagaacaaactccaagcagcgatccagagaatgcgctagaagtaaatggtgctgaagtgacaggggaaaaagaaaaccattgtgatgataaaacttgtgtgccatcaacttcagcagaagacatgagtgaaaatgtgcctatagcagaagataccacagagcaaccaaagaaaaacagaattacttactcacaaattattaaagaaggcaggagatttaatattgatttagtatcaaagctgctgtattctcgaggattactaattgatcttctaatcaaatctaatgttagtcgatatgcagagtttaaaaatattaccaggattcttgcatttcgagaaggacgagtggaacaggttccgtgttccagagcagatgtctttaatagcaaacaacttactatggtagaaaagcgaatgctaatgaaatttcttacattttgtatggaatatgagaaatatcctgatgaatataaaggatatgaagagatcacattttatgaatatttaaagactcaaaaattaacccccaacctccaatatattgtcatgcattcaattgcaatgacatcagagacagccagcagcaccatagatggtctcaaagctaccaaaaactttcttcactgtcttgggcggtatggcaacactccatttttgtttcctttatatggccaaggagaactcccccagtgtttctgcaggatgtgtgctgtgtttggtggaatttattgtcttcgccattcagtacagtgccttgtagtggacaaagaatccagaaaatgtaaagcaattatagatcagtttggtcagagaataatctctgagcatttcctcgtggaggacagttactttcctgagaacatgtgctcacgtgtgcaatacaggcagatctccagggcagtgctgattacagatagatctgtcctaaaaacagattcagatcaacagatttccattttgacagtgccagcagaggaaccaggaacttttgctgttcgggtcattgagttatgttcttcaacgatgacatgcatgaaaggcacctatttggttcatttgacttgcacatcttctaaaacagcaagagaagatttagaatcagttgtgcagaaattgtttgttccatatactgaaatggagatagaaaatgaacaagtagaaaagccaagaattctgtgggctctttacttcaatatgagagattcgtcagacatcagcaggagctgttataatgatttaccatccaacgtttatgtctgctctggcccagattgtggtttaggaaatgataatgcagtcaaacaggctgaaacacttttccaggaaatctgccccaatgaagatttctgtccccctccaccaaatcctgaagacattatccttgatggagacagtttacagccagaggcttcagaatccagtgccataccagaggctaactcggagactttcaaggaaagcacaaaccttggaaacctagaggagtcctctgaataatggatatacaccaaactggatacccaactttggaaattctgactggtctcagagtctacttgatagaaggactgtttgagaaatgttagaaagcagcagcaattataaggcaaaataggtaatagaaatccaaaaggggattttccttatagaggacattccaagaacacacaacacttataaagcacattgacttgctcattttaaataccaaacttgtgtgactagcagatgaaaattataaatcaattgattctcaggaatgtaactgtggatatgaaagtgatcctatgcattgttaataattccatggtcttaggacaattttgcttaccactttggatctttgtttgaaagccacattttcagaaccagctcatgtattttctttggttatttgaattttattttctttatggacaagagcatcataacataatgataaaaacatatagaaaaactaaagtatcatgatctagatagaagcctgtatttggaatacaggtttgttttgctttctatgttgagaagcattgaaaatgctaatataaaggtgtttagacatttttacgaataagtcagtagtgttttttagtatcagtagtgatatttgtttgtaaattatttacatattgggaaaggtcaataatgaagaaatgaaagaatggaaggaaaggtgtggataggctcattggtatttgaatattctgtctgtcaagtaactagagtattaggctaattgtctacagacctaatttaatcctggctgtcctactgatgatatttggtaaattgtttaacttctgagcctacgtttctccatatataaagtggaaatagtattactatgcctactatatgagaatggttatgaagacaatgcaatgccatgtttagaatcggtttgccagaagaaaattgttttagaattttcccattgacttgatgaatctcaaaagtctcacgcaggaaataattgcttgctgtcagtcaacttccaaacaaaatagatcacagtgtttttattgcattaagctttttaaatgaaaatttcttttttaaagtagtattttatagtcttacagaccagtaaaaatagtaacaagtagaattgtggttttgaaatattactaaggaaaacactctataaattgttttattccttttctggtaggtaaacctgcaaccaccaaggactccaaattgtgtatgacagttggtaagccctaatatacactacataaaaacgttagggctgcctgtaatcccagcactttgggaagctgaggtgggtagatcacttgaggtcaggagttcgagaccagcctggccaacatggcgaaaccctgtctctactaaaaatacaaaattttagctgggtgttatggtgggcacctgtaatcccagctactttgaagatgaggtagcagactcacttgaaccagggaggcggaggttgcagtgagccaagattttgccactgcactccagcctgggtgacagagcaagactctgtctcacaaaaaaaaaaaaagggggctgtacataggcagcaaactaagctgcagtgatgttgcctatatttaaattttctcaaatggccaagctctgatggtctactttatttgagcaatagttgagacttataattgcctataaataaacaaacaaatgaactatttgtttttttttctcacaacatctggcctatattgtctgtcaggaagccatggctccaatgtaaagtacatagttcttacatacttcaactgcagctggtccctgacctcaccaggtttcagagatgttcttaaaggaagccagctgtggcaggtcacagattcatgggaaatggaaagaaccaaggaatatagctcttgcctcacctttctacccactgcagatatagttcaagccagagtaatggaagaacttaacttactagcctctcaggctgctcctatccctacctcccagtgtacagcccctccccatctctttagtcccctttccctcacttccccttttataatgtcacacaaatcagggacagtaggatcacattataacctactttgtcatagggattcgatttttcttatatcaaatcatgtttcctgaaacccagctggggcatatgcactcaatgtctaatacatacttattaatgtaccggatattggccttgcccctggatatcagcaatatattataaaaggttccagtagatgagacgattgagtctgaatacaattgcagtaaattgtgccaataaagatattgtactgttacggtcttagagttaaagccgcttgaatgcagcatgcacattcatgtaaacagacaatcagggtaggcctagaataaccacaaaaattctattggccttactgcagccacctatatgtagaacaatggaggagatagtttgtggtccattattgtaccctgtttcatccattagcatcagaatctctctttcaggtcatttattaaatatgattgaaatgtttaaaagttcctgaacatgattcatgatgattaaaatatcatacaactgataaaagactttaagaactttatatatttcctgttgcctcaaaatgtaacagaaattattcttagagctttgattttagctatcctaattactgcaaataaatatttgttcttatagttttaaatcaaaaagaaaagtcttgttataaaaccttaagcttgaaatcatattaataaaatatattgtacatagtggaaaattttcagtagctaatttaaaatttcagaaaatgctattaaagaattttgattcaagtatttaaactgtttagttatgcatgcttcttattaaccgaaaatgataataccatttagtttagtgatcagtatgagaagcaatacctaatcctatgttgctattgtattttttcctagttggtgtgcctgctcagaaaaacatatactgtatgtgtatacatacctgtgtatatataaaaggtcaatttatatatttttctataggaaaatggagtaacaagttccctatctcccatatttatttgtccatagtaaaatggccacattgatgataatttctagaactagtttctgagattgtcagccctttgtctaaaataatggcagtattaatgattgacttctgtcactgccatagttacctggattgtcagccttggtagcctttgtctaaagtcctaaagagttccaaaaaaaatgtgttgaaatttaattgctaaatagtggttggtgattctttacagtaggaattgtaataattttcttgcaaataagttatttactgctattgatattgaataatttgtcttttattcagatatatttcaaaaagcatgaatatatgattattcataaattgtatactttaccagtaagttttcagaggaaataaagacttttaaatccttttca

SEQ ID NO: 117627 - DNA, 2821 bp, Homo sapiens
  Payload ID: 2981
  Gene Symbol: CHM
  Gene Name: choroideremia (Rab escort protein 1)
  Uniprot ID: P24386
  ENST ID: ENST00000615443
  CDS Start-End: 8-340
cgtcaagatggcggatactctcccttcggagtttgatgtgatcgtaatagggacgggtttgcctgaatccatcattgcagctgcatgttcaagaagtggccggagagttctgcatgttgattcaagaagctactatggaggaaactgggccagttttagcttttcaggactattgtcctggctaaaggaataccaggaaaacagtgacattgtaagtgacagtccagtgtggcaagaccagatccttgaaaatgaagaagccattgctcttagcaggaaggacaaaactattcaacatgtggaagtattttgttatgccaggtccacgctgcttttatgagctgtaacactcaccgcgaagatctgcagcttcactcctgcgcccaccgagaccacaagcccaccgggaggaacgaacaactccagacgctctgccttaagagctgtaacattcaccgcgaaggtctgcagcttcactcctgagccagcgagaccacgaacccaccagaaggaagaaactccgaacacatctgaacatcagaaggaacaaactccagacgtgccaccttaagagctgtaacactcaccgcgcgggtccgcggcttcattctttaagtcagtgagaccaagaacccaccaattccggacacaccgatagcattctaatattttacatttgattgcaaggaggactaggcgagaattcaaatggattagtgcaaacccattaccactgcttggaaaatacgtcaaagtatttgggcaatataattctaatatatgtattctaatataaatatatagggtgtatttatatattatgtattctaatataaatatataggatagttattttttgattaccatgacttatttaaaaagtattctgaagtattattcaacttaaaggttttcatgatcatttcaacattaaatttaatacgttgggtattgcaaaacaggctaaagactaaaatgtaaattgtagtaattattctatcataggctaggttcaaacatcatagactgtaaagaactatccagattgttttatcagagctttgttttcctgattcttccttacaataagtgggctacttaatattttggacctaaaatatttttgctacacaaagattgtttttcattgaagtgattttttgtgattacacaatcgagttatggaagggaaatgaaaaaggactagtgtttattggatattatctttgtggcaactgctgtaacctgttgctttacatattaatttcatttattctgtgcagcagtcatgtgcatgagctataggtacatcttactgacaaacagaagctcaaggaatgctagagatagcagagccaaatttgaacttgtgtttttctaactcaaaaacgtgtgctatttccagtgtatcatgttgtatttcagtcatcaggtaaacacatgtatgcacatcaagggaaccaaccgttccaccaagtgaattaagtatttcctttgtgaagactagcacctaagaaagtgcatttacttctttaatttactggaatactatatagtattgtaatgtagttatatctgtaatgagaaattaaagtgcctaactcccagtgttaggaagctatgggaagaatccaatattctttagttgttgagaccagtttatatgccatgggattttttaaattgatacataataattgtatatattcatgggatacaatatgttttggtacatataaacattgtagaatgatcaaattaggctaattagcatatccatcaccttaaacctttattattttttgtgagaacattcagaatcatctcttttagctatttgaaatatgcaatgcattattgttagctatactcaccttactgtgtgatagagtaccagaatgtattcctcctacctaactgtaacattatacccattgaccaacctctcctcatcttcccctccctcctgttctccccagtctctggtaaccactatcaagttttttagatttcacatatgagtgagatcattcagtatttttctttctgttctcagcttatttcacttaatataatgttctccaggctcatccatgttgtcacaaatgacaggatttaattttttttatggctgtgcagtattctattgtgtatatatgccacattttccttgttaattcatttgttgatgggcatttaagttgattccatattttcgcaattgtgaatagtgctccaataaacatgggagtgcagatgtctcttcaacctactgatttcatttcctttggctatatacccagtagtgagggtgaagattgctggatcatatgatagatttatttttaattttttgaggaacttctgtactgttttccataatggctgtactgatttgcattcctaccaacagtgtgtgagagttcttctttcttaccatgtaatagtttcatagtttatgtggggaaataaaagtagctattgtttctagttttagatcttgaacagactataaaaaggtgcaatatattaattcacacttaaatcacacaaactcaagttattcttaggtaaaatatcgttgcttgttaattgcataaagtcatctagtttctttagtgagaagagattttatctttctaaaatattaacaatagctttatacattttctgtcctattttctgcattgtactgaacgttgtttccctttttctggtataatattaaagcaggatgaaaacttatttgttaccttcaaatgaaccaactctaatgtattcataccaaaaataaagatttttttgcaataggaatctaaaa

SEQ ID NO: 117628 - DNA, 7078 bp, Homo sapiens
  Payload ID: 2982
  Gene Symbol: CHML
  Gene Name: choroideremia-like (Rab escort protein 2)
  Uniprot ID: P26374
  ENST ID: ENST00000366553
  CDS Start-End: 165-2135
ataagaaaaaaaatattttaaaagggtaaccgttaaacagctaggacctgcaacttcagtgcttctgggataactggaacatcagaaggacagattttattacagcataatcacacctcatttctttcatcagcagttgtcaccagacgctgttacttcctaaaatggcggacaatcttcccacagagtttgatgtggttataatagggacaggtttgcccgaatccatccttgcagctgcatgttcaagaagtggtcagagggttctgcatattgattcaagaagctactatggaggaaactgggctagtttcagcttttcaggattgctatcctggttgaaggagtatcagcaaaacaatgacattggggaagaaagtactgttgtatggcaggacctgatccatgaaacagaagaagccatcactcttcgcaagaaggatgaaactattcaacacacagaagctttttgctacgccagtcaggatatggaggacaacgttgaagagattggtgctctgcagaaaaatccttctttgggggtgtctaataccttcactgaagttctggattctgcattacctgaagaaagccagttatcgtattttaatagcgacgaaatgcctgcaaaacacactcagaaaagtgatacagagatttcactagaagtaactgatgtagaggaatcagtggagaaggaaaagtattgtggagataaaacttgtatgcacacagtttcagataaagatggagataaagatgaaagcaaatctacagtagaagataaggccgatgaaccaattagaaataggattacttactctcaaatagttaaagaaggcaggaggtttaatattgatttggtgtcaaaactgctgtattctcaaggattgctaattgatcttttaatcaaatcagatgttagtcgttatgtagaatttaaaaatgtcactaggattcttgcatttcgggaaggaaaggtagaacaagttccttgttccagagcagatgtctttaatagcaaggaactcaccatggttgaaaagaggatgctaatgaaatttctcacattttgtttagagtatgaacaacatcctgatgaataccaagctttcaggcagtgttcattttcagaatacttaaaaactaaaaaactaactcccaaccttcaacattttgtactgcactcaattgcaatgacatcagaatcatcttgcactacaatagatggtcttaacgcaactaaaaacttccttcagtgtctcggacggtttggcaacaccccctttttatttcccttgtatggccaaggagaaattccccagggtttctgtaggatgtgtgcagtttttggtggaatctattgtcttcgtcataaagtacaatgctttgtagtcgacaaagaatctggacgatgtaaagcaattatagatcactttggtcaaagaataaatgctaaatattttattgtggaagacagttacctttctgaggaaacatgctcaaatgtgcagtataagcagatctctagggcagtactcattacagatcagtctatactaaagacagatttagatcagcagacttccattctgatagttcctccagcagagccaggagcttgtgctgtacgggtcacagaattatgttcttcaaccatgacatgcatgaaggacacctatctggtacatttgacatgttcatcttctaaaacagcaagagaagacttagaatcagtggtgaagaaattattcactccgtatactgaaacagaaataaacgaggaagaacttacaaagccaagactcttgtgggctctttattttaatatgagagattcctcgggaatcagcagaagctcgtataatggcttgccttccaatgtttatgtctgctctgggcctgactgtggcctgggaaatgagcatgctgtcaagcaagctgaaacacttttccaggagatctttccaactgaagaattctgccctccacctccaaatccagaagacattatctttgatggtgatgataagcagccagaggctcctggaaccaataatgtagtaatggccaaactagaatcctctgaggaaagcaaaaacctagaaagcccagagaagcaccttcaaaattagaaaagagcaatctcgaaatgctgttttggacctccttcatggcatcagaattttctcatttaaaggacagtttcccatatgagtaattagaagtggttatatatgatgaatgctatgcagatgttgtctttaactctcagacattcagcattgaatatctttgttaacctatcaatgagtgatttattgattattgaacattttgtttagaatgggctatatgacccagaatcttaaaacagagttagctttattttagtattgggtatatatgtaagggttccatattagcaactcagcttaaaggtaatgtatttgctaatgatcttcagattttatctttgtctacagaacaattagtaatacccaagtaatattttaattacttttgcagctgttacagttgctgcggcctgttcgaatagtgaaacatacacaaatggtaaattatgtggatcttttgcatataatataaatgtatagacatggtggtaggaatagcaactaatacaaatgccaatatgataataaaatacatttgtctataatcgtttaaagattagctttgcatgatcctttatgcactgtgaaggtctgaagtttataatactcacttgacccttgtaactgatgaggcaatgatgccaccacagtattctaatttacaaaaagaattggagttcaattagtggttgtaaagctcattttggggaggttgattgcaaaggaaatttgaaagataagatttattcttatttaatacttcagaaaatttctgcagagccctgccctggcacttaaaatagcttccaataagtaacttagaccaaaaggaaaaatgaagtgccccaggagaagatacttcagaagggctgttctgaaattcctaaggaggaattcttaggaattcctaaggagaaacagagtgaggcctttttaacctgagattacagatacttataaaaccctctataaatagattacccaaggtttttcagtgagaatgaaacataccaccttgttggctctaccactttaattaatatcactataacataactgataggaatgaatcaaaggaggatttaccatgccctttcggttgtgtcccacttaacaaattgtgaagtaacaattttctgtaatctctcttgcctcttagctgttatccagagtatagaaactttttttctcccagagccacccaacgtcataaaactggtagtactctaatggtgaaaacctgtggagctgtcagaagacatgaacttgcttttcctctagtccagtttccattcttcagtcagagtatgatgatccctgtgacagtttttgctctgaaatagtatttatcatgtgtttggtacctagtattatgctttctcatgacagtttctcaacaatcctgtgaggcaaattcgcatgtaccctctgtattagtgtgttctcatgctgttgataaagacacacctgagatggtaatttgtaaagaaaaaggtttaatggactcacagttccatgtggctggggaggcctcacaatcatggtggaaggtgaaaggcacgtcttacatggcggtggacaagagagaatgagaactaagtgaaaagggaaacccttttaaaaccatcagatatcgtgagacttatttactaccatgagaacagtatgggggaaacaactccatgattcagttatctcccaccaggttcctcccacaacacgtgggaattataggagctacaattcaagatgagatttgagtgggaacacagccaaaccatatcaccttcaaagaagaaataagagaattattagtaatttgctcagaatctggtatgtggaagagccaacatggggacccagccttttgtgattctaaaacctttgatctttctactaacattcactgttagagagtgtaggcgctgcaggagaaagagaaagtgcccacgaaaattagtctagcattgccgggggtaaaaagcacacactggtcctgcagcttattgaatcagagaaatgtgaagataagatgaactaaacaaacatattttagagcatggatctcgaagcagaatttggctaaattttaacaaaatgttcttcagtaacacatctcatgatctgaagattgtgttacaaaaaatattatcaggccaaaatttgttcggaatacactaatttttgctcctctatatgtgaggaaaatgagactagacagatttaagtaattgacaacttacttaaagtagcaaagtcatggattgtattgacttttaaaaatatagtaaaagtcatatttaaactttatcctaaagtttaaatctaacagaacaactgaaatacttgaaatagacctataaaatagtaattaaaatgagaaatacataagatgataaataaaatgaaggtgaaggtattccagatctaccgaaaagattttcagtatcacagattattcataagaaattgagaaaaggaacaatcagaagttgcaaaagatggtatagccgaatataatggaaataggaaaaattagtcgaaaataaaggttgatttagaaatgaagaaaatgaatatatttcttaatacaaaataagtgggaaatgagaagttataccaataaaaagcatttaaaaatttaggggatattgtaacccagtataattttctgacaggttggactttgaccctaatggacttactggtgaactttttcaaatgtttaaataatgtctatccatgtatcatgaaggacagtatgcttcaaattgtcttttgaggcagacatgttctcagtactaaaagacatttttagaaggattttattctcaacagatgcaaaatgcaaaataaaatattggcaaacaatacagcaacaaataatttactatcactcaggattataaggctggtgttaagcagaacagccattaaatcagcatcaaaagaacaaatagtaaaatccaaagtattaattacagataacttttcaaaaattcatcattcacccttgatttaattatttctctggcaatgatttaatagacttctcggagtctgttaagtacttaaaccaagaactaccattattcctactgggaaaacataaacatttctcaagtggaaagtaaacagtgttggcactatttttatatatggttaaagagacctgtcattgcaataaaagccagcattcacaaaatgaggaagataaggaaagtagcataaatattttctattaacatggctttacaactgctaaaacttatagtataaaaatgtactaacaaagactaattcaagaagttgcaggatacacaatttttaaaaatctcatttctacatcttagcagtgacaaactgcaatttaaaaagtgtgtttggttattaatatatatgagacttttaaagaaagttatataactacatagagataaattaagaaagatgcctaaatagaagcaagtttaaagagctatatttttaaacatgaacaaactcccatgggagccatgccagtgtagtggaaaagtagtacatggggagatggggagtttttttgaaaaccagaattacagttctcatttcactacttaccagttgtatactcttgggaaagtcactcctagtatctatttcaccatctacagaagagaaatacttcacagaattattgtggggattaagttagataatgtgttttaaaatataaagctacatccaaagaaatgccaatatgtgacattagtatgaaatttactacagttccatttaacattccaactggttgctgtgtggaatatggcataattgtaataaattatttaggaaagcaagcaaagatgtaagtttttttaatttagggggaaaaaatgggagccttgctctccaaatccttaaaacatgctattaagcaacctttctgaatattctgtggtgccaagtagaaagtttaactgaaattaataagccaatggaaagaaagaaatattaataactgctggtggaaagactagctagatgtcagtgtggaaagattagatccactttacatgtgatattccaaatgaattaaaatgttaagtataaaaagaaaaatactacaagtctcacaccaatagtggtataaaggaacttcatggcaattggcaaggtagatcaactaagagaaaaagttttaaatgtgtagtaaataggaaaaagacaaaacaagatggaatttaaaagaagctatttgcattacacatggatgcactcagtttttgtaaaactatatgcatatccataagggtttgtactcttaggcaaatttataaagcgatcgtgtataaatgatataaaaaatcaatttgaatggtattcaaatttcctaatattaaaaatgcaactttgacttagttcatgctattgtattagcaaaactgttttaattgcatgtgtccttatagcagcagcattgtgtattagtagccttttaagagaactgtgtagaagactataaaaagggctttataactgatcttttgacatactcactttgagtggcatatgcccaggaaaatatttaaaagaaagaaaagctatttgtacaaagttttctagcagttccactcagataactttaagggggaaaaaagcccaacgattggaaatggttaagtaaattttggtgtattgctagtgctatcacagaatgttatatagccattcaataatattgatatatgtcaaattgtatgcaaaaaagtgagattcaaaaatgttaataagaacataaattgtgtttactgatacatgtgaaaatttaggtctacattgaaaagaatcagaagataacatgtaattcagtttaacattaggggttctttatttttcttctgttaaatattgatgtatgcaataaaaaataaaagattaattggtaaagtggtttactg

SEQ ID NO: 117629 - DNA, 6220 bp, Homo sapiens
  Payload ID: 2983
  Gene Symbol: CHRFAM7A
  Gene Name: CHRNA7 (cholinergic receptor, nicotinic, alpha 7, exons 5-10) and FAM7A (family with sequence similarity 7A, exons A-E) fusion
  Uniprot ID: Q494W8
  ENST ID: ENST00000299847
  CDS Start-End: 455-1693
caggccgccacatagctcccgccaagtcctcggtgccccttgccattttccagccgcgctcccacgagggtcacggcggcggggagaggtggagccgcgagagctcggccgggggccccgcctggtggtcgcggccatgacagcggctcgggacaggctccttttccgcgcccctcccgccggaggtgaggggaagatgtccatgtccgggttcaaggccaaaccgaagttactggcctctatcttccaggagaaccaggagccacagccgcggctcacgccccaccgcaacattaagattacaagtggacacctgagtcagcaggacctggaatcccagatgagagagcttatctacacgactcagatcttgttgtcacccccattattgacaatccaaaggtgcagaaagcactctgacaaataatgaaacaaccaccatcggttaaatttgatgcaaaaatattgcatctaccagcattttcagttccaattgctaatccagcatttgtggatagctgcaaactgcgatattgctgatgagcgctttgacgccacattccacactaacgtgttggtgaattcttctgggcattgccagtacctgcctccaggcatattcaagagttcctgctacatcgatgtacgctggtttccctttgatgtgcagcactgcaaactgaagtttgggtcctggtcttacggaggctggtccttggatctgcagatgcaggaggcagatatcagtggctatatccccaatggagaatgggacctagtgggaatccccggcaagaggagtgaaaggttctatgagtgctgcaaagagccctaccctgatgtcaccttcacagtgaccatgcgccgcaggacgctctactatggcctcaacctgctgatcccctgtgtgctcatctccgccctcgccctgctggtgttcctgcttcctgcagattccggggagaagatttccctggggataacagtcttactctctcttaccgtcttcatgctgctcgtggctgagatcatgcccgcaacatccgattcggtaccattgatagcccagtacttcgccagcaccatgatcatcgtgggcctctcggtggtggtgacggtgatcgtgctgcagtaccaccaccacgaccccgacgggggcaagatgcccaagtggaccagagtcatccttctgaactggtgcgcgtggttcctgcgaatgaagaggcccggggaggacaaggtgcgcccggcctgccagcacaagcagcggcgctgcagcctggccagtgtggagatgagtgccgtggcgccgccgcccgccagcaacgggaacctgctgtacatcggcttccgcggcctggacggcgtgcactgtgtcccgacccccgactctggggtagtgtgtggccgcatggcctgctcccccacgcacgatgagcacctcctgcacggcgggcaaccccccgagggggacccggacttggccaagatcctggaggaggtccgctacattgccaaccgcttccgctgccaggacgaaagcgaggcggtctgcagcgagtggaagttcgccgcctgtgtggtggaccgcctgtgcctcatggccttctcggtcttcaccatcatctgcaccatcggcatcctgatgtcggctcccaacttcgtggaggccgtgtccaaagactttgcgtaaccacgcctggttctgtacatgtggaaaactcacagatgggcaaggcctttggcttggcgagatttgggggtgctaatccaggacagcattacacgccacaactccagtgttcccttctggctgtcagtcgtgttgcttacggtttctttgttactttaggtagtagaatctcagcactttgtttcatattctcagatgggctgatagatatccttggcacatccgtaccatcggtcagcagggccactgagtagtcattttgcccattagcccactgcctggaaagcccttcggagagctccccatggctcctcaccaccgagacagttggttttgcatgtctgcatgaaggtctacctgaaaattcaacatttgctttttgcttgtgtacaaacccagattgaagctaaaataaaccagactcactaaatcctttccaataattgactggtggaaggaaaacaaaaaacaaaaactaaaaacctcttagcttttctgcaattcaactttttatttttatttttatttctatcaaagacggtagagagaaacagcttgatgctgtttctacatcaaaaaaaaaaaaaaaaaagacagactgttggtcttactaaggatgtttttaccagcctgcctgacttctgcaaacctaccctgtcaaggagatcaaagggacgcaggtttctgtttattctgaacaagggccaggccccgcggagtgtctttggtggatcccagataactcctaggtgctgctctcagacactgaggagttgagcaaatctgttctattctgcagaacccataggacaaataagagttctactagaattaacagcccaaaagaatagctacagctaagtgaagccacttacgtgggctttaaaaaaataatgtgttagctgattcacatgcactggagttaattagtcttagaaatgtgtgcatccatacaaatgcacaacataaagtgaacatattcctaggccctttctgcctgtgtcagggccaggaagtagaggctgggaactcttctggtccccagtatggcaggcgccagggaggggatggtgtggcccatcccttctctggatacctggccagtggcaggcagcagggaggagctggccgaccctcagtgactgacaagccagcaattctgagttctggcctttgggagtctgcctgctccaagccagtccaccccagctgcagccccaaaagctggctcaaagtccttgggtggattcactggagatgggcaacttaaaacaagagaaactttaatttttaaacctaagtgatgatacagctcttcccttagattatcgcccaggctggagtgcagtggcatgatctcagctcactgcaagctccacctcctgggttcatgccattctcctgcctcagcctccccccgagtaactgggaatacaggcgcccgccaccatgcctggctaattttttgtatttttagtagagatagggtttcatcatgttagccaggatggtctcattcttattctttaatgagatcagagggtaattcaccaagaaagacctctcctgttccattgtgtcatccaacaactgctcagagctcaaaattatagaaggcttctgagcccctagagatttttaatttgcttctaatccctgaggtgggaacatcatgagggaagatttgattttcagagttaaataaattgtatgtgcttttccagccatctggctcactcatttctgggtaatgcacatgactttgtttgcactggaggaagatggaagcttgcgtgtgtgcggtgtgtgtgtgtgtgtaagtgtgaggtaccttgtgtgtgacaagagacctcacttacgagaaagttggtggatcaggacattccagcctcaggcggcttggagcaggatcattcctcagcaggcattccttccacatgctatggatgaaccatgcacaagattttcggttttttttttctgttttgatatataaaaggaatgcttcatttcttatcattatcccaaaattgatccctcccacatttttgctttaaaaagaaacctttttggttttgtattttatacaggaacacaaaatgcaaacaagttgtgcatattttggactctcaaataactactctgtcctttaataaagtaataataaggaatagatgtgcacatagttagaaaagtatgagtggttaaaaacaacagtctcccatactgcctgttttctctctcagaggggaccactaatgagcttctaagggcatttctagaaaggaagaaaagaagataagaggccaaagaaggagggacgggggttatggagagagaccttccctttccagcactaacgctctgtgaagggcgctgcaccttgcattcttcatgtggtgttttgtcttagaggtcgtcccataataacatataaagatctacctcattcctcctagtagctgcttagcattccattatctcagcggactatcatttatttgaatagccttttattggtgaacatatggatacttccagtttttatttttatatacaaatctataattggcatacttgtacatacatcttgacatagttttgtgactaaaacggtataaattccaacttagaaatggaattgctgggtttaaggctacatgtatttaaaattttgatagctattgccagattatcttctagaaactgatcgaaggatgtaactccatcaagagtacaataaaaggcccaatttctcagctttctataatagcactgggtattttcaaacttaatgtttttcccaatataattggtgaaacatgatatttacgaatattattctgattttggtttattttgtgtataaaatgggacatcttttaaaatttttttgtagttttaattttgatacatttatatattttacccagttcctaattgggttatttggctttttcttaatttgctcatgcactttgggacatttttgtcttatgtctttaaaatatttttatcatttgtctttcgatgttatttattgatttccttatttattggcatagagtttaaatttttatgttgtcaatttgtgagtatttttctttgtcgatcgtgggatttgtttccagtttttaaaagccttcctcattctgagattataaatagacttactcgcattttcttctgaaactttatggttttattggtttaccttcacatcttcagactccctggaattcatttgttgcaggacatgagggaaaaatccatactttttcctcgaaatggtggtcagcagtatcaataaatatgtaataatgcatttctaaaatacagtcatagtgttttccccagttgttcaaaatgcagccttatttgtaaactaaatttctttaagtgtttggttctgtttctgttctatttatctctatgaatgcctttcatttctaaagcattattcatactaatatcagtattttcaagtcaacactcccatcaactctgaatctctctctcatatgaatcttttttcaattagagtcacaatgaatttacagattgagtcttcctattcaaaagcatgaaatcttgtgtttaagtctaattttatgtaacttagtagtgttttatgattttgttcactaaggtgctttgaatttatagtttatttctagatgttttatcatttggctatcattttcaatggaatgatttattccactttattttctattttatcccattgtataagaaagtagttggtttttatgtatgaatgttataatcaaccacaaattgtgattcctacttgtttctaaggtatacttttgacttctcctttccaatgtgtctcttatttctttcttgtatctagttgatttgagatcagtgttgagtcacagtgattcaggtggcatgcttatcttgttcgtgacatcagtgggacgttttaatgtctcagcgtttaacttgtatgaagacatgtattttccttgccataataaaaaagtatctgtgtgttctcaaactattaagactctctggggaaaatgtagatgttagatttttgtcaaagccttctcagtgtccagagggattatcagaaggtcttttcctttgctctagtagtatgtttaattatattaatagaatacttaagaccaaatcattagtgtattcctgagatgttctttacttattagtatcatgactttggttatcaatatttataattaagattcatcattctacatcttgcttttatgtgttttttgtccagatttaactttatgctgacttaaaggaagaaatattataaaacaaaaacctctatattctacaatcatctattggttttggattattttctgcttaagtgtagaagaactagctggggctgtctgggcctgccgtggtatatttctggattttgctcatcaggcaagttaggtcctcgagcccttctagagtccattttaatgacatttttaaaaataaaattaattccatccacttttcaacata

SEQ ID NO: 117630 - DNA, 2794 bp, Homo sapiens
  Payload ID: 2983
  Gene Symbol: CHRFAM7A
  Gene Name: CHRNA7 (cholinergic receptor, nicotinic, alpha 7, exons 5-10) and FAM7A (family with sequence similarity 7A, exons A-E) fusion
  ENST ID: ENST00000397827
  CDS Start-End: 776-1741
agccctttcccaggcggtagcgggggcagtggtgctgttgcccttttaaactgcggcttgacgggagccgcgcctcctgtcggtggagtcggttataaagggagcagccccgcaggccgccacatagctcccgccaagtcctcggtgccccttgccattttccagccgcgctcccacgagggtcacggcggcggggagaggtggagccgcgagagctcggccgggggccccgcctggtggtcgcggccatgacagcggctcgggacaggctccttttccgcgcccctcccgccggaggtgaggggaagatgtccatgtccgggttcaaggccaaaccgaagttactggcctctatcttccaggagaaccaggagccacagccgcggctcacgccccaccgcaacattaagattacaagtggacacctgagtcagcaggacctggaatcccagatgagagagcttatctacacgactcagatcttgttgtcacccccattattgacaatccaaaggtgcagaaagcactctgacaattccaattgctaatccagcatttgtggatagctgcaaactgcgatattgctgatgagcgctttgacgccacattccacactaacgtgttggtgaattcttctgggcattgccagtacctgcctccaggcatattcaagagttcctgctacatcgatgtacgctggtttccctttgatgtgcagcactgcaaactgaagtttgggtcctggtcttacggaggctggtccttggatctgcagatgcaggaggcagatatcagtggctatatccccaatggagaatgggacctagtgggaatccccggcaagaggagtgaaaggttctatgagtgctgcaaagagccctaccctgatgtcaccttcacagtgaccatgcgccgcaggacgctctactatggcctcaacctgctgatcccctgtgtgctcatctccgccctcgccctgctggtgttcctgcttcctgcagattccggggagaagatttccctggggataacagtcttactctctcttaccgtcttcatgctgctcgtggctgagatcatgcccgcaacatccgattcggtaccattgatagcccagtacttcgccagcaccatgatcatcgtgggcctctcggtggtggtgacggtgatcgtgctgcagtaccaccaccacgaccccgacgggggcaagatgcccaagtggaccagagtcatccttctgaactggtgcgcgtggttcctgcgaatgaagaggcccggggaggacaaggtgcgcccggcctgccagcacaagcagcggcgctgcagcctggccagtgtggagatgagtgccgtggcgccgccgcccgccagcaacgggaacctgctgtacatcggcttccgcggcctggacggcgtgcactgtgtcccgacccccgactctggggtagtgtgtggccgcatggcctgctcccccacgcacgatgagcacctcctgcacggcgggcaaccccccgagggggacccggacttggccaagatcctggaggaggtccgctacattgccaaccgcttccgctgccaggacgaaagcgaggcggtctgcagcgagtggaagttcgccgcctgtgtggtggaccgcctgtgcctcatggccttctcggtcttcaccatcatctgcaccatcggcatcctgatgtcggctcccaacttcgtggaggccgtgtccaaagactttgcgtaaccacgcctggttctgtacatgtggaaaactcacagatgggcaaggcctttggcttggcgagatttgggggtgctaatccaggacagcattacacgccacaactccagtgttcccttctggctgtcagtcgtgttgcttacggtttctttgttactttaggtagtagaatctcagcactttgtttcatattctcagatgggctgatagatatccttggcacatccgtaccatcggtcagcagggccactgagtagtcattttgcccattagcccactgcctggaaagcccttcggagagctccccatggctcctcaccaccgagacagttggttttgcatgtctgcatgaaggtctacctgaaaattcaacatttgctttttgcttgtgtacaaacccagattgaagctaaaataaaccagactcactaaatcctttccaataattgactggtggaaggaaaacaaaaaacaaaaactaaaaacctcttagcttttctgcaattcaactttttatttttatttttatttctatcaaagacggtagagagaaacagcttgatgctgtttctacatcaaaaaaaaaaaaaaaaaagacagactgttggtcttactaaggatgtttttaccagcctgcctgacttctgcaaacctaccctgtcaaggagatcaaagggacgcaggtttctgtttattctgaacaagggccaggccccgcggagtgtctttggtggatcccagataactcctaggtgctgctctcagacactgaggagttgagcaaatctgttctattctgcagaacccataggacaaataagagttctactagaattaacagcccaaaagaatagctacagctaagtgaagccacttacgtgggctttaaaaaaataatgtgttagctgattcacatgcactggagttaattagtcttagaaatgtgtgcatccatacaaatgcacaacataaagtgaacatattcctaggccctttctgcctgtgtcagggccaggaagtagaggctgggaactcttctggtccccagtatggcag

SEQ ID NO: 117631 - DNA, 1913 bp, Homo sapiens
  Payload ID: 2983
  Gene Symbol: CHRFAM7A
  Gene Name: CHRNA7 (cholinergic receptor, nicotinic, alpha 7, exons 5-10) and FAM7A (family with sequence similarity 7A, exons A-E) fusion
  ENST ID: ENST00000401522
  CDS Start-End: 713-1678
ggggaagatgtccatgtccgggttcaaggccaaaccgaagttactggcctctatcttccaggagaaccaggagccacagccgcggctcacgccccaccgcaacattaagattacaagtggacacctgagtcagcaggacctggaatcccagatgagagagcttatctacacgactcagatcttgttgtcacccccattattgacaatccaaaggtgcagaaagcactctgacaaataatgaaacaaccaccatcggttaaatttgatgcaaaaatattgcatctaccagcattttcagttataatttctgaaagaccaagattggaatgactttttgtaacaagtgtgctcgcagatcgactccagtgagaagagctcggggacctcctgagccaagcttaatctcctttgctgtttgtgagtggtggctggtcaccaggaggtggccaccaggctcctcctttccccgctgttccaattgctaatccagcatttgtggatagctgcaaactgcgatattgctgatgagcgctttgacgccacattccacactaacgtgttggtgaattcttctgggcattgccagtacctgcctccaggcatattcaagagttcctgctacatcgatgtacgctggtttccctttgatgtgcagcactgcaaactgaagtttgggtcctggtcttacggaggctggtccttggatctgcagatgcaggaggcagatatcagtggctatatccccaatggagaatgggacctagtgggaatccccggcaagaggagtgaaaggttctatgagtgctgcaaagagccctaccctgatgtcaccttcacagtgaccatgcgccgcaggacgctctactatggcctcaacctgctgatcccctgtgtgctcatctccgccctcgccctgctggtgttcctgcttcctgcagattccggggagaagatttccctggggataacagtcttactctctcttaccgtcttcatgctgctcgtggctgagatcatgcccgcaacatccgattcggtaccattgatagcccagtacttcgccagcaccatgatcatcgtgggcctctcggtggtggtgacggtgatcgtgctgcagtaccaccaccacgaccccgacgggggcaagatgcccaagtggaccagagtcatccttctgaactggtgcgcgtggttcctgcgaatgaagaggcccggggaggacaaggtgcgcccggcctgccagcacaagcagcggcgctgcagcctggccagtgtggagatgagtgccgtggcgccgccgcccgccagcaacgggaacctgctgtacatcggcttccgcggcctggacggcgtgcactgtgtcccgacccccgactctggggtagtgtgtggccgcatggcctgctcccccacgcacgatgagcacctcctgcacggcgggcaaccccccgagggggacccggacttggccaagatcctggaggaggtccgctacattgccaaccgcttccgctgccaggacgaaagcgaggcggtctgcagcgagtggaagttcgccgcctgtgtggtggaccgcctgtgcctcatggccttctcggtcttcaccatcatctgcaccatcggcatcctgatgtcggctcccaacttcgtggaggccgtgtccaaagactttgcgtaaccacgcctggttctgtacatgtggaaaactcacagatgggcaaggcctttggcttggcgagatttgggggtgctaatccaggacagcattacacgccacaactccagtgttcccttctggctgtcagtcgtgttgcttacggtttctttgttactttaggtagtagaatctcagcactttgtttcatattctcagatgggctgatagatatccttggcacatccgtaccatcggt

SEQ ID NO: 117632 - DNA, 573 bp, Homo sapiens
  Payload ID: 2983
  Gene Symbol: CHRFAM7A
  Gene Name: CHRNA7 (cholinergic receptor, nicotinic, alpha 7, exons 5-10) and FAM7A (family with sequence similarity 7A, exons A-E) fusion
  ENST ID: ENST00000562729
  CDS Start-End: 261-573
ggttgtgccgcccagtcgcgagtgtgaggaagggaccagatcggtcgggcagaaaggagaaccaggagccacagccgcggctcacgccccaccgcaacattaagattacaagtggacacctgagtcagcaggacctggaatcccagatgagagagcttatctacacgactcagatcttgttgtcacccccattattgacaatccaaaggtgcagaaagcactctgacaaataatgaaacaaccaccatcggttaaatttgatgcaaaaatattgcatctaccagcattttcagttccaattgctaatccagcatttgtggatagctgcaaactgcgatattgctgatgagcgctttgacgccacattccacactaacgtgttggtgaattcttctgggcattgccagtacctgcctccaggcatattcaagagttcctgctacatcgatgtacgctggtttccctttgatgtgcagcactgcaaactgaagtttgggtcctggtcttacggaggctggtccttggatctgcagatgcaggaggcagatatcagtggctatatccccaatggag

SEQ ID NO: 117633 - DNA, 2859 bp, Homo sapiens
  Payload ID: 2983
  Gene Symbol: CHRFAM7A
  Gene Name: CHRNA7 (cholinergic receptor, nicotinic, alpha 7, exons 5-10) and FAM7A (family with sequence similarity 7A, exons A-E) fusion
  ENST ID: ENST00000617299
  CDS Start-End: 567-1805
agccctttcccaggcggtagcgggggcagtggtgctgttgcccttttaaactgcggcttgacgggagccgcgcctcctgtcggtggagtcggttataaagggagcagccccgcaggccgccacatagctcccgccaagtcctcggtgccccttgccattttccagccgcgctcccacgagggtcacggcggcggggagaggtggagccgcgagagctcggccgggggccccgcctggtggccgcggccatgacagcggctcgggactggctccttttccgcgcccctcccgccggaggtgaggggaagatgtccatgtcagggttcaaggccaaaccgaagttactggcctctatcttccaggagaaccaggagccacagccgcggctcacgccccaccgcaacattaagattacaagtggacacctgagtcagcaggacctggaatcccagatgagagagcttatctacacgactcagatcttgttgtcacccccattattgacaatccaaaggtgcagaaagcactctgacaaataatgaaacaaccaccatcggttaaatttgatgcaaaaatattgcatctaccagcattttcagttccaattgctaatccagcatttgtggatagctgcaaactgcgatattgctgatgagcgctttgacgccacattccacactaacgtgttggtgaattcttctgggcattgccagtacctgcctccaggcatattcaagagttcctgctacatcgatgtacgctggtttccctttgatgtgcagcactgcaaactgaagtttgggtcctggtcttacggaggctggtccttggatctgcagatgcaggaggcagatatcagtggctatatccccaatggagaatgggacctagtgggaatccccggcaagaggagtgaaaggttctatgagtgctgcaaagagccctaccccgatgtcaccttcacagtgaccatgcgccgcaggacactctactatggcctcaacctgctgatcccctgtgtgctcatctccgccctcgccctgctggtgttcctgcttcctgcagattccggggagaagatttccctggggataacagtcttactctctcttaccgtcttcatgctgctcgtggctgagatcatgcccgcaacatccgattcggtaccattgatagcccagtacttcgccagcaccatgatcatcgtgggcctctcggtggtggtgacggtgatcgtgctgcagtaccaccaccacgaccccgacgggggcaagatgcccaagtggaccagagtcatccttctgaactggtgcgcgtggttcctgcgaatgaagaggcccggggaggacaaggtgcgcccggcctgccagcacaagcagcggcgctgcagcctggccagtgtggagatgagcgccgtggcgccgccgcccgccagcaacgggaacctgctgtacatcggcttccgcggcctggacggcgtgcactgtgtcccgacccccgactctggggtagtgtgtggccgcatggcctgctcccccacgcacgatgagcacctcctgcacggtgggcaaccccccgagggggacccggacttggccaagatcctggaggaggtccgctacattgccaaccgcttccgctgccaggacgaaagcgaggcggtctgcagcgagtggaagttcgccgcctgtgtggtggaccgcctgtgcctcatggccttctcggtcttcaccatcatctgcaccatcggcatcctgatgttggctcccaacttcgtggaggccgtgtccaaagactttgcgtaaccacgcctggttctgtacatgtggaaaactcacagatgggcaaggcctttggcttggcgagatttgggggtgctaatccaggacagcattacacgccacaactccagtgttcccttctggctgtcagtcgtgttgcttacggtttctttgttactttaggtagtagaatctcagcactttgtttcatattctcagatgggctgatagatatccttggcacatccgtaccatcggtcagcagggccactgagtagtcattttgcccattagcccactgcctggaaagcccttcggagagctccccatggctcctcaccaccgagacagttggttttgcatgtctgcatgaaggtctacctgaaaattcaacatttgctttttgcttgtgtacaaacccagattgaagctaaaataaaccagactcactaaatcctttccaataattgactggtggaaggaaaacaaaaaacaaaaactaaaaacctcttagcttttctgcaattcaactttttatttttatttttatttctatcaaagacggtagagagaaacagcttgatgctgtttctacattaaaaaaaaaaaaaaaaaaagacagactgttggtcttactaaggatgtttttaccagcctgcctgacttctgcaaacctaccctgtcaaggagatcaaagggacgcaggtttctgtttattctgaacaagggccaggccccgcggagtgtctttggtggatcccagataactcctaggtgctgctctcagacactgaggagttgagcaaatctgttctattctgcagaacccataggacaaataagagttctactagaattaacagcccaaaagaatagctacagctaagtgaagccacttacgtgggctttaaaaaaataatgtgttagctgattcacatgcactggagttaattagtcttagaaatgtgtgcatccatacaaatgcacaacataaagtgaacatattcctaggccctttctgcctgtgtcagggccaggaagtagaggctgggaactcttctggtccccagtatggcag

SEQ ID NO: 117634 - DNA, 1913 bp, Homo sapiens
  Payload ID: 2983
  Gene Symbol: CHRFAM7A
  Gene Name: CHRNA7 (cholinergic receptor, nicotinic, alpha 7, exons 5-10) and FAM7A (family with sequence similarity 7A, exons A-E) fusion
  ENST ID: ENST00000618874
  CDS Start-End: 713-1678
ggggaagatgtccatgtcagggttcaaggccaaaccgaagttactggcctctatcttccaggagaaccaggagccacagccgcggctcacgccccaccgcaacattaagattacaagtggacacctgagtcagcaggacctggaatcccagatgagagagcttatctacacgactcagatcttgttgtcacccccattattgacaatccaaaggtgcagaaagcactctgacaaataatgaaacaaccaccatcggttaaatttgatgcaaaaatattgcatctaccagcattttcagttataatttctgaaagaccaagattggaatgactttttgtaacaagtgtgctcgcagatcgactccagtgagaagagctcggggacctcctgagccaagcttaatctcctttgctgtttgtgagtggtggctggtcaccaggaggtggccaccaggctcctcctttccccgctgttccaattgctaatccagcatttgtggatagctgcaaactgcgatattgctgatgagcgctttgacgccacattccacactaacgtgttggtgaattcttctgggcattgccagtacctgcctccaggcatattcaagagttcctgctacatcgatgtacgctggtttccctttgatgtgcagcactgcaaactgaagtttgggtcctggtcttacggaggctggtccttggatctgcagatgcaggaggcagatatcagtggctatatccccaatggagaatgggacctagtgggaatccccggcaagaggagtgaaaggttctatgagtgctgcaaagagccctaccccgatgtcaccttcacagtgaccatgcgccgcaggacactctactatggcctcaacctgctgatcccctgtgtgctcatctccgccctcgccctgctggtgttcctgcttcctgcagattccggggagaagatttccctggggataacagtcttactctctcttaccgtcttcatgctgctcgtggctgagatcatgcccgcaacatccgattcggtaccattgatagcccagtacttcgccagcaccatgatcatcgtgggcctctcggtggtggtgacggtgatcgtgctgcagtaccaccaccacgaccccgacgggggcaagatgcccaagtggaccagagtcatccttctgaactggtgcgcgtggttcctgcgaatgaagaggcccggggaggacaaggtgcgcccggcctgccagcacaagcagcggcgctgcagcctggccagtgtggagatgagcgccgtggcgccgccgcccgccagcaacgggaacctgctgtacatcggcttccgcggcctggacggcgtgcactgtgtcccgacccccgactctggggtagtgtgtggccgcatggcctgctcccccacgcacgatgagcacctcctgcacggtgggcaaccccccgagggggacccggacttggccaagatcctggaggaggtccgctacattgccaaccgcttccgctgccaggacgaaagcgaggcggtctgcagcgagtggaagttcgccgcctgtgtggtggaccgcctgtgcctcatggccttctcggtcttcaccatcatctgcaccatcggcatcctgatgttggctcccaacttcgtggaggccgtgtccaaagactttgcgtaaccacgcctggttctgtacatgtggaaaactcacagatgggcaaggcctttggcttggcgagatttgggggtgctaatccaggacagcattacacgccacaactccagtgttcccttctggctgtcagtcgtgttgcttacggtttctttgttactttaggtagtagaatctcagcactttgtttcatattctcagatgggctgatagatatccttggcacatccgtaccatcggt

SEQ ID NO: 117635 - DNA, 2795 bp, Homo sapiens
  Payload ID: 2983
  Gene Symbol: CHRFAM7A
  Gene Name: CHRNA7 (cholinergic receptor, nicotinic, alpha 7, exons 5-10) and FAM7A (family with sequence similarity 7A, exons A-E) fusion
  ENST ID: ENST00000620917
  CDS Start-End: 776-1741
agccctttcccaggcggtagcgggggcagtggtgctgttgcccttttaaactgcggcttgacgggagccgcgcctcctgtcggtggagtcggttataaagggagcagccccgcaggccgccacatagctcccgccaagtcctcggtgccccttgccattttccagccgcgctcccacgagggtcacggcggcggggagaggtggagccgcgagagctcggccgggggccccgcctggtggccgcggccatgacagcggctcgggactggctccttttccgcgcccctcccgccggaggtgaggggaagatgtccatgtcagggttcaaggccaaaccgaagttactggcctctatcttccaggagaaccaggagccacagccgcggctcacgccccaccgcaacattaagattacaagtggacacctgagtcagcaggacctggaatcccagatgagagagcttatctacacgactcagatcttgttgtcacccccattattgacaatccaaaggtgcagaaagcactctgacaattccaattgctaatccagcatttgtggatagctgcaaactgcgatattgctgatgagcgctttgacgccacattccacactaacgtgttggtgaattcttctgggcattgccagtacctgcctccaggcatattcaagagttcctgctacatcgatgtacgctggtttccctttgatgtgcagcactgcaaactgaagtttgggtcctggtcttacggaggctggtccttggatctgcagatgcaggaggcagatatcagtggctatatccccaatggagaatgggacctagtgggaatccccggcaagaggagtgaaaggttctatgagtgctgcaaagagccctaccccgatgtcaccttcacagtgaccatgcgccgcaggacactctactatggcctcaacctgctgatcccctgtgtgctcatctccgccctcgccctgctggtgttcctgcttcctgcagattccggggagaagatttccctggggataacagtcttactctctcttaccgtcttcatgctgctcgtggctgagatcatgcccgcaacatccgattcggtaccattgatagcccagtacttcgccagcaccatgatcatcgtgggcctctcggtggtggtgacggtgatcgtgctgcagtaccaccaccacgaccccgacgggggcaagatgcccaagtggaccagagtcatccttctgaactggtgcgcgtggttcctgcgaatgaagaggcccggggaggacaaggtgcgcccggcctgccagcacaagcagcggcgctgcagcctggccagtgtggagatgagcgccgtggcgccgccgcccgccagcaacgggaacctgctgtacatcggcttccgcggcctggacggcgtgcactgtgtcccgacccccgactctggggtagtgtgtggccgcatggcctgctcccccacgcacgatgagcacctcctgcacggtgggcaaccccccgagggggacccggacttggccaagatcctggaggaggtccgctacattgccaaccgcttccgctgccaggacgaaagcgaggcggtctgcagcgagtggaagttcgccgcctgtgtggtggaccgcctgtgcctcatggccttctcggtcttcaccatcatctgcaccatcggcatcctgatgttggctcccaacttcgtggaggccgtgtccaaagactttgcgtaaccacgcctggttctgtacatgtggaaaactcacagatgggcaaggcctttggcttggcgagatttgggggtgctaatccaggacagcattacacgccacaactccagtgttcccttctggctgtcagtcgtgttgcttacggtttctttgttactttaggtagtagaatctcagcactttgtttcatattctcagatgggctgatagatatccttggcacatccgtaccatcggtcagcagggccactgagtagtcattttgcccattagcccactgcctggaaagcccttcggagagctccccatggctcctcaccaccgagacagttggttttgcatgtctgcatgaaggtctacctgaaaattcaacatttgctttttgcttgtgtacaaacccagattgaagctaaaataaaccagactcactaaatcctttccaataattgactggtggaaggaaaacaaaaaacaaaaactaaaaacctcttagcttttctgcaattcaactttttatttttatttttatttctatcaaagacggtagagagaaacagcttgatgctgtttctacattaaaaaaaaaaaaaaaaaaagacagactgttggtcttactaaggatgtttttaccagcctgcctgacttctgcaaacctaccctgtcaaggagatcaaagggacgcaggtttctgtttattctgaacaagggccaggccccgcggagtgtctttggtggatcccagataactcctaggtgctgctctcagacactgaggagttgagcaaatctgttctattctgcagaacccataggacaaataagagttctactagaattaacagcccaaaagaatagctacagctaagtgaagccacttacgtgggctttaaaaaaataatgtgttagctgattcacatgcactggagttaattagtcttagaaatgtgtgcatccatacaaatgcacaacataaagtgaacatattcctaggccctttctgcctgtgtcagggccaggaagtagaggctgggaactcttctggtccccagtatggcag

SEQ ID NO: 117636 - DNA, 2488 bp, Homo sapiens
  Payload ID: 2984
  Gene Symbol: CHRAC1
  Gene Name: chromatin accessibility complex 1
  Uniprot ID: Q9NRG0
  ENST ID: ENST00000220913
  CDS Start-End: 203-598
atgcgcagatcgggggcgcgaggcctcacggagctcgtagtttcccggacgggccgctcccggcctcgcggcctcgcctccccacactacaactcccacggggcagcgggcgcggctccccgtacccaccagctggccgggcagggcagccacttcgcggtcgggcccgccggctgcgggcacccgcgcgacgggcgggaagatggcggacgtggtcgtgggtaaagacaagggcggggagcagcggctcatctcgctgcctctatcccgcatccgggtcatcatgaagagctcccccgaggtgtccagcatcaaccaggaggcgttggtgctcacggccaaggccacggagctctttgttcaatgcctagccacctattcctacagacacggcagtggaaaggaaaagaaagtactgacttacagtgatttagcaaacactgcacagcaatcagaaacttttcagtttcttgcagatatattaccaaagaagattttagctagtaaatacctgaaaatgcttaaagaggaaaagagggaagaagatgaggagaatgacaatgataatgaaagtgaccatgatgaagctgactcctaaaccaaaagtgctttaaaaaccagcctggcgaggacagccctggacccactccactgtctctaagtaaacacagcactgcccgcttttagcgtcttcacttcttcacagagttccagtgtgtggtattctttcgaggtattctttccaggccgagattgagcacctcatgtacctacgccacagacagccagagggaaagcgacccagacagcagcccctcctcgacaggcccaccctgcagctcaggcaccaagaaaacagccgatactggcagccattgcagctccaaactgcagaggcaaggccaattttaacttttcaatttacagtcgattttgaagagcttctacatatcggttatgtaaattcatatatgtatattttggaatcagttcttataaacagctcgattcagttttagctaaatttatagtttaggtagtatgttacatttgaatttttgtcttaagaaaagttgactgttcagatatttttctactgtaaagaaatatacttttctattaaagatctgtacatatttttacagtaaaatgctttatggaactagttttagagccctctatggctttaaggccttgcttactgcctgcaaattttgagaaatttaaaaataagcattctaacacttttattcccacagaaaaattccaagtcaaattatcaaatcaaatacaaaaataagtcttacctcttgtataagcatgttgtactaaaaaaaaattttgaaacattttgtatattggagatctctctcatcttactgttctttgctttaaattcctggcacttctttttactgtctataagagaaaacctatcataagcccaattttttttttccacttagggtaaatgtttggctcctctcatttcattatctttttttttttttttttaaagacagattctcactcagttgcccaggctggattgcggtggcgctgtctcagctcactgcaacctccgcctcccaggttcaagtgattctcctgcctcatcctcctgagtagctgggattacaggcgtgtgccaccatgcccaacctatttttgtattttttagtagagacggggttcaccatgttggccaggcttgtctcaaactcctaacctcaactgatccacctgcctcagcctcccaaagtgccgccgggattacaggcgtgagccaccatgcctggccttcattatctcttttttaaaaatgaaaaagtttataatttacattcagtaaaatcaccctttttagtgtctagtctgtgaattttgacaaatgcatggttttgtaaccaatcgataggacagttctgccacccaggacattcccctctgttcctctgttcctctcttctcctgccccctagcaaccactggtgttttctgtccctcttgttcattgacatttattttaaaataaaatattttaaaatctactttttggtgtacagttctgagttttggcaaatgcagtcaagtcactaccaccaccacaattaacagctatatcaccctccagtaaattccctgtggtcagctccttccccaccttttaccgtggcaaccgtcaagctattctctgtccctataccaggtgtcatcaaatttttttctggaaagggccatgcagtaaatagttcaagctttgtgggcttttatagtctctgttgctgctgctgaactcagctgttgtagcacgaaagcagccaggtaattactagatgaaggaatgcaggtggctgtgtttcaatagagctttatttctgcaaactgaaacttgagttttgtgtaattttcatgtgtcatgaaatactgttttctccaaccatttaataatgtaaatacttgctagcttatgtgccattaaaaaatg

SEQ ID NO: 117637 - DNA, 1678 bp, Homo sapiens
  Payload ID: 2984
  Gene Symbol: CHRAC1
  Gene Name: chromatin accessibility complex 1
  ENST ID: ENST00000519533
  CDS Start-End: 190-360
gggcgcgaggcctcacggagctcgtagtttcccggacgggccgctcccggcctcgcggcctcgcctccccacactacaactcccacggggcagcgggcgcggctccccgtacccaccagctggccgggcagggcagccacttcgcggtcgggcccgccggctgcgggcacccgcgcgacgggcgggaagatggcggacgtggtcgtgggtaaagacaagggcggggagcagcggctcatctcgctgcctctatcccgcatccgggtcatcatgaagagctcccccgaggtgtccagcatcaaccaggaggcgttggtgctcacggccaaggccacgatatattaccaaagaagattttagctagtaaatacctgaaaatgcttaaagaggaaaagagggaagaagatgaggagaatgacaatgataatgaaagtgaccatgatgaagctgactcctaaaccaaaagtgctttaaaaaccagcctggcgaggacagccctggacccactccactgtctctaagtaaacacagcactgcccgcttttagcgtcttcacttcttcacagagttccagtgtgtggtattctttcgaggtattctttccaggccgagattgagcacctcatgtacctacgccacagacagccagagggaaagcgacccagacagcagcccctcctcgacaggcccaccctgcagctcaggcaccaagaaaacagccgatactggcagccattgcagctccaaactgcagaggcaaggccaattttaacttttcaatttacagtcgattttgaagagcttctacatatcggttatgtaaattcatatatgtatattttggaatcagttcttataaacagctcgattcagttttagctaaatttatagtttaggtagtatgttacatttgaatttttgtcttaagaaaagttgactgttcagatatttttctactgtaaagaaatatacttttctattaaagatctgtacatatttttacagtaaaatgctttatggaactagttttagagccctctatggctttaaggccttgcttactgcctgcaaattttgagaaatttaaaaataagcattctaacacttttattcccacagaaaaattccaagtcaaattatcaaatcaaatacaaaaataagtcttacctcttgtataagcatgttgtactaaaaaaaaattttgaaacattttgtatattggagatctctctcatcttactgttctttgctttaaattcctggcacttctttttactgtctataagagaaaacctatcataagcccaattttttttttccacttagggtaaatgtttggctcctctcatttcattatctttttttttttttttttaaagacagattctcactcagttgcccaggctggattgcggtggcgctgtctcagctcactgcaacctccgcctcccaggttcaagtgattctcctgcctcatcctcctgagtagctgggattacaggcgtgtgccaccatgcccaacctatttttgtattttttagtagagacggggttcaccatgttggccaggcttgtctcaaactcctaacctcaactgatccacctgcctcagcctcccaaagtgccgccgggattacaggcgtgagccaccatgcctggccttcattatctctttttt

SEQ ID NO: 117638 - DNA, 811 bp, Homo sapiens
  Payload ID: 2984
  Gene Symbol: CHRAC1
  Gene Name: chromatin accessibility complex 1
  ENST ID: ENST00000519618
  CDS Start-End: 1-293
actgtcctcccgccgtttctctcgcgcttccattcggcaaacccgagctctttgttcaatgcctagccacctattcctacagacacggcagtggaaaggaaaagaaagtactgacttacagtgatttagcaaacactgcacagcaatcagaaacttttcagtttcttgcagatatattaccaaagaagattttagctagtaaatacctgaaaatgcttaaagaggaaaagagggaagaagatgaggagaatgacaatgataatgaaagtgaccatgatgaagctgactcctaaaccaaaagtgctttaaaaaccagcctggcgaggacagccctggacccactccactgtctctaagtaaacacagcactgcccgcttttagcgtcttcacttcttcacagagttccagtgtgtggtattctttcgaggtattctttccaggccgagattgagcacctcatgtacctacgccacagacagccagagggaaagcgacccagacagcagcccctcctcgacaggcccaccctgcagctcaggcaccaagaaaacagccgatactggcagccattgcagctccaaactgcagaggcaaggccaattttaacttttcaatttacagtcgattttgaagagcttctacatatcggttatgtaaattcatatatgtatattttggaatcagttcttataaacagctcgattcagttttagctaaatttatagtttaggtagtatgttacatttgaatttttgtcttaagaaaagttgactgttcagatatttttctactgtaaagaaatatactttt

SEQ ID NO: 117639 - DNA, 925 bp, Homo sapiens
  Payload ID: 2984
  Gene Symbol: CHRAC1
  Gene Name: chromatin accessibility complex 1
  ENST ID: ENST00000518971
  CDS Start-End: 1-243
tttgtcgccttccttcgctccgcccgccccttccttccgtgcgcaccttcgccccgcccaccccactgtcctcccgccgtttctctcgcgcttccattcggcaaacccgagctctttgttcaatgcctagccacctattcctacagacacggcagtggaaaggaaaagaaagtactgacttacagtgatttagcaaacactgcacagcaatcagaaacttttcagtttcttgcaggtacttagtctttgaaacattctggttaaaaaatgattagtaatcaatagctctttccccaccccttgcctcccttctgctctcacggaaaattagactttttgctactttttccaagccgcaaagtactatgagttgtcacaggaagatacttttagtcttctctgtttgaatgtgtttgtcatgtggtccacctagaacaatagtgaagccaacaacattcacaagatgttggttggccgcgtatgctgggcagtcctttactctctacagggaccctgcctgccactgaagggaaaactcagggtgggtctacatggccgtagttagagcttaagtctaccctggggctagcctaggctatctcaggtagtcgggcagggttgctcataaaagcagctcatagagacaccatggtttgtactcattggactggaaagaggcctatagcgttcgttaggagacaatgctagtttctttgatattttacccagaaatgcagcctgaatttcatcttgttttggaacctcttatagaggtcaaagcaggaactagtacattttgaaatgtgcattgctgtgttcatagtctaccataaccaattgctgatgtacgctttatgtttttaagatatattaccaaagaagattttagctagtaaatacctgaaaatgcttaaagaggaaaaga

SEQ ID NO: 117640 - DNA, 3339 bp, Homo sapiens
  Payload ID: 2985
  Gene Symbol: CHAF1A
  Gene Name: chromatin assembly factor 1, subunit A (p150)
  Uniprot ID: Q13111
  ENST ID: ENST00000301280
  CDS Start-End: 102-2972
ggcggcagcagcggcgcgggcgggagggcgaagagcagcggccgcctgaggggagcccgcgcctccgccgcctgagaggaggtcgagctgccgccggggcgatgctggaggagctggagtgcggggcgcccggcgccaggggagccgccacagccatggattgcaaagatagaccagcttttccagttaagaagttaatacaagcccgtctgccgtttaagcgcctgaatcttgtcccaaaggggaaagccgatgacatgtcagacgatcagggtacttctgtgcaaagtaaaagccccgatttagaggcctctttggacaccttggaaaacaactgtcatgtgggttctgacatagactttagaccgaaacttgtcaacgggaagggtcccttagataactttttaagaaatagaatcgaaaccagtattggccagagcacagtcatcattgatttgacagaggactcgaatgagcagccagacagtcttgtggaccacaataaactaaattctgaagcctctccctccagggaggcaataaatggccagcgagaagacactggggatcagcaggggttgttgaaggccattcagaacgacaagttggcatttcctggagagaccctttcagacattccttgcaaaacagaggaggagggtgttggctgtggaggtgcagggaggagaggcgactcccaggaatgttcgccacggagctgcccggagctgacgagtggcccgagaatgtgccccagaaaggagcaggacagttggagtgaagctgggggcatcctgttcaaagggaaggtgcctatggtggtcttgcaggacatcttggctgtgagaccaccgcaaatcaagtcccttccagccacaccccaaggcaagaacatgacccctgagagtgaggtgctggaatctttccccgaagaagactctgtactcagccattcgtccctgagctctccctcttccaccagctcgcccgaggggccgcctgctcccccaaagcagcacagcagtaccagtcccttccccacctccacgcccctccgcagaataactaagaaattcgtcaaaggctctacagagaagaacaagctcagactgcaaagagatcaggagcgtctgggcaagcagctcaagttacgtgcagaaagggaagaaaaggagaagctgaaagaggaggccaagcgggccaaggaggaggccaagaagaagaaggaggaagagaaggagcttaaggaaaaggagaggcgggagaagcgggagaaggatgagaaggagaaggcggagaagcagcggctcaaggaggagcggcgcaaggagagacaggaagccctggaggctaaacttgaggaaaaaaggaaaaaggaagaagagaaacggttaagagaagaagagaagcgcattaaagcagagaaggccgaaatcacgaggttcttccagaaaccaaagactccacaggcccccaagaccctggccggctcctgtgggaagtttgccccctttgaaattaaagagcacatggtcctggcccctcggcgtcggaccgctttccatccagacctctgcagtcagctggaccagctcctccagcagcagagcggcgagttctccttcttgaaagacctcaaaggccggcagcccctgaggtccggacccacgcacgtttccacccggaatgcagatatttttaacagtgatgtcgtcatcgtggagcgtgggaagggcgacggtgttcccgagaggaggaagtttggcaggatgaagctcctgcagttctgtgagaaccaccggcctgcctactggggtacctggaataagaagacggcactcatccgcgcgcgagacccctgggcccaggacacgaagctcctggactatgaggtggacagtgatgaggagtgggaagaagaggagcctggggagtccctgtcccacagtgagggggatgatgatgacgacatgggagaggatgaagatgaggacgatggtttctttgtgccccatgggtacctgtctgaggacgaaggtgtgacagaggagtgtgccgaccctgagaaccataaggtccgccagaaactgaaggccaaggagtgggacgagttcctggctaaggggaagcgctttcgcgtcctgcaacctgtgaagatcggctgcgtgtgggcggctgacagagactgcgcaggcgatgacctgaaggtactgcagcagttcgcagcctgcttcctggagaccctgccggcccaggaggagcagacgcccaaggcctccaagcgggagaggagagacgagcagatcctggcccagctgctgccgctcctgcacggcaatgtgaacgggagcaaggtcatcatccgggagttccaggagcactgccgccggggactgctcagcaaccacaccggcagcccgcggagcccctccaccacctacctgcacacccccacccccagcgaggatgccgccatcccctctaagtcccggctcaagcggctcatttccgagaactcagtgtatgagaagcggcctgacttcaggatgtgctggtacgtgcacccgcaggtgctacagagcttccagcaggagcacctgcccgtgccgtgccagtggagctatgtgacatcggtgccctcggcccccaaagaggacagtggcagcgtcccctccacggggcccagccagggcactcccatctcgctgaagaggaagtcagcgggcagcatgtgcatcacccaattcatgaagaagcgcaggcacgacggccagattggtgctgaagacatggacggcttccaggcagacacggaggaggaggaagaggaggagggcgactgtatgatcgtggatgtcccggatgctgcggaggtccaagccccgtgtggagccgcttccggagctgggggtggtgtgggggtggacaccggcaaggccaccctgaccgcgagcccactgggtgcatcctgagagcaggggtgacgtatgtagaatgcttagggtgtcctccccacagagcagatacttgaaccgactcaattcctgtgtaaagagcactttgtcctgcttcacggacctccccaaagtgtgcagagttctatataggatgctggattagttcctttgatatttgtaaaaattcccccaagagccgcatatgaatctgccctttaataaagcattattgagattgctggcctattggggaagcctgcgggcacaggagcaggcgtggaatccaatacttgtaaatgaattgaagcgtcaggaccacccgcctggccacgtgcgcgggcccctggacctaacgaggcagtgtataaacttattctctagc

SEQ ID NO: 117641 - DNA, 499 bp, Homo sapiens
  Payload ID: 2985
  Gene Symbol: CHAF1A
  Gene Name: chromatin assembly factor 1, subunit A (p150)
  ENST ID: ENST00000585854
  CDS Start-End: 47-499
cccgcgcctccgccgcctgagaggaggtcgagctgccgccggggcgatgctggaggagctggagtgcggggcgcccggcgccaggggagccgccacagcccgtctgccgtttaagcgcctgaatcttgtcccaaaggggaaagccgatgacatgtcagacgatcagggtacttctgtgcaaagtaaaagccccgatttagaggcctctttggacaccttggaaaacaactgtcatgtgggttctgacatagactttagaccgaaacttgtcaacgggaagggtcccttagataactttttaagaaatagaatcgaaaccagtattggccagagcacagtcatcattgatttgacagaggactcgaatgagcagccagacagtcttgtggaccacaataaactaaattctgaagcctctccctccagggaggcaataaatggccagcgagaagacactggggatcagcaggggttgttgaaggccattcagaacgacaag

SEQ ID NO: 117642 - DNA, 563 bp, Homo sapiens
  Payload ID: 2985
  Gene Symbol: CHAF1A
  Gene Name: chromatin assembly factor 1, subunit A (p150)
  ENST ID: ENST00000589648
  CDS Start-End: 1-144
gaagacatggacggcttccaggcagacacggaggaggaggaagaggaggagggcgactgtatgatcgtggatgtcccggatgctgcggccatgcgcagcctcttccagtctctctctgattcaccctcctgccacctcttgtgaggacactgggtcccggaccacccaggatcatctcccagctcaagacctttcatcatacccaagcccctcttgccaggtgaagttgcgcatctgcaggttccaggaataggatgtggccgtctcaggacaccctgtccctctggccacagggaagccaggcctgtgacagcactcgcctcccctgcagggactgggcctttgtgggcacagcacagcctcccctagcgcacgggacttcctccccaggtgggtggctcatcgggcacttgtggccaggtgctggcctgagaacaggtatccacatggtcccaccttgacagggagccacacccagcccccaagccatccgctcttcagcaggtgggcctgccctgtgtcccacggtttcaacggagaaccaagaaactatattcaaacaa

SEQ ID NO: 117643 - DNA, 884 bp, Homo sapiens
  Payload ID: 2985
  Gene Symbol: CHAF1A
  Gene Name: chromatin assembly factor 1, subunit A (p150)
  ENST ID: ENST00000585371
  CDS Start-End: 1-54
aaattcgtcaaaggctctacagagaagaacaagctcagactgcaaagaggctaaacttgaggaaaaaaggaaaaaggaagaagagaaacggttaagagaagaagagaagcgcattaaagcagagaaggccgaaatcacgaggttcttccagaaaccaaagactccacaggcccccaagaccctggccggctcctgtgggaagtttgccccctttgaaattaaagagcacatggtcctggcccctcggcgtcggaccgctttccatccagacctctgcagtcagctggaccagctcctccagcagcagagcggcgagttctccttcttgaaagacctcaaaggccggcagcccctgaggtccggacccacgcacgtttccacccggaatgcagatatttttaacaggcctctctccacctggccttcctgtaagctcctgaagtcttcctctccctgtcttcccagctcctcgtggaggaatcttatttccctgctggtctccagtgaaggataccccccaacacctcgctcttgcaaatctcattccacagaacctcccttgctaaaaatgctctggggctgcacctgggcagctgtcctccctctcaccctgcaggctgcaccctcctccatctgtcccttcagtccatgttcctgacctttctttggggacaggcagtgctgctttttaacaaatgcccatctttctagaattgttaggccagcttcacagggaggttcctgggaggtttgtgagcaggtctgtaaggcagcgtgatcctgagcctggggttttccttctcagtgatgtcgtcatcgtggagcgtgggaagggcgacggtgttcccgagaggaggaagtttggcaggatgaagctcctgcag

SEQ ID NO: 117644 - DNA, 875 bp, Homo sapiens
  Payload ID: 2985
  Gene Symbol: CHAF1A
  Gene Name: chromatin assembly factor 1, subunit A (p150)
  ENST ID: ENST00000587739
  CDS Start-End: 1-875
atgtgccccagaaaggagcaggacagttggagtgaagctgggggcatcctgttcaaagggaaggtgcctatggtggtcttgcaggacatcttggctgtgagaccaccgcaaatcaagtcccttccagccacaccccaaggcaagaacatgacccctgagagtgaggtgctggaatctttccccgaagaagactctgtactcagccattcgtccctgagctctccctcttccaccagctcgcccgaggggccgcctgctcccccaaagcagcacagcagtaccagtcccttccccacctccacgcccctccgcagagatcaggagcgtctgggcaagcagctcaagttacgtgcagaaagggaagaaaaggagaagctgaaagaggaggccaagcgggccaaggaggaggccaagaagaagaaggaggaagagaaggagcttaaggaaaaggagaggcgggagaagcgggagaaggatgagaaggagaaggcggagaagcagcggctcaaggaggagcggcgcaaggagagacaggaagccctggaggctaaacttgaggaaaaaaggaaaaaggaagaagagaaacggttaagagaagaagagaagcgcattaaagcagagaaggccgaaatcacgaggttcttccagaaaccaaagactccacaggcccccaagaccctggccggctcctgtgggaagtttgccccctttgaaattaaagagcacatggtcctggcccctcggcgtcggaccgctttccatccagacctctgcagtcagctggaccagctcctccagcagcagagcggcgagttctccttcttgaaagacctcaaaggccggcagcccctgaggtccggacccacgcacgtttc

SEQ ID NO: 117645 - DNA, 4480 bp, Homo sapiens
  Payload ID: 2986
  Gene Symbol: CHAF1B
  Gene Name: chromatin assembly factor 1, subunit B (p60)
  Uniprot ID: Q13112
  ENST ID: ENST00000314103
  CDS Start-End: 152-1831
ggcctgcggcgcgcgggaagcggcgcgcgctgcgcgggaggtgacggtgcctctgactgtccgggtccctccagcattttgcagctttctcctgtcttgaagaagtagaacggtgcccgagaaacgtttttccccttcgagactcaggaggatgaaagtcatcacttgtgaaatagcctggcacaacaaggagcccgtgtacagcctggacttccagcatgggacggctgggaggatccacagactggcgtctgccggcgtggacaccaatgtcaggatctggaaggtagaaaagggaccagatggaaaagccatcgtggaatttttgtccaatcttgctcgtcataccaaagccgtcaatgttgtgcgtttttctccaactggggaaattttagcatcgggaggagatgatgctgtcatcctattgtggaaggtgaatgataacaaggagccggagcagatcgcttttcaggatgaggacgaggcccagctgaacaaggagaactggacggttgtgaagactctgcggggccacttagaagatgtgtatgatatttgctgggcaactgatgggaatttaatggcttctgcctctgtggataacacagccatcatatgggatgtcagcaaaggacaaaagatatcaatttttaatgaacataaaagttatgtccaaggagtaacctgggaccctttgggtcaatatgttgctactctgagctgtgacagggtgctgcgagtatacagtatacagaagaagcgtgtggctttcaatgtttcgaagatgctgtctggaataggggctgaaggagaggcaagaagctaccggatgtttcacgacgacagcatgaagtctttcttccgtagactgagtttcactcccgacggatctttgcttctcacgccagctggatgtgtggaatctggtgaaaatgtaatgaataccacttatgttttctccaggaagaatcttaaaaggcccatcgctcatcttccatgtcctggaaaagccactcttgctgttcgctgctgtccggtctactttgaactgaggccagtggtggaaacaggtgtggagctgatgagtctgccctaccgcctggtgtttgctgtggcctcggaggattccgtgcttctgtatgacacccagcagtccttcccttttggttacgtgtctaatatacattaccacaccctcagtgacatttcatggtccagcgatggtgccttcctggccatttcttccacggacggttactgctcatttgtgacatttgagaaagatgaacttggaattcctttgaaagagaagccagttttgaacatgagaactcctgatacagcaaagaaaaccaagagtcagacacatcgagggtcttcgccaggacccagaccggtagagggaacccctgccagcagaacccaagaccccagcagccccggcacgactccccctcaggccagacaggccccagccccaacagtcatcagggaccctccctccatcactcctgctgtcaaaagccccttgccggggccttcggaggagaagaccctgcagcccagtagtcaaaacacaaaagcccacccatcccggagggtcactctgaacacactgcaagcctggagcaagacaacaccccggagaataaacttaacacccttaaagacggacactccaccaagttctgtaccaaccagtgtgatttccaccccttctacagaagaaattcagtcagagacgcctggagacgctcagggcagtcccccagagctaaagcggcccagactcgatgaaaacaaaggaggcacggaaagtctggacccttgatgggacctcggcttctgctcgaagcctaccaggctcccggtgtgtgcagggagacggtaaagctggaggtgcctgagaccagggcttccatggagcgggacacactgtaaatggatttctataacagaagtgacatgtgtactgatttttctccagaaatatggatgctgttgtattcagtatccatttttaacttgggacatgaacgttttaacgtagtaaatcctctttttgatgagtttctgaaactggagcggttcaacgttatccagtgtgaaaatcagtgagtcctccctggcatcctcgtgaaagtgcacacacttcatggagggactccttttcaataagaattaggaagatgagaaagtaatttgagattttactctgtcgaattttagagtatttgaagtgattgttagatttcacttctaaggagttgattgattaaactttggaaggtagttgtgtttgttttctgattttaaaggtgacgatgcttattcttttagtaactaagtgaagtgaaaaagatgggtatcacccatcatcttcccaccagaagtaaccctcgttaatgttgtagtatatttccttagcatttttgtggatctatttattctaaaaagagaattgagattttatttcatatgcaatttggtatctaaataggttagttttttagattggtttttcaaagcaaaaaaagtatcttttttgttttttgagacagggtcttgctctgttgcccaggctggagtgcagtggcgctatctcagctcactgcagcctcgacctcctgggctcgagcgatccttccacctcagcttcccgagtagctgggactacaggcatgtgccaccatgccatgctaatttcacacacacatgcacccacacacacacatatatatgatacatatatatatatatacacacacacacaagtatgtgtgtatatatatattttttttcttttttttttgagatggagtctcactctgtcgcccaggctggagtacagtggcacaatctcggctcactataacctccgcctcctgggttcaaacgattctcctgcctctgcctcttgagtagctaggattacaggtgtgtgccaccacatccggctaatttttatatttttagtagagatggggttttgccatgttggccaagctggtctctaactcctgacctcagatgatctgcctgcctcggcctcccaaagtgttgggattacaggtgtgagctactgcacctggcctaattattatatttttaggggagacggggtttttccatgttgcccaggctggtctcgaactcctggggctcaagtaatcctccctccccagcctcccaaagtgttgggattacaggcgtgagacaccatgcctggtcaaatggtatctgttttgacgggtggttctcaactgtagctgcatactgaaatcacctaagagctgacataccagtgcctgggttcccgcttcggaggatttggcctaatcggtctggggtatgttctgaatattaggatttcttaaagctcctggagtaattctgatgcgcagccaagattgagaaatctaagggaaaaaactttccctggatacggtctgttctggttaaatgcatttccactgaaagcatttttttttttttccgagacagagtctcgctctgtcacccaggctggagtgcagtggcgcaatctccactcactgcaacctcacctcctaggttcaagggattctcctgcctcagcctctccagtagctgggattacaggcacccgccaccacgcccggctaatttttgtatttttagtagagatggtgtttcaccatgttggtcaggctggtctccaacgcctgacctcgtgatctgcccacctcagcctcccaaagtgctgggattacaggcgtgagccaccgcgcccagccgaaagcattttcttgattatctctgccccgtcactgattgacatcctcctttgctggggccgcggactgaaggacagtatgcaggaggtgccatcagctcttctgaaaagagacagctttcagtgtcatgtggctggcgtgaggtgcggtttgcagttgttgatcctgtgcagacagatgaatgaccatgggtcccctgtccttattgagcagcctgcttcctggccatacctggggaggaacagtattaggtttttctgggtgtggtggctcacacctgtaatcccagcactttgggaggccaaggtgggtggatcacttgaggttgggagtttgagaccagcctggccaacatggtggaaccccatctctactaaaaatacaaaaactagccaggcgcggtggcacacacttgtaatcccagctactcgggaggctgaggcacaagaatcgcttgaacccgggaggcggagtttgtagtgagctgagatggtgccactgtactccagcctgggcgacagagcgagactctgtctcaaaaaaaaaaaaaaagagaaaaagaagaacagtattaggttttacaaatctgtttcttgtgcattgattgtgggagttggggtgggggacccctgatggcctgcctgttctcagccatcatccttaaatataaatcaaaattggcaataaaagaccaagtgaagtca

SEQ ID NO: 117646 - DNA, 3240 bp, Homo sapiens
  Payload ID: 2987
  Gene Symbol: CDT1
  Gene Name: chromatin licensing and DNA replication factor 1
  Uniprot ID: Q9H211
  ENST ID: ENST00000301019
  CDS Start-End: 620-2260
ttttgtatttttagtagagacggggtttcaccgtgttagccaggatggtctcgatctcctgacctcatgatccgcccgcctcggcctcccaaagtactgggattacaggcgtgagccaccgcgcccagccagaaatagttttaaaaaaagaaataaggagcgtgcggcccgcgggggaagcgcctttaccagctcgagcctgcagccccccaggccgcgccgtcctcggctcccccgggcagcgccggggttttgtcaggcgcgcgctgctgtttgcctggattgcgctcattctgaccctgaagccagcggccccactgacacgccctgaaaagtgggagccacacgcgggatccggagaccgcgctaaagtcccacgcacgacggcgcccgccggcgagtccacgcccgcacgtcggcgcatgcgcgcggccaagccggtgcccgcgcccaccagcgcgcatgcgcgccccgtcccttccctccccccgtgctctgccccgatggttcggtccgcgccgggggcggggccagggcgcccgcgggaaatttggcgggaaccgcgcccgcctcttcctcccttccttctttccttgctttcgccgcgcactccgccgccatggagcagcgccgcgtcaccgacttcttcgcgcgccgccgccccgggcccccccgcatcgcgccgcccaagctggcctgccgcacccccagccccgccaggcccgcactccgcgccccggcctccgctaccagtggcagccgcaagcgcgcccgcccgcccgccgcccccggacgcgaccaggccaggccaccggcccgcaggagactgcggctgtcggtggacgaggtttccagccccagtacccccgaggccccagacatcccagcctgcccttctccgggccagaagataaagaaatccaccccggcagcaggtcagccgccccacctgacatccgcgcaggaccaggacaccatctctgagcttgcgtcatgcctgcaacgggcccgggagctgggggcaagagtccgggcgctgaaggccagtgcccaggatgctggggagtcctgcaccccagaggccgagggccgccctgaggagccatgtggcgagaaggcgcccgcctaccagcgcttccatgccctggcccagcccggcctgccgggactcgtgctgccctacaagtaccaggtgctggcggagatgttccgcagcatggacaccatcgtgggcatgctccacaaccgctccgagacgcccacctttgccaaggtccagcggggcgtccaggacatgatgcgtaggcgttttgaggagtgcaatgttggccagatcaaaaccgtgtacccggcctcctaccgcttccgccaggagcgcagtgtccccaccttcaaggatggcaccaggaggtcagattaccagctcaccatcgagccactgctggagcaggaggctgacggagcagccccccagctcacggcctcgcgcctcctgcagcgacggcagatcttcagccagaagctggtggagcatgtcaaggagcaccacaaggccttcctggcctccctgagccccgccatggtggtgccggaggaccagctgacccgctggcacccgcgcttcaacgtggatgaagtacccgacatcgagccggccgcgctgccccagccacccgccacggagaagctcaccactgctcaggaggtgctggcccgggcccgcaacctgatttcacccaggatggagaaggccttgagtcaattggccctgcgctctgctgcgcccagcagccccgggtctcccaggccagcactgccggctaccccaccagccaccccgcctgcagcctctcccagtgctctgaagggggtgtcccaggatctgctggagcggatccgagccaaggaggcacagaagcagctggcacagatgacgcggtgcccggagcaggagcagcggctgcagcgcttagaacggctgcctgagctggcccgcgtgctgcggagcgtctttgtgtccgaacgcaagcctgcgctcagcatggaggtggcctgtgccaggatggtgggcagctgttgtactatcatgagccctggggaaatggagaagcacctgctgctcctctccgagctgctgccggactggctcagcctccaccgcatccgcaccgacacctacgtcaagctggacaaggccgcggacctcgcccacatcactgcacgcctggcccaccagacacgtgctgaggaggggctgtgagcctgggggccactgtggacagacgtgggcttcagaagctcgctggcctgggcccaccagcattttcttttatgaacatgatacactttggccttcctttccccagcgcccctgagggccagaggcagatgtgggctgcaggctgcacagcccgagggtctctggctgcgggcggtgggccccttcatggggctcacctggtggattcacattaaaccggtttctgtgggcacctctgtccttgctgctggtggggaagggaagccagatccagcaccccctggggggccatcgggagtgtggctgggggtgaagggggctctgtggcaatatggggttgggtagtgtgggtggcaggccatcccctctaatcttggaacctctgaatatgggacctcccacagcaaagggtgacttttgtcattaagaaagactggggtgggtgtggtggctcacgcctgtaaccccagcactttgggaggccaaggtgggcagatcacgaggtcaagagatcgagaccatcctggcgaacatggtgaaaccccatctctactaaaaatacaaaaaattagccgggtgtggtggtgggcacctgtcgtcccagctactagggaggctgaggcaggagaatggtgtgaacccaggaggcacagcttgcagtgagcgaagatcgcaccactgcacgcactccagcctgggtgacagagcgagactccgtctcaaaaaaaaaaatttcaagactggagaggtgatcctgaattgtccagctacgccccatgtcatcacagggccttcatgacagggccagagccagccagctttgaagacgcggccctgccccgacacaggcagcctggagaagctgggcaggacaagtaggacatccctggagcctccagaagggactggcctctgcccacaccttgacttcagtatttctgacctcctaaactctaataaagtcatgcttacagccacta

SEQ ID NO: 117647 - DNA, 571 bp, Homo sapiens
  Payload ID: 2987
  Gene Symbol: CDT1
  Gene Name: chromatin licensing and DNA replication factor 1
  ENST ID: ENST00000569140
  CDS Start-End: 1-571
cggcctcctaccgcttccgccaggagcgcagtgtccccaccttcaaggatggcaccaggaggtcagattaccagctcaccatcgagccactgctggagcaggaggctgacggagcagccccccagctcacggcctcgcgcctcctgcagcgacggcagatcttcagccagaagctggtggagcatgtcaaggagcaccacaaggccttcctggcctccctgagccccgccatggtggtgccggaggaccagctgacccgctggcacccgcgcttcaacgtggatgaagtacccgacatcgagccggccgcgctgccccagccacccgccacggagaagctcaccactgctcaggagatggagaaggccttgagtcaattggccctgcgctctgctgcgcccagcagccccgggtctcccaggccagcactgccggctaccccaccagccaccccgcctgcagcctctcccagtgctctgaagggggtgtcccaggatctgctggagcggatccgagccaaggaggcacagaagcagctggcacagatgacgcggtgcccggagcaggagca

SEQ ID NO: 117648 - DNA, 2250 bp, Homo sapiens
  Payload ID: 2988
  Gene Symbol: CHTOP
  Gene Name: chromatin target of PRMT1
  ENST ID: ENST00000368686
  CDS Start-End: 9-314
gggcttcgatgcagcaacaacagcagctagccagtgccagaaacagaagactggcccagcagatggagaatagaccctctgtccaggcagcattaaaacttaagcagaagagcttaaagcagcgcctgggtaagagtaacatccaggcacggttaggccgacccataggggccctggccaggggagcaatcggaggacgaggcctacccataatccagagaggcttgcccagaggaggactacgtgggggacgtgccaccagaaccctacttaggggcgggatgtcactccgaggtcagtgctgtgtaccctgataattgtcgggccctactcccttcccttttctcttgggctgcttatggacacgtttgtttaacatctttaagcctgaatttgtattaatataataacttctgaaatcacatatttttaatagtgctgcatgtcttttatcaataccattccttttctgataatgtgcaatggtgagaggctatgacctgcgtaacaacaggtaattcatgtcatctccattccattttaaaacaccctgctgttgcttgaatcaaagcacattcaagttctagaaacaagtcaaacataagaaatttataggtcttttggcctatatctctttgttcctggtgctagtaaaacactgatacagctggaaaaagaggacaagttgacccacagcacttacctatatatgttcatttggggcactattactctgttccctgtatagttcttgttccctagaagaatctgttgagatcaggaaccatagcatttatttttaaatttaccataatgctaggcatctatctgattattcagtagatatttattaaatgtatgtacttactaattgaattaactcccaacttccaaaaatggatttgtggtcagacttgttgaattgattgaataaagagtagcttaatctgttcacagtatgcagcttgccccagccaacctaaaaactaactgaattaccttcatttaaccctcaccgccttcctttggttagaatctactttgtgtctcttggatttacctgcatatacattgtatgcctcctctctaaggtcaaaacctgctccgaggtggacgagccgtagctccccgaatgggcttaagaagaggtggtgttcgaggtcgtggaggtcctgggagagggggcctagggcgtggagctatgggtcgtggcggaatcggtggtagaggttagtcagctaccaacttcagagagtagctcccccttactttcctcccttaaaaactcagagccacctttctgcacagcttcaagtcataggcaggcttctttgtttgtcttgttttgttatttgaaactggcttatttttcaaattaccatgctggtagtgcaaaagtctcatgatttttccaagaatcaatcaagtgcatattatagagccagattatatgccatcttcctccaagctcttgcaaatttaaattgtatagttgaaaataccccccaaaatggtcagtttagggttttgcctttctctgcccctgtcccaccaccatcaccaccacataccaccctgtagctccaaatcctggtttgagtcacatgagaatatagaagagagagagagatacaaagatgaagtagagttaagagggtggtgagacttggagctgggcattggctctgaaaccaaataaattcaatgtcacatttggtgcctgtggagaaccagagatgactttttttgcttaaggtagagagcaagatggaattattatcagttaactaactggctcttattgataatcttgcctttgaaatttattgatgtttgtcttgtgacctcatgacccagattgggaaagagtttaatgatgttgctgctgttaatactaaatctcatgggagccttctggtttagagcttagtggaaaactcccaacacctgtccagaaaaaaaacactattgaagcccctgtgtatatttgctttggttctcttaaaaggtgtcttgggtcttccataacttatgaccttgaagttgccaaggaataataactgttaggaaagaaaagttgataaccaagggcttgttttcttctctcccattatatgatacttactgagtgaagtgcaagctagtttgggtttcaggatgaaataacatgtttccaaattatcttgacttggatcctgagagacatcacgagggtgggagagactaaaatagcttttcaaaaagctgagt

SEQ ID NO: 117649 - DNA, 1094 bp, Homo sapiens
  Payload ID: 2988
  Gene Symbol: CHTOP
  Gene Name: chromatin target of PRMT1
  ENST ID: ENST00000368687
  CDS Start-End: 222-893
gtgctgcacttagctgcatttctaagtttctgattcttgcaagtttgtggaaacagaggagtctttaacccacatcagccttgatctaagtgtaccactttacttaaaagttcgtgggatctggagctcctggtctagcaagccatgaaaatgccaataaatgtttgtaataaagcttttatttaaacatccattttgttcgaccttgaagctttactaatatgctgaagaacaaacagccgacgccagtgaatattcgggcttcgatgcagcaacaacagcagctagccagtgccagaaacagaagactggcccagcagatggagaatagaccctctgtccaggcagcattaaaacttaagcagagcttaaagcagcgcctgggtaagagtaacatccaggcacggttaggccgacccataggggccctggccaggggagcaatcggaggacgaggcctacccataatccagagaggcttgcccagaggaggactacgtgggggacgtgccaccagaaccctacttaggggcgggatgtcactccgaggtcaaaacctgctccgaggtggacgagccgtagctccccgaatgggcttaagaagaggtggtgttcgaggtcgtggaggtcctgggagagggggcctagggcgtggagctatgggtcgtggcggaatcggtggtagaggtcggggtatgataggtcggggaagagggggctttggaggccgaggccgaggccgtggacgagggagaggtgcccttgctcgccctgtattgaccaaggagcagctggacaaccaattggatgcatatatgtcgaaaacaaaaggacacctggatgctgagttggatgcctacatggcgcagacagatcccgaaaccaatgattgaagcctgcccatcctcccatgagagactcttgttagtcaacacatctgtaaataaccttgagataacagatgagaagaaatctgattgatgctggatggacctatcacaataggctgtggacttacttgccaccagcttgtgcatttagtgtgttccttttactttttgatactgtgttgtatgaaacccttttgtcctttg

SEQ ID NO: 117650 - DNA, 2165 bp, Homo sapiens
  Payload ID: 2988
  Gene Symbol: CHTOP
  Gene Name: chromatin target of PRMT1
  Uniprot ID: Q9Y3Y2
  ENST ID: ENST00000368690
  CDS Start-End: 380-1129
tttcccgccctctagtcgtgcgcggatctgacgcctgacgtaattgcgtagacgccattttagccggtcagacaagcactggacgtggcggccattttgttttggacaccgagcaggagctggcggccgctgcagacgaaaggcaggaaagggcaggccgggtgagcagacggatcggccgactagacagccaaccagcaacaacgaactgagctcgcatactaccgcttacgcatctaaccaaccgcccatctagctaacccgagcccctccaccgtcaactcaggttcggccggtccccggcccgcctgccggagccgtggtggcagccccgggaggagcactggcgtctgtttccttcgattctcgggattcgaagatggctgcacagtcagcgccgaaagttgtgctaaaaagcaccaccaagatgtctctaaatgagcgctttactaatatgctgaagaacaaacagccgacgccagtgaatattcgggcttcgatgcagcaacaacagcagctagccagtgccagaaacagaagactggcccagcagatggagaatagaccctctgtccaggcagcattaaaacttaagcagaagagcttaaagcagcgcctgggtaagagtaacatccaggcacggttaggccgacccataggggccctggccaggggagcaatcggaggacgaggcctacccataatccagagaggcttgcccagaggaggactacgtgggggacgtgccaccagaaccctacttaggggcgggatgtcactccgaggtcaaaacctgctccgaggtggacgagccgtagctccccgaatgggcttaagaagaggtggtgttcgaggtcgtggaggtcctgggagagggggcctagggcgtggagctatgggtcgtggcggaatcggtggtagaggtcggggtatgataggtcggggaagagggggctttggaggccgaggccgaggccgtggacgagggagaggtgcccttgctcgccctgtattgaccaaggagcagctggacaaccaattggatgcatatatgtcgaaaacaaaaggacacctggatgctgagttggatgcctacatggcgcagacagatcccgaaaccaatgattgaagcctgcccatcctcccatgagagactcttgttagtcaacacatctgtaaataaccttgagataacagatgagaagaaatctgattgatgctggatggacctatcacaataggctgtggacttacttgccaccagcttgtgcatttagtgtgttccttttactttttgatactgtgttgtatgaaacccttttgtcctttgatttggttttttgtttttgtttttttaggggggagggggggtttcccctcctttgcccagacttctctttgaacacaaatgcattagccttgtggctagaacaccctcttcctacctctgtctcccctcacttgtcatatgctctgacatgctaacatttcttttgttcatccctgttgcccccacagaaacatcccagaaaaaccggtcagtgttccttcctccctgatccttaggtttctgaaatagggttctgttacatcctcttcgatagcctgtttaaaatgtttagaaggtctggagctcaaaaatgcgttcttccacattgataatttagtaaactgagaacattgacatcactacagggcagcataagaggttgcttacatgtggtagcagctctggtttgattcaagttgctaccatgtacattgacagcacatataccataaccagcgtgttgggttgaattgcactttctacctttgtatgagatttacagactttccttctgggtttgtatcatgaccagaggggtactatagggttggtttatactgcaatatagaggatcagaagccatttgatttggtaggtgtgtcagaagggagaatgatggcagacgaactgctggaagaggtcagaagatagccatgctaaaatgcaattatatcctcatgtttatcccaaactaatcttggacttttccactcattagctttgttttgcccttgtttcccttgaaggtttaagttcaaccatattctgtcaactgttcagtttcagtggaatcttgtatttctggttcattataacaaactgttcgcttaaatcc

SEQ ID NO: 117651 - DNA, 2096 bp, Homo sapiens
  Payload ID: 2988
  Gene Symbol: CHTOP
  Gene Name: chromatin target of PRMT1
  Uniprot ID: Q9Y3Y2
  ENST ID: ENST00000368694
  CDS Start-End: 313-1059
tcagacaagcactggacgtggcggccattttgttttggacaccgagcaggagctggcggccgctgcagacgaaaggcaggaaagggcaggccgggtgagcagacggatcggccgactagacagccaaccagcaacaacgaactgagctcgcatactaccgcttacgcatctaaccaaccgcccatctagctaacccgagcccctccaccgtcaactcaggttcggccggtccccggcccgcctgccggagccgtggtggcagccccgggaggagcactggcgtctgtttccttcgattctcgggattcgaagatggctgcacagtcagcgccgaaagttgtgctaaaaagcaccaccaagatgtctctaaatgagcgctttactaatatgctgaagaacaaacagccgacgccagtgaatattcgggcttcgatgcagcaacaacagcagctagccagtgccagaaacagaagactggcccagcagatggagaatagaccctctgtccaggcagcattaaaacttaagcagagcttaaagcagcgcctgggtaagagtaacatccaggcacggttaggccgacccataggggccctggccaggggagcaatcggaggacgaggcctacccataatccagagaggcttgcccagaggaggactacgtgggggacgtgccaccagaaccctacttaggggcgggatgtcactccgaggtcaaaacctgctccgaggtggacgagccgtagctccccgaatgggcttaagaagaggtggtgttcgaggtcgtggaggtcctgggagagggggcctagggcgtggagctatgggtcgtggcggaatcggtggtagaggtcggggtatgataggtcggggaagagggggctttggaggccgaggccgaggccgtggacgagggagaggtgcccttgctcgccctgtattgaccaaggagcagctggacaaccaattggatgcatatatgtcgaaaacaaaaggacacctggatgctgagttggatgcctacatggcgcagacagatcccgaaaccaatgattgaagcctgcccatcctcccatgagagactcttgttagtcaacacatctgtaaataaccttgagataacagatgagaagaaatctgattgatgctggatggacctatcacaataggctgtggacttacttgccaccagcttgtgcatttagtgtgttccttttactttttgatactgtgttgtatgaaacccttttgtcctttgatttggttttttgtttttgtttttttaggggggagggggggtttcccctcctttgcccagacttctctttgaacacaaatgcattagccttgtggctagaacaccctcttcctacctctgtctcccctcacttgtcatatgctctgacatgctaacatttcttttgttcatccctgttgcccccacagaaacatcccagaaaaaccggtcagtgttccttcctccctgatccttaggtttctgaaatagggttctgttacatcctcttcgatagcctgtttaaaatgtttagaaggtctggagctcaaaaatgcgttcttccacattgataatttagtaaactgagaacattgacatcactacagggcagcataagaggttgcttacatgtggtagcagctctggtttgattcaagttgctaccatgtacattgacagcacatataccataaccagcgtgttgggttgaattgcactttctacctttgtatgagatttacagactttccttctgggtttgtatcatgaccagaggggtactatagggttggtttatactgcaatatagaggatcagaagccatttgatttggtaggtgtgtcagaagggagaatgatggcagacgaactgctggaagaggtcagaagatagccatgctaaaatgcaattatatcctcatgtttatcccaaactaatcttggacttttccactcattagctttgttttgcccttgtttcccttgaaggtttaagttcaaccatattctgtcaactgttcagtttcagtggaatcttgtatttctggttcattataacaaactgttcgcttaaatcca

SEQ ID NO: 117652 - DNA, 1923 bp, Homo sapiens
  Payload ID: 2988
  Gene Symbol: CHTOP
  Gene Name: chromatin target of PRMT1
  Uniprot ID: Q9Y3Y2
  ENST ID: ENST00000403433
  CDS Start-End: 282-890
gttttggacaccgagcaggagctggcggccgctgcagacgaaaggcaggaaagggcaggccgggtgagcagacggatcggccgactagacagccaaccagcaacaacgaactgagctcgcatactaccgcttacgcatctaaccaaccgcccatctagctaacccgagcccctccaccgtcaactcaggttcggccggtccccggcccgcctgccggagccgtggtggcagccccgggaggagcactggcgtctgtttccttcgattctcgggattcgaagatggctgcacagtcagcgccgaaagttgtgctaaaaagcaccaccaagatgtctctaaatgagcgctttactaatatgctgaagaacaaacagccgacgccagtgaatattcgggcttcgatgcagcaacaacagcagctagccagtgccagaaacagaagactggcccagcagatggagaatagaccctctgtccaggcagcattaaaacttaagcagagcttaaagcagcgcctgggtaagagtaacatccaggcacggttaggccgacccataggggccctggccaggggagcaatcggaggacgaggcctacccataatccagagaggcttgcccagaggaggactacgtgggggacgtgccaccagaaccctacttaggggcgggatgtcactccgaggtcggggtatgataggtcggggaagagggggctttggaggccgaggccgaggccgtggacgagggagaggtgcccttgctcgccctgtattgaccaaggagcagctggacaaccaattggatgcatatatgtcgaaaacaaaaggacacctggatgctgagttggatgcctacatggcgcagacagatcccgaaaccaatgattgaagcctgcccatcctcccatgagagactcttgttagtcaacacatctgtaaataaccttgagataacagatgagaagaaatctgattgatgctggatggacctatcacaataggctgtggacttacttgccaccagcttgtgcatttagtgtgttccttttactttttgatactgtgttgtatgaaacccttttgtcctttgatttggttttttgtttttgtttttttaggggggagggggggtttcccctcctttgcccagacttctctttgaacacaaatgcattagccttgtggctagaacaccctcttcctacctctgtctcccctcacttgtcatatgctctgacatgctaacatttcttttgttcatccctgttgcccccacagaaacatcccagaaaaaccggtcagtgttccttcctccctgatccttaggtttctgaaatagggttctgttacatcctcttcgatagcctgtttaaaatgtttagaaggtctggagctcaaaaatgcgttcttccacattgataatttagtaaactgagaacattgacatcactacagggcagcataagaggttgcttacatgtggtagcagctctggtttgattcaagttgctaccatgtacattgacagcacatataccataaccagcgtgttgggttgaattgcactttctacctttgtatgagatttacagactttccttctgggtttgtatcatgaccagaggggtactatagggttggtttatactgcaatatagaggatcagaagccatttgatttggtaggtgtgtcagaagggagaatgatggcagacgaactgctggaagaggtcagaagatagccatgctaaaatgcaattatatcctcatgtttatcccaaactaatcttggacttttccactcattagctttgttttgcccttgtttcccttgaaggtttaagttcaaccatattctgtcaactgttcagtttcagtggaatcttgtatttctggttcattataacaaactgttcgcttaaa

SEQ ID NO: 117653 - DNA, 1840 bp, Homo sapiens
  Payload ID: 2988
  Gene Symbol: CHTOP
  Gene Name: chromatin target of PRMT1
  ENST ID: ENST00000614256
  CDS Start-End: 380-610
tttcccgccctctagtcgtgcgcggatctgacgcctgacgtaattgcgtagacgccattttagccggtcagacaagcactggacgtggcggccattttgttttggacaccgagcaggagctggcggccgctgcagacgaaaggcaggaaagggcaggccgggtgagcagacggatcggccgactagacagccaaccagcaacaacgaactgagctcgcatactaccgcttacgcatctaaccaaccgcccatctagctaacccgagcccctccaccgtcaactcaggttcggccggtccccggcccgcctgccggagccgtggtggcagccccgggaggagcactggcgtctgtttccttcgattctcgggattcgaagatggctgcacagtcagcgccgaaagttgtgctaaaaagcaccaccaagatgtctctaaatgagcgctttactaatatgctgaagaacaaacagccgacgccagtgaatattcgggcttcgatgcagcaacaacagcagctagccagtgccagaaacagaagactggcccagcagatggagaatagaccctctgtccaggcagcattaaaacttaagcaggtcggggtatgataggtcggggaagagggggctttggaggccgaggccgaggccgtggacgagggagaggtgcccttgctcgccctgtattgaccaaggagcagctggacaaccaattggatgcatatatgtcgaaaacaaaaggacacctggatgctgagttggatgcctacatggcgcagacagatcccgaaaccaatgattgaagcctgcccatcctcccatgagagactcttgttagtcaacacatctgtaaataaccttgagataacagatgagaagaaatctgattgatgctggatggacctatcacaataggctgtggacttacttgccaccagcttgtgcatttagtgtgttccttttactttttgatactgtgttgtatgaaacccttttgtcctttgatttggttttttgtttttgtttttttaggggggagggggggtttcccctcctttgcccagacttctctttgaacacaaatgcattagccttgtggctagaacaccctcttcctacctctgtctcccctcacttgtcatatgctctgacatgctaacatttcttttgttcatccctgttgcccccacagaaacatcccagaaaaaccggtcagtgttccttcctccctgatccttaggtttctgaaatagggttctgttacatcctcttcgatagcctgtttaaaatgtttagaaggtctggagctcaaaaatgcgttcttccacattgataatttagtaaactgagaacattgacatcactacagggcagcataagaggttgcttacatgtggtagcagctctggtttgattcaagttgctaccatgtacattgacagcacatataccataaccagcgtgttgggttgaattgcactttctacctttgtatgagatttacagactttccttctgggtttgtatcatgaccagaggggtactatagggttggtttatactgcaatatagaggatcagaagccatttgatttggtaggtgtgtcagaagggagaatgatggcagacgaactgctggaagaggtcagaagatagccatgctaaaatgcaattatatcctcatgtttatcccaaactaatcttggacttttccactcattagctttgttttgcccttgtttcccttgaaggtttaagttcaaccatattctgtcaactgttcagtttcagtggaatcttgtatttctggttcattataacaaactgttcgcttaaatcc

SEQ ID NO: 117654 - DNA, 2232 bp, Homo sapiens
  Payload ID: 2989
  Gene Symbol: CBX1
  Gene Name: chromobox homolog 1
  Uniprot ID: P83916
  ENST ID: ENST00000225603
  CDS Start-End: 292-849
gaggcccatggtgccgtgcggcgggtcgttgcgcctgcgcggtgcgagcggcgggcagcgcagactgcgaggctcttttgttcggctgaggggagggccgttggccggggcctgcggtacgccgcttcagtgagggacgccactgcggccacccggcttgctgccttcctgggcgccactcccccaggcgacccgacgcgacgcgccagcagcgcagcaccgattcctctcgggctcttgggcgctgctctgagcagcgtcaccctttacaccagaaagctggcgggcactatggggaaaaaacaaaacaagaagaaagtggaggaggtgctagaagaggaggaagaggaatatgtggtggaaaaagttctcgaccgtcgagtggtaaagggcaaagtggagtacctcctaaagtggaagggattctcagatgaggacaacacatgggagccagaagagaacctggattgccccgacctcattgctgagtttctgcagtcacagaaaacagcacatgagacagataaatcagagggaggcaagcgcaaagctgattctgattctgaagataagggagaggagagcaaaccaaagaagaagaaagaagagtcagaaaagccacgaggctttgctcgaggtttggagccggagcggattattggagctacagactccagtggagagctcatgttcctgatgaaatggaaaaactctgatgaggctgacctggtccctgccaaggaagccaatgtcaagtgcccacaggttgtcatatccttctatgaggaaaggctgacgtggcattcctacccctcggaggatgatgacaaaaaagatgacaagaactaacgctcctgagtaccagcccctgtcacatctgactgtgggtttcaagtgggaagggaaggagttctacttgtcttgacaccatagaggtggcttgagaagatgtcctttgaagagccagtatagtttctgtgccctgcagcagcccaagtgctttaaagccgtttcaagctgtatagtttgcacacccatcccagtggaggggaaaggggataagtgtttcaaggcaaccttttctgcactttgctgcgaaaagcaaagggccttctatgaaggacaaaacttgcagaattgggtgtgtgggagagcaaaaaaatactgtagatcttcaaagagcatctccacaacccacagccttcttcccaatagtgttaactctgcatttttacagcgtagcatgtgtgtagtttttggctattactggtgtattatttgggggagggagggatggggaggggagaaagggagatgggtagcatcattttgattaacatttggggcctgataggggaaatggtgaagcaatggaaaagaacagacaactaatgatttgcttctatgtccagaatattttacctttaaaaaaatgtcattggcaccataaataaggactgtgagagactgtttaaaagctgtgaaagtctgaaacctataagccaaggtgttccctgcctaaacttattgctgttcccacaaaggactaagcctgttcataagttaccaaagttgccattttggagatggaaattgacgaggagggaaggtcttttattggagagtatacagtacaagcagatcattctgccttagaggtgctaattcccgaaattagaagaccctttcttttccagtaacgaagttataaatatcagcttgttcatccaagccactggctgaggtgttaggaagaggaagagggtggtagaggaggtaagacagtagggaaagacaagggcccatgctcttagtggggaaaactcttggagccgtttactttgagctttgaacactgaaaccattgttggcagggttcagtcactgacagcacaagtttcactgaattgatccaagagtttagtgatttcaaaagccttggtctcaggagaagattaaactttcatattgggcagtggttcactttaaaacacacacatacacacacaaaacaattttttaagaaatcctaataagtaacatacccaaaatgctctgtcttgagtcatgagaaccatcagttcttgatattgtctagacttgcatctagagctacgttgtaaaattcttttaggcatgtgttagatttctgtgtaaactttgtttaaatgtaaacttcatactacattgtcagtttttgtcttaataaaactatagatttataatccctga

SEQ ID NO: 117655 - DNA, 2422 bp, Homo sapiens
  Payload ID: 2989
  Gene Symbol: CBX1
  Gene Name: chromobox homolog 1
  Uniprot ID: P83916
  ENST ID: ENST00000393408
  CDS Start-End: 482-1039
gtgagggaacgcgctttcgaggcggaggttaggagcggggagcgcgcccgggtccagcgtcctgcttctccgcttcccgcgctgagctcttcgcctgtcgctgaggcgtcggtgccagctgcgtgaaggatggagagggcggggcgcgaatcctgagccagagactgagtgcttgggggtgggccgagcacttgggggccgctcttcggggcccgggtggtctggaacaatgttgcttggctgggcggctgcgggatagggcggaaggggacaggcttgaggcttggataggcgtgaggaggcgcatacgaccgcacaacccgaggtttgtaactgtattcggaagacgccgggtccggctgggactgccagaggaacctggctttgcaggactacggaggagtaacgtcgagtgaattggaagagggcccagggccgcacaagcagcgtcaccctttacaccagaaagctggcgggcactatggggaaaaaacaaaacaagaagaaagtggaggaggtgctagaagaggaggaagaggaatatgtggtggaaaaagttctcgaccgtcgagtggtaaagggcaaagtggagtacctcctaaagtggaagggattctcagatgaggacaacacatgggagccagaagagaacctggattgccccgacctcattgctgagtttctgcagtcacagaaaacagcacatgagacagataaatcagagggaggcaagcgcaaagctgattctgattctgaagataagggagaggagagcaaaccaaagaagaagaaagaagagtcagaaaagccacgaggctttgctcgaggtttggagccggagcggattattggagctacagactccagtggagagctcatgttcctgatgaaatggaaaaactctgatgaggctgacctggtccctgccaaggaagccaatgtcaagtgcccacaggttgtcatatccttctatgaggaaaggctgacgtggcattcctacccctcggaggatgatgacaaaaaagatgacaagaactaacgctcctgagtaccagcccctgtcacatctgactgtgggtttcaagtgggaagggaaggagttctacttgtcttgacaccatagaggtggcttgagaagatgtcctttgaagagccagtatagtttctgtgccctgcagcagcccaagtgctttaaagccgtttcaagctgtatagtttgcacacccatcccagtggaggggaaaggggataagtgtttcaaggcaaccttttctgcactttgctgcgaaaagcaaagggccttctatgaaggacaaaacttgcagaattgggtgtgtgggagagcaaaaaaatactgtagatcttcaaagagcatctccacaacccacagccttcttcccaatagtgttaactctgcatttttacagcgtagcatgtgtgtagtttttggctattactggtgtattatttgggggagggagggatggggaggggagaaagggagatgggtagcatcattttgattaacatttggggcctgataggggaaatggtgaagcaatggaaaagaacagacaactaatgatttgcttctatgtccagaatattttacctttaaaaaaatgtcattggcaccataaataaggactgtgagagactgtttaaaagctgtgaaagtctgaaacctataagccaaggtgttccctgcctaaacttattgctgttcccacaaaggactaagcctgttcataagttaccaaagttgccattttggagatggaaattgacgaggagggaaggtcttttattggagagtatacagtacaagcagatcattctgccttagaggtgctaattcccgaaattagaagaccctttcttttccagtaacgaagttataaatatcagcttgttcatccaagccactggctgaggtgttaggaagaggaagagggtggtagaggaggtaagacagtagggaaagacaagggcccatgctcttagtggggaaaactcttggagccgtttactttgagctttgaacactgaaaccattgttggcagggttcagtcactgacagcacaagtttcactgaattgatccaagagtttagtgatttcaaaagccttggtctcaggagaagattaaactttcatattgggcagtggttcactttaaaacacacacatacacacacaaaacaattttttaagaaatcctaataagtaacatacccaaaatgctctgtcttgagtcatgagaaccatcagttcttgatattgtctagacttgcatctagagctacgttgtaaaattcttttaggcatgtgttagatttctgtgtaaactttgtttaaatgtaaacttcatactacattgtcagtttttgtcttaataaaactatagatttataatccctga

SEQ ID NO: 117656 - DNA, 578 bp, Homo sapiens
  Payload ID: 2989
  Gene Symbol: CBX1
  Gene Name: chromobox homolog 1
  ENST ID: ENST00000402583
  CDS Start-End: 73-578
ccgattcctctcgggctcttgggcgctgctctgagcagcgtcaccctttacaccagaaagctggcgggcactatggggaaaaaacaaaacaagaagaaagtggaggaggtgctagaagaggaggaagaggaatatgtggtggaaaaagttctcgaccgtcgagtggtaaagggcaaagtggagtacctcctaaagtggaagggattctcagatgaggacaacacatgggagccagaagagaacctggattgccccgacctcattgctgagtttctgcagtcacagaaaacagcacatgagacagataaatcagagggaggcaagcgcaaagctgattctgattctgaagataagggagaggagagcaaaccaaagaagaagaaagaagaggtaagaatagaatcagaaaagccacgaggctttgctcgaggtttggagccggagcggattattggagctacagactccagtggagagctcatgttcctgatgaaatggaaaaactctgatgaggctgacctggtccctgccaaggaagccaatgtcaagtgcccacaggttgtcatatccttctatga

SEQ ID NO: 117657 - DNA, 544 bp, Homo sapiens
  Payload ID: 2989
  Gene Symbol: CBX1
  Gene Name: chromobox homolog 1
  ENST ID: ENST00000444685
  CDS Start-End: 215-544
gccgcccttgcatcctgatgggtccttacagtggggaggctgtaagaataattcaagttttccatctggaaagcatttgcttcgcaaacagccacagcttacagactacaagcagtttagaaacaagactaccacctgaatatactacacatgccttcacctgccttttgatgattgcagcgtcaccctttacaccagaaagctggcgggcactatggggaaaaaacaaaacaagaagaaagtggaggaggtgctagaagaggaggaagaggaatatgtggtggaaaaagttctcgaccgtcgagtggtaaagggcaaagtggagtacctcctaaagtggaagggattctcagatgaggacaacacatgggagccagaagagaacctggattgccccgacctcattgctgagtttctgcagtcacagaaaacagcacatgagacagataaatcagagggaggcaagcgcaaagctgattctgattctgaagataagggagaggagagcaaaccaaagaagaagaaagaagagtcagaaaagcca

SEQ ID NO: 117658 - DNA, 812 bp, Homo sapiens
  Payload ID: 2989
  Gene Symbol: CBX1
  Gene Name: chromobox homolog 1
  ENST ID: ENST00000581003
  CDS Start-End: 292-812
ctgcggccacccggcttgctgccttcctgggcgccactcccccaggcgacccgacgcgacgcgccagcagcgcagcaccgattcctctcgggctcttgggcgctgctctgagacggaggctcacactgtctcccaggctggagtgcagtggcgcgatcttggcacactgtaacctccacctcccaggttgtagcaattcttctgcctctgcctcccaagtagctaggattacaggcgcctgccaccacgcccagcagcgtcaccctttacaccagaaagctggcgggcactatggggaaaaaacaaaacaagaagaaagtggaggaggtgctagaagaggaggaagaggaatatgtggtggaaaaagttctcgaccgtcgagtggtaaagggcaaagtggagtacctcctaaagtggaagggattctcagatgaggacaacacatgggagccagaagagaacctggattgccccgacctcattgctgagtttctgcagtcacagaaaacagcacatgagacagataaatcagagggaggcaagcgcaaagctgattctgattctgaagataagggagaggagagcaaaccaaagaagaagaaagaagagtcagaaaagccacgaggctttgctcgaggtttggagccggagcggattattggagctacagactccagtggagagctcatgttcctgatgaaatggaaaaactctgatgaggctgacctggtccctgccaaggaagccaatgtcaagtgcccacaggttgtcatatccttctatgaggaaaggctgacgtggcattcctaccc

SEQ ID NO: 117659 - DNA, 550 bp, Homo sapiens
  Payload ID: 2989
  Gene Symbol: CBX1
  Gene Name: chromobox homolog 1
  ENST ID: ENST00000495350
  CDS Start-End: 58-474
ctcttgggcgctgctctgagcagcgtcaccctttacaccagaaagctggcgggcactatggggaaaaaacaaaacaagaagaaagtggaggaggtgctagaagaggaggaagaggaatatgtggtggaaaaagttctcgaccgtcgagtggtaaagggcaaagtggagtacctcctaaagtggaagggattctcagatgaggacaacacatgggagccagaagagaacctggattgccccgacctcattgctgagtttctgcagtcacagaaaacagcacatgagacagataaatcagagggaggcaagcgcaaagctgattctgattctgaagataagggagaggagagcaaaccaaagaagaagaaagaagagtcagaaaagccacgaggctttgctcgaggtttggagccggagcggattattggagctacagactccagtggagagctcatgttcctgatgaaatggtgagtcggccagtggctctgtgtggttgttttttttcttctcccattggtttcatgccagaggaaaagagctggacctt

SEQ ID NO: 117660 - DNA, 1061 bp, Homo sapiens
  Payload ID: 2990
  Gene Symbol: CBX2
  Gene Name: chromobox homolog 2
  Uniprot ID: Q14781
  ENST ID: ENST00000269399
  CDS Start-End: 43-678
gactggcggcgggcgccgcggtcgggctggctgccgggcagcatggaggagctgagcagcgtgggcgagcaggtcttcgccgccgagtgcatcctgagcaagcggctccgcaagggcaagctggagtacctggtcaagtggcgcggctggtcctccaaacataacagctgggagccggaggagaacatcctggacccgaggctgctcctggccttccagaagaaggaacatgagaaggaggtgcagaaccggaagagaggcaagaggccgagaggccggccaaggaagctcactgccatgtcctcctgcagccggcgctccaagctcaaggtgggtggctgcgctgggtatgctgaccccacctcccagcacccccttggcgtagggggcaggcagagggagggtttggggccctcaggaagggggtggcacttctgccaacagtctgtccctctactcggaaaacaggagccccctttcttcctgtctctcagcttctgctgccaggggccccagccggctgagagttcctccccgcccctcccaggggcttcctgcttcagcctgtcctgcacgcctctctgctgggtggcagggtcaaactgctgcagacaagcactcttccctcccagggggtccttgggggacggaaaggaacaggaagcatgcgtacagtaggtgctcataggattgccggctggatgtgactcaaaagcctaagatttgggggctactccgggcccacctgcgggtgcaccttaaatcgaggtggccacgaaaggcagggctgactgaatagccagggggtgccaggaggggccttggaggagggcagaggcagtgtgggctgatgatgtgctttggccttctcgggactgtcctgtcacccctcctcgctacagtgatgggctcaccccgccacaggtatgcatgcgcccctggggtccgtggtagggcccctccctcccctgaggacaggtgaggcaggacaggatgggggaggagggcctggcctcagtcccgggtgtggctttgattccctcctccgggcactgtccctg

SEQ ID NO: 117661 - DNA, 4644 bp, Homo sapiens
  Payload ID: 2990
  Gene Symbol: CBX2
  Gene Name: chromobox homolog 2
  Uniprot ID: Q14781
  ENST ID: ENST00000310942
  CDS Start-End: 105-1703
ggcgccgggcgggggcggtgctttgtgtgctgccggcggggcgcgcggcggtccgggcgggtgactggcggcgggcgccgcggtcgggctggctgccgggcagcatggaggagctgagcagcgtgggcgagcaggtcttcgccgccgagtgcatcctgagcaagcggctccgcaagggcaagctggagtacctggtcaagtggcgcggctggtcctccaaacataacagctgggagccggaggagaacatcctggacccgaggctgctcctggccttccagaagaaggaacatgagaaggaggtgcagaaccggaagagaggcaagaggccgagaggccggccaaggaagctcactgccatgtcctcctgcagccggcgctccaagctcaaggaacccgatgctccctccaaatccaagtccagcagttcctcctcttcctccacgtcatcctcctcttcctcagatgaagaggatgacagtgacttagatgctaagaggggtccccggggccgcgagacccacccagtgccgcagaagaaggcccagatcctggtggccaaacccgagctgaaggatcccatccggaagaagcggggacgaaagcccctgcccccagagcaaaaggcaacccgaagacccgtgagcctggccaaggtgctgaagaccgcccggaaggatctgggggccccggccagcaagctgccccctccactcagcgcccccgttgcaggcctggcagctctgaaggcccacgccaaggaggcctgtggcggccccagtgccatggccaccccagagaacctggccagcctaatgaagggcatggccagtagccccggccggggtggcatcagctggcagagctccatcgtgcactacatgaaccggatgacccagagccaggcccaggctgccagcaggttggcgctgaaggcccaggccaccaacaagtgcggcctcgggctggacctgaaggtgaggacgcagaaaggggagctgggaatgagccctccaggaagcaaaatcccgaaggcccccagcggtggggctgtggagcagaaagtggggaacacagggggccccccgcacacccatggtgccagcagggtgcctgctgggtgcccaggcccccagccagcacccacccaggagctgagcctccaggtcttggacttgcagagtgtcaagaatggcatgcccggggtgggtctccttgcccgccacgccaccgccaccaagggtgtcccggccaccaacccagcccctgggaagggcactgggagtggcctcattggggccagcggggccaccatgcccaccgacacaagcaaaagtgagaagctggcttccagagcagtggcgccacccacccctgccagcaagagggactgtgtcaagggcagtgctacccccagtgggcaggagagccgcacagcccccggagaagcccgcaaggcggccacactgccagagatgagcgcaggtgaggagagtagcagctcggactccgaccccgactccgcctcgccgcccagcactggacagaacccgtcagtgtccgttcagaccagccaggactggaagcccacccgcagcctcatcgagcacgtatttgtcaccgacgtcactgccaacctcatcaccgtcacagtgaaggagtctcccaccagcgtgggcttcttcaacctgaggcattactgaagccccggcgccaccagctgcgcggtcttactccccttccctgcctatggtgtcgcttggctaagtgactcccagcccaagccccctcaagagtctgggtcgggggaggaggagtgggtggcctccttgatgggcaggcttggaagggacttctcccgcaccccactctgtcccaggacatagggcagggggcctcactgccttgttggtctccaccttgttcctacctctgcaggcctctttgctctcccctcttgcctcaggaaacccggtggcacctgtggctccaggtgactgtcttgaacagagcgggcttcttcatggctgcgttgttgctgagtttgaactgctcctccctggcctgcgtgactgaatcacagctttggtccctgtcttgcaggggctgaggtgtcaggaggggacttctggcccaccttgccttcagccctggagtgggcagagagtattgtggggaggcatggccagtgggactagtgttccctccatctggccacagcttttgggagatggggtgggcaggggtggtcctggctggcattgcctgagccggcagtgatgaagtggggagcttgcccttgacaggtgggggctggctggggccttaatgtgaaaagacagtggcaggcagctggagtagagcgagcccagcagccctaaaaggctgccttcatggccatctagccccagttcagggcagcatccatagcccacaagccagcgtgggtggggcgggggtggtcccacagctgggttccacctgaagagcctccgtgcctcggagcaggagaggcaggctatggctgccaccctccctcctgcctgtgtcccagtgagaactgacctgagtccccttccaaacccagacccacctcctgccccaggcccactgaagcatgttccatttctaaaaagcccagagttcagtgtgtcccaaggaaaacccaaagtggaggtgctcaggtccaggggagtccagtgggcaggacccttggcaggcaagcccctcccttcactcccaggacctaccttctgctagtaaaggactggcttcattctaattatggcccacagactgccccggagacctggaggacagcagtgctggcacttgggtgtccatgggcccgtctgccggctctgcctgtgctgcaagtgttggccgtgggtccagccaacaactccctacgtcctgtgtggggccctgcccaagtggatgaggcattccttgaggagtatcattttccctgacaatccccatcacctttaggggttccctgcttggctcctttccagctgaaaaactagacctgtgccattggggaagctggacaaagtctagggggcccgcctggtagagggtcccgggaagctggatctgtcagcctcggccctgaggcccctgttaactcaagactgtgagctgcctctaggtggtcacgtctgggagctagcttgtatggcttctgaccagtatcaggatttctgttctgagagcagcgtgggcagcaaggcagggcagcccagaggtggcagcggcaggcaatctggtcactaggtctttgtgatgccaaaaataaaagagggtggggtgggtgctttctgttcctctgattggatggagtccgccagcaggcatggggctacattccagtgcctgactatagggaggcactcctgattccatggagcagcccggactttgagaatgggctctggtttgcggggggcaggcgtaccagactgcaagaccccccagtacctcaccgtgccaaataggaagaggtggccttggtgtagccaaatggatctttttaacagtgtgcctttggggagggacccatgtccatggcttcgttgagggccatccatatgccagctgggggccagcccacagtggccatattggctgcagcaggaatggtgcccacctcggcgaattgaagggctaagagtcccagatagctaggccagagctggaagcagacagtaaggggaagagctgctcccacaggagagggagagattccagctcactgcgcagcctgggaggaggcgtggatcctggcacgctgagcctcaggcaccagcctccctgtgctcgacagcaaagtcttgactccttcctgctgagcactgtgctaccttcactgctccaaagccagactaacagctctccaagcccttggggtgactcggcttccaggagctgttggagaaatgaggatgtctgtccctgtctgcctgggcaggccagattcctccccagcagccgggtctctccagaccctgattcggtgcctttctgtttaccagctacttcaatcccaaagtttgaatctgcagataccttactcccagccactttgccttcttactgtgttgtgtgtttttcctggtgcttcaagagcgtgtgcagggcaagtgccgtcactgggaactgcaccagatgctcagacttggttgtcttatgtttaccaataaataaaagtagactttttctatttttatttgctgctatttgtgtgtgtgtttgtgtttgtgtagctaggtatctggcacttctgacgatgcattgttgcttttttcccgaaggtcccgcaggaactgtggcaatggtgtgtgtgtgaaatggtgtgttaaccgcgttttgtttgctcctgtattgaataggaagcagtggccagtctgtcttccttagagatgttagcatatttttatatgtatatattttgtaccaaaaaagagtgttccttgttttggttacactcgaaattctgacctagctggagagggctctgggccgagagctttcactaaggggagacttcaggggaggatcaagctttgaaccaaagccaatcactggcttgatttgtgttttttaattaaaaaaaaaatcattcatgtatgccacttctaa

SEQ ID NO: 117662 - DNA, 2128 bp, Homo sapiens
  Payload ID: 2991
  Gene Symbol: CBX3
  Gene Name: chromobox homolog 3
  Uniprot ID: Q13185
  ENST ID: ENST00000337620
  CDS Start-End: 429-980
agccttccctttttgttttccgtgccccaactcggcggattgactcggccccttccggaaacacccgaatcaacttctagtcaaattattgttcacgccgcaatgacccacccctggcccgcgtctgtggaactgacccctggtgtacaggagagttcgctgctgaaagtggtcccaaaggggtactagtttttaagctcccaactccccctcccccagcgtctggaggattccacaccctcgcaccgcaggggcgaggaagtgggcggagtccggttttggcgccagccgctgaggctgccaagcagaaaagccaccgctgaggagactccggtcactgtcctcgccccgcctcccccttccctccccttggggaccaccgggcgccacgccgcgaacgtaatagctcttcaagtctgcaataaaaaatggcctccaacaaaactacattgcaaaaaatgggaaaaaaacagaatggaaagagtaaaaaagttgaagaggcagagcctgaagaatttgtcgtggaaaaagtactagatcgacgtgtagtgaatgggaaagtggaatatttcctgaagtggaagggatttacagatgctgacaatacttgggaacctgaagaaaatttagattgtccagaattgattgaagcgtttcttaactctcagaaagctggcaaagaaaaagatggtacaaaaagaaaatctttatctgacagtgaatctgatgacagcaaatcaaagaagaaaagagatgctgctgacaaaccaagaggatttgccagaggtcttgatcctgaaagaataattggtgccacagacagcagtggagaattgatgtttctcatgaaatggaaagattcagatgaggcagacttggtgctggcgaaagaggcaaatatgaagtgtcctcaaattgtaattgctttttatgaagagagactaacttggcattcttgtccagaagatgaagctcaataattgttcacattgttcttttatatatatttatatatatatataaaaattgggtcttagattttgatttactagtgtgacaaaataactacatcctaatgaaaatcaagtttgatatgtttgttttgaaagtagcgttggaagagttgttgggggttttttgcatccatagcactggttactttgaacaaataaataaaagctttctgtagttgcttcctttatcagaaaagaacatttgataccatggtatatcatttcctcttcattaaagaacagcttttctaaatgttgggggaaatgtccatagtcattactcagtcaaaacttgtgttctcatgagcctaaggaccattctagatttattacgtgttttttgtgtgtgtgtgtgtgtgtgtgtgtgtgtgtatccataaaatgcatatgtaaatttttttttgtttttaagcattcacccaaacaaaaaaatcacaggtaaacccatgtttctgagatgccattattccaagcaaaataagagataatcccttcaagttaaattgaaaattttcctgaaaccatacatttcaagtgaaataagtaattctagataggacaatttaaattggataattttaaagtgtctataattgcagtggtttatttgcaaaattcctaaaaggaaaaattttatcactgccatcacagcaggtttcctcatccagatgaggaaactagacaaatgctagtgtgttttaactagctaaacaaaactaagttaaatgaacatttaaaagtttccctagcgggccattccttagcaaaatgttggaatccctgttgctacattgactaaaaggtcatgatgaatggaatatgtaagacttggctcatagaaacctaatcagatggttagaggtgttggcagtttaggacctgctgtcataaatgtgtgaacaaccttttgtaacctaacctattgacctgcatgttttttctttaccccaattcattacatggaggctcaatcttgagtttgctttactggttcagcaaaagccaggaagaacaactttgtagtaatcaaaatgttatccaactgtatattgtttactttattgtaaatactggtgaacagtggttaataaatagttttatattcctttatgcaa

SEQ ID NO: 117663 - DNA, 1857 bp, Homo sapiens
  Payload ID: 2991
  Gene Symbol: CBX3
  Gene Name: chromobox homolog 3
  Uniprot ID: Q13185
  ENST ID: ENST00000396386
  CDS Start-End: 163-714
ggtgccacccctccccccggcggccccgcgcgcagctcccggctccctcccccttcggatgtggcttgagctgtaggcgcggagggccggagacgctgcagacccgcgacccggagcagctcggaggcggtgaataatagctcttcaagtctgcaataaaaaatggcctccaacaaaactacattgcaaaaaatgggaaaaaaacagaatggaaagagtaaaaaagttgaagaggcagagcctgaagaatttgtcgtggaaaaagtactagatcgacgtgtagtgaatgggaaagtggaatatttcctgaagtggaagggatttacagatgctgacaatacttgggaacctgaagaaaatttagattgtccagaattgattgaagcgtttcttaactctcagaaagctggcaaagaaaaagatggtacaaaaagaaaatctttatctgacagtgaatctgatgacagcaaatcaaagaagaaaagagatgctgctgacaaaccaagaggatttgccagaggtcttgatcctgaaagaataattggtgccacagacagcagtggagaattgatgtttctcatgaaatggaaagattcagatgaggcagacttggtgctggcgaaagaggcaaatatgaagtgtcctcaaattgtaattgctttttatgaagagagactaacttggcattcttgtccagaagatgaagctcaataattgttcacattgttcttttatatatatttatatatatatataaaaattgggtcttagattttgatttactagtgtgacaaaataactacatcctaatgaaaatcaagtttgatatgtttgttttgaaagtagcgttggaagagttgttgggggttttttgcatccatagcactggttactttgaacaaataaataaaagctttctgtagttgcttcctttatcagaaaagaacatttgataccatggtatatcatttcctcttcattaaagaacagcttttctaaatgttgggggaaatgtccatagtcattactcagtcaaaacttgtgttctcatgagcctaaggaccattctagatttattacgtgttttttgtgtgtgtgtgtgtgtgtgtgtgtgtgtgtatccataaaatgcatatgtaaatttttttttgtttttaagcattcacccaaacaaaaaaatcacaggtaaacccatgtttctgagatgccattattccaagcaaaataagagataatcccttcaagttaaattgaaaattttcctgaaaccatacatttcaagtgaaataagtaattctagataggacaatttaaattggataattttaaagtgtctataattgcagtggtttatttgcaaaattcctaaaaggaaaaattttatcactgccatcacagcaggtttcctcatccagatgaggaaactagacaaatgctagtgtgttttaactagctaaacaaaactaagttaaatgaacatttaaaagtttccctagcgggccattccttagcaaaatgttggaatccctgttgctacattgactaaaaggtcatgatgaatggaatatgtaagacttggctcatagaaacctaatcagatggttagaggtgttggcagtttaggacctgctgtcataaatgtgtgaacaaccttttgtaacctaacctattgacctgcatgttttttctttaccccaattcattacatggaggctcaatcttgagtttgctttactggttcagcaaaagccaggaagaacaactttgtagtaatcaaaatgttatccaactgtatattgtttactttattgtaaatactggtgaacagtggttaataaatagttttatattccttta

SEQ ID NO: 117664 - DNA, 1717 bp, Homo sapiens
  Payload ID: 2991
  Gene Symbol: CBX3
  Gene Name: chromobox homolog 3
  ENST ID: ENST00000409747
  CDS Start-End: 91-396
gtaggcgcggagggccggagacgctgcagacccgcgacccggagcagctcggaggcggtgaataatagctcttcaagtctgcaataaaaaatggcctccaacaaaactacattgcaaaaaatgggaaaaaaacagaatggaaagagtaaaaaagttgaagaggcagagcctgaagaatttgtcgtggaaaaagtactagatcgacgtgtagtgaatgggaaagtggaatatttcctgaagtggaagggatttacagaaaagctggcaaagaaaaagatggtacaaaaagaaaatctttatctgacagtgaatctgatgacagcaaatcaaagaagaaaagagatgctgctgacaaaccaagaggatttgccagaggtcttgatcctgaaagaataattggtgccacagacagcagtggagaattgatgtttctcatgaaatggaaagattcagatgaggcagacttggtgctggcgaaagaggcaaatatgaagtgtcctcaaattgtaattgctttttatgaagagagactaacttggcattcttgtccagaagatgaagctcaataattgttcacattgttcttttatatatatttatatatatatataaaaattgggtcttagattttgatttactagtgtgacaaaataactacatcctaatgaaaatcaagtttgatatgtttgttttgaaagtagcgttggaagagttgttgggggttttttgcatccatagcactggttactttgaacaaataaataaaagctttctgtagttgcttcctttatcagaaaagaacatttgataccatggtatatcatttcctcttcattaaagaacagcttttctaaatgttgggggaaatgtccatagtcattactcagtcaaaacttgtgttctcatgagcctaaggaccattctagatttattacgtgttttttgtgtgtgtgtgtgtgtgtgtgtgtgtgtgtatccataaaatgcatatgtaaatttttttttgtttttaagcattcacccaaacaaaaaaatcacaggtaaacccatgtttctgagatgccattattccaagcaaaataagagataatcccttcaagttaaattgaaaattttcctgaaaccatacatttcaagtgaaataagtaattctagataggacaatttaaattggataattttaaagtgtctataattgcagtggtttatttgcaaaattcctaaaaggaaaaattttatcactgccatcacagcaggtttcctcatccagatgaggaaactagacaaatgctagtgtgttttaactagctaaacaaaactaagttaaatgaacatttaaaagtttccctagcgggccattccttagcaaaatgttggaatccctgttgctacattgactaaaaggtcatgatgaatggaatatgtaagacttggctcatagaaacctaatcagatggttagaggtgttggcagtttaggacctgctgtcataaatgtgtgaacaaccttttgtaacctaacctattgacctgcatgttttttctttaccccaattcattacatggaggctcaatcttgagtttgctttactggttcagcaaaagccaggaagaacaactttgtagtaatcaaaatgttatccaactgtatattgtttactttattgtaaatactggtgaacagtggttaataaatagttttatattcctttatgcaa

SEQ ID NO: 117665 - DNA, 1068 bp, Homo sapiens
  Payload ID: 2991
  Gene Symbol: CBX3
  Gene Name: chromobox homolog 3
  ENST ID: ENST00000456948
  CDS Start-End: 882-1068
cttgagctgtaggcgcggagggccggagacgctgcagacccgcgacccggagcagctcggaggcggtgaagtcggtggctttccttctctctagctctcgctcgctggtggtgcttcagatgccacacgcgtcccgggggcccggttctccgctcccctcccctccccttctcgccggaccccgcgccgggagctgcgggaaggagtggagggtcgggcggtggcctcgcggctggcctggcgcgcggccagcgccggtagttagtggggggactgctctgccctcgagggggtagggagctgtggcgacggttgccccatttcgagacaaagcgcatttccccctcccctcccccacccgcgttccggcggaggcgccccctcccccagccgccacgcggggctgggtcgagacttgggcctcccggagggcggcgcgtggtcccgcgtccgcgaggcctggcggcgcgcggccggctgtcccgaggctgcggcgaccgcccagttaacgtggccgccgcgggggtaggcgcgtgcggtgtggcgcagtgcccttgagcccccgtgccgcggcctttgtttctccccgcggatgcgctgaccacgaggcccgcgctcccgggtgggggcgggcacccgcgcttaggcctctggacgccgggcttcagcggcgggggtcgggagcgggtgtttgcaagaggtgattcttttttcaaagtgtcacgaaacggggttgaagcatcttaagttttttccttttgttatttaattaccgattggaaagagggagggtttctgagcagaaaccaagttgggattgcagaacagagaagattcacagtgctttaccgtttaatagctcttcaagtctgcaataaaaaatggcctccaacaaaactacattgcaaaaaatgggaaaaaaacagaatggaaagagtaaaaaagttgaagaggcagagcctgaagaatttgtcgtggaaaaagtactagatcgacgtgtagtgaatgggaaagtggaatatttcctgaagtggaagggatttacagatgctgacaatacttgggaac

SEQ ID NO: 117666 - DNA, 949 bp, Homo sapiens
  Payload ID: 2991
  Gene Symbol: CBX3
  Gene Name: chromobox homolog 3
  ENST ID: ENST00000462165
  CDS Start-End: 1-324
caaaaaatgggaaaaaaacagaatggaaagagtaaaaaagttgaagaggcagagcctgaagaatttgtcgtggaaaaagtactagatcgacgtgtagtgaatgggaaagtggaatatttcctgaagtggaagggatttacagatgctgacaatacttgggaacctgaagaaaatttagattgtccagaattgattgaagcgtttcttaactctcagaaagctggcaaagaaaaagatggtacaaaaagaaaatctttatctgacagtgaatctgatgacagcaaatcaaagaagaaaagagatgctatgaggaaacgagattgactacaaatttggttttgaaaataaatcacatgctcaacagaagcagttttggccaggcacggtggctcgcacctataatcccagcaccttgggaaaccaaagcaggaacatcgcttgagcccaggagttggaggccagtttgggcaacatagtgagaccccatctctacaaagaaaaaaaaaagaatcagcaagacgtggtggacacctcctgtagtctcagctacttgggaggctgaggcagaaggattgcttgagcctgggagttcaaggtgcagtgagctgtgatcatgccagtgcactttggcctaggcaacggagcaagaccttgtctcaaaaaattattaaataataaatcaggcacaactttaacaacacttattgagtccttagcatgtgctatactgtgtgccaaattatttgcttttaatgtgctgtgaaatatctgtgcagtagatactaaaattctgttttattaacctaaaccacaaagaggttaattaacttgcccaaagccacacagctcgtaagtggggtaggtccatcattctcacccaggcagtgtgactccagagcttgtgacattgatgtaaaactctgacaggaataaaggatttattgatatc

SEQ ID NO: 117667 - DNA, 2664 bp, Homo sapiens
  Payload ID: 2992
  Gene Symbol: CBX4
  Gene Name: chromobox homolog 4
  Uniprot ID: O00257
  ENST ID: ENST00000269397
  CDS Start-End: 179-1861
cgagcgcgagccgggagccggggcgggcgcgggcagcggcgggccggccgggctgtgcggggcgagcggcggcggcggcgggggcgcttcggccggggcggcagctgggcgccggcgggagctagcagcgtctgcagccgcgccggccgccagcgccccggcgcgctccggctcggccatggagctgccagctgttggcgagcacgtcttcgcggtggagagcatcgagaagaagcggatccgcaagggcagagtggagtatctggtgaaatggagaggctggtcgcccaaatataacacgtgggaaccggaggagaacatcctggaccccaggctgctgatcgccttccagaacagggaacggcaggagcagctgatgggatatcggaagagagggccgaagcccaaaccgctagtggtgcaggtgcctacctttgcccgtcgttccaatgtcctgaccggcctccaggactcctccactgacaaccgtgccaagctggatttgggcgcgcaggggaagggccaggggcatcagtacgagctcaacagcaagaagcaccaccagtaccagccgcacagcaaggagcgggcgggcaagcccccgccgccgggcaagagcggcaagtactactaccagctcaacagcaagaagcaccacccctaccagcccgaccccaaaatgtacgacctgcagtaccagggcggccacaaggaggcgcccagccccacctgcccggacctgggggccaagagccacccgcccgacaagtgggcgcaaggtgcgggggccaaaggctacctgggggcggtgaagcccctggccggtgcggcgggtgctccaggcaaaggctccgagaagggcccccccaacggaatgatgccggcccccaaagaggctgtgacgggcaacgggattgggggcaagatgaagatagtcaagaacaagaacaagaacggacgcatcgtgatcgtgatgagcaaatacatggagaacggcatgcaggcggtgaagatcaagtccggcgaggtggcagagggggaggctcgctcccccagccacaagaagcgggcagccgacgagcgccaccctcctgccgacaggacttttaaaaaggcggcgggcgcagaggagaagaaggtggaggcgccgcccaagaggagggaggaggaggtgtccggggttagcgatccgcagccccaggatgccggctcccgcaagctgtccccgaccaaggaggcctttggagagcagcccctgcagctcaccaccaagcccgacctgcttgcctgggacccggcccggaacacgcacccgccctcacaccacccgcacccgcacccccatcaccaccaccaccaccaccaccaccaccaccacgccgtcggcctgaatctctcccacgtgcgcaagcgctgcctctccgagacccacggcgagcgcgagccctgcaagaagcggctgactgcgcgcagcatcagcacccccacctgcctggggggcagcccagccgctgagcgcccggccgacctgccaccagccgccgccctcccgcagcccgaggtcatcctgctagactcagacctggatgaacccatagacttgcgctgcgtcaagacgcgcagcgaggccggggagccgcccagctccctccaggtgaagcccgagacaccggcgtcggcggcggtggcggtggcggcggcagcggcacccaccacgacggcggagaagcctccagccgaggcccaggacgaacctgcagagtcgctgagcgagttcaagcccttctttgggaatataattatcaccgacgtcaccgcgaactgcctcaccgttactttcaaggagtacgtgacggtgtagccggagggcgtcggaaggggaagcgccattcccgcgggggggcggggagctgagcacctggggcctcggggcgggctcccctctcgccaacccgccaaccgcgagagacccaggctggcccccagggtgaggacgcccggagcggaggtaaccatgttccccctgcggcggctgtcagacctgggcggaggccccttccacgcggtgccggcggggctcgccctctcctgcccttccccgctggagatggacccccggaacggacagggcagctctgcgcccggcctcagagttctagtattatattttaaccgtgctaacttgtcaagtgctgactctactcccgtttgtacgtggtgttattattgaaatgtattgtttgagctcaaaaggcccgaccaccccccttcgggctgctatatatatatttatttgtaggtatttatatattgaaatataaaaacctagatttatggagtttcctctagatcatgttatattctatatcagacaaactattttcttttgacctttcttcccctccatccagtatttcggttgatttcattttctcccctctcttccccttccacgaactgcaataccagtaaccttggtatatattttttgatactgtacacatggatgtcttgtttctatgtgcaaaaaaaaaaaaaaaaaaaagtttgttaaaaggctacacgagctctctagaaactgctgctactagaaatgtctaaactataagcttccaactattacctgcttgaatgtaaatattaaatggagatgttgaaggtgca

SEQ ID NO: 117668 - DNA, 718 bp, Homo sapiens
  Payload ID: 2992
  Gene Symbol: CBX4
  Gene Name: chromobox homolog 4
  ENST ID: ENST00000448310
  CDS Start-End: 137-319
gccggccgggctgtgcggggcgagcggcggcggcggcgggggcgcttcggccggggcggcagctgggcgccggcgggagctagcagcgtctgcagccgcgccggccgccagcgccccggcgcgctccggctcggccatggagctgccagctgttggcgagcacgtcttcgcggtggagagcatcgagaagaagcggatccgcaagggcagagtggagtatctggtgaaatggagaggctggtcgcccaaatataacacgtgggaaccggaggagaacatcctggaccccaggctgctgatcgccttccagaacagctgatgggatatcggaagagagggccgaagcccaaaccgctagtggtgcaggtgcctacctttgcccgtcgttccaatgtcctgaccggcctccaggactcctccactgacaaccgtgccaagctggatttgggcgcgcaggggaagggccaggggcatcagtacgagctcaacagcaagaagcaccaccagtaccagccgcacagcaaggagcgggcgggcaagcccccgccgccgggcaagagcggcaagtactactaccagctcaacagcaagaagcaccacccctaccagcccgaccccaaaatgtacgacctgcagtaccagggcggccacaaggaggcgcccagccccacctgcccggacctgggggccaagagccacccgcccgacaagtgggcgc

SEQ ID NO: 117669 - DNA, 490 bp, Homo sapiens
  Payload ID: 2992
  Gene Symbol: CBX4
  Gene Name: chromobox homolog 4
  ENST ID: ENST00000495122
  CDS Start-End: 1-271
ggagaacatcctggaccccaggctgctgatcgccttccagaacagggaacggcaggagcagctgatgggatatcggaagagagggccgaagcccaaaccgctagtggtgcagacctcccacctcctgccccccatgaggcagctgcggacctggtgggggctgggacgctccagaaactcccggcatgcggtggggctgtctcctccctcctctcacccctgcacccgttccctcaggtgcctacctttgcccgtcgttccaatgtcctgaccggcctccaggactcctccactgacaaccgtgccaagctggatttgggcgcgcaggggaagggccaggggcatcagtacgagctcaacagcaagaagcaccaccagtaccagccgcacagcaaggagcgggcgggcaagcccccgccgccgggcaagagcggcaagtactactaccagctcaacagcaagaagcaccacccctaccagcccgacccca

SEQ ID NO: 117670 - DNA, 11528 bp, Homo sapiens
  Payload ID: 2993
  Gene Symbol: CBX5
  Gene Name: chromobox homolog 5
  Uniprot ID: P45973
  ENST ID: ENST00000209875
  CDS Start-End: 138-713
ttgcgcagaaggcggcggcggtggtggcttgtggtgcggcctcaccatacaggaacagggcagacgttagcgtgagtgatcactctcaatcccggggacctggtggccttagtctttcaggtggaacggtgtgcgacatgggaaagaaaaccaagcggacagctgacagttcttcttcagaggatgaggaggagtatgttgtggagaaggtgctagacaggcgcgtggttaagggacaagtggaatatctactgaagtggaaaggcttttctgaggagcacaatacttgggaacctgagaaaaacttggattgccctgagctaatttctgaatttatgaaaaagtataagaagatgaaggagggtgaaaataataaacccagggagaagtcagaaagtaacaagaggaaatccaatttctcaaacagtgccgatgacatcaaatctaaaaaaaagagagagcagagcaatgatatcgctcggggctttgagagaggactggaaccagaaaagatcattggggcaacagattcctgtggtgatttaatgttcctaatgaaatggaaagacacagatgaagctgacctggttcttgcaaaagaagctaatgtgaaatgtccacaaattgtgatagcattttatgaagagagactgacatggcatgcatatcctgaggatgcggaaaacaaagagaaagaaacagcaaagagctaaaggaggggatggtctctgtcatttctctttgtacataatacattcacctccctgcctcctctcctttctacccacccctttctatcctaaacacatccataaaaaatgtgcttatcactgtgctccacaggagaaatgttggtattggttctcttgtaacataactgatggtctgattaatgataagtgtctctctgtgaagaccaggcatttacatactgagtgtaatacccacaatttttttttcctttgccctgatctcttccttctgcttccctgtgacctcaagatgagtttcaactttttaatcaccttagagtcttgatcttttcagggttggtcgctttttaggttgggggattttgttacaatgatgttgaattttggtttcttgctttggttcttagaacatgttgctgactagctggcctttgttctgacatgttgagatggaaaggatgttgcccatctgttaaaaagccaatagcaactgcctacctgttggggctttcccaaccttgttcagctctacccaggagaatacagggtttctggtgtggtcttctgggccaccctctgttgttcatcctcactcatcctcccagaattactccatcctttggaagatttgaaattttacactgaaatctgtcaagacactctttttagccccaggactttcggtattgcttttagcactccccacttctgcttctgtaaagtgatatcaatttgtgataaaatgacaagattattaactgtgcagatttgtagctatagtacatgaggatgatggggtagggtacaattgtctttattatcatatatggtatgtatgtatgatttctttccattcctcatatttagactgtatatttatgtaggtgtgagtgattgcctggtgcttgcttgtgccaaggtgctaggcaccctccaaccctgccaacttttgtggcctcccaaagcattcctgttaccaaagaggcttcaaacctgaccctcacttctcagtggacccgagtttcccttccatgccattattttcagtggggaagttttagaggtgagctgttggccacaatatcaattttaagtgttcatagcagttatgtctcctgcattcttggctcctggatttaccaccaagagtccccaaaatattaatgctcttccctttttctaccctcaaacttatagttgtatcttattttttaaaatgaattttcatggccaggcacagtggctaccgcctgtaatcccagcactttgggaggctgaggcaggagaattgcttgaagccagaagtttgagaccagcctgggcaatgtagtgagaccccctgtctctaaaaaatataaataaaaataaaggcatgttcctgaaagactgtcaccttggaaagtgacaggccctggcattagcatgttgacacacccttttcttcttactcagcaaaatacttcgttttggtttcttcttgtgttgctattgagaaatttgtctgatcatatccttctgcctttgtcccccaagaaatgccctactttatccttttctttttgtagttgaggagggctagagaatcacaattaaaagtaaggaaatagcagggttttgaggatccttgtcccagccccaaagctgaggaaataagaataaatgcttaatatagccttaattctagagcgcaccagccatgaggctgcttttcttgttgtttttgatttttaaaacatacagctgtctggccaggagcatctaccatttctagattattcagagtaatgaggggaatggatggattgctccagtccacagatgagccacataatatgcaaatcatatacccattcatagcatttgttaacattgcttccctgctcagctgctgattgaattctgtgtgcttatataaattatgtcaaaaattatactgcataattgaggtgacagctgttgctgcagtgacatgacagactggaacaatgaagcttttggtttaagtcagccaggaaaatccttctgaatggtaatgtgattgggcaagagctcataaaccatacctcaagtgggtgggagttttatctctatattccttctctctctgaaggaattaaaggcctagatcaagtgctggataattgacaattgcttgtacttaatctgatcggtatctaaaagaaggaaaggatggtcaggaaacatttatcataaatgtagccaaggatatcaattagggtagacaagaataggacaaaaataggccagagctcctgaggaggtgatatgggtctcttgatttgcagaaaatgacagcctatccaagtggcccagtgtatgcctcccagtagcagtgggcatgtaaactgcagcgaccttatttttaaaaccaaaaacctagtatgtggacaaagaacatgacaatatttggtactgagattggttctgagaaacctggggcatgtggctgctgtggttataggtaatatttaagacattcataaaaatctgatattcttttaccgaaataaccccagtatcatctactacttaccatctgttaatagactttactctgtcttttttgtcttcggtttattgtactgagtgccgccaaaacaacttttgttctcttcctgcctacctgcagctggttctataggaatgtagggagccagaggccagtattgatttcagcccttagcacaaaggaaatcagatgcctgcttccagcatttgttagtgttgagtagatgttcttgccctagaagaattacagcctcaaacagaaacctgtttcatggagctttctcccctcagaagagttaatagttaagagctaagcactcttaaacacctaagtctcaaatgctaaaaatttatttttcttgtgtttagtcctctttcaagacatctttctaagcctttcagtaatcaacattaaaagatctccctttcttcagagttatagcacagctttgcccagtagaggctaccaaggacagcttagcagccctttgattgctgggctgggcagatggccttcaagttaagatcaaatgccgggaaaatcagcctacatgggagcacccattttaaacctggagagaaccatgatgttttcttcttcaaataacaatctagttttttttcccccagtactaaaattgtattgtctttcagacaatataatttttatttaaaattggaacatactatcttcatgctttctaagctaaatcttcatttagatttcactcctcagtagatcccagagaagaagctatataggatccagattcaaatttaacagtgtcttctacttttttagttatgttttctatcaactcctgctgccttttcaaatacggatatttttcaggagactcttctacttgtccactgactgtattttttcctttttgatccgtagccctggttaaatggctgacatccttccgtggatgattcttggaggtagtctcagaattccaaagtgattgtctgtcttcttcttgtcttgatcctaatgcagacattcacctctattatttatttattttttttagacagagtctcgctctgtcaccaggctggagtgcagtggcacaatcttggcttactgtaccctccacctcctgggttcaagcgattctcctgcctcagcctctcgagtagctgggactacaggtgtgtgccaccatgcccagctaatttttgtatttttggtagagatggggttttaccatgtttgccaggatggtctcgatttcctgaccttgtgatctgcccaccttggcctcccaaagtgctggaattacaggcatgagccaccgtgcctggccacctctattaaatttttgtggacaaaaataaaattgtcattatttgtttgctctcatggagcactttcagtaatacaattttttttaaattccagttgccctctttgttgctctgtcctctgtaatacctgactttgctaaagacttgaggggtggtttcagaggagggtcaggtgatgggaaggcaggatgagaaaagccctggacttgcatgtttgagaaggcttccaaccacatcttcactcagactcttggaattcctgtccccaaaacaagcttctgttttttgctcacaatgctatatttctaaatttttcctgaattactgagaagcagtcattagctttgttaagtttggtttggggacattgttggtatcaaaaatcgaagtcttattcatttgatgtaggccatgaatcatcaataactggttgctggaaagcttgactaccatccactggggtgctattttgagaaggatttttgggtatctttatagtctgcaattagttgatgattgctttctagtttatcaactgcatttatatttgcttttctgttcatggaaaatcctttatttgctggggttttttgtttgtttgtttgtttttcccacttacagcaagtaaaagtggtctgaggttatccttgtttttcttcgcggtttgccatgtgtgaaagtagatttcctgctattgatatattctcattatagacagaatagtggagaacagtgttgccatggacaaaatccagttttggtccactctggggagcatttggacctgtggtgcttctaacaattaaaagtctagatggtccttgactgtcccccagccatactgcatactactttgtgcattctactttgtgtcattaatgaaagattggttctgtccctgtaacttaggcatttattattcttaactcttcattcctgttctgtagccacccagcagtccattttccctatgttcaggccaaaccacagggcattggggaaggtttttgggattttcttattgagattttgttgaatctgtagtttaccccagctttcctaaggtacagtgaggggttggagggatctgtgtttggcccggggagcaattgtctctaccttaaggttcagttttgagggcataaaatactactttgcaatgtcatgagaacaccgttagatctgaaatgtggaaatggtttctcacaatttaaaggaaaaacccactttgcacccatgatcccatcattttggttgagattttagaataaaaaatatagtgttgagatccgtacttttgtaatcagaccaccaagcatgcctgtggcaaggcagagaggaaaggtctggagccagtgtattgcagtttcatgctacctttacctgctaatcataaaaattatgttttcaaaagtagatgatactagccttacacccaaaaacatgttctgaattagatgccccctcacccaatttttattaagctttctaaattccagccacattgctgtacatcaacattggtttcattcaacagacatttttttggcctgaagatacaaggttcagaaagaggccatccctgccctcaaataactttcatactggtgtatgatgaactgaccattaatagtttaagtgcttacaagctatgtttctgttcaaaaaaaaaatagtttggtataataaatgctataaaccaatacacatttctgacttgggggcagagacagactggctgatgttgtatagtttgtagccctggagtaagaagttgacattaatttcggcctatatgtggaaaagacctataacattgggtgaactgagccagctggccatagaacacaagaacatattccaggaaataaatatagctggagggttggaaatgctgttattactgagagagaaaacaggtgagttgggattgagaactcctgattttcatccctggtttagattcttggccaaagtagtggtagagttaatctttgcttgtggaaagcattaactatgttgcagattcagttgtgttacattattgtgggttctataacaacatattcctcatggacactttaccagagttgctcacacctttttcaatttctcatcccttttggaggaatgaacatgagacttaactgcctttaagcctaaaacggacatgctttccaatgacaagagattttctaaagagaagtcttggagcacatctgttaatacctgagcatctactctgagcagtgcagttttattcaatactggagagagggtgatttctttttttttgagacggagtcttgctctgtctcccaggctggagtgcagtggcgcaatctcggctcactgcaagctccacctcccgggttcacgccattctcctgcctcagcctcccgaggagctgggactacaggcgccggccaccacgcccggctaattttttgtatttttagtagagacggggtttcaccttgttagccaggatggtctcaatctcctgacctcatgatccacccacctcggcctcccagagtgctgggattacaggcgtgagccaccgccgggccgagagggtgatttctaagcagagaattgtatcagttatgtggaaacctttgccagaaatacatataccttgtatattaaatctgagtctcagatttaatcatcgaagcgtagctgggttaagaaacagtctgatcgtaaggatgttgtcgattctgacccatggatgaccacaagaaaaagatatttatttctgcctggataattgagagttgactaactttggaagtcagaattcccaggaattagagtaactgctctggaaagttaaagtgtgaagttttttagatagtttcataaaaacaattctggtttctttttgcttgtgctgactttcttggattttaatctacctcatcttgtctttttagagttacttcaacttgtcactttaacattgtgcttgactttggttgttttctaagatggaatttttcctgttcattgacagcttgttctcttgccttttcattctgatcctcatttcatctaacatcatctcatattgctcctctgtcaagagaaatgttttaaaatagtttaaagtcttgttttatgggaagaaagtgatcctccaatgctatttgtttctgaggtcagtaagagaaggagttaaaacaaggcagtggggaagggaatgaatcctgcactggaggcaaaagctgacaaggaaagagccattaattaagacaatttcaaagtcaactgattgtgatcattaatgtcacaatagatcaaaacctaattatcacagcctaggtaagagccatcagtattaatcggaaaatctaataggaaactattatcaagaaattaggccaaattgaatgcagtgaactttttatcttggcattctctatttttttgtgatgtcccctggcattggcaggtgtgaccctaacagtcgattcaaggccaagtggtcagtttgtcagccttttttaagggatttctttttatttttaggaattccaaacagagttaacctaaactgtcattgccaaaagatcagtcttaaactttcttagcacctgtacctgtttaatgtgatcagctatcagtgaggaaaaaaaaaaaaatctatttaggtcttggaatggttcctgtacctagagtatccatattgaaccttttttttttttttttttttttttttttgagatggaaacttgctcttttgcccaggctggagtgcagtggcgtgatcttggctcactgcaacctccgcctcccgggttcaagcagttctctgcctcagcctcctgagcagctgggattataggcgcctgccaccatgcccggctaatttttgtatttttagtagagacagggttcaccatcttggccgtgctggtcttgaactcctgaccttgtgatccgcctgcctcggccactcaaagtgctgggattgcaggcgtgagccagcacccggccacagtatctttattacagctcactgcagcctcaatctcctgggctcaaatgatcctcctgcctcagcctcccaagcagctgggactacaggcgcacaccacggtgtctggctaattttattatttaaaaaatgttttgtagagacagtctccctgtgttgcccaggctggtctccaactcgtgagctcaagtgatccacgtgcctcagcctcccaaagtgctgggattacaagcataagccaccgcacccggcccctagtgaacattttactgtatgtgttgataaatcatcttttgagtttctgttgtatgtggggacttcctacactggctgctgtgaagaggtatggaagaaaggagaggctttctgcctagaaattctttgagaacacctgaaaagacagtttaatcatgtcacaacactcttaaggctcaagtcagtgttctggtttccggtagctttaggattggattctaaacgagggctggtggtgagtttggtgtttgtctcgtgtcaccctcacccctcacctcctcagtttaggataagagacataatgatttctaccagaatccaaagtaaatccaaagggggagaaaagacataactgttttttcttctaccttttttttgttaaagagttacatctctcacaggaggaaagaattcaagagtctatatgattagttacagagaatattttcatcccctctccctgaatagaaaagcaggggtcaccatttgtatccttacccttgaggtgtttttgaagatgctgtaactcttgaagttgagctgaggcagaaaggttggaaaaatgcagccctctgggtattgtggggagggatgtgatgtagtaagagggtgttttgtggtgctaggattcccacgccaccaacttgcagctttataagagcgctaccaagaaccaccactggggaaaaggttcttattcattgtttctgttggaatgtgatcttgctttctggattttaggaattcaggttactcagtataaaactctgagaaatcagtgtgacttagtccttcacctcctaagataaagtgaatatttctttacaaaataattcatgtccttaatgttaaagatgtaattttattttcaaaacatctataacatgactttcagaagcagttcatttttccaagattcctcacattatactagataaataataggccctcagttaatacccttcagttattgaattaatctagtttgtggaatgaggtgtatcctgccaacttccctctgctcccaagtacactctgagaggtaaaatgctctgggaaatggaacaagaatcgagtggatgctgactctgtgtgcccacctcctcaactgattgataatggttgaccttgggcaagtcacttctttcaatgcctcagttccccatctgtcaaatggggttaataatactgacctacctcacaggggtgttgttgtgaggcattgtaaatcaaagttaatagaatacttcagggtcctctgtggaggatgtcttgagccagagtttaagcctgacacacaggctttggtcctcactgagctgtctccaagactggaactacttagtgactcggcaaattttctgccccccacccctcatcaaagctgctagttcagatgttgacagtgttttcatgaatgttggaatcttactagtccagacttacttaggatgttgttggggaaggcacttgggattttctgtgtcttgcattcacagagggaggccatttcagattcaagagcattggattagggaatcgtgaggcagggatgctactgcgtatttctctctgcaggttggggattaaagttcctttccccatgggtttgaagcagactcagactgtctcaggatcaaagcaaccctcaatggttttgatttatgtcattgcttaccactccccaaccaatcccaggacagctgggtcactgtacccctttgtggtatctgtacctgggcctctccttcctcatagggaccagctgattgaataaatgtgaccaccttatttccaccccccacccccaaaagctacattggaattatttttcctagaaatgtgtataacactcagaattgggcattgatccttaaagcttcatcccattcaccgtattcaacatctgtcatctcttagtgtctgcagtctgaacctaaccttgaccttttttccctctggtttgagaaaactttggacactatttctacttggccaggtgtgggctcaagagccttactctttccatctcagtttaggggcgcagccagctcctcttcccaatagggctctttctgctttccctctccttggccctagatttgtaatccatgaaaaagcacaaggtcctggctccttgcggtcacattctggttctctgtgttttgtggactctgctctcactgttcacccagcactagcagtaccagatggttctgtggagtcctggggaatggagagagcacagtctgactccctgccaagtagccaggagttgacttgcccatggtccgctggctttcccaccacttcctacaggatgggatctaagagactcaagagctgggtttctttcagcactctgtactgtcccaaatagcaaacaaatcactttgtagccagatttctgaatggaaatgagaaattgaattctccatggacttttaggtttatgggggagttttagctgtgtttcttggttttatttcagccaaacatgtctgcttttgattttttttttaaagtataagtggtctatatatatgttcaccttttaaatgtaaatgtttaaaaagtaagcatttatgtgtttccataactgacatctgatgcagacctcattctctccccctcttctaccctcctcttttcccccttttcatactcttgtattggttctaataaatggttgcttttcaaatatgga

SEQ ID NO: 117671 - DNA, 1832 bp, Homo sapiens
  Payload ID: 2993
  Gene Symbol: CBX5
  Gene Name: chromobox homolog 5
  Uniprot ID: P45973
  ENST ID: ENST00000439541
  CDS Start-End: 127-702
agctgccagcccgccaagacccagacctgggaggggaggcccctcctgttagcccagagggaaagaaagaactggggcgatccgggacctggtggccttagtctttcaggtggaacggtgtgcgacatgggaaagaaaaccaagcggacagctgacagttcttcttcagaggatgaggaggagtatgttgtggagaaggtgctagacaggcgcgtggttaagggacaagtggaatatctactgaagtggaaaggcttttctgaggagcacaatacttgggaacctgagaaaaacttggattgccctgagctaatttctgaatttatgaaaaagtataagaagatgaaggagggtgaaaataataaacccagggagaagtcagaaagtaacaagaggaaatccaatttctcaaacagtgccgatgacatcaaatctaaaaaaaagagagagcagagcaatgatatcgctcggggctttgagagaggactggaaccagaaaagatcattggggcaacagattcctgtggtgatttaatgttcctaatgaaatggaaagacacagatgaagctgacctggttcttgcaaaagaagctaatgtgaaatgtccacaaattgtgatagcattttatgaagagagactgacatggcatgcatatcctgaggatgcggaaaacaaagagaaagaaacagcaaagagctaaaggaggggatggtctctgtcatttctctttgtacataatacattcacctccctgcctcctctcctttctacccacccctttctatcctaaacacatccataaaaaatgtgcttatcactgtgctccacaggagaaatgttggtattggttctcttgtaacataactgatggtctgattaatgataagtgtctctctgtgaagaccaggcatttacatactgagtgtaatacccacaatttttttttcctttgccctgatctcttccttctgcttccctgtgacctcaagatgagtttcaactttttaatcaccttagagtcttgatcttttcagggttggtcgctttttaggttgggggattttgttacaatgatgttgaattttggtttcttgctttggttcttagaacatgttgctgactagctggcctttgttctgacatgttgagatggaaaggatgttgcccatctgttaaaaagccaatagcaactgcctacctgttggggctttcccaaccttgttcagctctacccaggagaatacagggtttctggtgtggtcttctgggccaccctctgttgttcatcctcactcatcctcccagaattactccatcctttggaagatttgaaattttacactgaaatctgtcaagacactctttttagccccaggactttcggtattgcttttagcactccccacttctgcttctgtaaagtgatatcaatttgtgataaaatgacaagattattaactgtgcagatttgtagctatagtacatgaggatgatggggtagggtacaattgtctttattatcatatatggtatgtatgtatgatttctttccattcctcatatttagactgtatatttatgtaggtgtgagtgattgcctggtgcttgcttgtgccaaggtgctaggcaccctccaaccctgccaacttttgtggcctcccaaagcattcctgttaccaaagaggcttcaaacctgaccctcacttctcagtggacccgagtttcccttccatgccattattttcagtggggaagttttagaggtgagctgttggccacaatatcaattttaagtgttcatagcagttatgtctcctgcattcttggctc

SEQ ID NO: 117672 - DNA, 894 bp, Homo sapiens
  Payload ID: 2993
  Gene Symbol: CBX5
  Gene Name: chromobox homolog 5
  Uniprot ID: P45973
  ENST ID: ENST00000550411
  CDS Start-End: 319-894
gttagcccagagggaaagaaagaactggggcgatccggtaggtaaaggagggaacccccattcattttctacctttggggctcctcttctgcatgaaggtataaagggagattttccttgtctctccctcaaaatgaagaacacatgtaaatccttgtttttcctggtgaggcaggggaggccatagccacaatgcttaactgcatgcatctaacatggggctggttttaaccccagcgctctgacctaaactgctcagctcccggaaattccaagggacctggtggccttagtctttcaggtggaacggtgtgcgacatgggaaagaaaaccaagcggacagctgacagttcttcttcagaggatgaggaggagtatgttgtggagaaggtgctagacaggcgcgtggttaagggacaagtggaatatctactgaagtggaaaggcttttctgaggagcacaatacttgggaacctgagaaaaacttggattgccctgagctaatttctgaatttatgaaaaagtataagaagatgaaggagggtgaaaataataaacccagggagaagtcagaaagtaacaagaggaaatccaatttctcaaacagtgccgatgacatcaaatctaaaaaaaagagagagcagagcaatgatatcgctcggggctttgagagaggactggaaccagaaaagatcattggggcaacagattcctgtggtgatttaatgttcctaatgaaatggaaagacacagatgaagctgacctggttcttgcaaaagaagctaatgtgaaatgtccacaaattgtgatagcattttatgaagagagactgacatggcatgcatatcctgaggatgcggaaaacaaagagaaagaaacagcaaagagctaa

SEQ ID NO: 117673 - DNA, 675 bp, Homo sapiens
  Payload ID: 2993
  Gene Symbol: CBX5
  Gene Name: chromobox homolog 5
  ENST ID: ENST00000552562
  CDS Start-End: 402-675
agttgcatcttgggaattactgaataatctagtgactaattttgaattttaggactgaaaaattttttctcctttctgcctccctcccatccccaaattagctttctaaaaaggaagattagtgtgtttgagatgtcagccttgcttttgtgagctgatggatgctctgaagggacaagctcaatttgtttaagggaaatgtaccaagtcactgaaaatgtggtgaaaggtgcctaagcaagccttttttgtgtgctgctaagagactgggcaagatgctcagagcacagaaaactcatattttagtggcttttcttttttcatttttataaagacgcttattcaccttggagaaaaagggacctggtggccttagtctttcaggtggaacggtgtgcgacatgggaaagaaaaccaagcggacagctgacagttcttcttcagaggatgaggaggagtatgttgtggagaaggtgctagacaggcgcgtggttaagggacaagtggaatatctactgaagtggaaaggcttttctgaggagcacaatacttgggaacctgagaaaaacttggattgccctgagctaatttctgaatttatgaaaaagtataagaagatgaaggagggtgaaaataataaacccagggagaagtcagaaagtaacaagaggaaat

SEQ ID NO: 117674 - DNA, 3191 bp, Homo sapiens
  Payload ID: 2994
  Gene Symbol: CBX6
  Gene Name: chromobox homolog 6
  ENST ID: ENST00000216083
  CDS Start-End: 27-1211
atgggctgtgggtgccgctgagcaagatggagctgtctgcagtgggcgagcgggtcttcgcggccgaatccatcatcaaacggcggatccgaaagggacgcatcgagtacctggtgaaatggaaggggtgggcgatcaagtacagcacttgggagcccgaggagaacatcctggactcgcggctcattgcagccttcgaacaaaaggagagggagcgtgagctgtatgggcccaagaagaggggacccaaacccaaaactttcctcctgaagccgagcgccagtgcctcctcgcccaagctgcactccagcgcagccgtgcaccggctcaagaaggacatccgccgctgccaccgtatgtcccgccgtcccctgccccgcccggacccgcaggggggcagccccggactgcgcccgcccatttcgcccttctcggagacggtgcgcatcatcaaccgcaaggtgaagccgcgggagcccaagcggaaccgcatcatcctgaacctgaaggtgatcgacaagggcgctggcggcgggggcgccgggcagggggccggggcgctggcccgccccaaagtcccctcgcggaaccgcgttataggcaagagcaagaagttcagcgagagcgtcctgcgtacacagatccgccacatgaagttcggcgcctttgcgctgtacaagcctccgcccgcccccctggtagccccgtcccccggcaaggctgaggcctcagccccgggccctgggctacttctggccgcccccgccgccccctacgacgcccgcagctctggctcctccggctgcccctcgcctacaccacagtcctctgaccccgacgacacgccccccaagctcctccccgagaccgtgagcccatccgcccccagctggcgcgagccggaggtgctcgacctgtccctccctcccgagtcggcagccaccagcaagcgggcaccgcctgaggtcacagctgctgccggcccggcacctcccacggcccctgagcccgccggtgcctcctccgagcccgaggctggggactggcgccccgagatgtcaccctgctccaatgtggtcgtcaccgatgtcaccagcaacctcctgacggtcacaatcaaggaattctgcaaccctgaggatttcgagaaggtggctgctggggtagcaggcgccgctgggggcggtggcagcattggggcgagcaagtgagggggctccaccaaggaggggggcttgggggggccctcctgcccgaagtcatactcttgctcccaccccacccttgcccccagccctctctccctgtgctttgcttgtctcaaatggctcggtgttgacccagggatggggctgggtagttggggtcccagaaagccgggggtaggggccaccctggaatggggcaggggaagggcacaccccctgcccatgcatggtagcccactgggtggtttctggaaagccctagaaactagggttcctctgccccttccacatcccacctgtctctctagcttgcttcctgctctcctgtgcggcgtctgatttctcggtgctaacctggcagctgtggggcccttaggagccccccaccgagggtggacacagtccctttccttcctgcagatgcctaggcaggaggagggcttcctgcctgtttggcaaagtcccaggcagaggccaaggatgaggcctgactcggctcctccctccacatcagccagggcatcagaagttgggccagggcggggtcttccctgctcgattttggacgaggcctaagtagaccccctatgccctgccccagccctggctctttcctaaccccctcaacggtgggaggaactggcagagggtgcgcctggccacagcctccccgcatctaaaggccccttcagttcttgaccaaaggtgctacgagaacctgccgtggaaacttccagttgtgcgtctgccccactcgctgtgtttgtccgtgggttcatacatgcattgggtgctaggccccaggctgccgggtggcaccctttacagttcctttgaacaggggcattgaaggcctggactgcctctcgcctcagtaggcctggggaccaggcttgggtctggaggtttgctgtggaagtcaccaggcctcccctcctggcccaggtgtgctgggggcaccgtgccccccacccccctgccctcctcagggtggtcagcccaacctgtcggaccttcacttcacatcatggtggggaccgagatagagagggagaccccattccaagctccctcttcctccgggtgtttggggaggatgctgaagaatccattcccgagggcctcccggcttgtcccagcccctcttttgcttctgaccacggaggctttctcacagcccagcctgcctgaagcaaaggaggctcccgtgtcctgggcagcttctgtttccctctgctgcctgggagctgaggcacccgtgccagtggcagaggccacagccccagccttaggccaggccctgggagggcaggcaggcaaaggggagaccagagggtctgtgttctccaggagaatgagggtgttggtcccagaattgggaccggggccccgctggccagccctgggccacttcccgggtctccattgtgcgtgggtggcgtgttccaggcgtggctggagctggcttcctggctgtgctgccatgggcccctccctcagaagcacgttggcaggaggccgatcagaaccctagcgcctttggtcctaagaatgggaggctgccttccttcccaatctccctgccagggcccacagcgtggccctagccctcccctccccgggatgtagaacggggaccctcgcagggttggggcgggggctgatactcctcggcccctccctaccctgccctgtgtgttggctttgtggccgtccaagtgccaattggcttttcgcccaaataagggctggtatttctcctctgtccttggaggtgatttccccctgaccccctcccccaggtgagtgaccacctgggtgccagttacaggtgtttccagagaccatagaaatgtgttttcctgagagttcgtgtcattcgtgacttttttgtaaagaagttgtgttttcagaggtgattttatgacaggaaagtgaaagaattagttttgcaaaaaaacaaaaacaaaaaaagaggaaaaa

SEQ ID NO: 117675 - DNA, 6122 bp, Homo sapiens
  Payload ID: 2994
  Gene Symbol: CBX6
  Gene Name: chromobox homolog 6
  Uniprot ID: O95503
  ENST ID: ENST00000407418
  CDS Start-End: 125-1363
cgcgagcgcgcgccccgccgcgctcccgcccgccggggcctgggcgctgcggcgcgtgcgcgagcggtgccgcaccggccgcgggcgcagggagtattatgggctgtgggtgccgctgagcaagatggagctgtctgcagtgggcgagcgggtcttcgcggccgaatccatcatcaaacggcggatccgaaagggacgcatcgagtacctggtgaaatggaaggggtgggcgatcaagtacagcacttgggagcccgaggagaacatcctggactcgcggctcattgcagccttcgaacaaaaggagagggagcgtgagctgtatgggcccaagaagaggggacccaaacccaaaactttcctcctgaaggcgcgggcccaggccgaggccctccgcatcagtgatgtgcatttctctgtcaagccgagcgccagtgcctcctcgcccaagctgcactccagcgcagccgtgcaccggctcaagaaggacatccgccgctgccaccgtatgtcccgccgtcccctgccccgcccggacccgcaggggggcagccccggactgcgcccgcccatttcgcccttctcggagacggtgcgcatcatcaaccgcaaggtgaagccgcgggagcccaagcggaaccgcatcatcctgaacctgaaggtgatcgacaagggcgctggcggcgggggcgccgggcagggggccggggcgctggcccgccccaaagtcccctcgcggaaccgcgttataggcaagagcaagaagttcagcgagagcgtcctgcgtacacagatccgccacatgaagttcggcgcctttgcgctgtacaagcctccgcccgcccccctggtagccccgtcccccggcaaggctgaggcctcagccccgggccctgggctacttctggccgcccccgccgccccctacgacgcccgcagctctggctcctccggctgcccctcgcctacaccacagtcctctgaccccgacgacacgccccccaagctcctccccgagaccgtgagcccatccgcccccagctggcgcgagccggaggtgctcgacctgtccctccctcccgagtcggcagccaccagcaagcgggcaccgcctgaggtcacagctgctgccggcccggcacctcccacggcccctgagcccgccggtgcctcctccgagcccgaggctggggactggcgccccgagatgtcaccctgctccaatgtggtcgtcaccgatgtcaccagcaacctcctgacggtcacaatcaaggaattctgcaaccctgaggatttcgagaaggtggctgctggggtagcaggcgccgctgggggcggtggcagcattggggcgagcaagtgagggggctccaccaaggaggggggcttgggggggccctcctgcccgaagtcatactcttgctcccaccccacccttgcccccagccctctctccctgtgctttgcttgtctcaaatggctcggtgttgacccagggatggggctgggtagttggggtcccagaaagccgggggtaggggccaccctggaatggggcaggggaagggcacaccccctgcccatgcatggtagcccactgggtggtttctggaaagccctagaaactagggttcctctgccccttccacatcccacctgtctctctagcttgcttcctgctctcctgtgcggcgtctgatttctcggtgctaacctggcagctgtggggcccttaggagccccccaccgagggtggacacagtccctttccttcctgcagatgcctaggcaggaggagggcttcctgcctgtttggcaaagtcccaggcagaggccaaggatgaggcctgactcggctcctccctccacatcagccagggcatcagaagttgggccagggcggggtcttccctgctcgattttggacgaggcctaagtagaccccctatgccctgccccagccctggctctttcctaaccccctcaacggtgggaggaactggcagagggtgcgcctggccacagcctccccgcatctaaaggccccttcagttcttgaccaaaggtgctacgagaacctgccgtggaaacttccagttgtgcgtctgccccactcgctgtgtttgtccgtgggttcatacatgcattgggtgctaggccccaggctgccgggtggcaccctttacagttcctttgaacaggggcattgaaggcctggactgcctctcgcctcagtaggcctggggaccaggcttgggtctggaggtttgctgtggaagtcaccaggcctcccctcctggcccaggtgtgctgggggcaccgtgccccccacccccctgccctcctcagggtggtcagcccaacctgtcggaccttcacttcacatcatggtggggaccgagatagagagggagaccccattccaagctccctcttcctccgggtgtttggggaggatgctgaagaatccattcccgagggcctcccggcttgtcccagcccctcttttgcttctgaccacggaggctttctcacagcccagcctgcctgaagcaaaggaggctcccgtgtcctgggcagcttctgtttccctctgctgcctgggagctgaggcacccgtgccagtggcagaggccacagccccagccttaggccaggccctgggagggcaggcaggcaaaggggagaccagagggtctgtgttctccaggagaatgagggtgttggtcccagaattgggaccggggccccgctggccagccctgggccacttcccgggtctccattgtgcgtgggtggcgtgttccaggcgtggctggagctggcttcctggctgtgctgccatgggcccctccctcagaagcacgttggcaggaggccgatcagaaccctagcgcctttggtcctaagaatgggaggctgccttccttcccaatctccctgccagggcccacagcgtggccctagccctcccctccccgggatgtagaacggggaccctcgcagggttggggcgggggctgatactcctcggcccctccctaccctgccctgtgtgttggctttgtggccgtccaagtgccaattggcttttcgcccaaataagggctggtatttctcctctgtccttggaggtgatttccccctgaccccctcccccaggtgagtgaccacctgggtgccagttacaggtgtttccagagaccatagaaatgtgttttcctgagagttcgtgtcattcgtgacttttttgtaaagaagttgtgttttcagaggtgattttatgacaggaaagtgaaagaattagttttgcaaaaaaacaaaaacaaaaaaagaggaaaaaaaaaagaaatagaaaaaaatattgtgggattcctatgggggggtggcgggggagaaagagctatttaagaaaaaatagtaacgcagtgattgcacaggtgaggtggcaatgtcaggatggggcggaggcctgggcccagctggcaggtcccctggcatcgcaggcactgtggagagggcctggacccagatctccacacccgtgcttgctcaaagggaaggacaacagcgggcccccgggagctaacccaagctgcaggtcccggcaagctgaggtttgggagggtgggggttgtcactggtgattttctccagggggctggtgagtgggcagtttggtttcttgcccccttctgttcctttcccagttgttgggccatctggtccccaccaccgccaccctatgggggagacctccctccccacgggtcaccctaaagcccacaacctctctgagcctccctggcctgaaaggggatgcaggcttcaggaggcaagaagctgggcccctgggggtggctggggagagggaatgcatttcccttgccacaggtggtctgcttctgctggcctgagctccaagtggagcagcccgggccagccttggtgcatgaagaggcaccaggcacaccgccttgaggtgggcagtgcccatgggggcccgagtggatgggaccgagggtgagtggagcctccttcctcccctctctagtacccccgcctcccacacacttgcacggatcggcctcccttgggagatcagcctccatgggcccctcgtccacccttgctgctttccatttgcctaattaccaagcagaagttgcaatctggtttgctttatttttgtatgtgaaataacccccaaagcccaatctcctcctacgttcaatattggttggggcatccgtcatctccccttaagtgcgccccctccccacccaagtatcataggaaaccggtgaggtctggtgtctctggtttgagacggtaagttgggacccatccctgtctgggtgcccactctgacctttagtttgcccttctgtgaaatgggtgtattgggtagcaagccctcttcagaaagcgctgctggtgtcagagcagctgcccagtaccaggtggggggtcaaggttgctggtactggggcccccagctgcccacaacccctctttgttctcaccctgcaaaggggtcaaggtcaaaatgagcctcatccttcctatgatctgggaagaggtgatgatcaagtccccaacttcagtgtgaggtggacagagttggggggatggcccctttttgaagaggtgaaaatggttttggagaagcgcagctgcttcactgggggaatgcggcagggactggggcccaggatgctttggcctatggggaaaagccctttaaaaggcagggcccaggccctggagccagcacaagactggcctcgagcccctgagccaggaggtcctggaggagagccaggccggtgggcccgcccaaggctggagggtcagccccaacagggagctgggttggccagggggctggactgctaccagcctctctggcctatggggacccaagaggacacatcccccttttgcccactcttctgtgtcattttgttgttttggtttgtggtggtttttcttttttcttttgtttttcttttttctttctttctttttttttttttttttttttttttttgcacttcgcccacacaggacagtggagccccacctggtcagttccacttccgggctcccatgcacttgcccaaggcggcctctttgggacggggatggtttgaggaaacacttttaaagaaaaaaggaagacattgaaaggttttagtttcttccctatctgcatgtcctctcatatagaaagcccagaattaggggctagaactccaggagagggtctccccgactcatctcttgctgacggtcaccaggatgcagaaatagggagatggttagtgggggccaaagatgccccctcccaggccttcgtggttccctcctccgccccctgcaatctttggaggagtcagtgcctcactccagcagtgagtgcctactgtatgcaggtagtcagccaggcaaagagagactaacggtctcatgggggaaccctcttgcgggaggccgggtagctggagcgaagcgttccggctgcccttgctgctgggtggagtggagagggagacttctttttgttggttttaatttaaaaacacaaaggcctaaagaaatacgtatcttataatttttttaatttttgagacgttcatttaatgaattgtgcacgaatgaattctatatatataaaatatacatatatagctctatatttggggaggggcactgtctcttttttctctcatttttaaaatgaagtgttgttgcctttgtatgtggttcaaccatccagctcccagctggctaaactttgcctccagtggtcaaagatgggaaaagagtggggttggcaggagatggaaaacggaggtgccgccccagcatggggggcaggtcccccagtccaccctgcccctccccctgtggagaagacgcttagttgggggtgtgggtttgggctccattctggattcggcggttccgggggaggggtgggtctgtgccgattactctgtcttgtacgtttgttctgctgctcttcaatattgtatcaacgccaggaaaggggggtgaaaagcctcttttaccccccaaataaattgtcacattccgaagctgaggcctagccccta

SEQ ID NO: 117676 - DNA, 4081 bp, Homo sapiens
  Payload ID: 2995
  Gene Symbol: CBX7
  Gene Name: chromobox homolog 7
  Uniprot ID: O95931
  ENST ID: ENST00000216133
  CDS Start-End: 207-962
ccgaggaaaacgttgcgcaggttcaaaaatggaacgtcggcggcgtgagggagcgcgagggggtgtgcgcgcgtgcgcgtgcgcgtgcgcgcccggacgagggtgacggggaccccgccagccccagcatcgcgcgccgcagccgcggccccgcagctccgcccccggcccggcccggccccgggcccgctcgcccgccgccccgcatggagctgtcagccatcggcgagcaggtgttcgccgtggagagcatccggaagaagcgcgtgcggaagggtaaagtcgagtatctggtgaagtggaaaggatggcccccaaagtacagcacgtgggagccagaagagcacatcttggacccccgcctcgtcatggcctacgaggagaaggaggagagagaccgagcatcggggtataggaagagaggtccgaaacccaagcggcttctgctgcagcggctgtacagcatggacctgcggagctcccacaaggccaagggcaaggagaagctctgcttctccctgacgtgcccactcggcagcgggagccctgagggggtggtcaaggcgggggcacctgagctggtggacaagggccccttggtgcccaccctgcccttcccgctccgcaagccccgaaaggcccacaagtacctgcggctctcgcgcaagaagttcccgccccgcgggcccaacctggagagccacagccatcgacgggagctcttcctgcaggagccaccggccccagacgtcctgcaggcggctggcgagtgggagcctgctgcgcagccccctgaagaggaggcagatgccgacctggccgaggggccccctccctggacacctgcgctcccctcaagtgaggtgaccgtgaccgacatcaccgccaactccatcaccgtcaccttccgcgaggcccaggcagctgagggcttcttccgagaccgcagtgggaagttctgaatcaccgtttttactcttcttaaactgttttcttttgggcttggggtgggacttccagagatagggatgggttgggggcggggtaattattttatttaaaaaaataccgagcagcaaaaggggagaagatcccactactctcccaccacctgccctttctctgagggacgtttaccacgaggcctcaggctggggatggagagagttgctctgggagttggggtaccacccccagggcaggatggggacaggatcacctgcccgggacaccaccattatcattctcctctagtgacgcagcagctggttctgggagttaaaggagcattggaaggcccaaaccctctcccttgagtggccaccccagcctggttggctggttttccccttttctcttgtttcaattgggtctttaccttgaactctcctctctggctttgcggtgggctgtggaggctggttttgaccaaaagtgagtggggcgggaggaaggggcaggaggaagggttgaggttacttggggcgagtcccttccccttcagagaggcttctatccttcccagggaggaggcgccgctgagacccttctgctgagagctctgccctcccctcatcacctggcctgtgcagaaacgctcatgcacacctggctgcacaggtgtgcacgcattacccttcgcgtgtacgttcccatgtgccccgtgaaagcatgtgtggctgcagacgtgtccacatgggccttgcgaacctgggttagaaaccctggccaggcgaacgtggggtgattcacagcacaaaagacctcaccaccacacctgcactcaccccaccttgcatgcaccttgctacctgcttgcggctttcagtggagggcaggggtctggcacaggtgcgatggcaccccatgctccaggcatacagatgtggtttctcggctgcaccgggccaggctgcgggtgtgcaggcgtctgctaagttgtgtgatgtatcagcacaggctttgagacgtctggaccctgtccttcctcccgtgaggggttcttgttctttctgactcaggtgacttttcagcccttccaattcccctctttttctgccctcccctccaactcagccaacccaggtgtgggcagtcagggagggagggagtgtcccaccacgttctcagggcagcccttgactcctaagccccttcctccttccattctgcatcccctccccatccaacctaaatgccacagctggggctgagctgtattcctgtggagggacctctgccgtgcctctctgaggtcaggctgtgctgtgtgatgggcaggctttgccccagcccacccctggcaaggtgcacttgttttctggtttgtacaaggtgtcctgggggcccgtggcttccctgccagtgaggagtgacttctccctctcttccagtcctgtaggggagacaaaaccagattggggggcccaaggggagcatggaaaaggccggctcccctgtctttccttggctgtcagagtcagggtaacacacaccaagagtggagtgcggccagcaagtttgagacctgcccgccctcctcgcagctctgctctgtgtcctcaggaagtcacagagtctactgaggcaaggagagggtgattctttccccaaatcccttcttccctggttcccaaaccaaagacagcctgcagccctttctgcatggggtgctctgttgacaggcttcccagatccctgagtctctctttccttcctcctcgatctttagttgtccacggtcaattcagtgcttccattgggggacagtcccctccgggatgacctgattcacctccagcccagggaatggaatctagaggaatacgtggggtgggtctggacaaggagcggcaggaatcaccacccatctccagctgtggagccctgtggaggggaaggggaagcttggggttcagaggggactcttccaggagaggggtgcccagcggaggtaaagatgatagagggttgtggggggtctctagttgaatgttttggcccatgactttggaacatggctggcagcttccagcagaagtcacgctccccatcccccaggggacataggacctttttcctgcttcctggtcactttcaaagaactatttgcgcaatctgtgggtctgtggattcacggggctttctgtgtgggtgctgcagttgcttttgtctgcagcagcaggacacatctttcctcttactcagccctttatggcccatggggaactccgtggctcagggagagctgaactccaggggtgtgacctgggacgggtgggcctgaggtgcccagctcagggcagccaggtggctcatgggctgtagtgagccagctccctgggggaaaaggctgtgggccgttaggaccatcctccaggacaggtgacctctatgaggtcacctacggctgtggccgtgcaggcctccttccagcccagagtggcccagtagagcaaggcagacagtgacctccacccccgcagccctcttaaaaggccagtactcttgggggtggggggagggtttagaaagcatttgcccatctgcctttctttcccccagcccccacccgctttgaatgtagagacccgtgggcacttttccttttgtggtggggggtgcggaggaggtacccccacccctggcacagccgcctggaatgcaggactgtcactgctgttcgggtgatgacctcgttgccaagctcctcctgtccccttgttctgggggcaggcgctgtgcttctgtgaggtggtttagcttttgctttcgaagtggccagctgcggccaccaggtctcagcacaagagcgcttcctttgcacagaatgagcttcgagctttgttcagactaaatgaatgtatctgggaggggtcgggggcacgagttgattccaagcacatgcctttgctgagtgtgtgtgtgctgggagagtcagagtggatgtagagcgcggttttatttttgtactgacattggtaagagactgtatagcatctatttatttagatgatttatctggtaaatgaggcaaaaaaattattaaaaatacattaaagatgatttaaaaaaaagaaaa

SEQ ID NO: 117677 - DNA, 784 bp, Homo sapiens
  Payload ID: 2995
  Gene Symbol: CBX7
  Gene Name: chromobox homolog 7
  ENST ID: ENST00000401405
  CDS Start-End: 1-477
atggagctgtcagccatcggcgagcaggtgttcgccgtggagagcatccggaagaagcgcgtgcggaagggtaaagtcgagtatctggtgaagtggaaaggatggcccccaaagtacagcacgtgggagccagaagagcacatcttggacccccgcctcgtcatggcctacgaggagaaggaggagagagaccgagcatcggggtataggaagagaggtccgaaacccaagcggcttctgctgcaggagccaccggccccagacgtcctgcaggcggctggcgagtgggagcctgctgcgcagccccctgaagaggaggcagatgccgacctggccgaggggccccctccctggacacctgcgctcccctcaagtgaggtgaccgtgaccgacatcaccgccaactccatcaccgtcaccttccgcgaggcccaggcagctgagggcttcttccgagaccgcagtgggaagttctgaatcaccgtttttactcttcttaaactgttttcttttgggcttggggtgggacttccagagatagggatgggttgggggcggggtaattattttatttaaaaaaataccgagcagcaaaaggggagaagatcccactactctcccaccacctgccctttctctgagggacgtttaccacgaggcctcaggctggggatggagagagttgctctgggagttggggtaccacccccagggcaggatggggacaggatcacctgcccgggacaccaccattatcattctcctctagtgacgcagcagctgg

SEQ ID NO: 117678 - DNA, 472 bp, Homo sapiens
  Payload ID: 2995
  Gene Symbol: CBX7
  Gene Name: chromobox homolog 7
  ENST ID: ENST00000434260
  CDS Start-End: 109-472
gagggtgacggggaccccgccagccccagcatcgcgcgccgcagccgcggccccgcagctccgcccccggcccggcccggccccgggcccgctcgcccgccgccccgcatggagctgtcagccatcggcgagcaggtgttcgccgtggagagcatccggaagaagcgcgtgcggaagggtaaagtcgagtatctggtgaagtggaaaggatggcccccaaaggaggagagagaccgagcatcggggtataggaagagaggtccgaaacccaagcggcttctgctgcagcggctgtacagcatggacctgcggagctcccacaaggccaagggcaaggagaagctctgcttctccctgacgtgcccactcggcagcgggagccctgagggggtggtcaaggcgggggcacctgagctggtggacaagggccccttggtgcccaccctgcccttcccgctccgcaagccccgaa

SEQ ID NO: 117679 - DNA, 3791 bp, Homo sapiens
  Payload ID: 2996
  Gene Symbol: CBX8
  Gene Name: chromobox homolog 8
  Uniprot ID: Q9HC52
  ENST ID: ENST00000269385
  CDS Start-End: 119-1288
gagagcgccgggagggggaggagaactgacgtcagcgggagagtattatggtctgtcgtgcgctggctgctgcttttctgctcctggaagcggccaaggggggaagcggcgagtcaacatggagctttcagcggtgggggagcgggtgttcgcggccgaagccctcctgaagcggcgcatacggaaaggacgcatggaatacctcgtgaaatggaagggatggtcgcagaagtacagcacatgggaaccggaggaaaacatcctggatgctcgcttgctcgcagcctttgaggaaagggaaagagagatggagctctatggccccaaaaagcgtggacccaagcccaaaaccttcctcctcaaagcgcaggccaaggcaaaggccaaaacttacgagtttcgaagtgactcagccaggggcatccggatcccctaccctggccgctcgccccaggacctggcctccacttcccgggcccgggagggccttcgaaacatgggtttgtccccgccagcgagcagcaccagcaccagcagcacctgccgcgcagaggcccctcgggaccgggaccgagaccgggatagggaccgggagcgggatcgagaaagggagagggagcgagagagggagcgggaacgtgagagggaacgagagcggggtaccagcagagtggatgacaagcccagctcaccgggggacagctcgaagaagcgaggccccaagccccggaaggagctcccggacccctcacagaggcccttaggcgaacccagcgccggcctcggagagtacctcaagggcaggaagctggacgacaccccttccggggcaggaaagtttccagccggccacagtgtgatccagctggcccgaagacaggactcggacctggtgcagtgtggtgtgaccagccctagctcagctgaggccacgggcaaactggctgtggacaccttcccggccagggtgataaagcacagggctgccttcctggaggccaaaggccagggtgccctagatcccaatggcacccgggtccgacatggctcaggcccccccagctctggggggggcctgtaccgggacatgggggcccaggggggaaggccctccctcatcgccaggatccctgtggccagaatcctgggggacccggaggaagagtcctggagcccctccctgactaacctggagaaggtggtggtcacggacgtgacctcaaactttttgaccgtcaccattaaggaaagtaacacggaccaaggcttttttaaagagaaaagatgaatgctgggtgggtgtgtccaggaggagagcaggggagagagtgagcgtgagcttggcatagtgatttttatttctgggtgggatgtggccttttggctggtcccgtccctgatgtcacccccaccccaccagcccctttcatccctccttcctccccctcagtttttgttggaaagattatctctagagttatattttctattagatgtaaatatgttatttaagaaaaatatctaaatatatatatttcaactcgaagttgttttatttaaaggagagagactctcattgtgctttagttggggcagcccgaatgagctggggcaggaggggcccccttgccccagagctctagggaagttgggccctgggtacaggtttctgagagtgtctggaggggcttggcctgcccacctcacccctcctcccttctcccacagcccaatgccagactcctggcaccaaggcccggcccagatttgctctctcttcccattggccaggcaggccaacaaaaggttggctccccaatcagaaaaaagggggggtggggtcagtctgttttccttttttctatttttttttttttaaggtaaagaagtctattagggaaaaaagtattaacttgaataagcttttcgtgtgtgatgttgaaggttaaaacgtccccagcaggcagggacaggaggtttctccccaggaccacaccaggaaatgcactttagggaggggtgtgtgtgtggtacacgcagatcgtgtgtatgtcatgtggataaaatctccccgttccctcgttcctttccttactccgcagaaagaaaagaaatccagcgaatctgtttacattcccgaaatgccaggataaattgggaggattgcgtgtcagtgctgagagttcgagacagttgttttgcaagaaaagtgttggggtggacttttccttttcgcgtcctctagctttgccaggagaagagacggtggcccccacctcccaggaagagttggacaagcctccctgcctggggagggcgggccgccagctctgtggtggacacatggccagacaggcccaccctgcgggacccacggagggaggcgcggcggcgggcgctgctaggagcagtggcttcgcacccagggcctctccacggccaggcttggagtgtggctgaggaccacggctcggagctcggagctggggctagactcacccccgcggctccggccgggcacgggaaggaggggcgaggcggggttttcatccaagaatgcgcatcggaacttttgctttttccttttttttcccccgtccttcttaaaagcaaaagctataatttataggtcttttcgattcgcagtgttctctatttgaactcgacattcaaactccgccaaagggggagggaggagcgggagttgggagtggggacggccgcggcggggaaggccgtgcgaggcggcggggcctgggacgcccctgcccggcggacttgaccgctctgcgctccgaggacgcagaatgcgcgcccctcttttgactcaaaagcacaaatcagtcccctccactccacccccgtctcttggagcacggatcccgcagcctccctgccctccccgcccttaaagggccagcgaagatctaacttcccattgcttgttgagggaggggcgcgggggccctgcacgccagaggaagcacagactcggggggagcgaggcggggagtcgggggtgggggagcttcgcgtggggtggggggtgctgggagggaaccccagcctcgtcctccgcactcccggcttctcagcctctcctccagactttcttgcctttaaagagagaaaaggagggaaacggtgtactacatgattgtgtttgtttttgaatatcaaattgcgcctataaagagaagcccctggaatggggatttttatctactcacatttgtaaaactggtattttagactttgtataaagaagcgccgttgaccgagtgtatctatttaaatgtcgatgctattttcagatgaaacttcactgaaggggcatgtctgttacctagtggacgggactgggggatacgcgtcttcacctggccgccgccttcccttctctcccgcctgtcctttactcccacctccctcccttcctgggggctgactttgccccttcccttggaccttctttccagccagctctgtccctgccgcccctccgtcctgctgtttgtccgtggccgtgtgtgtatgtgtctccttctctcgctcttgcgacgctgacctggggggtgggtgggcaggggccgggggccacgtggctgggagtctgcaaccgcgcagggtgtgtgcgctgttgggtttatttaattctaagatttgtacaaatctccaatcgatctccgcctcagctcaagagtgaagcttcggtacctatcttctgcggtcgtgaatgtctgtatccaataccgctttttacgtgtttaaatatatactttgtaaataga

SEQ ID NO: 117680 - DNA, 777 bp, Homo sapiens
  Payload ID: 2996
  Gene Symbol: CBX8
  Gene Name: chromobox homolog 8
  ENST ID: ENST00000413392
  CDS Start-End: 52-777
cactggacccggcgacgtcccccagcttcccgcgctggcgtttctcgcaggatgtccgccgcccacgttgggaagagcggtggacaggaaggacgcatggaatacctcgtgaaatggaagggatggtcgcagaagtacagcacatgggaaccggaggaaaacatcctggatgctcgcttgctcgcagcctttgaggaaagggaaagagagatggagctctatggccccaaaaagcgtggacccaagcccaaaaccttcctcctcaaagcgcaggccaaggcaaaggccaaaacttacgagtttcgaagtgactcagccaggggcatccggatcccctaccctggccgctcgccccaggacctggcctccacttcccgggcccgggagggccttcgaaacatgggtttgtccccgccagcgagcagcaccagcaccagcagcacctgccgcgcagaggcccctcgggaccgggaccgagaccgggatagggaccgggagcgggatcgagaaagggagagggagcgagagagggagcgggaacgtgagagggaacgagagcggggtaccagcagagtggatgacaagcccagctcaccgggggacagctcgaagaagcgaggccccaagccccggaaggagctcccggacccctcacagaggcccttaggcgaacccagcgccggcctcggagagtacctcaagggcaggaagctggacgacaccccttccggggcaggaaagtttccagccggccacagtgtgatccagctggcccga

SEQ ID NO: 117681 - DNA, 665 bp, Homo sapiens
  Payload ID: 2996
  Gene Symbol: CBX8
  Gene Name: chromobox homolog 8
  ENST ID: ENST00000427800
  CDS Start-End: 140-665
ggccttgggaccagtttccagaatgtcgggtcaccctgcggcattcccgcagcaggcggcaggcgcccagccctagctcggcgtctaggaagcagcgctgcgggacgcccgcccggctccgggaccgcgggagggacgcatggaatacctcgtgaaatggaagggatggtcgcagaagtacagcacatgggaaccggaggaaaacatcctggatgctcgcttgctcgcagcctttgaggaaagggaaagagagatggagctctatggccccaaaaagcgtggacccaagcccaaaaccttcctcctcaaagcgcaggccaaggcaaaggccaaaacttacgagtttcgaagtgactcagccaggggcatccggatcccctaccctggccgctcgccccaggacctggcctccacttcccgggcccgggagggccttcgaaacatgggtttgtccccgccagcgagcagcaccagcaccagcagcacctgccgcgcagaggcccctcgggaccgggaccgagaccgggatagggaccgggagcgggatcgagaaagggagagggagcgagagagggagcgggaacgtgagagggaacgagagcggggtaccagcagagtggatgacaagcccagctcaccgggggacagctcgaagaagcgaggcc

SEQ ID NO: 117682 - DNA, 6457 bp, Homo sapiens
  Payload ID: 2997
  Gene Symbol: CHD1
  Gene Name: chromodomain helicase DNA binding protein 1
  Uniprot ID: O14646
  ENST ID: ENST00000284049
  CDS Start-End: 149-5281
gtgaatcaaaggagagtcccagaaaacctgtgactgttgaagaaaattcatctgtgaatttttatattcaaggagtcagtatttatattcatcttttaaactgggaagatttatattttactttaaaacttcttgataataatttacaatgaatggacacagtgatgaagaaagtgttagaaacagtagtggagaatcaagccagtcggatgatgattctgggtcagcttcaggctctggatctggttcgagttctggaagcagtagtgatggaagcagtagccagtcaggtagcagtgactctgactccggatctgaatcaggcagtcagtcagagtctgagtcagacacttcccgagaaaacaaagttcaagcaaaaccaccgaaagttgatggagctgagttttggaaatctagtcctagtattctggccgttcagagatctgcaatcctcaagaagcagcaacagcagcagcagcaacaacaacatcaagcctcatctaatagcggatcagaagaggattcctctagcagtgaagattccgatgactcatcaagtgaggtcaaaaggaaaaagcataaagatgaagattggcaaatgtctgggtcaggatctccatctcagtctggttcagattcagaatctgaagaagagagagagaaaagcagttgtgatgaaacagaatctgattatgagccaaaaaacaaagtcaaaagcagaaaacctcaaaatagatctaagtcaaaaaatggaaagaagattcttggacaaaaaaagagacagattgattcatctgaggaggatgatgatgaagaagattatgataatgataaaagaagttctcgtcgccaagcaactgttaatgttagctataaggaggatgaagaaatgaaaacagattctgatgacctactggaagtctgtggagaggatgttcctcaacctgaggaagaggaatttgaaaccatagaaagatttatggattgtcggattgggagaaaaggagctactggtgctactacaaccatctatgcagttgaagcagatggtgacccaaatgcaggctttgaaaaaaacaaagaaccaggagagattcagtatttaattaaatggaaaggatggtcccatatccacaacacttgggagacagaagaaaccctcaagcagcagaatgttagaggaatgaaaaaattggataattataagaaaaaagatcaggaaacaaaaagatggttgaaaaatgcctctccagaagatgtggaatattataattgccagcaagaacttacagatgatctacataaacagtatcaaatagtggaacgtataattgctcattccaatcaaaagtcagcagctggttatcctgattattactgcaaatggcagggccttccatactcagagtgcagctgggaagatggagctctcatttccaaaaagtttcaagcatgcattgatgagtattttagcaggaaccaatcaaaaaccactccttttaaagattgcaaagtattaaaacaaaggccaaggtttgtagccctgaagaagcagccatcctatattggaggacatgagggcttagaattaagagattatcaactgaatggtttaaattggcttgctcattcttggtgcaaaggaaatagttgcatactcgctgatgaaatgggccttggaaaaacaatacagacgatctcatttctgaattatttgtttcatgaacatcaattatatggaccttttttattggtagtaccgctctccactcttacttcctggcaaagggaaattcagacttgggcttctcaaatgaatgctgtggtttatttaggtgacattaacagcagaaacatgataagaactcatgaatggacgcatcatcagaccaaacggttaaaatttaatatattgttaacaacttatgaaattttattaaaagataaggcattccttggaggtctaaattgggcatttataggtgttgatgaagcacaccgattaaagaatgatgactcccttctgtataaaactttaatagattttaaatccaatcatcgtctccttatcactggaactcctctacagaattccctcaaagagctctggtctttgctacatttcattatgccagaaaagttttcttcctgggaagattttgaagaagaacatggcaaagggagagaatatggttatgcaagccttcacaaggagcttgagccatttctgttacgccgagttaagaaagatgtggaaaaatctcttcctgccaaggttgagcagattttaagaatggaaatgagtgctttacagaaacaatattacaaatggattttaactaggaattacaaagccctcagcaaaggttccaagggcagtacctcaggctttttgaacattatgatggagctaaagaaatgttgtaaccattgctacctcattaaaccaccagataataatgaattctataataaacaggaggccttacaacacttaattcgtagtagcggaaaattgattcttcttgacaagctattaattcgcctaagagaacgaggcaatcgagttcttattttttcacaaatggtgcggatgttagatatacttgcagaatatttgaaatatcgtcaattcccctttcaaagattagatggatcaataaaaggagaactgaggaaacaagctctagatcattttaatgctgagggatcagaggatttttgctttttgctgtccacaagagctggaggtctagggattaatttagcctctgctgacactgttgttatatttgattccgattggaatccacagaatgatcttcaggcacaggctagagcccatcgaattgggcaaaagaaacaggtgaatatttatcgtctagttacaaagggatcagttgaagaagatattcttgaaagggcgaaaaagaagatggttttagatcatcttgtaattcaaagaatggacacaactgggaagacagtactacatacaggttctgccccatcaagttctactcctttcaataaagaagagttatcagccattttaaagtttggtgctgaagaactttttaaggaacctgaaggagaagaacaagagccccaggaaatggatatagatgaaatcttgaagagagctgaaactcatgaaaatgaaccaggtcctttaactgtaggagatgaattgctttcccagttcaaggttgccaacttctcaaatatggatgaggatgacattgagttggaacctgaaagaaattcaaagaattgggaggaaattattccagaagatcaaagaagacgattagaagaagaagaaagacaaaaggaacttgaagaaatttatatgctcccaagaatgagaaattgtgcaaaacagattagtttcaatggaagtgaagggaggcgcagtagaagtaggagatactctggatctgatagtgattccatctcagaagggaaaaggccaaagaaacgtggaagaccacggactattcctcgggagaatattaaaggatttagtgatgcagaaattaggcggtttatcaagagctataagaaatttggtggtcctctggaaagattagatgcaattgctcgagatgctgagttagttgataagtcagaaacagaccttagacgactgggagaattggtacataatggttgcattaaagcattaaaggatagttcttcaggaacagaacgaacaggtggtagactcggaaaagtgaagggtccaacattccgaatatcaggagtacaggtgaatgccaaactagtcatctcccatgaagaagaattaatacctttgcacaaatccattccttctgatccagaagaaagaaagcagtatactatcccatgccacacaaaggcagctcattttgatatagactggggcaaagaagatgattccaatttgttaattggcatctatgaatatggatatggaagctgggaaatgattaaaatggatcctgacctcagtctaacacacaagattcttccagatgatcccgataaaaaaccacaagcaaaacagttgcagacccgtgcagactacctcatcaaattacttagtagagatcttgcaaaaaaagaagctctttctggtgcgggaagttcaaagaggagaaaagcaagagctaagaagaataaagcaatgaagtctataaaagtgaaagaggaaataaagagtgattcttctcctctgccttcagagaagtctgatgaagatgatgataaattgagtgaatccaagtctgatggtagggaaagatccaagaaatcttcagtgtcagatgctccagttcatatcacggcaagtggtgaaccagttcccatttctgaagaatctgaagagctggatcagaagacattcagcatttgtaaagaaagaatgaggcctgttaaagcagctttgaaacaacttgataggcctgagaaaggcctttcagaaagagaacaactagagcatactagacaatgtttaataaaaattggagaccatatcacagaatgtctaaaagagtatacaaatcctgaacaaattaagcaatggagaaaaaacctgtggatttttgtatctaagtttactgaatttgatgcaagaaaattacataaattatataagcatgctattaaaaaacggcaggagtctcagcaaaacagtgatcaaaacagcaacttgaatcctcacgtgattagaaatccagatgtggaaagattaaaagagaatacaaatcacgatgatagcagcagggacagttattcctctgatagacacttaactcagtaccatgatcatcataaagaccgacatcagggagattcttacaaaaaaagtgattccaggaaaagaccctattcttcttttagtaatggtaaagaccatcgtgattgggatcactacaagcaagacagcagatattacagtgacagagagaaacacagaaaactggatgatcacaggagtagagatcacaggtcaaatttggaaggaagtttaaaagatagatctcattctgatcatcgttctcactcagatcatcggttacattcagaccaccggtcaagttctgaatatacgcaccataaatcttccagggattataggtatcactcagactggcaaatggaccacagagcttccagcagtggccctaggtcaccactagatcagagatctccttatggctccagatctccatttgaacattcagttgaacacaaaagtacaccggagcatacctggagtagtcggaaaacataacaaaaactgatacttcgtctttctggacttttcttttagccatatatcataaaccaacacagtaattgccttacatgacttgaaagatataaacagatcttctatcagtagcagtattgttacttctttccaggatgcaaggtctattatcccaacagaagagaaaatatttttatatttaaggattatgctgcactgtactacaaaattgtagtacttttttttgttttcttttttaaagaaatggaaaatgtttactattacagggacctcaacactgccctcccatacaggctggataaaactgtttttaagtcagtgattttagactgacctccatttaaattatgtttatatatgaactttactctgacctgtgatcatgtttcaggaaggaatgaaagagagttctttcttaataaagaaaaacactcaaggactttgttcatttccaaagctacttgtttacattgtacactgcgaccaccttgccgcttttcatcacaagcttgaatatttaaattctgtacttatatctgtaaaatagccaggaatttcctgtttgtgatctattatgcctttttacaaaaaaaatggctgtaaattattgtaaatattaaaggaactttccttacttccttccctttctcaggctttttttgactgttcctttccctaccaactcaggccttcttattaaaaaaaaaaaaatcagtgtaataacactttttaatgatttgtcttgatggaatcattgtttagaatgtaaaaatggggaaaggggccacttaattccattagtcctctttttatactgaatattttattagatacatgttattcccttttttttccttttttagtcaatattgtgtttgtagttttaaaaaatggcgagatatgtaaaatctaaactgcatgctctggaaacacttttttcagatgcatctggtttaaaagggtaggtgtataaacacttttcagaatccaaaacggccaaaagttattgtaaatccgtttgttttcccgttttatgtgggcaataatgtcaaatgtgctatgcagccaggttaacattttagataaacttgattgacttttaatataaactgttacaatgcacactgattgtatataaaaacgttatatatgacaaattaaatttaagaaaaagga

SEQ ID NO: 117683 - DNA, 736 bp, Homo sapiens
  Payload ID: 2997
  Gene Symbol: CHD1
  Gene Name: chromodomain helicase DNA binding protein 1
  ENST ID: ENST00000505657
  CDS Start-End: 1-342
gaatccaagtctgatggtagggaaagatccaagaaatcttcagtgtcagatgctccagttcatatcacggcaagtggtgaaccagttcccatttctgaagaatctgaagagctggatcagaagacattcagcatttgtaaagaaagaatgaggcctgttaaagcagctttgaaacaacttgataggcctgagaaaggcctttcagaaagagaacaactagagcatactagacaatgtttaataaaaattggagaccatatcacagaatgtctaaaagagtatacaaatcctgaacaaattaagcaatggagaaacaaaacagtgatcaaaacagcaacttgaatcctcacgtgattagaaatccagatgtggaaagattaaaagagaatacaaatcacgatgatagcagcagggacagttattcctctgatagacacttaactcagtaccatgatcatcataaagaccgacatcagggagattcttacaaaaaaagtgattccaggaaaagaccctattcttcttttagtaatggtaaagaccatcgtgattgggatcactacaagcaagacagcagatattacagtgacagagagaaacacagaaaactggatgatcacaggagtagagatcacaggtcaaatttggaaggaagtttaaaagatagatctcattctgatcatcgttctcactcagatcatcggttacattcagaccaccggtcaagttctgaata

SEQ ID NO: 117684 - DNA, 848 bp, Homo sapiens
  Payload ID: 2997
  Gene Symbol: CHD1
  Gene Name: chromodomain helicase DNA binding protein 1
  ENST ID: ENST00000512844
  CDS Start-End: 1-69
atttctgaagaatctgaagagctggatcagaagacattcagcattaaacctgtggatttttgtatctaagtttactgaatttgatgcaagaaaattacataaattatataagcatgctattaaaaaacggcaggagtctcagcaaaacagtgatcaaaacagcaacttgaatcctcacgtgattagaaatccagatgtggaaagattaaaagagaatacaaatcacgatgatagcagcagggacagttattcctctgatagacacttaactcagtaccatgatcatcataaagaccgacatcagggagattcttacaaaaaaagtgattccaggaaaagaccctattcttcttttagtaatggtaaagaccatcgtgattgggatcactacaagcaagacagcagatattacagtgacagagagaaacacagaaaactggatgatcacaggagtagagatcacaggtcaaatttggaaggaagtttaaaagatagatctcattctgatcatcgttctcactcagatcatcggttacattcagaccaccggtcaagttctgaatatacgcaccataaatcttccagggattataggtatcactcagactggcaaatggaccacagagcttccagcagtggccctaggtcaccactagatcagagatctccttatggctccagatctccatttgaacattcagttgaacacaaaagtacaccggagcatacctggagtagtcggaaaacataacaaaaactgatacttcgtctttctggacttttcttttagccatatatcataaaccaacacagtaattgccttacatgacttgaaagatataaacaga

SEQ ID NO: 117685 - DNA, 817 bp, Homo sapiens
  Payload ID: 2997
  Gene Symbol: CHD1
  Gene Name: chromodomain helicase DNA binding protein 1
  ENST ID: ENST00000511067
  CDS Start-End: 1-817
atcccgataaaaaaccacaagcaaaacagttgcagacccgtgcagactacctcatcaaattacttagtagagatcttgcaaaaaaagaagctctttctggtgcgggaagttcaaagaggagaaaagcaagagctaagaagaataaagcaatgaagtctataaaagtgaaagaggaaataaagagtgattcttctcctctgccttcagagaagtctgatgaagatgatgataaagatgagatcagttctgtgaaacatccaaataaaaaaattaaaacagaaagagacagtgaagaaaaacctgagccagatgtttatataaagaaggaaccagaagaaaagagggaagcaaaagaaaaggagaataaaaaagaacttaaaagggagataaaagaaaaagaggataagaaagatataaaggaaaaagattttaaagaaaaaagagaaaacaaagtaaaagaagctatacagaaagaaaaagacataaaggaagaaaagttgagtgaatccaagtctgatggtagggaaagatccaagaaatcttcagtgtcagatgctccagttcatatcacggcaagtggtgaaccagttcccatttctgaagaatctgaagagctggatcagaagacattcagcatttgtaaagaaagaatgaggcctgttaaagcagctttgaaacaacttgataggcctgagaaaggcctttcagaaagagaacaactagagcatactagacaatgtttaataaaaattggagaccatatcacagaatgtctaaaagagtatacaaatcctgaacaaattaagcaatggagaaa

SEQ ID NO: 117686 - DNA, 8095 bp, Homo sapiens
  Payload ID: 2997
  Gene Symbol: CHD1
  Gene Name: chromodomain helicase DNA binding protein 1
  Uniprot ID: O14646
  ENST ID: ENST00000614616
  CDS Start-End: 568-5700
gggaggcggaggcgacggcgacctcggtggcggcggcggctacgacggagacggttgcgctcgcttgctttctcggcgtcatggcggctgccgggggcagataagcggagggagcgggagcgcgcgcgcgacggcggcggcggcggcggcgacgactggttacttatagctcttgctgccctcgcccttggtgcttcaataatgaattgttagctccactccgcaggggatcgcgcgttggtgctgcggaccggggcttccccttcccctccgcgtctgtccccttccccctcccccgcacggactcttgcttaccccgagacgccggagccctaggactgggcggcggagatcccgggcctgggcgcgggggaggccgtccacccgagtcggctccctccgccccgccaagcccgccggtgaatcaaaggagagtcccagaaaacctgtgactgttgaagaaaattcatctgtgaatttttatattcaaggagtcagtatttatattcatcttttaaactgggaagatttatattttactttaaaacttcttgataataatttacaatgaatggacacagtgatgaagaaagtgttagaaacagtagtggagaatcaagccagtcggatgatgattctgggtcagcttcaggctctggatctggttcgagttctggaagcagtagtgatggaagcagtagccagtcaggtagcagtgactctgactccggatctgaatcaggcagtcagtcagagtctgagtcagacacttcccgagaaaacaaagttcaagcaaaaccaccgaaagttgatggagctgagttttggaaatctagtcctagtattctggccgttcagagatctgcaatcctcaagaagcagcaacagcagcagcagcaacaacaacatcaagcctcatctaatagcggatcagaagaggattcctctagcagtgaagattccgatgactcatcaagtgaggtcaaaaggaaaaagcataaagatgaagattggcaaatgtctgggtcaggatctccatctcagtctggttcagattcagaatctgaagaagagagagagaaaagcagttgtgatgaaacagaatctgattatgagccaaaaaacaaagtcaaaagcagaaaacctcaaaatagatctaagtcaaaaaatggaaagaagattcttggacaaaaaaagagacagattgattcatctgaggaggatgatgatgaagaagattatgataatgataaaagaagttctcgtcgccaagcaactgttaatgttagctataaggaggatgaagaaatgaaaacagattctgatgacctactggaagtctgtggagaggatgttcctcaacctgaggaagaggaatttgaaaccatagaaagatttatggattgtcggattgggagaaaaggagctactggtgctactacaaccatctatgcagttgaagcagatggtgacccaaatgcaggctttgaaaaaaacaaagaaccaggagagattcagtatttaattaaatggaaaggatggtcccatatccacaacacttgggagacagaagaaaccctcaagcagcagaatgttagaggaatgaaaaaattggataattataagaaaaaagatcaggaaacaaaaagatggttgaaaaatgcctctccagaagatgtggaatattataattgccagcaagaacttacagatgatctacataaacagtatcaaatagtggaacgtataattgctcattccaatcaaaagtcagcagctggttatcctgattattactgcaaatggcagggccttccatactcagagtgcagctgggaagatggagctctcatttccaaaaagtttcaagcatgcattgatgagtattttagcaggaaccaatcaaaaaccactccttttaaagattgcaaagtattaaaacaaaggccaaggtttgtagccctgaagaagcagccatcctatattggaggacatgagggcttagaattaagagattatcaactgaatggtttaaattggcttgctcattcttggtgcaaaggaaatagttgcatactcgctgatgaaatgggccttggaaaaacaatacagacgatctcatttctgaattatttgtttcatgaacatcaattatatggaccttttttattggtagtaccgctctccactcttacttcctggcaaagggaaattcagacttgggcttctcaaatgaatgctgtggtttatttaggtgacattaacagcagaaacatgataagaactcatgaatggacgcatcatcagaccaaacggttaaaatttaatatattgttaacaacttatgaaattttattaaaagataaggcattccttggaggtctaaattgggcatttataggtgttgatgaagcacaccgattaaagaatgatgactcccttctgtataaaactttaatagattttaaatccaatcatcgtctccttatcactggaactcctctacagaattccctcaaagagctctggtctttgctacatttcattatgccagaaaagttttcttcctgggaagattttgaagaagaacatggcaaagggagagaatatggttatgcaagccttcacaaggagcttgagccatttctgttacgccgagttaagaaagatgtggaaaaatctcttcctgccaaggttgagcagattttaagaatggaaatgagtgctttacagaaacaatattacaaatggattttaactaggaattacaaagccctcagcaaaggttccaagggcagtacctcaggctttttgaacattatgatggagctaaagaaatgttgtaaccattgctacctcattaaaccaccagataataatgaattctataataaacaggaggccttacaacacttaattcgtagtagcggaaaattgattcttcttgacaagctattaattcgcctaagagaacgaggcaatcgagttcttattttttcacaaatggtgcggatgttagatatacttgcagaatatttgaaatatcgtcaattcccctttcaaagattagatggatcaataaaaggagaactgaggaaacaagctctagatcattttaatgctgagggatcagaggatttttgctttttgctgtccacaagagctggaggtctagggattaatttagcctctgctgacactgttgttatatttgattccgattggaatccacagaatgatcttcaggcacaggctagagcccatcgaattgggcaaaagaaacaggtgaatatttatcgtctagttacaaagggatcagttgaagaagatattcttgaaagggcgaaaaagaagatggttttagatcatcttgtaattcaaagaatggacacaactgggaagacagtactacatacaggttctgccccatcaagttctactcctttcaataaagaagagttatcagccattttaaagtttggtgctgaagaactttttaaggaacctgaaggagaagaacaagagccccaggaaatggatatagatgaaatcttgaagagagctgaaactcatgaaaatgaaccaggtcctttaactgtaggagatgaattgctttcccagttcaaggttgccaacttctcaaatatggatgaggatgacattgagttggaacctgaaagaaattcaaagaattgggaggaaattattccagaagatcaaagaagacgattagaagaagaagaaagacaaaaggaacttgaagaaatttatatgctcccaagaatgagaaattgtgcaaaacagattagtttcaatggaagtgaagggaggcgcagtagaagtaggagatactctggatctgatagtgattccatctcagaagggaaaaggccaaagaaacgtggaagaccacggactattcctcgggagaatattaaaggatttagtgatgcagaaattaggcggtttatcaagagctataagaaatttggtggtcctctggaaagattagatgcaattgctcgagatgctgagttagttgataagtcagaaacagaccttagacgactgggagaattggtacataatggttgcattaaagcattaaaggatagttcttcaggaacagaacgaacaggtggtagactcggaaaagtgaagggtccaacattccgaatatcaggagtacaggtgaatgccaaactagtcatctcccatgaagaagaattaatacctttgcacaaatccattccttctgatccagaagaaagaaagcagtatactatcccatgccacacaaaggcagctcattttgatatagactggggcaaagaagatgattccaatttgttaattggcatctatgaatatggatatggaagctgggaaatgattaaaatggatcctgacctcagtctaacacacaagattcttccagatgatcccgataaaaaaccacaagcaaaacagttgcagacccgtgcagactacctcatcaaattacttagtagagatcttgcaaaaaaagaagctctttctggtgcgggaagttcaaagaggagaaaagcaagagctaagaagaataaagcaatgaagtctataaaagtgaaagaggaaataaagagtgattcttctcctctgccttcagagaagtctgatgaagatgatgataaattgagtgaatccaagtctgatggtagggaaagatccaagaaatcttcagtgtcagatgctccagttcatatcacggcaagtggtgaaccagttcccatttctgaagaatctgaagagctggatcagaagacattcagcatttgtaaagaaagaatgaggcctgttaaagcagctttgaaacaacttgataggcctgagaaaggcctttcagaaagagaacaactagagcatactagacaatgtttaataaaaattggagaccatatcacagaatgtctaaaagagtatacaaatcctgaacaaattaagcaatggagaaaaaacctgtggatttttgtatctaagtttactgaatttgatgcaagaaaattacataaattatataagcatgctattaaaaaacggcaggagtctcagcaaaacagtgatcaaaacagcaacttgaatcctcacgtgattagaaatccagatgtggaaagattaaaagagaatacaaatcacgatgatagcagcagggacagttattcctctgatagacacttaactcagtaccatgatcatcataaagaccgacatcagggagattcttacaaaaaaagtgattccaggaaaagaccctattcttcttttagtaatggtaaagaccatcgtgattgggatcactacaagcaagacagcagatattacagtgacagagagaaacacagaaaactggatgatcacaggagtagagatcacaggtcaaatttggaaggaagtttaaaagatagatctcattctgatcatcgttctcactcagatcatcggttacattcagaccaccggtcaagttctgaatatacgcaccataaatcttccagggattataggtatcactcagactggcaaatggaccacagagcttccagcagtggccctaggtcaccactagatcagagatctccttatggctccagatctccatttgaacattcagttgaacacaaaagtacaccggagcatacctggagtagtcggaaaacataacaaaaactgatacttcgtctttctggacttttcttttagccatatatcataaaccaacacagtaattgccttacatgacttgaaagatataaacagatcttctatcagtagcagtattgttacttctttccaggatgcaaggtctattatcccaacagaagagaaaatatttttatatttaaggattatgctgcactgtactacaaaattgtagtacttttttttgttttcttttttaaagaaatggaaaatgtttactattacagggacctcaacactgccctcccatacaggctggataaaactgtttttaagtcagtgattttagactgacctccatttaaattatgtttatatatgaactttactctgacctgtgatcatgtttcaggaaggaatgaaagagagttctttcttaataaagaaaaacactcaaggactttgttcatttccaaagctacttgtttacattgtacactgcgaccaccttgccgcttttcatcacaagcttgaatatttaaattctgtacttatatctgtaaaatagccaggaatttcctgtttgtgatctattatgcctttttacaaaaaaaatggctgtaaattattgtaaatattaaaggaactttccttacttccttccctttctcaggctttttttgactgttcctttccctaccaactcaggccttcttattaaaaaaaaaaaaatcagtgtaataacactttttaatgatttgtcttgatggaatcattgtttagaatgtaaaaatggggaaaggggccacttaattccattagtcctctttttatactgaatattttattagatacatgttattcccttttttttccttttttagtcaatattgtgtttgtagttttaaaaaatggcgagatatgtaaaatctaaactgcatgctctggaaacacttttttcagatgcatctggtttaaaagggtaggtgtataaacacttttcagaatccaaaacggccaaaagttattgtaaatccgtttgttttcccgttttatgtgggcaataatgtcaaatgtgctatgcagccaggttaacattttagataaacttgattgacttttaatataaactgttacaatgcacactgattgtatataaaaacgttatatatgacaaattaaatttaagaaaaaggatatgtgggctcctgtaattttctgctgcattcttactccctcaagcacttaccaccaccaccaccgccccctacccccgtttttaagtaacattttgctgccagaaaaagtattttggtaagcagttgaatatttgtaatgtgtagcattacaactaaatctgttttggagactatgaatattcctatgaagtaaaacttaggtcatagacatttttgttggccccttttggcttcctacagatattattatgggatgctttatatttattcacagatttttattttgttttatattcagcgggaagtttttaagtcatgtggcacacattcttgcatgtatgctttgatgtaacaaatttgaatctttgacgaatataagtatgtggacataatttctatagtattgctatgtgtgtcactgttaattagctgtgggagcaacctacagatatttgtccataggtgtattttttaatattttcctttgtccaattaggtttatgtgtataaaagcttgtgggtttttttgctttttgttttgttttttgcagtaatttctctttctgatacagttaccctgaagaataataatgctttgtttcttttctggtatatgagagaacatgtgagggagtagctcagttttttaaacatctaatttataattaaatataaaagtaatgaaggtagtcctggcacacatttttgaaacttttatcacttttctctacatttagtatgactattttattccacaagatagcatttgactaattcataatgcttaagtcataagatggtggctggcattttttaatttattactaaaagctaagatatttgcattatattgtgcaaatttcacagaacaatgttgcattttctgagataaggctctaattttttaaatagtgctacatttagttgaaagtttcagtcagctagttagctgagttgaatgaaaaatatagaactgtatgtacatttatcaaatgataaaatatgttcatttttgtaagaaatcagaaaaattaagacgcaatggtgaagaacattagtacataaatatagcagaacattctccataaaatattctgttttcattctgctttgttatttttatccagttatgtttaatttttcaagggtgagagattatgtatagtactgtaccaattaaccttccacttttatacaataaataattcttactaaaa

SEQ ID NO: 117687 - DNA, 2484 bp, Homo sapiens
  Payload ID: 2998
  Gene Symbol: CHD1L
  Gene Name: chromodomain helicase DNA binding protein 1-like
  ENST ID: ENST00000361293
  CDS Start-End: 377-2227
gcgttgggaagttgggagggaggtgcgcgcttggccgcgcggggcggggcctctaccggcccgatggagcgcgcgggcgctactagccgcgggggccaagcccctggcttcttactgcggcttcatactgagggccgagccgaggcggcgcgggtgcaggagcaggacttacggcagtgggggctgacagattcccttggagtgttcttgttgtggatgaagctcacaggttgaaaaaccaaagctccctgctgcataagaccttgtcagagcaagtgaactgcacaaactcttgcagccatttctgctgaggcgagtgaaagctgaggtagctacagagcttcccaagaagacagaagtagtgatataccatggcatgtcagcattgcagaagaaatactacaaggccattttgatgaaagacctagatgcatttgaaaatgagacggcaaagaaagttaaactacagaacattttgtcccagcttcgaaagtgtgtggatcacccatatttgtttgatggtgtggagccggagccttttgaagttggagaccacctgactgaggctagtgggaagcttcacctgctggataagctactagcattcctgtattctgggggccatcgggttttacttttctcccaaatgacccagatgttggatattctccaagactatatggattacagaggctacagctatgagcgtgtggatggttctgtgagaggagaagagagacacttggccattaagaactttggacagcagcccattttcgtttttctcctgagtactagggcaggtggagttggcatgaacttaacagcagcagatactgtgatttttgttgacagtgactttaatcctcagaatgacttgcaagcagctgccagggctcatcgcattggccaaaacaagtctgttaaagttattcggctgattggtcgagacactgtggaagaaatagtctataggaaagcagcctccaaactgcagctcaccaacatgatcatagaaggaggccattttactctgggagcccagaaacccgctgccgatgctgacctccagttgagtgagatactcaaatttggtttggataaactgctggcctctgaggggagcaccatggatgaaatagacctggagtccatcctgggagaaacaaaagatggccagtgggtctctgatgccttgcctgcagcagaaggagggagcagagatcaagaggaaggaaaaaatcatatgtacttatttgaaggtaaagattattctaaagagcccagtaaggaagacagaaaatcatttgaacaactggtaaaccttcagaaaacccttttggagaaagctagtcaagagggccgatcactccgaaataaaggcagtgttctcatcccaggccttgtggagggatctaccaaaaggaagcgggttctgagtccagaagagctggaggacagacagaagaaaagacaagaagcagctgccaagagaaggagactcatagaggagaagaagaggcaaaaggaagaggctgaacataagaaaaagatggcctggtgggaatccaacaattaccagtccttctgcctgccctctgaggagagcgagccagaggaccttgagaatggggaagagagctctgctgagctggattaccaagacccagatgctacttccctcaagtacgttagtggtgatgtcacccaccctcaggctggggccgaggatgctctcattgtgcactgcgtagatgactctggccactggggcagaggtggtttatttacagctctggaaaagcgatccgctgagccaagaaaaatatatgagctggctgggaaaatgaaagacctgagtttgggaggtgtccttttatttcctgttgatgataaagaatcaagaaacaaagggcaagatttgttggccttgattgtggctcagcatcgtgatcgttccaatgtcctgtctggcattaagatggcagccctagaagagggcctgaagaagatatttttagcagcaaaaaagaagaaagcaagtgttcatcttccacgtattggacatgccacgaaaggttttaactggtatggtactgagcgacttattcggaaacatctggctgcaagaggcatcccaacttacatatattattttcctagaagcaagtctgctgtccttcattcacagtcttcatcttcctcctcaagacagctggtgccttaagaattggcccagcctcagatcctgtctttagcaaccagctaatatttacccagaggtactgcaatagagtatttcaaaatggaatcaggatctggtgggcctcagaaattgtctcttttctgagtttcagtttggttctcctggatgttttgctctgttttggtacctgtaatatagggaaacacaactttttttgggaaagccctttgaccccagcttgctagttgcataataataaattttctgttcctaatggt

SEQ ID NO: 117688 - DNA, 2967 bp, Homo sapiens
  Payload ID: 2998
  Gene Symbol: CHD1L
  Gene Name: chromodomain helicase DNA binding protein 1-like
  Uniprot ID: Q86WJ1
  ENST ID: ENST00000369258
  CDS Start-End: 21-2714
gcggggcctctaccggcccgatggagcgcgcgggcgctactagccgcgggggccaagcccctggcttcttactgcggcttcatactgagggccgagccgaggcggcgcgggtgcaggagcaggacttacggcagtgggggctgacagggattcacctacgctcttaccagctggagggagtaaactggctcgcccagcgcttccattgtcagaatggctgtatcctgggagatgagatgggcctggggaagacctgccagactattgctctcttcatttatttggcaggaagattaaatgatgaagggccatttctgattctttgtcccttgtctgttttgagcaactggaaagaagaaatgcagagatttgctccaggtctttcctgtgtaacatatgcaggcgacaaggaggaaagagcctgccttcagcaagacctgaaacaggagtcacgttttcatgtgctactgactacctatgagatttgcttgaaagatgcatcatttctaaaatcattcccttggagtgttcttgttgtggatgaagctcacaggttgaaaaaccaaagctccctgctgcataagaccttgtcagagttctcagtagtcttcagtctcctgttgaccggaactcccatccagaacagcctccaagagctctactccctcctcagttttgtggagcctgatctcttttccaaggaagaggtgggagattttattcaacgctaccaggatattgagaaagaatctgagtcagcaagtgaactgcacaaactcttgcagccatttctgctgaggcgagtgaaagctgaggtagctacagagcttcccaagaagacagaagtagtgatataccatggcatgtcagcattgcagaagaaatactacaaggccattttgatgaaagacctagatgcatttgaaaatgagacggcaaagaaagttaaactacagaacattttgtcccagcttcgaaagtgtgtggatcacccatatttgtttgatggtgtggagccggagccttttgaagttggagaccacctgactgaggctagtgggaagcttcacctgctggataagctactagcattcctgtattctgggggccatcgggttttacttttctcccaaatgacccagatgttggatattctccaagactatatggattacagaggctacagctatgagcgtgtggatggttctgtgagaggagaagagagacacttggccattaagaactttggacagcagcccattttcgtttttctcctgagtactagggcaggtggagttggcatgaacttaacagcagcagatactgtgatttttgttgacagtgactttaatcctcagaatgacttgcaagcagctgccagggctcatcgcattggccaaaacaagtctgttaaagttattcggctgattggtcgagacactgtggaagaaatagtctataggaaagcagcctccaaactgcagctcaccaacatgatcatagaaggaggccattttactctgggagcccagaaacccgctgccgatgctgacctccagttgagtgagatactcaaatttggtttggataaactgctggcctctgaggggagcaccatggatgaaatagacctggagtccatcctgggagaaacaaaagatggccagtgggtctctgatgccttgcctgcagcagaaggagggagcagagatcaagaggaaggaaaaaatcatatgtacttatttgaaggtaaagattattctaaagagcccagtaaggaagacagaaaatcatttgaacaactggtaaaccttcagaaaacccttttggagaaagctagtcaagagggccgatcactccgaaataaaggcagtgttctcatcccaggccttgtggagggatctaccaaaaggaagcgggttctgagtccagaagagctggaggacagacagaagaaaagacaagaagcagctgccaagagaaggagactcatagaggagaagaagaggcaaaaggaagaggctgaacataagaaaaagatggcctggtgggaatccaacaattaccagtccttctgcctgccctctgaggagagcgagccagaggaccttgagaatggggaagagagctctgctgagctggattaccaagacccagatgctacttccctcaagtacgttagtggtgatgtcacccaccctcaggctggggccgaggatgctctcattgtgcactgcgtagatgactctggccactggggcagaggtggtttatttacagctctggaaaagcgatccgctgagccaagaaaaatatatgagctggctgggaaaatgaaagacctgagtttgggaggtgtccttttatttcctgttgatgataaagaatcaagaaacaaagggcaagatttgttggccttgattgtggctcagcatcgtgatcgttccaatgtcctgtctggcattaagatggcagccctagaagagggcctgaagaagatatttttagcagcaaaaaagaagaaagcaagtgttcatcttccacgtattggacatgccacgaaaggttttaactggtatggtactgagcgacttattcggaaacatctggctgcaagaggcatcccaacttacatatattattttcctagaagcaagtctgctgtccttcattcacagtcttcatcttcctcctcaagacagctggtgccttaagaattggcccagcctcagatcctgtctttagcaaccagctaatatttacccagaggtactgcaatagagtatttcaaaatggaatcaggatctggtgggcctcagaaattgtctcttttctgagtttcagtttggttctcctggatgttttgctctgttttggtacctgtaatatagggaaacacaactttttttgggaaagccctttgaccccagcttgctagttgcataataataaattttctgttcctaa

SEQ ID NO: 117689 - DNA, 2358 bp, Homo sapiens
  Payload ID: 2998
  Gene Symbol: CHD1L
  Gene Name: chromodomain helicase DNA binding protein 1-like
  Uniprot ID: Q86WJ1
  ENST ID: ENST00000369259
  CDS Start-End: 21-2102
gcggggcctctaccggcccgatggagcgcgcgggcgctactagccgcgggggccaagcccctggcttcttactgcggcttcatactgagggccgagccgaggcggcgcgggtgcaggagcaggacttacggcagtgggggctgacagcaagtgaactgcacaaactcttgcagccatttctgctgaggcgagtgaaagctgaggtagctacagagcttcccaagaagacagaagtagtgatataccatggcatgtcagcattgcagaagaaatactacaaggccattttgatgaaagacctagatgcatttgaaaatgagacggcaaagaaagttaaactacagaacattttgtcccagcttcgaaagtgtgtggatcacccatatttgtttgatggtgtggagccggagccttttgaagttggagaccacctgactgaggctagtgggaagcttcacctgctggataagctactagcattcctgtattctgggggccatcgggttttacttttctcccaaatgacccagatgttggatattctccaagactatatggattacagaggctacagctatgagcgtgtggatggttctgtgagaggagaagagagacacttggccattaagaactttggacagcagcccattttcgtttttctcctgagtactagggcaggtggagttggcatgaacttaacagcagcagatactgtgatttttgttgacagtgactttaatcctcagaatgacttgcaagcagctgccagggctcatcgcattggccaaaacaagtctgttaaagttattcggctgattggtcgagacactgtggaagaaatagtctataggaaagcagcctccaaactgcagctcaccaacatgatcatagaaggaggccattttactctgggagcccagaaacccgctgccgatgctgacctccagttgagtgagatactcaaatttggtttggataaactgctggcctctgaggggagcaccatggatgaaatagacctggagtccatcctgggagaaacaaaagatggccagtgggtctctgatgccttgcctgcagcagaaggagggagcagagatcaagaggaaggaaaaaatcatatgtacttatttgaaggtaaagattattctaaagagcccagtaaggaagacagaaaatcatttgaacaactggtaaaccttcagaaaacccttttggagaaagctagtcaagagggccgatcactccgaaataaaggcagtgttctcatcccaggccttgtggagggatctaccaaaaggaagcgggttctgagtccagaagagctggaggacagacagaagaaaagacaagaagcagctgccaagagaaggagactcatagaggagaagaagaggcaaaaggaagaggctgaacataagaaaaagatggcctggtgggaatccaacaattaccagtccttctgcctgccctctgaggagagcgagccagaggaccttgagaatggggaagagagctctgctgagctggattaccaagacccagatgctacttccctcaagtacgttagtggtgatgtcacccaccctcaggctggggccgaggatgctctcattgtgcactgcgtagatgactctggccactggggcagaggtggtttatttacagctctggaaaagcgatccgctgagccaagaaaaatatatgagctggctgggaaaatgaaagacctgagtttgggaggtgtccttttatttcctgttgatgataaagaatcaagaaacaaagggcaagatttgttggccttgattgtggctcagcatcgtgatcgttccaatgtcctgtctggcattaagatggcagccctagaagagggcctgaagaagatatttttagcagcaaaaaagaagaaagcaagtgttcatcttccacgtattggacatgccacgaaaggttttaactggtatggtactgagcgacttattcggaaacatctggctgcaagaggcatcccaacttacatatattattttcctagaagcaagtctgctgtccttcattcacagtcttcatcttcctcctcaagacagctggtgccttaagaattggcccagcctcagatcctgtctttagcaaccagctaatatttacccagaggtactgcaatagagtatttcaaaatggaatcaggatctggtgggcctcagaaattgtctcttttctgagtttcagtttggttctcctggatgttttgctctgttttggtacctgtaatatagggaaacacaactttttttgggaaagccctttgaccccagcttgctagttgcataataataaattttctgttcctaatgg

SEQ ID NO: 117690 - DNA, 2907 bp, Homo sapiens
  Payload ID: 2998
  Gene Symbol: CHD1L
  Gene Name: chromodomain helicase DNA binding protein 1-like
  ENST ID: ENST00000431239
  CDS Start-End: 257-2650
gcgttgggaagttgggagggaggtgcgcgcttggccgcgcggggcggggcctctaccggcccgatggagcgcgcgggcgctactagccgcgggggccaagcccctggcttcttactgcggcttcatactgagggccgagccgaggcggcgcgggtgcaggagcaggacttacggcagtgggggctgacagggattcacctacgctcttaccagctggagggagtaaactggctcgcccagcgcttccattgtcagaatggctgtatcctgggagatgagatgggcctggggaagacctgccagatttgctccaggtctttcctgtgtaacatatgcaggcgacaaggaggaaagagcctgccttcagcaagacctgaaacaggagtcacgttttcatgtgctactgactacctatgagatttgcttgaaagatgcatcatttctaaaatcattcccttggagtgttcttgttgtggatgaagctcacaggttgaaaaaccaaagctccctgctgcataagaccttgtcagagttctcagtagtcttcagtctcctgttgaccggaactcccatccagaacagcctccaagagctctactccctcctcagttttgtggagcctgatctcttttccaaggaagaggtgggagattttattcaacgctaccaggatattgagaaagaatctgagtcagcaagtgaactgcacaaactcttgcagccatttctgctgaggcgagtgaaagctgaggtagctacagagcttcccaagaagacagaagtagtgatataccatggcatgtcagcattgcagaagaaatactacaaggccattttgatgaaagacctagatgcatttgaaaatgagacggcaaagaaagttaaactacagaacattttgtcccagcttcgaaagtgtgtggatcacccatatttgtttgatggtgtggagccggagccttttgaagttggagaccacctgactgaggctagtgggaagcttcacctgctggataagctactagcattcctgtattctgggggccatcgggttttacttttctcccaaatgacccagatgttggatattctccaagactatatggattacagaggctacagctatgagcgtgtggatggttctgtgagaggagaagagagacacttggccattaagaactttggacagcagcccattttcgtttttctcctgagtactagggcaggtggagttggcatgaacttaacagcagcagatactgtgatttttgttgacagtgactttaatcctcagaatgacttgcaagcagctgccagggctcatcgcattggccaaaacaagtctgttaaagttattcggctgattggtcgagacactgtggaagaaatagtctataggaaagcagcctccaaactgcagctcaccaacatgatcatagaaggaggccattttactctgggagcccagaaacccgctgccgatgctgacctccagttgagtgagatactcaaatttggtttggataaactgctggcctctgaggggagcaccatggatgaaatagacctggagtccatcctgggagaaacaaaagatggccagtgggtctctgatgccttgcctgcagcagaaggagggagcagagatcaagaggaaggaaaaaatcatatgtacttatttgaaggtaaagattattctaaagagcccagtaaggaagacagaaaatcatttgaacaactggtaaaccttcagaaaacccttttggagaaagctagtcaagagggccgatcactccgaaataaaggcagtgttctcatcccaggccttgtggagggatctaccaaaaggaagcgggttctgagtccagaagagctggaggacagacagaagaaaagacaagaagcagctgccaagagaaggagactcatagaggagaagaagaggcaaaaggaagaggctgaacataagaaaaagatggcctggtgggaatccaacaattaccagtccttctgcctgccctctgaggagagcgagccagaggaccttgagaatggggaagagagctctgctgagctggattaccaagacccagatgctacttccctcaagtacgttagtggtgatgtcacccaccctcaggctggggccgaggatgctctcattgtgcactgcgtagatgactctggccactggggcagaggtggtttatttacagctctggaaaagcgatccgctgagccaagaaaaatatatgagctggctgggaaaatgaaagacctgagtttgggaggtgtccttttatttcctgttgatgataaagaatcaagaaacaaagggcaagatttgttggccttgattgtggctcagcatcgtgatcgttccaatgtcctgtctggcattaagatggcagccctagaagagggcctgaagaagatatttttagcagcaaaaaagaagaaagcaagtgttcatcttccacgtattggacatgccacgaaaggttttaactggtatggtactgagcgacttattcggaaacatctggctgcaagaggcatcccaacttacatatattattttcctagaagcaagtctgctgtccttcattcacagtcttcatcttcctcctcaagacagctggtgccttaagaattggcccagcctcagatcctgtctttagcaaccagctaatatttacccagaggtactgcaatagagtatttcaaaatggaatcaggatctggtgggcctcagaaattgtctcttttctgagtttcagtttggttctcctggatgttttgctctgttttggtacctgtaatatagggaaacacaactttttttgggaaagccctttgaccccagcttgctagttgcataataataaattttctgttcctaatggt

SEQ ID NO: 117691 - DNA, 2782 bp, Homo sapiens
  Payload ID: 2998
  Gene Symbol: CHD1L
  Gene Name: chromodomain helicase DNA binding protein 1-like
  ENST ID: ENST00000467213
  CDS Start-End: 21-1154
gcggggcctctaccggcccgatggagcgcgcgggcgctactagccgcgggggccaagcccctggcttcttactgcggcttcatactgagggccgagccgaggcggcgcgggtgcaggagcaggacttacggcagtgggggctgacagggattcacctacgctcttaccagctggagggagtaaactggctcgcccagcgcttccattgtcagaatggctgtatcctgggagatgagatgggcctggggaagacctgccagactattgctctcttcatttatttggcaggaagattaaatgatgaagggccatttctgattctttgtcccttgtctgttttgagcaactggaaagaagaaatgcagagatttgctccaggtctttcctgtgtaacatatgcaggcgacaaggaggaaagagcctgccttcagcaagacctgaaacaggagtcacgttttcatgtgctactgactacctatgagatttgcttgaaagatgcatcatttctaaaatcattcccttggagtgttcttgttgtggatgaagctcacaggttgaaaaaccaaagctccctgctgcataagaccttgtcagagttctcagtagtcttcagtctcctgttgaccggaactcccatccagaacagcctccaagagctctactccctcctcagttttgtggagcctgatctcttttccaaggaagaggtgggagattttattcaacgctaccaggatattgagaaagaatctgagtcagcaagtgaactgcacaaactcttgcagccatttctgctgaggcgagtgaaagctgaggtagctacagagcttcccaagaagacagaagtagtgatataccatggcatgtcagcattgcagaagaaatactacaaggccattttgatgaaagacctagatgcatttgaaaatgagacggcaaagaaagttaaactacagaacattttgtcccagcttcgaaagtgtgtggatcacccatatttgtttgatggtgtggagccggagccttttgaagttggagaccacctgactgaggctagtgggaagcttcacctgctggataagctactagcattcctgtattctgggtggagttggcatgaacttaacagcagcagatactgtgatttttgttgacagtgactttaatcctcagaatgacttgcaagcagctgccagggctcatcgcattggccaaaacaagtctgttaaagttattcggctgattggtcgagacactgtggaagaaatagtctataggaaagcagcctccaaactgcagctcaccaacatgatcatagaaggaggccattttactctgggagcccagaaacccgctgccgatgctgacctccagttgagtgagatactcaaatttggtttggataaactgctggcctctgaggggagcaccatggatgaaatagacctggagtccatcctgggagaaacaaaagatggccagtgggtctctgatgccttgcctgcagcagaaggagggagcagagatcaagaggaaggaaaaaatcatatgtacttatttgaaggtaaagattattctaaagagcccagtaaggaagacagaaaatcatttgaacaactggtaaaccttcagaaaacccttttggagaaagctagtcaagagggccgatcactccgaaataaaggcagtgttctcatcccaggccttgtggagggatctaccaaaaggaagcgggttctgagtccagaagagctggaggacagacagaagaaaagacaagaagcagctgccaagagaaggagactcatagaggagaagaagaggcaaaaggaagaggctgaacataagaaaaagatggcctggtgggaatccaacaattaccagtccttctgcctgccctctgaggagagcgagccagaggaccttgagaatggggaagagagctctgctgagctggattaccaagacccagatgctacttccctcaagtacgttagtggtgatgtcacccaccctcaggctggggccgaggatgctctcattgtgcactgcgtagatgactctggccactggggcagaggtggtttatttacagctctggaaaagcgatccgctgagccaagaaaaatatatgagctggctgggaaaatgaaagacctgagtttgggaggtgtccttttatttcctgttgatgataaagaatcaagaaacaaagggcaagatttgttggccttgattgtggctcagcatcgtgatcgttccaatgtcctgtctggcattaagatggcagccctagaagagggcctgaagaagatatttttagcagcaaaaaagaagaaagcaagtgttcatcttccacgtattggacatgccacgaaaggttttaactggtatggtactgagcgacttattcggaaacatctggctgcaagaggcatcccaacttacatatattattttcctagaagcaagtctgctgtccttcattcacagtcttcatcttcctcctcaagacagctggtgccttaagaattggcccagcctcagatcctgtctttagcaaccagctaatatttacccagaggtactgcaatagagtatttcaaaatggaatcaggatctggtgggcctcagaaattgtctcttttctgagtttcagtttggttctcctggatgttttgctctgttttggtacctgtaatatagggaaacacaactttttttgggaaagccctttgaccccagcttgctagttgcataataataaattttctgttcctaa

SEQ ID NO: 117692 - DNA, 2937 bp, Homo sapiens
  Payload ID: 2998
  Gene Symbol: CHD1L
  Gene Name: chromodomain helicase DNA binding protein 1-like
  ENST ID: ENST00000622533
  CDS Start-End: 21-269
gcggggcctctaccggcccgatggagcgcgcgggcgctactagccgcgggggccaagcccctggcttcttactgcggcttcatactgagggccgagccgaggcggcgcgggtgcaggagcaggacttacggcagtgggggctgacagggattcacctacgctcttaccagctggagggagtaaactggctcgcccagcgcttccattgtcagaatggctgtatcctgggagatgagatgggcctggggaagacctgccaggaagattaaatgatgaagggccatttctgattctttgtcccttgtctgttttgagcaactggaaagaagaaatgcagagatttgctccaggtctttcctgtgtaacatatgcaggcgacaaggaggaaagagcctgccttcagcaagacctgaaacaggagtcacgttttcatgtgctactgactacctatgagatttgcttgaaagatgcatcatttctaaaatcattcccttggagtgttcttgttgtggatgaagctcacaggttgaaaaaccaaagctccctgctgcataagaccttgtcagagttctcagtagtcttcagtctcctgttgaccggaactcccatccagaacagcctccaagagctctactccctcctcagttttgtggagcctgatctcttttccaaggaagaggtgggagattttattcaacgctaccaggatattgagaaagaatctgagtcaggcaatgaactgcacaaactcttgcagccatttctgctgaggcgagtgaaagctgaggtagctacagagcttcccaagaagacagaagtagtgatataccatggcatgtcagcattgcagaagaaatactacaaggccattttgatgaaagacctagatgcatttgaaaatgagacggcaaagaaagttaaactacagaacattttgtcccagcttcgaaagtgtgtggatcacccatatttgtttgatggtgtggagccggagccttttgaagttggagaccacctgactgaggctagtgggaagcttcacctgctggataagctactagcattcctgtattctgggggccatcgggttttacttttctcccaaatgacccagatgttggatattctccaagactatatggattacagaggctacagctatgagcgtgtggatggttctgtgagaggagaagagagacacttggccattaagaactttggacagcagcccattttcgtttttctcctgagtactagggcaggtggagttggcatgaacttaacagcagcagatactgtgatttttgttgacagtgactttaatcctcagaatgacttgcaagcagctgccagggctcatcgcattggccaaaacaagtctgttaaagttattcggctgattggtcgagacactgtggaagaaatagtctataggaaagcagcctccaaactgcagctcaccaacatgatcatagaaggaggccattttactctgggagcccagaaacccgctgccgatgctgacctccagttgagtgagatactcaaatttggtttggataaactgctggcctctgaggggagcaccatggatgaaatagacctggagtccatcctgggagaaacaaaagatggccagtgggtctctgatgccttgcctgcagcagaaggagggagcagagatcaagaggaaggaaaaaatcatatgtacttatttgaaggtaaagattattctaaagagcccagtaaggaagacagaaaatcatttgaacaactggtaaaccttcagaaaacccttttggagaaagctagtcaagagggccgatcactccgaaataaaggcagtgttctcatcccaggccttgtggagggatctaccaaaaggaagcgggttctgagtccagaagagctggaggacagacagaagaaaagacaagaagcagctgccaagagaaggagactcatagaggagaagaagaggcaaaaggaagaggctgaacataagaaaaagatggcctggtgggaatccaacaattaccagtccttctgcctgccctctgaggagagcgagccagaggaccttgagaatggggaagagagctctgctgagctggattaccaagacccagatgctacttccctcaagtacgttagtggtgatgtcacccaccctcaggctggggccgaggatgctctcattgtgcactgcgtagatgactctggccactggggcagaggtggtttatttacagctctggaaaagcgatccgctgagccaagaaaaatatatgagctggctgggaaaatgaaagacctgagtttgggaggtgtccttttatttcctgttgatgataaagaatcaagaaacaaagggcaagatttgttggccttgattgtggctcagcatcgtgatcgttccaatgtcctgtctggcattaagatggcagccctagaagagggcctgaagaagatatttttagcagcaaaaaagaagaaagcaagtgttcatcttccacgtattggacatgccacgaaaggttttaactggtatggtactgagcgacttattcggaaacatctggctgcaagaggcatcccaacttacatatattattttcctagaagcaagtctgctgtccttcattcacagtcttcatcttcctcctcaagacagctggtgccttaagaattggcccagcctcagatcctgtctttagcaaccagctaatatttacccagaggtactgcaatagagtatttcaaaatggaatcaggatctggtgggcctcagaaattgtctcttttctgagtttcagtttggttctcctggatgttttgctctgttttggtacctgtaatatagggaaacacaactttttttgggaaagccctttgaccccagcttgctagttgcataataataaattttctgttcct

SEQ ID NO: 117693 - DNA, 2415 bp, Homo sapiens
  Payload ID: 2998
  Gene Symbol: CHD1L
  Gene Name: chromodomain helicase DNA binding protein 1-like
  ENST ID: ENST00000488864
  CDS Start-End: 1-171
atggagcgcgcgggcgctactagccgcgggggccaagcccctggcttcttactgcggcttcatactgagggccgagccgaggcggcgcgggtgcaggagcaggacttacggcagtgggggctgacagattcccttggagtgttcttgttgtggatgaagctcacaggttgaaaaaccaaagctccctgctgcataagaccttgtcagagcaagtgaactgcacaaactcttgcagccatttctgctgaggcgagtgaaagctgaggtagctacagagcttcccaagaagacagaagtagtgatataccatggcatgtcagcattgcagaagaaatactacaaggccattttgatgaaagacctagatgcatttgaaaatgagacggcaaagaaagttaaactacagaacattttgtcccagcttcgaaagtgtgtggatcacccatatttgtttgatggtgtggagccggagccttttgaagttggagaccacctgactgaggctagtgggaagcttcacctgctggataagctactagcattcctgtattctgggggccatcgggttttacttttctcccaaatgacccagatgttggatattctccaagactatatggattacagaggctacagctatgagcgtgtggatggttctgtgagaggagaagagagacacttggccattaagaactttggacagcagcccattttcgtttttctcctgagtactagggcaggtggagttggcatgaacttaacagcagcagatactgtgatttttgttgacagtgactttaatcctcagaatgacttgcaagcagctgccagggctcatcgcattggccaaaacaagtctgttaaagttattcggctgattggtcgagacactgtggaagaaatagtctataggaaagcagcctccaaactgcagctcaccaacatgatcatagaaggaggccattttactctgggagcccagaaacccgctgccgatgctgacctccagttgagtgagatactcaaatttggtttggataaactgctggcctctgaggggagcaccatggatgaaatagacctggagtccatcctgggagaaacaaaagatggccagtgggtctctgatgccttgcctgcagcagaaggagggagcagagatcaagaggaaggaaaaaatcatatgtacttatttgaaggtaaagattattctaaagagcccagtaaggaagacagaaaatcatttgaacaactggtaaaccttcagaaaacccttttggagaaagctagtcaagagggccgatcactccgaaataaaggcagtgttctcatcccaggccttgtggagggatctaccaaaaggaagcgggttctgagtccagaagagctggaggacagacagaagaaaagacaagaagcagctgccaagagaaggagactcatagaggagaagaagaggcaaaaggaagaggctgaacataagaaaaagatggcctggtgggaatccaacaattaccagtccttctgcctgccctctgaggagagcgagccagaggaccttgagaatggggaagagagctctgctgagctggattaccaagacccagatgctacttccctcaagtacgttagtggtgatgtcacccaccctcaggctggggccgaggatgctctcattgtgcactgcgtagatgactctggccactggggcagaggtggtttatttacagctctggaaaagcgatccgctgagccaagaaaaatatatgagctggctgggaaaatgaaagacctgagtttgggaggtgtccttttatttcctgttgatgataaagaatcaagaaacaaagggcaagatttgttggccttgattgtggctcagcatcgtgatcgttccaatgtcctgtctggcattaagatggcagccctagaagagggcctgaagaagatatttttagcagcaaaaaagaagaaagcaagtgttcatcttccacgtattggacatgccacgaaaggttttaactggtatggtactgagcgacttattcggaaacatctggctgcaagaggcatcccaacttacatatattattttcctagaagcaagtctgctgtccttcattcacagtcttcatcttcctcctcaagacagctggtgccttaagaattggcccagcctcagatcctgtctttagcaaccagctaatatttacccagaggtactgcaatagagtatttcaaaatggaatcaggatctggtgggcctcagaaattgtctcttttctgagtttcagtttggttctcctggatgttttgctctgttttggtacctgtaatatagggaaacacaactttttttgggaaagccctttgaccccagcttgctagttgcataataataaattttctgttcct

SEQ ID NO: 117694 - DNA, 9363 bp, Homo sapiens
  Payload ID: 2999
  Gene Symbol: CHD2
  Gene Name: chromodomain helicase DNA binding protein 2
  Uniprot ID: O14647
  ENST ID: ENST00000394196
  CDS Start-End: 577-6063
tctcagagctgggaaggaggctctagatggcggctgtgccttagagagagcgcgctctgctccctgcctttgcctcactttacgcaactttccctaactttcgggcagcctcagggggcccccgtagccccctgcctttcctagggacttactggggtcgattcgaacctttttttgggagaaaagcagcttttaggagctttcttttcgtgccttgttggaaagaagcagccgtactgagagcccaggtcgttgttttttccagcttagaagccatggcgcacctccatttttgtgcgctctcctaatgaggttttttttctttcggacctgttttagtattaattattgctttatttttttgaccagttaacatatttgagggttattttatttatttttcgttttttaacggaggattttgcctttatttttaattatttgggatctgatatttttctactagtagataggactcttggtttggacatactacatggatcagtaaatacctgggcacaggacttcaaagcaaacacagattccccctcccccttaatatttaagaattaaaagatgatgagaaataaggacaaaagccaagaggaggacagttcgctacacagcaatgcatcgagtcactcagcctctgaagaagcttcgggttcagactcaggcagtcagtcggaaagtgagcagggaagtgatccaggaagtggacatggcagcgagtcgaacagcagctctgaatcttctgagagtcagtcggaatctgagagcgaatcagcaggttccaaatcccagccagtcctcccagaagccaaagagaagccagcctctaagaaggaacggatagctgatgtgaagaagatgtgggaagaatatcctgatgtttatggggtcaggcggtcaaaccgaagcagacaagaaccatcgcgatttaatattaaggaagaggcaagtagcgggtctgagagtgggagcccaaaaagaagaggccagaggcagctgaaaaaacaagaaaaatggaaacaggaaccctcagaagatgaacaggaacaaggcaccagtgcagagagtgagccagaacaaaaaaaagtaaaagccagaagacctgtccccagaagaacagtgcccaaacctcgtgttaaaaagcagccgaagactcagcgtggaaagagaaaaaagcaagattcttctgatgaggatgatgatgatgacgaagctcccaaaaggcagactcgtcgaagagcggctaaaaacgttagttacaaagaagatgatgactttgagactgactcagatgatctcattgaaatgactggagaaggagttgatgaacagcaagataatagtgaaactattgaaaaggtcttagattcaagactgggaaagaaaggagccactggagcatctactactgtatatgcgattgaagctaatggcgaccctagtggtgactttgacactgaaaaggatgaaggtgaaatccagtacctcatcaagtggaagggttggtcttacatccacagcacatgggagagtgaagaatccttacagcaacagaaagtgaagggcctaaaaaaactagagaacttcaagaaaaaagaggacgaaatcaaacaatggttagggaaagtttctcctgaagatgtagaatatttcaattgccaacaggagctggcttcagagttgaataaacagtatcagatagtagaaagagtaatagctgtgaagacaagtaaatctacattgggtcaaacagattttccagctcatagtcggaagccggcaccctcaaatgagcccgaatatctatgtaaatggatgggactcccctattcagagtgtagctgggaagatgaagccctcattggaaagaaattccagaattgcattgacagcttccacagtaggaacaactcaaaaaccatcccaacaagagaatgcaaggccctgaagcagagaccacgatttgtagctttaaagaaacaacctgcatatttaggaggggagaatctggaacttcgagattatcagctagaaggtctaaactggctagctcattcctggtgcaaaaataatagtgtaatccttgctgatgaaatgggcctaggaaagaccatccagaccatatcattcctctcctacctgttccaccaacaccagctgtatggcccctttcttatagtcgtccctttatccaccctcacctcatggcagagagagtttgaaatctgggcaccagagattaacgtagtggtttacataggtgacctgatgagcagaaatacgatacgggaatatgaatggattcattcccaaaccaaaagattgaagttcaacgcacttataacaacatatgagatcctcttgaaagataagactgtgctgggcagtattaactgggcctttctgggagtggatgaagcccatcggttgaagaatgatgactctttattgtataaaactctgattgatttcaagtccaaccataggctcctgattacggggacccctcttcagaattccctcaaagagctctggtccttgctgcactttattatgccggagaagtttgaattttgggaagattttgaagaagaccatgggaaggggagagaaaatggctaccagagtcttcataaggtgctagagcctttccttctccggagagtcaaaaaagatgtggagaaatcccttcctgctaaagtggaacagattctcagggtggagatgtcagcccttcagaaacagtattacaagtggattctgaccaggaattacaaggctcttgccaaaggaacaagaggcagcacatctggttttcttaatattgtgatggaactgaaaaaatgttgcaaccactgctatctgattaaaccccctgaagaaaatgaaagggaaaatggacaggagattcttctgtccctcataaggagcagtgggaagttgattttattagacaaactgttgacaagacttcgagaaagggggaatcgagtgcttatcttctctcagatggtgagaatgttggatatcctggctgaatacctaactattaaacactatcctttccagcgtctggatggttccatcaagggagaaatccgaaaacaggcactggaccacttcaatgcagatgggtctgaggacttctgtttcctgctctcgacaagggctggtggcctgggaatcaatttggcttcagcggacacagtcgtcatctttgactctgactggaacccccagaatgacttgcaggcacaagcccgagcgcatagaattggtcaaaagaagcaggtaaatatttaccgcttagttacaaaggggactgtggaggaggagatcatagaacgggccaaaaagaagatggtattagatcatctggtgattcagcgcatggacaccactggccggacgatcctggaaaacaactcaggaaggtccaactcaaatccttttaataaagaagagctgacagctattttgaaatttggagcagaggatctcttcaaagaactggaaggggaggaatcagaacctcaggaaatggatatagatgaaattttgcggttggctgaaacgagagagaatgaagtgtcaacaagtgcaacagatgaacttctatcacagtttaaggttgccaactttgcaacaatggaagatgaagaagagctagaagagcgtcctcacaaggactgggatgagatcattccagaggaacaaaggaaaaaagtagaggaggaagagcggcagaaggagctagaagaaatttatatgctgcctcgaattcggagttccactaaaaaggctcagacaaatgacagtgactctgacactgagtctaagaggcaggcccagagatcctctgcttctgagagtgaaacggaagactctgatgatgacaagaagccaaagcgcagagggcgtccgaggagtgtgcggaaggacctcgtggagggatttactgatgcagagatccgaaggttcatcaaggcttataagaagtttggtctccctcttgaacggctggagtgcatagcacgtgatgctgagctggtagataagtcggtggcagatctgaagcgcctgggtgaactgatccacaacagctgtgtgtcagcaatgcaggaatacgaagagcagctgaaagaaaatgccagcgagggaaaaggaccagggaaaaggagaggtccaacaatcaagatatccggagttcaggttaatgtgaaatccattatccaacatgaagaggagtttgagatgctgcataaatctatccctgtggaccctgaagaaaaaaaaaaatactgcttaacctgtcgtgtcaaagctgcacattttgatgtagagtggggggtggaagatgattctcgcctgttgctggggatttatgaacatggctatggaaactgggagttaattaaaacagacccagagcttaaattaactgacaaaattctgccggtggagacagataaaaagcctcaggggaagcagctacagacccgagcggattacttgttgaagctgctcagaaagggtctggagaagaagggggctgtgacaggtggggaagaggccaaattaaagaagcggaagcctcgggtaaagaaggaaaacaaagtgcccaggctgaaagaggagcatggaattgagctttcatctcctaggcattcagataatccatcagaagagggagaagtgaaagatgatggcttggaaaaaagtccaatgaaaaaaaaacagaagaagaaagagaacaaggagaacaaggagaaacaaatgagttctaggaaagacaaagaaggggacaaggaaagaaagaagtcaaaagataagaaagagaagcctaaaagtggtgatgccaaatcttcgagtaaatcaaagcgatctcagggtcctgtccatattacagcaggaagtgaacctgtccccattggagaggatgaggatgatgatctggaccaggagacattcagcatatgtaaggagaggatgaggcccgtgaaaaaggcactgaaacagctcgacaaacctgacaaggggctcaacgtgcaagaacagctggaacacacccggaactgcctgctgaaaatcggagaccggatagccgagtgccttaaagcctactcagatcaggagcacatcaaactctggaggaggaacctatggatttttgtttccaagtttacagaatttgatgctcgaaaactgcataagttatacaagatggctcataagaaaaggtctcaagaagaagaggagcaaaagaagaaagacgacgtgactgggggtaagaaaccatttcgtccagaggcctcaggctccagccgggactctctgatatctcagtcccatacctcacacaaccttcaccctcagaagcctcatttgcctgcctcccatggcccacagatgcatggacacccaagagataactacaatcaccccaacaagagacacttcagtaatgcagatcgaggagactggcagagggaaagaaagttcaactatggtggtggcaacaacaatccaccatggggaagcgacaggcaccatcagtatgagcagcactggtacaaggaccaccattatggggaccggcgacatatggatgcccaccgttccggaagctatcgacccaacaacatgtccagaaagaggccttatgaccagtacagcagtgaccgagaccaccggggacacagagattattatgacaggcaccatcatgactccaagcggaggagatccgatgaatttaggcctcaaaattaccaccagcaggatttccgacgaatgtctgatcaccgccccgctatgggctaccatggccagggaccctcagaccattaccgctctttccacacagataaactgggggaatataaacagcctctacccccattgcaccctgcagtctcagatcctcgctcacccccttctcagaaatctcctcacgattccaagtcacccctggatcataggtctcctttggagagatcactagaacagaaaaacaacccagattataactggaatgttcggaaaacataaaggacagctcgtaaaggagagagtaagagtcaccaaacacgtggatatttttggtctgatcctacagtagccggttatctagaccagtaagtggagttttggacatgctgctgctgtcaactcactggctgaaggagcacttcaaggaatgggaggcctttcactgggtccagctctgattcgggtcaccactcctgcactttggcaccccatcccattccagcctagttctggcctcccactttgacgggcacttggaggaggagctgactgtgtgtgtaccagcttcactgggatgtgtttccccagtcaaggaacaggggatcttcagagtcatgaatgttttcttgccagggtcagtgttcccaggaccttagtgcatggtcggggcaggaactggtgcatggaggctgctgggacctggtgaacagtgtgtgatttggttgatttggttcactctgacatgatggatgctgctgatggggagtggcgagttggggcaagcgggtggggacaagcataggacttgaaggggagcaggtacacccctcaaatgtgttcttgggagaagtgatacactcggcctcattatgtgaaacctgtgggtggggttggggtggagaagtagagagagggcaacagcttccacaactgcttcatctctgccaacactaatttttcccacactgtctttgtacatttcagagctttggtctcctgagtgggcctccttttcccactgtgccagggaaggtaggtttctctggctgactgagtactgtgagtgaggcaacactgatgccagcatgggtcttacttgactggggagtaggctgagtgaggggtagggtggggtaggtggggagtagtgtggccagggaactggaatccctggtggatttctgattcctgtggtgagaaggaaagctacaggacctggagaaggggatgcagaggcaggcctgctgaccaacttgttgcaatcacaaaggtgggggtcctggtgcaggcagtgaacaggcttctaatgtggggttcagtagtgccagcaagtgggggaaactttcagtattgcgctaggtcaacacttcctgctgcatttccttccctttgcacagcttgaagaaatagagtagacagaatcacacatcatgtggtgggcagatggaaataagtacctgtggtgaacaagtttctactgtagttggagatcattagaattgaattcagtttctcttagaatataatcaggtataaacctaagttaaactttttcccaaacaaggagcatccaaagacacagtgacttgagctatagatagtaaaaatcatacgagagttgaactgagtcaggtttaggaagcaagtttggttgcatcaattaagcaggctcttttcaattgactgatgctggggccttcagttttattctcagtatagattgccagtattgttaagagtatccaaaggcctttctagatggagacagaataactgacttgaacatacagtgtgcctgtaagtgtccaggctcagagctggtgaaaacccttctgttgggcgtgtgcagggttaaactcctgaagtaacttgtgaggacttcagtgcttgctggtgtcctgggcagcaccatgaatgcctttaccaagacatgccaagttggatcccccgaatgaagcagatgtggctgtggtgtgacccttgctccctgctacacagagcatcgcagggctggcctgtgtggtttccagatgagggtctgggtcccggaagcttgtgttgagagctcagtggacccaccccgcttgctgaaccctcacagttcttggggttgtccagcctggacttgtagcacacatgtcctgaagcaaagctccggtgactgcatgagccacctggccacagtcctcccatggagggcctgccgtgacgctcagtggagagggcagggcctgtgtctccacttaggccacacagtgatgaggaaaccacagatggagcttcttgccgataatactgactctagcccatgattgccttgcccaagccaaagaggaaggttaggttggcttgtcgagcccttgagcgttgggagatggggtgggaaggaggtgagcccctgcagagagttgggtagtgtccttcaggaatgaaaggaggggcaaaggagtcaccagaggtcctgcatttccatcagggtttccacagtcatcagggcttctctcttgagttgctgataggagatgtgagttatgcccagagatgtcttatcgtgaggaaaaagaaacttccttttgttcacatttaggactctcagtgccatatgaagtagcaaaaggcagtatcggccagatcagtgttacattgattctaaaattacagtgtccccattagacaactattttaggtgctggagtatgtttgaagagtgtgctgggaaaaaggaagcatttcttcattgatttaaatcagtatgaatattatatgcctaaataaaaaatttgcacaggtaaattctctcacttgtgaatgggagaagctgccccaggaatctgtgaggatggtattccctggagtctggctttgaaagatttcattgttggtagaaataacaggttgagaaagagggagttagcatcacctaaaacctgcacgtgaacaagggttgacatgatacactatggccttagaaaagggccaggtgaaaccccaagctaatcactgcggtctttcagagccggacagacaggtgccagcagagcccggggctcactctcctttcagtcattcctcagcccttcgaagggaagcccaaacactttgcacgctgtgctgcagacattctggcctggtgtgtctgaaagttgcatcagtcctcacggtgcaaacacagttgatttaggaagtcacacaatgacactgaaatcctacagaccaaaatccacttgtcagcaggagcagcagcccaggcccagcaccagcggtcttccggctcctctgagggctgccacgttgggcgaggggagccatgccaagggtccaggctgctttaggccatctgtgccccactcatctggggacagatggtttttctttattgtaaaattgtggacttttaaaacctgttgactaaacagtaattaatttatatttgtgaaaaatgccactgtcctagtgatttctgatgtaaataatgttgtttatatagtatgtattaaattttcctacattgtaaaactgctgtacttttgattcttgtatattaaaaagtgttactgagcatttttagaattgggctaa

SEQ ID NO: 117695 - DNA, 2221 bp, Homo sapiens
  Payload ID: 2999
  Gene Symbol: CHD2
  Gene Name: chromodomain helicase DNA binding protein 2
  Uniprot ID: O14647
  ENST ID: ENST00000420239
  CDS Start-End: 562-2067
ggaggctctagatggcggctgtgccttagagagagcgcgctctgctccctgcctttgcctcactttacgcaactttccctaactttcgggcagcctcagggggcccccgtagccccctgcctttcctagggacttactggggtcgattcgaacctttttttgggagaaaagcagcttttaggagctttcttttcgtgccttgttggaaagaagcagccgtactgagagcccaggtcgttgttttttccagcttagaagccatggcgcacctccatttttgtgcgctctcctaatgaggttttttttctttcggacctgttttagtattaattattgctttatttttttgaccagttaacatatttgagggttattttatttatttttcgttttttaacggaggattttgcctttatttttaattatttgggatctgatatttttctactagtagataggactcttggtttggacatactacatggatcagtaaatacctgggcacaggacttcaaagcaaacacagattccccctcccccttaatatttaagaattaaaagatgatgagaaataaggacaaaagccaagaggaggacagttcgctacacagcaatgcatcgagtcactcagcctctgaagaagcttcgggttcagactcaggcagtcagtcggaaagtgagcagggaagtgatccaggaagtggacatggcagcgagtcgaacagcagctctgaatcttctgagagtcagtcggaatctgagagcgaatcagcaggttccaaatcccagccagtcctcccagaagccaaagagaagccagcctctaagaaggaacggatagctgatgtgaagaagatgtgggaagaatatcctgatgtttatggggtcaggcggtcaaaccgaagcagacaagaaccatcgcgatttaatattaaggaagaggcaagtagcgggtctgagagtgggagcccaaaaagaagaggccagaggcagctgaaaaaacaagaaaaatggaaacaggaaccctcagaagatgaacaggaacaaggcaccagtgcagagagtgagccagaacaaaaaaaagtaaaagccagaagacctgtccccagaagaacagtgcccaaacctcgtgttaaaaagcagccgaagactcagcgtggaaagagaaaaaagcaagattcttctgatgaggatgatgatgatgacgaagctcccaaaaggcagactcgtcgaagagcggctaaaaacgttagttacaaagaagatgatgactttgagactgactcagatgatctcattgaaatgactggagaaggagttgatgaacagcaagataatagtgaaactattgaaaaggtcttagattcaagactgggaaagaaaggagccactggagcatctactactgtatatgcgattgaagctaatggcgaccctagtggtgactttgacactgaaaaggatgaaggtgaaatccagtacctcatcaagtggaagggttggtcttacatccacagcacatgggagagtgaagaatccttacagcaacagaaagtgaagggcctaaaaaaactagagaacttcaagaaaaaagaggacgaaatcaaacaatggttagggaaagtttctcctgaagatgtagaatatttcaattgccaacaggagctggcttcagagttgaataaacagtatcagatagtagaaagagtaatagctgtgaagacaagtaaatctacattgggtcaaacagattttccagctcatagtcggaagccggcaccctcaaatgagcccgaatatctatgtaaatggatgggactcccctattcagagtgtagctgggaagatgaagccctcattggaaagaaattccagaattgcattgacagcttccacagtaggaacaactcaaaaaccatcccaacaagagaatgcaaggccctgaagcagagaccacgatttgtagctttaaagaaacaacctgcatatttaggaggggagaatctggaacttcgagattatcagctagaaggtctaaactggctagctcattcctggtgcaagtaggtagaaaaatatgagtgcaattttccttactgtttctggcttctttattgttagatgtcaagaattttttttttcttttttcacacccttattgtatctcaaccaagaaatctttatgctgcatattacagaaataaaagatgattgagagaaa

SEQ ID NO: 117696 - DNA, 649 bp, Homo sapiens
  Payload ID: 2999
  Gene Symbol: CHD2
  Gene Name: chromodomain helicase DNA binding protein 2
  ENST ID: ENST00000629104
  CDS Start-End: 1-108
ggggtggaagatgattctcgcctgttgctggggatttatgaacatggctatggaaactgggagttaattaaaacagacccagagcttaaattaactgacaaactttaacctagctccagggattccctgctcctggaaggaggaaatccacgacggctgggatgctctagcagatgaagccacaagcccctcctacctgagttgttctaccctgttaacagcacagattctgccggtggagacagataaaaagcctcaggggaagcagctacagacccgagcggattacttgttgaagctgctcagaaagggtctggagaagaagggggctgtgacaggtggggaagaggccaaattaaagaagcggaagcctcgggtaaagaaggaaaacaaagtgcccaggctgaaagaggagcatggaattgagctttcatctcctaggcattcagataatccatcagaagagggagaagtgaaagatgatggcttggaaaaaagtccaatgaaaaaaaaacagaagaagaaagagaacaaggagaacaaggagaaacaaatgagttctaggaaagacaaagaaggggacaaggaaagaaagaagtcaaaagataagaaagagaagcctaaaagtggtgatgccaaatcttcgagt

SEQ ID NO: 117697 - DNA, 888 bp, Homo sapiens
  Payload ID: 2999
  Gene Symbol: CHD2
  Gene Name: chromodomain helicase DNA binding protein 2
  ENST ID: ENST00000625990
  CDS Start-End: 716-888
ctagatggcggctgtgccttagagagagcgcgctctgctccctgcctttgcctcactttacgcaactttccctaactttcgggcagcctcagggggcccccgtagccccctgcctttcctagggacttactggggtcgattcgaacctttttttgggagaaaagcagcttttaggagctttcttttcgtgccttgttggaaagaagcagccgtactgagagcccaggtcgttgttttttccagcttagaagccatggcgcacctccatttttgtgcgctctcctaatgaggttttttttctttcggacctgttttagtattaattattgctttatttttttgaccagttaacatatttgagggttattttatttatttttcgttttttaacggaggattttgcctttatttttaattatttgggatctgatatttttctactagtagataggactcttggtttggacatactacatggatcagtcactcagcctctgaagaagcttcgggttcagactcaggcagtcagtcggaaagtgagcagggaagtgatccaggaagtggacatggcagcgagtcgaacagcagctctgaatcttctgagagtcagtcggaatctgagagcgaatcagcaggttccaaatcccagccagtcctcccagaagccaaagagaagccagcctctaagaaggaacggatagctgatgtgaagaagatgtgggaagaatatcctgatgtttatggggtcaggcggtcaaaccgaagcagacaagaaccatcgcgatttaatattaaggaagaggcaagtagcgggtctgagagtgggagcccaaaaagaagaggccagaggcagctgaaaaaacaagaaaaatggaaacaggaaccctc

SEQ ID NO: 117698 - DNA, 760 bp, Homo sapiens
  Payload ID: 2999
  Gene Symbol: CHD2
  Gene Name: chromodomain helicase DNA binding protein 2
  ENST ID: ENST00000627460
  CDS Start-End: 1-104
ggtctcaagaagaagaggagcaaaagaagaaagacgacgtgactggggaagcctcatttgcctgcctcccatggcccacagatgcatggacacccaagagataactacaatcaccccaacaagagacacttcagtaatgcagatcgaggagactggcagagggaaagaaagttcaactatggtggtggcaacaacaatccaccatggggaagcgacaggcaccatcagtatgagcagcactggtacaaggaccaccattatggggaccggcgacatatggatgcccaccgttccggaagctatcgacccaacaacatgtccagaaagaggccttatgaccagtacagcagtgaccgagaccaccggggacacagagattattatgacaggcaccatcatgactccaagcggaggagatccgatgaatttaggcctcaaaattaccaccagcaggatttccgacgaatgtctgatcaccgccccgctatgggctaccatggccagggaccctcagaccattaccgctctttccacacagataaactgggggaatataaacagcctctacccccattgcaccctgcagtctcagatcctcgctcacccccttctcagaaatctcctcacgattccaagtcacccctggatcataggtctcctttggagagatcactagaacagaaaaacaacccagattataactggaatgttcggaaaacataaaggacagctcgtaaaggagagagtaagagtcaccaaa

SEQ ID NO: 117699 - DNA, 5127 bp, Homo sapiens
  Payload ID: 2999
  Gene Symbol: CHD2
  Gene Name: chromodomain helicase DNA binding protein 2
  ENST ID: ENST00000625662
  CDS Start-End: 1-232
tgtggaccctgaagaaaaaaaaaaatactgcttaacctgtcgtgtcaaagctgcacattttgatgtagagtggggggtggaagatgattctcgcctgttgctggggatttatgaacatggctatggaaactgggagttaattaaaacagacccagagcttaaattaactgacaaactccagggattccctgctcctggaaggaggaaatccacgacggctgggatgctctagcagatgaagccacaagcccctcctacctgagttgttctaccctgttaacagcacagattctgccggtggagacagataaaaagcctcaggggaagcagctacagacccgagcggattacttgttgaagctgctcagaaagggtctggagaagaagggggctgtgacaggtggggaagaggccaaattaaagaagcggaagcctcgggtaaagaaggaaaacaaagtgcccaggctgaaagaggagcatggaattgagctttcatctcctaggcattcagataatccatcagaagagggagaagtgaaagatgatggcttggaaaaaagtccaatgaaaaaaaaacagaagaagaaagagaacaaggagaacaaggagaaacaaatgagttctaggaaagacaaagaaggggacaaggaaagaaagaagtcaaaagataagaaagagaagcctaaaagtggtgatgccaaatcttcgagtaaatcaaagcgatctcagggtcctgtccatattacagcaggaagtgaacctgtccccattggagaggatgaggatgatgatctggaccaggagacattcagcatatgtaaggagaggatgaggcccgtgaaaaaggcactgaaacagctcgacaaacctgacaaggggctcaacgtgcaagaacagctggaacacacccggaactgcctgctgaaaatcggagaccggatagccgagtgccttaaagcctactcagatcaggagcacatcaaactctggaggaggaacctatggatttttgtttccaagtttacagaatttgatgctcgaaaactgcataagttatacaagatggctcataagaaaaggtctcaagaagaagaggagcaaaagaagaaagacgacgtgactgggggtaagaaaccatttcgtccagaggcctcaggctccagccgggactctctgatatctcagtcccatacctcacacaaccttcaccctcagaagcctcatttgcctgcctcccatggcccacagatgcatggacacccaagagataactacaatcaccccaacaagagacacttcagtaatgcagatcgaggagactggcagagggaaagaaagttcaactatggtggtggcaacaacaatccaccatggggaagcgacaggcaccatcagtatgagcagcactggtacaaggaccaccattatggggaccggcgacatatggatgcccaccgttccggaagctatcgacccaacaacatgtccagaaagaggccttatgaccagtacagcagtgaccgagaccaccggggacacagagattattatgacaggcaccatcatgactccaagcggaggagatccgatgaatttaggcctcaaaattaccaccagcaggatttccgacgaatgtctgatcaccgccccgctatgggctaccatggccagggaccctcagaccattaccgctctttccacacagataaactgggggaatataaacagcctctacccccattgcaccctgcagtctcagatcctcgctcacccccttctcagaaatctcctcacgattccaagtcacccctggatcataggtctcctttggagagatcactagaacagaaaaacaacccagattataactggaatgttcggaaaacataaaggacagctcgtaaaggagagagtaagagtcaccaaacacgtggatatttttggtctgatcctacagtagccggttatctagaccagtaagtggagttttggacatgctgctgctgtcaactcactggctgaaggagcacttcaaggaatgggaggcctttcactgggtccagctctgattcgggtcaccactcctgcactttggcaccccatcccattccagcctagttctggcctcccactttgacgggcacttggaggaggagctgactgtgtgtgtaccagcttcactgggatgtgtttccccagtcaaggaacaggggatcttcagagtcatgaatgttttcttgccagggtcagtgttcccaggaccttagtgcatggtcggggcaggaactggtgcatggaggctgctgggacctggtgaacagtgtgtgatttggttgatttggttcactctgacatgatggatgctgctgatggggagtggcgagttggggcaagcgggtggggacaagcataggacttgaaggggagcaggtacacccctcaaatgtgttcttgggagaagtgatacactcggcctcattatgtgaaacctgtgggtggggttggggtggagaagtagagagagggcaacagcttccacaactgcttcatctctgccaacactaatttttcccacactgtctttgtacatttcagagctttggtctcctgagtgggcctccttttcccactgtgccagggaaggtaggtttctctggctgactgagtactgtgagtgaggcaacactgatgccagcatgggtcttacttgactggggagtaggctgagtgaggggtagggtggggtaggtggggagtagtgtggccagggaactggaatccctggtggatttctgattcctgtggtgagaaggaaagctacaggacctggagaaggggatgcagaggcaggcctgctgaccaacttgttgcaatcacaaaggtgggggtcctggtgcaggcagtgaacaggcttctaatgtggggttcagtagtgccagcaagtgggggaaactttcagtattgcgctaggtcaacacttcctgctgcatttccttccctttgcacagcttgaagaaatagagtagacagaatcacacatcatgtggtgggcagatggaaataagtacctgtggtgaacaagtttctactgtagttggagatcattagaattgaattcagtttctcttagaatataatcaggtataaacctaagttaaactttttcccaaacaaggagcatccaaagacacagtgacttgagctatagatagtaaaaatcatacgagagttgaactgagtcaggtttaggaagcaagtttggttgcatcaattaagcaggctcttttcaattgactgatgctggggccttcagttttattctcagtatagattgccagtattgttaagagtatccaaaggcctttctagatggagacagaataactgacttgaacatacagtgtgcctgtaagtgtccaggctcagagctggtgaaaacccttctgttgggcgtgtgcagggttaaactcctgaagtaacttgtgaggacttcagtgcttgctggtgtcctgggcagcaccatgaatgcctttaccaagacatgccaagttggatcccccgaatgaagcagatgtggctgtggtgtgacccttgctccctgctacacagagcatcgcagggctggcctgtgtggtttccagatgagggtctgggtcccggaagcttgtgttgagagctcagtggacccaccccgcttgctgaaccctcacagttcttggggttgtccagcctggacttgtagcacacatgtcctgaagcaaagctccggtgactgcatgagccacctggccacagtcctcccatggagggcctgccgtgacgctcagtggagagggcagggcctgtgtctccacttaggccacacagtgatgaggaaaccacagatggagcttcttgccgataatactgactctagcccatgattgccttgcccaagccaaagaggaaggttaggttggcttgtcgagcccttgagcgttgggagatggggtgggaaggaggtgagcccctgcagagagttgggtagtgtccttcaggaatgaaaggaggggcaaaggagtcaccagaggtcctgcatttccatcagggtttccacagtcatcagggcttctctcttgagttgctgataggagatgtgagttatgcccagagatgtcttatcgtgaggaaaaagaaacttccttttgttcacatttaggactctcagtgccatatgaagtagcaaaaggcagtatcggccagatcagtgttacattgattctaaaattacagtgtccccattagacaactattttaggtgctggagtatgtttgaagagtgtgctgggaaaaaggaagcatttcttcattgatttaaatcagtatgaatattatatgcctaaataaaaaatttgcacaggtaaattctctcacttgtgaatgggagaagctgccccaggaatctgtgaggatggtattccctggagtctggctttgaaagatttcattgttggtagaaataacaggttgagaaagagggagttagcatcacctaaaacctgcacgtgaacaagggttgacatgatacactatggccttagaaaagggccaggtgaaaccccaagctaatcactgcggtctttcagagccggacagacaggtgccagcagagcccggggctcactctcctttcagtcattcctcagcccttcgaagggaagcccaaacactttgcacgctgtgctgcagacattctggcctggtgtgtctgaaagttgcatcagtcctcacggtgcaaacacagttgatttaggaagtcacacaatgacactgaaatcctacagaccaaaatccacttgtcagcaggagcagcagcccaggcccagcaccagcggtcttccggctcctctgagggctgccacgttgggcgaggggagccatgccaagggtccaggctgctttaggccatctgtgccccactcatctggggacagatggtttttctttattgtaaaattgtggacttttaaaacctgttgactaaacagtaattaatttatatttgtgaaaaatgccactgtcctagtgatttctgatgtaaataatgttgtttatatagtatgtattaaattttcctacattgtaaaa

SEQ ID NO: 117700 - DNA, 340 bp, Homo sapiens
  Payload ID: 2999
  Gene Symbol: CHD2
  Gene Name: chromodomain helicase DNA binding protein 2
  ENST ID: ENST00000625463
  CDS Start-End: 1-340
ccccctgaagaaaatgaaagggaaaatggacaggagattcttctgcgtctggatggttccatcaagggagaaatccgaaaacaggcactggaccacttcaatgcagatgggtctgaggacttctgtttcctgctctcgacaagggctggtggcctgggaatcaatttggcttcagcggacacagtcgtcatctttgactctgactggaacccccagaatgacttgcaggcacaagcccgagcgcatagaattggtcaaaagaagcaggtaaatatttaccgcttagttacaaaggggactgtggaggaggagatcatagaacgggccaaaaagaagatgg

SEQ ID NO: 117701 - DNA, 361 bp, Homo sapiens
  Payload ID: 2999
  Gene Symbol: CHD2
  Gene Name: chromodomain helicase DNA binding protein 2
  ENST ID: ENST00000625243
  CDS Start-End: 1-361
catcaagtggaagggttggtcttacatccacagcacatgggagagtgaagaatccttacagcaacagaaagtgaagggcctaaaaaaactagagaacttcaagaaaaaagaggacgaaatcaaacaatggttagggaaagtttctcctgaagatgtagaatatttcaattgccaacaggagctggcttcagagttgaataaacagtatcagatagtagaaagagtaatagctcatagtcggaagccggcaccctcaaatgagcccgaatatctatgtaaatggatgggactcccctattcagagtgtagctgggaagatgaagccctcattggaaagaaattccagaattgcattgacagc

SEQ ID NO: 117702 - DNA, 2131 bp, Homo sapiens
  Payload ID: 2999
  Gene Symbol: CHD2
  Gene Name: chromodomain helicase DNA binding protein 2
  ENST ID: ENST00000626782
  CDS Start-End: 436-1980
agggagccgcacgccgaggggaaaaggaagggaactctagttgggactttccggtgggcggcttctttcctggacgcgtttgctcctggcagtcttgtccgcccttgcctgtagcggtccgcaccctgtagtgtgttcttttgcccatttccgggaatggtttatcctctttgagaagcggctgcttttggagaaaaagtgcaggcactatttataaattttaaaggcactatttggaaatcttaaaatagaaaatttgcccagttttacattttcccttttcataccttagcgtcccttctccccgcccccgttcagtgtgaagagatgagtgggtttaattttgttacaattgaccaaaacgtttgagtgtcagaggcggatacttttattttagtgaaaacctcttgacgggtgttaacagctgtttaatacatggctcataaacaaagggaagattatttgaacttgtccccatgcgtttttacttggtaccgtacattttctcagttggcatttgatggagaaaaactcagtcactcagcctctgaagaagcttcgggttcagactcaggcagtcagtcggaaagtgagcagggaagtgatccaggaagtggacatggcagcgagtcgaacagcagctctgaatcttctgagagtcagtcggaatctgagagcgaatcagcaggttccaaatcccagccagtcctcccagaagccaaagagaagccagcctctaagaaggaacggatagctgatgtgaagaagatgtgggaagaatatcctgatgtttatggggtcaggcggtcaaaccgaagcagacaagaaccatcgcgatttaatattaaggaagaggcaagtagcgggtctgagagtgggagcccaaaaagaagaggccagaggcagctgaaaaaacaagaaaaatggaaacaggaaccctcagaagatgaacaggaacaaggcaccagtgcagagagtgagccagaacaaaaaaaagtaaaagccagaagacctgtccccagaagaacagtgcccaaacctcgtgttaaaaagcagccgaagactcagcgtggaaagagaaaaaagcaagattcttctgatgaggatgatgatgatgacgaagctcccaaaaggcagactcgtcgaagagcggctaaaaacgttagttacaaagaagatgatgactttgagactgactcagatgatctcattgaaatgactggagaaggagttgatgaacagcaagataatagtgaaactattgaaaaggtcttagattcaagactgggaaagaaaggagccactggagcatctactactgtatatgcgattgaagctaatggcgaccctagtggtgactttgacactgaaaaggatgaaggtgaaatccagtacctcatcaagtggaagggttggtcttacatccacagcacatgggagagtgaagaatccttacagcaacagaaagtgaagggcctaaaaaaactagagaacttcaagaaaaaagaggacgaaatcaaacaatggttagggaaagtttctcctgaagatgtagaatatttcaattgccaacaggagctggcttcagagttgaataaacagtatcagatagtagaaagagtaatagctgtgaagacaagtaaatctacattgggtcaaacagattttccagctcatagtcggaagccggcaccctcaaatgagcccgaatatctatgtaaatggatgggactcccctattcagagtgtagctgggaagatgaagccctcattggaaagaaattccagaattgcattgacagcttccacagtaggaacaactcaaaaaccatcccaacaagagaatgcaaggccctgaagcagagaccacgatttgtagctttaaagaaacaacctgcatatttaggaggggagaatctggaacttcgagattatcagctagaaggtctaaactggctagctcattcctggtgcaagtaggtagaaaaatatgagtgcaattttccttactgtttctggcttctttattgttagatgtcaagaattttttttttcttttttcacacccttattgtatctcaaccaagaaatctttatgctgcatattacagaaataaaagatgattgagag

SEQ ID NO: 117703 - DNA, 7764 bp, Homo sapiens
  Payload ID: 2999
  Gene Symbol: CHD2
  Gene Name: chromodomain helicase DNA binding protein 2
  Uniprot ID: O14647
  ENST ID: ENST00000626874
  CDS Start-End: 708-5927
ccctgggatggaggatctgtctctctctctctctctcctttttttttttttggtggagatgaaggggtgggtctatggtacatcacctgagttgtggggtaaatgtagagagtgtcaatcaaaggcagagctctcagagctgggaaggaggctctagatggcggctgtgccttagagagagcgcgctctgctccctgcctttgcctcactttacgcaactttccctaactttcgggcagcctcagggggcccccgtagccccctgcctttcctagggacttactggggtcgattcgaacctttttttgggagaaaagcagcttttaggagctttcttttcgtgccttgttggaaagaagcagccgtactgagagcccaggtcgttgttttttccagcttagaagccatggcgcacctccatttttgtgcgctctcctaatgaggttttttttctttcggacctgttttagtattaattattgctttatttttttgaccagttaacatatttgagggttattttatttatttttcgttttttaacggaggattttgcctttatttttaattatttgggatctgatatttttctactagtagataggactcttggtttggacatactacatggatcagtaaatacctgggcacaggacttcaaagcaaacacagattccccctcccccttaatatttaagaattaaaagatgatgagaaataaggacaaaagccaagaggaggacagttcgctacacagcaatgcatcgagtcactcagcctctgaagaagcttcgggttcagactcaggcagtcagtcggaaagtgagcagggaagtgatccaggaagtggacatggcagcgagtcgaacagcagctctgaatcttctgagagtcagtcggaatctgagagcgaatcagcaggttccaaatcccagccagtcctcccagaagccaaagagaagccagcctctaagaaggaacggatagctgatgtgaagaagatgtgggaagaatatcctgatgtttatggggtcaggcggtcaaaccgaagcagacaagaaccatcgcgatttaatattaaggaagaggcaagtagcgggtctgagagtgggagcccaaaaagaagaggccagaggcagctgaaaaaacaagaaaaatggaaacaggaaccctcagaagatgaacaggaacaaggcaccagtgcagagagtgagccagaacaaaaaaaagtaaaagccagaagacctgtccccagaagaacagtgcccaaacctcgtgttaaaaagcagccgaagactcagcgtggaaagagaaaaaagcaagattcttctgatgaggatgatgatgatgacgaagctcccaaaaggcagactcgtcgaagagcggctaaaaacgttagttacaaagaagatgatgactttgagactgactcagatgatctcattgaaatgactggagaaggagttgatgaacagcaagataatagtgaaactattgaaaaggtcttagattcaagactgggaaagaaaggagccactggagcatctactactgtatatgcgattgaagctaatggcgaccctagtggtgactttgacactgaaaaggatgaaggtgaaatccagtacctcatcaagtggaagggttggtcttacatccacagcacatgggagagtgaagaatccttacagcaacagaaagtgaagggcctaaaaaaactagagaacttcaagaaaaaagaggacgaaatcaaacaatggttagggaaagtttctcctgaagatgtagaatatttcaattgccaacaggagctggcttcagagttgaataaacagtatcagatagtagaaagagtaatagctgtgaagacaagtaaatctacattgggtcaaacagattttccagctcatagtcggaagccggcaccctcaaatgagcccgaatatctatgtaaatggatgggactcccctattcagagtgtagctgggaagatgaagccctcattggaaagaaattccagaattgcattgacagcttccacagtaggaacaactcaaaaaccatcccaacaagagaatgcaaggccctgaagcagagaccacgatttgtagctttaaagaaacaacctgcatatttaggaggggagaatctggaacttcgagattatcagctagaaggtctaaactggctagctcattcctggtgcaaaaataatagtgtaatccttgctgatgaaatgggcctaggaaagaccatccagaccatatcattcctctcctacctgttccaccaacaccagctgtatggcccctttcttatagtcgtccctttatccaccctcacctcatggcagagagagtttgaaatctgggcaccagagattaacgtagtggtttacataggtgacctgatgagcagaaatacgatacgggaatatgaatggattcattcccaaaccaaaagattgaagttcaacgcacttataacaacatatgagatcctcttgaaagataagactgtgctgggcagtattaactgggcctttctgggagtggatgaagcccatcggttgaagaatgatgactctttattgtataaaactctgattgatttcaagtccaaccataggctcctgattacggggacccctcttcagaattccctcaaagagctctggtccttgctgcactttattatgccggagaagtttgaattttgggaagattttgaagaagaccatgggaaggggagagaaaatggctaccagagtcttcataaggtgctagagcctttccttctccggagagtcaaaaaagatgtggagaaatcccttcctgctaaagtggaacagattctcagggtggagatgtcagcccttcagaaacagtattacaagtggattctgaccaggaattacaaggctcttgccaaaggaacaagaggcagcacatctggttttcttaatattgtgatggaactgaaaaaatgttgcaaccactgctatctgattaaaccccctgaagaaaatgaaagggaaaatggacaggagattcttctgtccctcataaggagcagtgggaagttgattttattagacaaactgttgacaagacttcgagaaagggggaatcgagtgcttatcttctctcagatggtgagaatgttggatatcctggctgaatacctaactattaaacactatcctttccagcgtctggatggttccatcaagggagaaatccgaaaacaggcactggaccacttcaatgcagatgggtctgaggacttctgtttcctgctctcgacaagggctggtggcctgggaatcaatttggcttcagcggacacagtcgtcatctttgactctgactggaacccccagaatgacttgcaggcacaagcccgagcgcatagaattggtcaaaagaagcaggtaaatatttaccgcttagttacaaaggggactgtggaggaggagatcatagaacgggccaaaaagaagatggtattagatcatctggtgattcagcgcatggacaccactggccggacgatcctggaaaacaactcaggaaggtccaactcaaatccttttaataaagaagagctgacagctattttgaaatttggagcagaggatctcttcaaagaactggaaggggaggaatcagaacctcaggaaatggatatagatgaaattttgcggttggctgaaacgagagagaatgaagtgtcaacaagtgcaacagatgaacttctatcacagtttaaggttgccaactttgcaacaatggaagatgaagaagagctagaagagcgtcctcacaaggactgggatgagatcattccagaggaacaaaggaaaaaagtagaggaggaagagcggcagaaggagctagaagaaatttatatgctgcctcgaattcggagttccactaaaaaggctcagacaaatgacagtgactctgacactgagtctaagaggcaggcccagagatcctctgcttctgagagtgaaacggaagactctgatgatgacaagaagccaaagcgcagagggcgtccgaggagtgtgcggaaggacctcgtggagggatttactgatgcagagatccgaaggttcatcaaggcttataagaagtttggtctccctcttgaacggctggagtgcatagcacgtgatgctgagctggtagataagtcggtggcagatctgaagcgcctgggtgaactgatccacaacagctgtgtgtcagcaatgcaggaatacgaagagcagctgaaagaaaatgccagcgagggaaaaggaccagggaaaaggagaggtccaacaatcaagatatccggagttcaggttaatgtgaaatccattatccaacatgaagaggagtttgagatgctgcataaatctatccctgtggaccctgaagaaaaaaaaaaatactgcttaacctgtcgtgtcaaagctgcacattttgatgtagagtggggggtggaagatgattctcgcctgttgctggggatttatgaacatggctatggaaactgggagttaattaaaacagacccagagcttaaattaactgacaaaattctgccggtggagacagataaaaagcctcaggggaagcagctacagacccgagcggattacttgttgaagctgctcagaaagggtctggagaagaagggggctgtgacaggtggggaagaggccaaattaaagaagcggaagcctcgggtaaagaaggaaaacaaagtgcccaggctgaaagaggagcatggaattgagctttcatctcctaggcattcagataatccatcagaagagggagaagtgaaagatgatggcttggaaaaaagtccaatgaaaaaaaaacagaagaagaaagagaacaaggagaacaaggagaaacaaatgagttctaggaaagacaaagaaggggacaaggaaagaaagaagtcaaaagataagaaagagaagcctaaaagtggtgatgccaaatcttcgagtaaatcaaagcgatctcagggtcctgtccatattacagcaggaagtgaacctgtccccattggagaggatgaggatgatgatctggaccaggagacattcagcatatgtaaggagaggatgaggcccgtgaaaaaggcactgaaacagctcgacaaacctgacaaggggctcaacgtgcaagaacagctggaacacacccggaactgcctgctgaaaatcggagaccggatagccgagtgccttaaagcctactcagatcaggagcacatcaaactctggaggaggaacctatggatttttgtttccaagtttacagaatttgatgctcgaaaactgcataagttatacaagatggctcataagaaaaggtctcaagaagaagaggagcaaaagaagaaagacgacgtgactgggggtaagaaaccatttcgtccagaggcctcaggctccagccgggactctctgatatctcagtcccatacctcacacaaccttcaccctcagaagcctcatttgcctgcctcccatggcccacagatgcatggacacccaagagataactacaatcaccccaacaagagacacttcagtaatgcagatcgaggagactggcagagggaaagaaagttcaactatggtggtggcaacaacaatccaccatggggaagcgacaggcaccatcagtatgagcagcactggtacaaggaccaccattatggggaccggcgacatatggatgcccaccgttccggaagctatcgacccaacaacatgtccagaaagaggccttatgaccagtacagcagtgaccgagaccaccggggacacagagattattatgacaggtatgcaaaaggctgtgagacaccaggtgccaacctttgccaggagctgtttctagggagaaagtgacgtatacatgaatgtatttatctatcaaattactgaagatctcatcatgcatgtgtcagccacagcgaatcccatgtcttggttataggttttatgttttgttttgtgggtcatagggagcacatttcacctgtgcaggaaaagagttttctgccgtcttttgaggaaatctagtgaagaggtcgccataaaatattagagtcaacaaccaaaattattaagctctgtgcgaggctgtcagccacactaggtatcagggatcccgagatgggtaccagcccacagtccttacctgccacgagcccataattgaagagtcaaagtcttctgaagctgcaccctctttacttcagtacaatgccaccagtagtacgatgagccgaagctttacattgtgagagtagcaagtccagggagagctaaagaggttttatctgtatttcctaatttcaaatcttggataatttaacctcatagcagctttggttttccctgggctgatgatgtgcgtcatttgcactgtaccttgaatttacagtgggaaaatttcatataaacgtgtcaaagtcgtgctttgtttttggaagatctggtaacagcagcccgcattagcagagagctgtagctgagtagctgccacctcgttgggagactgcccctcgctcccacccttctctattgtctggacccagtgggcatcttgccctgcgttcttctagtaggtctgtatttctatttgatgtcactttccttttgcctgaaggactttttctgctggtgataaactctttcagtgtttgtatatatgcctgaaaaagtattttgccttcatttttgaaagtagtttttgctgagtgtatacatttttggctttacagtttctttcagtgctttaaagatgtacctctgctatttacttgcattgttttgtgatgaaaaatctgtcatccttatctttgttcctctttacataatgttccttttaaaaaaaatcactgattatgatgtgccttggtgtatttttccttggtttcttgtgcttggaaatttttgaacttcttggatctgtgggtttattgtttccataaaatttggaaatttttacaatcttcttcaaatattttttctgatcccccactctctcttcttctttggagattctcattacacctatattagcttgcttgaagttgtctcacagctcacttgtattctgttgacttttaaaaaattatgctttctgtttcactgtggatagtttctattgctacctcttcaagttcactaatactttccttttcaatgtcaagactgctgtgaggcccatccagtgtactttgcattttatacattgtagttctaaaagttcggaaagttgtttttgggtctttttatatatgttctgtgtctaaccttttaaaacctggaacacagatataacaatggttttgatgtccttgtctgcgaatcttatcacttgggtcagtttcagttgatacctcctcactgtgggtcttgctcccctggtgctttctgtgcctagtaatttttgtcagatgccagatgtaacatttaccttgttgggtgctggatatttctgtattcctgtaagtattctggagctttgttatgagttgcaggttatttggaagcagtttcctttttcaggtcttgctgttaagattcgttaggtagaaccagagcagtgctcagtcaagggctaatgattgcccacccccaaggtaaagagcctcattgcactctacccaattgcgttagtctgttttgcaggaatacctgaggctgggtaatttatagagaaaagagttttatttgg

SEQ ID NO: 117704 - DNA, 1740 bp, Homo sapiens
  Payload ID: 2999
  Gene Symbol: CHD2
  Gene Name: chromodomain helicase DNA binding protein 2
  ENST ID: ENST00000627622
  CDS Start-End: 576-713
ctcagagctgggaaggaggctctagatggcggctgtgccttagagagagcgcgctctgctccctgcctttgcctcactttacgcaactttccctaactttcgggcagcctcagggggcccccgtagccccctgcctttcctagggacttactggggtcgattcgaacctttttttgggagaaaagcagcttttaggagctttcttttcgtgccttgttggaaagaagcagccgtactgagagcccaggtcgttgttttttccagcttagaagccatggcgcacctccatttttgtgcgctctcctaatgaggttttttttctttcggacctgttttagtattaattattgctttatttttttgaccagttaacatatttgagggttattttatttatttttcgttttttaacggaggattttgcctttatttttaattatttgggatctgatatttttctactagtagataggactcttggtttggacatactacatggatcagtaaatacctgggcacaggacttcaaagcaaacacagattccccctcccccttaatatttaagaattaaaagatgatgagaaataaggacaaaagccaagaggaggacagttcgctacacagcaatgcatcgaggtatgagctatcaactttcttcctttttgtctttttttttgggggagaaacctcagcttacaattgtttaccttgacagacatggattgctgtctgttttattgtgtttttctaatttggattcgttttttaaagcatgaccttgagattgctaatatgccacaccctaattttttggtagcaatttatgaaagttgagttgtgacttaaggcctcttacagcagtcaaaaggtaaggtacctttattcaaaggggcctttactgtaatgtacagtttttctgtcagtaaatttcagtttttaggtttttgtactgcagaaaaatgaccttgtcggtttagccattgctgcattgcaccattttacatacaaggcaaattttttctttgaagaatccaggatatctaaacttgtaactgagggccatagagaagccttgtagtagtaaattatagtaaatagacatatcagaaagttatatgaatgaaaaaatgtacatttaaaaacaaaatcacttaaaggaccctttgactgatgcctctcagtttatatttttatgtgactttatatttcttttgatacacttgacattttaggaaattttgatgtgatttatcaaaacctttacttgatggttagagttcctgcatttatgaaatcaaatctgtaataacagaaatcctggaatactcttaatatatacttctattttgtgtttgttactgtgattaatatttgcagttgtatattttacatttaaattattttaaggtttgcatttgtatgcttaagacattgatttcctgttggtagatgtattttatcctcacaatttagatgtagctgctttaaatttattgatgtatttcgacagagtcgtctggaatgctttatcttctgaagcttaaaaatgtactgtttgtgcaaatcatgatctgtttcacattccttggagtaccttgttagtgatgaagtaataaagcctctaagatgtttttgttgtatgacctctgtatattaatttttaaaagtacatatgaatgcattttttgatgtgttctttatgcattttcatattataaattttaaatcatgcagtttaa

SEQ ID NO: 117705 - DNA, 607 bp, Homo sapiens
  Payload ID: 2999
  Gene Symbol: CHD2
  Gene Name: chromodomain helicase DNA binding protein 2
  ENST ID: ENST00000630016
  CDS Start-End: 1-214
tacattgggtcaaacagattttccagctcatagtcggaagccggcaccctcaaatgagcccgaatatctatgtaaatggatgggactcccctattcagagtgtagctgggaagatgaagccctcattggaaagaaattccagaattgcattgacagcttccacagtaggaacaactcaaaaaccatcccaacaagagaatgcaaggtatggtgatggttggcttttgttttttcagggagaagatatactgataaagaggattggacacatatgtgctgagaaaatattacaaaatgaaatgatgattgccattttgaagtgaaagaaggccctgaagcagagaccacgatttgtagctttaaagaaacaacctgcatatttaggaggggagaatctggaacttcgagattatcagctagaaggtctaaactggctagctcattcctggtgcaagtaggtagaaaaatatgagtgcaattttccttactgtttctggcttctttattgttagatgtcaagaattttttttttcttttttcacacccttattgtatctcaaccaagaaatctttatgctgcatattacagaaataaaagatgattgag

SEQ ID NO: 117706 - DNA, 1249 bp, Homo sapiens
  Payload ID: 2999
  Gene Symbol: CHD2
  Gene Name: chromodomain helicase DNA binding protein 2
  ENST ID: ENST00000629346
  CDS Start-End: 573-668
agagctgggaaggaggctctagatggcggctgtgccttagagagagcgcgctctgctccctgcctttgcctcactttacgcaactttccctaactttcgggcagcctcagggggcccccgtagccccctgcctttcctagggacttactggggtcgattcgaacctttttttgggagaaaagcagcttttaggagctttcttttcgtgccttgttggaaagaagcagccgtactgagagcccaggtcgttgttttttccagcttagaagccatggcgcacctccatttttgtgcgctctcctaatgaggttttttttctttcggacctgttttagtattaattattgctttatttttttgaccagttaacatatttgagggttattttatttatttttcgttttttaacggaggattttgcctttatttttaattatttgggatctgatatttttctactagtagataggactcttggtttggacatactacatggatcagtaaatacctgggcacaggacttcaaagcaaacacagattccccctcccccttaatatttaagaattaaaagatgatgagaaataaggacaaaagccaagaggaggacagttcgctacacagcaatgcatcgagagtcgtctggaatgctttatcttctgaagcttaaaaatgtactgtttgtgcaaatcatgatctgtttcacattccttggagtaccttgttagtgatgaagtaataaagcctctaagatgtttttgttgtatgacctctgtatattaatttttaaaagtacatatgaatgcattttttgatgtgttctttatgcattttcatattataaattttaaatcatgcagtttaacaaggatgtgattcattatgtggttttccttcccaatttttacttttctaatttttataaataatacacttttctattaggctagtgaatttgaaagttttgaacatgatgtgttactaatatgctgaattctatttattttatttgactgaaagcatattgagccttgctttagaaaataagttaccaaatttttttgcattgagttgtcacccagtttgtagtgctgtcttaattgaattgcccatgtaaattactagattaaattgaggacagaaaagttttttactcatcctaagctgtttttttctggaaagtaatgacaatttgaagaaatgagaacctccagatatatttggcaaattattaaagattcagcactaaaa

SEQ ID NO: 117707 - DNA, 3202 bp, Homo sapiens
  Payload ID: 2999
  Gene Symbol: CHD2
  Gene Name: chromodomain helicase DNA binding protein 2
  ENST ID: ENST00000628375
  CDS Start-End: 573-1850
agagctgggaaggaggctctagatggcggctgtgccttagagagagcgcgctctgctccctgcctttgcctcactttacgcaactttccctaactttcgggcagcctcagggggcccccgtagccccctgcctttcctagggacttactggggtcgattcgaacctttttttgggagaaaagcagcttttaggagctttcttttcgtgccttgttggaaagaagcagccgtactgagagcccaggtcgttgttttttccagcttagaagccatggcgcacctccatttttgtgcgctctcctaatgaggttttttttctttcggacctgttttagtattaattattgctttatttttttgaccagttaacatatttgagggttattttatttatttttcgttttttaacggaggattttgcctttatttttaattatttgggatctgatatttttctactagtagataggactcttggtttggacatactacatggatcagtaaatacctgggcacaggacttcaaagcaaacacagattccccctcccccttaatatttaagaattaaaagatgatgagaaataaggacaaaagccaagaggaggacagttcgctacacagcaatgcatcgagtcactcagcctctgaagaagcttcgggttcagactcaggcagtcagtcggaaagtgagcagggaagtgatccaggaagtggacatggcagcgagtcgaacagcagctctgaatcttctgagagtcagtcggaatctgagagcgaatcagcaggttccaaatcccagccagtcctcccagaagccaaagagaagccagcctctaagaaggaacggatagctgatgtgaagaagatgtgggaagaatatcctgatgtttatggggtcaggcggtcaaaccgaagcagacaagaaccatcgcgatttaatattaaggaagaggcaagtagcgggtctgagagtgggagcccaaaaagaagaggccagaggcagctgaaaaaacaaacagtgcccaaacctcgtgttaaaaagcagccgaagactcagcgtggaaagagaaaaaagcaagattcttctgatgaggatgatgatgatgacgaagctcccaaaaggcagactcgtcgaagagcggctaaaaacgttagttacaaagaagatgatgactttgagactgactcagatgatctcattgaaatgactggagaaggagttgatgaacagcaagataatagtgaaactattgaaaaggtcttagattcaagactgggaaagaaaggagccactggagcatctactactgtatatgcgattgaagctaatggcgaccctagtggtgactttgacactgaaaaggatgaaggtgaaatccagtacctcatcaagtggaagggttggtcttacatccacagcacatgggagagtgaagaatccttacagcaacagaaagtgaagggcctaaaaaaactagagaacttcaagaaaaaagaggacgaaatcaaacaatggttagggaaagtttctcctgaagatgtagaatatttcaattgccaacaggagctggcttcagagttgaataaacagtatcagatagtagaaagagtaatagctgtgaagacaagtaaatctacattgggtcaaacagattttccagctcatagtcggaagccggcaccctcaaatgagcccgaatatctatgtaaatggatgggactcccctattcagagtgtagctgggaagatgaagccctcattggaaagaaattccagaattgcattgacagcttccacagtaggaacaactcaaaaaccatcccaacaagagaatgcaaggtatggtgatggttggcttttgttttttcagggagaagatatactgataaagaggattggacacatatgtgctgagaaaatattacaaaatgaaatgatgattgccattttgaagtgaaagaaggtgatttaaatatgacattaaagcaaaaggagagaatgaattatttcatggctttgctgacttgtttaatcttgcaatttacataattagaaatagagatatttgagagaatacttgaaaggatttaggcacttttattttattttattttattattttattttgagacagagtttcgctgtgtcgcccaggctggagtgcactggcactatcttggctaactgcaacctctgcctcctgggtttaagtgattctcctgcctcagcctcctgagcagctgggattacaggcacgcaccaccacttccagctaattttttgtatttttagcagagatggggtttcaccatgttggtcaggctggtctcaaactcctgacctcaaatgatccacccaccttggcctcccaaagtgctgggattacaggcgtgagccaccatgcccagttgcatttaggcactttaaaagagaagtgaagccagttgcagtggctcacacctgtggttccagctacttgggaggctgaggcggcaggattgcttgagcacaggagtttgaggccaacctggggaagattgtgatacccgttctctaaaaaaaaaaaaaaatagagagcgggaagtgatagaaaaggcgagtgtctttgaattctaagttagaaattaaatatataggcttatttgctagattggctgaataaatcctttccttggaatttattccatcaggaaactgatgtgcttgggtcctcagtaatgaaatatcagacaagtgatacgtctctgagaagttgacattcatgttaatggcactagaattctatctgtgaaaaccagtatttaattgccaaagagtgtgatagggaaaatgtggtcagagaagcaccaatgtagaagtctctgagctccagtggtcattgaatgggttttaagaggaagttgtggttgttgaactgcatctggcccttgtataatggattggtgctgctggctatacagacaagagggggcccagggtattgccctcctgtgaaaggtatcaagagaaagattcttatagttcaataggagaactactagaccccaggggtgaggagaagaggaatgatgttgacaagtacatcaaggtcaaagtgtgtgtgtcttggctacctcgaagggtattttgactttatctcctaggtattcgtacagctgagtacagtggcattatgaaatagttttatttagaaagcttca

SEQ ID NO: 117708 - DNA, 7328 bp, Homo sapiens
  Payload ID: 3000
  Gene Symbol: CHD3
  Gene Name: chromodomain helicase DNA binding protein 3
  Uniprot ID: Q12873
  ENST ID: ENST00000330494
  CDS Start-End: 151-6153
atatggaggtgaagggtgagatcgggaaacaaagggtatggccccctagttcccaaagggagcagggagatgggaatagaattgaaggtaggttttaggctacttgggaggaggaatatttaggtaattgtggagactttctcctgtgtgatgaaggcggcagacactgtgatcctgtgggcaagaagtaaaaatgaccagctgaggatttcttttcctccaggactgtgttggggtgacaggatgcctgataaggatgacattcggctgctgccgtcagcattgggtgtgaagaagagaaaacgaggacccaagaagcagaaggagaacaagccaggaaaaccccgaaaacgcaagaagcgtgacagtgaggaggaatttggttctgagcgagatgagtaccgggagaagtcagagagtgggggcagtgaatatggaaccggaccgggtcggaaacgaagaaggaagcaccgagaaaaaaaggagaagaagacaaagcggcggaaaaagggggagggagatggggggcaaaagcaagtggaacagaagtcatcagcaactctgcttctgacctggggcctggaggatgtggagcatgtgttctctgaggaggattaccacacgctcaccaactacaaagccttcagccagttcatgaggcccctaattgctaagaagaatcctaagatcccaatgtctaagatgatgaccatccttggggccaaatggagagagttcagtgccaacaaccccttcaaggggtcagcagctgctgtggcggcggcagcggcagcagcagcagcagctgtagctgagcaggtgtcagctgctgtctcgtcggccacccccatagcaccctccggaccccccgcccttccaccaccccctgctgctgatatccagcccccacccatccgaagagccaaaaccaaagagggcaaaggtccaggccataagaggcggagtaagagcccccgagtgcctgatggacgcaagaagcttcggggaaagaaaatggcaccactcaaaataaaactagggcttctgggtggcaagaggaagaaaggaggctcgtatgtttttcagagcgacgaaggtcctgaaccagaggctgaggaatcagacctggacagtggcagtgtccacagtgcctcaggccggcctgatggccctgtccgcaccaagaaactaaagagaggccggccaggaaggaagaagaagaaggtcctgggctgtcctgcagtggccggggaggaggaggttgatggctacgagacggatcaccaggattactgtgaggtgtgccagcagggtggggaaattattctgtgtgacacctgccctcgtgcctaccacctcgtctgccttgatcctgagcttgaccgggctccagagggcaaatggagctgccctcactgtgagaaggagggggtccagtgggaggccaaggaggaagaagaagaatacgaagaggagggagaggaagaaggggagaaggaggaggaggatgatcacatggagtactgccgcgtatgcaaggacggcggggagctcctgtgctgtgacgcgtgcatctcctcctaccacattcattgtctaaaccctcccctgcctgacattcccaatggtgaatggctgtgtccccgatgcacatgccccgtgctgaagggtcgagtgcagaagatcctacattggcggtggggggagccacctgtagcagtgccagcccctcaacaggcagatggaaatccagatgtcccacccccccgtcctcttcaaggcagatcagagcgagagttctttgtcaagtgggtaggactatcctactggcactgctcctgggccaaggagcttcagctggaaatcttccatttggttatgtatcgaaactaccagcggaagaatgacatggatgagcccccacccctggactatggctccggcgaggatgatgggaagagcgacaagcgtaaagtgaaagacccgcactatgctgagatggaggagaagtactatcgttttggcatcaagccagagtggatgaccgtccaccgcatcatcaaccacagtgtggataaaaaggggaattaccactatctagtaaaatggagggacttaccatatgaccagtccacgtgggaggaagatgaaatgaatatccctgaatacgaagaacataagcaaagctactggagacaccgagaactaattatgggggaagaccctgcccagccccgcaagtataagaagaagaagaaggagctacagggtgatgggcctcccagttctcccactaatgatcctaccgtgaaatatgagactcagccacggtttatcacagccactggaggcaccctgcacatgtatcagttggaagggctgaactggctacgcttctcctgggcccagggcactgacaccattctagctgatgagatggggctaggcaagaccatacaaaccatcgtcttcctctactcactctacaaggagggccacacaaaaggtcccttcctggtgagtgccccactctctaccatcattaactgggagcgggagttccagatgtgggcacccaaattctatgtggtgacatacacgggtgacaaggacagccgggccatcattcgtgagaatgaattctcctttgaggacaatgccatcaaagggggcaagaaagcttttaagatgaagagggaggcacaggtgaagttccatgttctcctgacatcgtatgagctgatcaccattgatcaggcagcacttggttccatccgctgggcctgtcttgtggtagatgaggcccatcgactcaagaacaaccagtccaagtttttcagggttctcaatggttacaagatagatcataagttgctgctgacaggaaccccattgcagaataatctggaggagctcttccatctcctgaacttcctcaccccagagagatttaacaacttggagggcttcctggaggagtttgctgacatatccaaagaggaccagatcaagaaactgcatgatttgctggggccacacatgctgcggagactcaaggcagatgtctttaagaacatgccagccaagacagagctcatcgttcgggtggagctaagccccatgcagaagaaatactacaaatacatcctgactcgaaattttgaggccttgaattcacgaggtggtgggaaccaggtgtcgctgcttaatatcatgatggatcttaagaagtgctgcaaccatccatacctttttcccgtggctgctatggagtcccccaaactccccagtggggcttatgagggtggggcacttattaagtcgtctgggaagctcatgctgctccagaagatgctgcgaaagctgaaggagcaaggacaccgagtgctcatcttctcgcagatgaccaaaatgttagacttgcttgaggacttcttagactatgaaggctacaagtatgagcgcatcgatggtggtatcacgggtgccctgaggcaggaggccatcgatcggtttaatgctcctggggcccaacaattctgcttcctcctgtccacccgagctgggggcctgggcatcaatctggccactgctgacactgtcatcatctttgattctgactggaacccccataatgacatccaggcctttagccgggctcatcggattggccaggccaacaaagtgatgatttaccggtttgtgactcgcgcgtcagtggaagagcgaatcacacaagtggccaagagaaagatgatgctgacacacctggttgtgcggcctgggctgggctccaaggcaggctccatgtccaagcaggagcttgacgacattctcaaatttggcactgaagagctattcaaggatgaaaacgagggggagaacaaggaggaggacagcagtgtgattcattatgacaatgaggccatcgctcggctgttggaccggaaccaggatgcaactgaggacactgacgtgcagaacatgaatgagtatctcagctccttcaaggtggcacagtacgtcgtgcgggaagaagacaagattgaggaaattgagcgagagatcatcaagcaggaggagaatgtggaccctgactactgggagaagctgctgaggcatcactatgagcaacagcaggaagacctagcccggaatctaggcaagggcaagcgggttcgcaagcaagttaactacaatgatgctgctcaggaagaccaagacaaccagtcagagtactcggtgggttcagaggaggaggatgaagacttcgatgaacgtcctgaagggcgtagacagtcaaagaggcagctccggaatgagaaagataagccactgcctccactgctggcccgagtcgggggcaacattgaggtgctgggcttcaacacccgtcagcggaaggctttcctcaatgctgtgatgcgctgggggatgccaccacaggatgccttcaccacacagtggctggtgcgggacctgaggggcaagactgagaaggagtttaaggcctatgtgtctttgttcatgcgccatctgtgtgagcctggggcagacggctctgaaacctttgccgatggggtccctcgggagggactgagtcgccagcaggtgttgacccgcattggagtcatgtctctcgtcaaaaagaaggtgcaggagtttgagcacatcaatgggcgttggtcaatgccggaactgatgcctgaccccagcgccgattctaagcgctcctccagagcctcctctcctaccaaaacgtctcccaccactcctgaggcttctgctaccaacagtccctgcacctctaaacctgctactccagctccaagtgagaaaggagaaggcataaggacacctcttgagaaggaggaagctgaaaaccaggaggaaaagccagagaagaacagcagaattggggagaagatggagacagaggctgatgcccccagcccagccccatcacttggggagcggctggagccaaggaagattcctctagaggatgaggtgccaggggtgcctggagagatggagcctgaacctgggtaccgtggggacagagagaagtcagccacagagtcgacgccaggagaaaggggggaggagaagccgttggatggacaggaacacagggagaggccggagggggaaacaggggatttgggcaagagagaagatgtaaaaggtgaccgggagcttcgaccagggcctcgagatgagccacggtccaatgggcgacgagaggaaaagacagagaagccccggttcatgttcaatatcgccgatggtggcttcacagagcttcacacactgtggcagaatgaggaacgggcagctatttcctcggggaaactcaatgagatctggcacagaagacatgactattggcttctggctgggattgtcctccatggctatgcacggtggcaggacatccagaatgatgctcaatttgccattatcaacgagccatttaaaactgaagccaataaggggaactttctggagatgaaaaataagttcctggcccggaggttcaagctcctggagcaggcgctggtgattgaggagcagctgcggcgggcggcctacctgaacctgtcgcaggagccggcgcaccccgccatggccctccacgcccgcttcgccgaggccgagtgcctggccgagagccaccagcacctctccaaggagtcgctggcggggaacaagccggccaacgccgtcctgcacaaggttctgaaccagctggaggagttgctgagcgacatgaaggcggacgtgacccgcctgccagccacgctgtcccgaataccccccatcgcagcccgccttcagatgtccgagcgcagcatcctcagccggctggccagcaagggcacggagcctcaccccacaccggcctacccgccgggtccctacgctacacctccggggtacggggcggccttcagcgccgcacccgtaggggccctggccgccgcaggcgccaattacagccagatgcctgcagggtccttcatcacagccgccaccaacggccctccagtgcttgtgaagaaggagaaggaaatggtgggggcattggtgtcagacgggctggatcggaaggagccccgagccggggaggtgatctgtatagacgactgactggatcccaggcctgcccttcacccaggccccgtccccgaggccgacccccagctcaagcgctggggcctgctgccagccctccaccttccccaccccttgggccatcactgggctaggaacccctttgcccctctctgcagctcctctcttcaagaagggccctttgtctttctccactcccacacacctttcccaccaagccttgaagactgtgctggtgagaagaagtctgggtgggagatggctggcagggtcttccaagtaccttcctcccacactgccaagtatacacaacttcccagtaaatggttgtggggaggaaagaggtggagcctccccagccgtttccctgcagaatcagctctgtctcatgtggaagtggagaatcagccttgcctggcctttaggaacttttgtggggaagagagctttgaagagaggagggggactttagagagggatgaaaatgagccctgggagggaggaagggacgaggaggggtggctgcatgttaccgtcccctacctctccccacgtggagggtggagcagttatgagggaggaagtcaactgctgttcagcctcagaataaaggtgccgttcactggctcagttacctcctgtgtaccggcatcttgtgttgggaatgttcccccctccctagggaccaaggaccacccctacaaaaagagtaatggttgggtgatactccctcaagccaaagaggagctccccaacctgttctagggacccaggtaacctagaagggtgggagagaatacaatgggccagatgtggtggaagcccagctctggggctcaggttcctggaagacttctactaccctccctcctcaaggcctggatacagactaaatttgtataagtcaggcaggggacctagtcagggtcttgggagctaccttgtcgttgggaccagagcaaaatagtggagggcaggctagggaaatgtgggcacatcccccctcccaggaggggccggggagagtggcagtttgcatggcgaaccccccacttcctctttgctgccccttcactttcttgctgcccctttcccagtctctcttcacacccactcctggtctgtcctgatcccctcttctgtatcaggtttattggttgtacatataaattatactttcctttctgtgt

SEQ ID NO: 117709 - DNA, 7286 bp, Homo sapiens
  Payload ID: 3000
  Gene Symbol: CHD3
  Gene Name: chromodomain helicase DNA binding protein 3
  Uniprot ID: Q12873
  ENST ID: ENST00000358181
  CDS Start-End: 211-6111
atctttgtttgggtctcccatactgcgtatagatgaatgggtcaggatatctggaacaaaatatggaggtgaagggtgagatcgggaaacaaagggtatggccccctagttcccaaagggagcagggagatgggaatagaattgaaggtaggttttaggctacttgggaggaggaatatttaggtaattgtggagactttctcctgtgtgatgaaggcggcagacactgtgatcctgtgggcaagaagtaaaaatgaccagctgaggatttcttttcctccaggactgtgttggggtgacaggatgcctgataaggatgacattcggctgctgccgtcagcattgggtgtgaagaagagaaaacgaggacccaagaagcagaaggagaacaagccaggaaaaccccgaaaacgcaagaagcgtgacagtgaggaggaatttggttctgagcgagatgagtaccgggagaagtcagagagtgggggcagtgaatatggaaccggaccgggtcggaaacgaagaaggaagcaccgagaaaaaaaggagaagaagacaaagcggcggaaaaagggggagggagatggggggcaaaagcaagtggaacagaagtcatcagcaactctgcttctgacctggggcctggaggatgtggagcatgtgttctctgaggaggattaccacacgctcaccaactacaaagccttcagccagttcatgaggcccctaattgctaagaagaatcctaagatcccaatgtctaagatgatgaccatccttggggccaaatggagagagttcagtgccaacaaccccttcaaggggtcagcagctgctgtggcggcggcagcggcagcagcagcagcagctgtagctgagcaggtgtcagctgctgtctcgtcggccacccccatagcaccctccggaccccccgcccttccaccaccccctgctgctgatatccagcccccacccatccgaagagccaaaaccaaagagggcaaaggtccaggccataagaggcggagtaagagcccccgagtgcctgatggacgcaagaagcttcggggaaagaaaatggcaccactcaaaataaaactagggcttctgggtggcaagaggaagaaaggaggctcgtatgtttttcagagcgacgaaggtcctgaaccagaggctgaggaatcagacctggacagtggcagtgtccacagtgcctcaggccggcctgatggccctgtccgcaccaagaaactaaagagaggccggccaggaaggaagaagaagaaggtcctgggctgtcctgcagtggccggggaggaggaggttgatggctacgagacggatcaccaggattactgtgaggtgtgccagcagggtggggaaattattctgtgtgacacctgccctcgtgcctaccacctcgtctgccttgatcctgagcttgaccgggctccagagggcaaatggagctgccctcactgtgagaaggagggggtccagtgggaggccaaggaggaagaagaagaatacgaagaggagggagaggaagaaggggagaaggaggaggaggatgatcacatggagtactgccgcgtatgcaaggacggcggggagctcctgtgctgtgacgcgtgcatctcctcctaccacattcattgtctaaaccctcccctgcctgacattcccaatggtgaatggctgtgtccccgatgcacatgccccgtgctgaagggtcgagtgcagaagatcctacattggcggtggggggagccacctgtagcagtgccagcccctcaacaggcagatggaaatccagatgtcccacccccccgtcctcttcaaggcagatcagagcgagagttctttgtcaagtgggtaggactatcctactggcactgctcctgggccaaggagcttcagctggaaatcttccatttggttatgtatcgaaactaccagcggaagaatgacatggatgagcccccacccctggactatggctccggcgaggatgatgggaagagcgacaagcgtaaagtgaaagacccgcactatgctgagatggaggagaagtactatcgttttggcatcaagccagagtggatgaccgtccaccgcatcatcaaccacagtgtggataaaaaggggaattaccactatctagtaaaatggagggacttaccatatgaccagtccacgtgggaggaagatgaaatgaatatccctgaatacgaagaacataagcaaagctactggagacaccgagaactaattatgggggaagaccctgcccagccccgcaagtataagaagaagaagaaggagctacagggtgatgggcctcccagttctcccactaatgatcctaccgtgaaatatgagactcagccacggtttatcacagccactggaggcaccctgcacatgtatcagttggaagggctgaactggctacgcttctcctgggcccagggcactgacaccattctagctgatgagatggggctaggcaagaccatacaaaccatcgtcttcctctactcactctacaaggagggccacacaaaaggtcccttcctggtgagtgccccactctctaccatcattaactgggagcgggagttccagatgtgggcacccaaattctatgtggtgacatacacgggtgacaaggacagccgggccatcattcgtgagaatgaattctcctttgaggacaatgccatcaaagggggcaagaaagcttttaagatgaagagggaggcacaggtgaagttccatgttctcctgacatcgtatgagctgatcaccattgatcaggcagcacttggttccatccgctgggcctgtcttgtggtagatgaggcccatcgactcaagaacaaccagtccaagtttttcagggttctcaatggttacaagatagatcataagttgctgctgacaggaaccccattgcagaataatctggaggagctcttccatctcctgaacttcctcaccccagagagatttaacaacttggagggcttcctggaggagtttgctgacatatccaaagaggaccagatcaagaaactgcatgatttgctggggccacacatgctgcggagactcaaggcagatgtctttaagaacatgccagccaagacagagctcatcgttcgggtggagctaagccccatgcagaagaaatactacaaatacatcctgactcgaaattttgaggccttgaattcacgaggtggtgggaaccaggtgtcgctgcttaatatcatgatggatcttaagaagtgctgcaaccatccatacctttttcccgtggctgctatggagtcccccaaactccccagtggggcttatgagggtggggcacttattaagtcgtctgggaagctcatgctgctccagaagatgctgcgaaagctgaaggagcaaggacaccgagtgctcatcttctcgcagatgaccaaaatgttagacttgcttgaggacttcttagactatgaaggctacaagtatgagcgcatcgatggtggtatcacgggtgccctgaggcaggaggccatcgatcggtttaatgctcctggggcccaacaattctgcttcctcctgtccacccgagctgggggcctgggcatcaatctggccactgctgacactgtcatcatctttgattctgactggaacccccataatgacatccaggcctttagccgggctcatcggattggccaggccaacaaagtgatgatttaccggtttgtgactcgcgcgtcagtggaagagcgaatcacacaagtggccaagagaaagatgatgctgacacacctggttgtgcggcctgggctgggctccaaggcaggctccatgtccaagcaggagcttgacgacattctcaaatttggcactgaagagctattcaaggatgaaaacgagggggagaacaaggaggaggacagcagtgtgattcattatgacaatgaggccatcgctcggctgttggaccggaaccaggatgcaactgaggacactgacgtgcagaacatgaatgagtatctcagctccttcaaggtggcacagtacgtcgtgcgggaagaagacaagattgaggaaattgagcgagagatcatcaagcaggaggagaatgtggaccctgactactgggagaagctgctgaggcatcactatgagcaacagcaggaagacctagcccggaatctaggcaagggcaagcgggttcgcaagcaagttaactacaatgatgctgctcaggaagaccaagacaaccagtcagagtactcggtgggttcagaggaggaggatgaagacttcgatgaacgtcctgaagggcgtagacagtcaaagaggcagctccggaatgagaaagataagccactgcctccactgctggcccgagtcgggggcaacattgaggtgctgggcttcaacacccgtcagcggaaggctttcctcaatgctgtgatgcgctgggggatgccaccacaggatgccttcaccacacagtggctggtgcgggacctgaggggcaagactgagaaggagtttaaggcctatgtgtctttgttcatgcgccatctgtgtgagcctggggcagacggctctgaaacctttgccgatggggtccctcgggagggactgagtcgccagcaggtgttgacccgcattggagtcatgtctctcgtcaaaaagaaggtgcaggagtttgagcacatcaatgggcgttggtcaatgccggaactgatgcctgaccccagcgccgattctaagcgctcctccagagcctcctctcctaccaaaacgtctcccaccactcctgaggcttctgctaccaacagtccctgcacctctaaacctgctactccagctccaagtgagaaaggagaaggcataaggacacctcttgagaaggaggaagctgaaaaccaggaggaaaagccagagaagaacagcagaattggggagaagatggagacagaggctgatgcccccagcccagccccatcacttggggagcggctggagccaaggaagattcctctagaggatgaggtgccaggggtgcctggagagatggagcctgaacctgggtaccgtggggacagagagaagtcagaagatgtaaaaggtgaccgggagcttcgaccagggcctcgagatgagccacggtccaatgggcgacgagaggaaaagacagagaagccccggttcatgttcaatatcgccgatggtggcttcacagagcttcacacactgtggcagaatgaggaacgggcagctatttcctcggggaaactcaatgagatctggcacagaagacatgactattggcttctggctgggattgtcctccatggctatgcacggtggcaggacatccagaatgatgctcaatttgccattatcaacgagccatttaaaactgaagccaataaggggaactttctggagatgaaaaataagttcctggcccggaggttcaagctcctggagcaggcgctggtgattgaggagcagctgcggcgggcggcctacctgaacctgtcgcaggagccggcgcaccccgccatggccctccacgcccgcttcgccgaggccgagtgcctggccgagagccaccagcacctctccaaggagtcgctggcggggaacaagccggccaacgccgtcctgcacaaggttctgaaccagctggaggagttgctgagcgacatgaaggcggacgtgacccgcctgccagccacgctgtcccgaataccccccatcgcagcccgccttcagatgtccgagcgcagcatcctcagccggctggccagcaagggcacggagcctcaccccacaccggcctacccgccgggtccctacgctacacctccggggtacggggcggccttcagcgccgcacccgtaggggccctggccgccgcaggcgccaattacagccagatgcctgcagggtccttcatcacagccgccaccaacggccctccagtgcttgtgaagaaggagaaggaaatggtgggggcattggtgtcagacgggctggatcggaaggagccccgagccggggaggtgatctgtatagacgactgactggatcccaggcctgcccttcacccaggccccgtccccgaggccgacccccagctcaagcgctggggcctgctgccagccctccaccttccccaccccttgggccatcactgggctaggaacccctttgcccctctctgcagctcctctcttcaagaagggccctttgtctttctccactcccacacacctttcccaccaagccttgaagactgtgctggtgagaagaagtctgggtgggagatggctggcagggtcttccaagtaccttcctcccacactgccaagtatacacaacttcccagtaaatggttgtggggaggaaagaggtggagcctccccagccgtttccctgcagaatcagctctgtctcatgtggaagtggagaatcagccttgcctggcctttaggaacttttgtggggaagagagctttgaagagaggagggggactttagagagggatgaaaatgagccctgggagggaggaagggacgaggaggggtggctgcatgttaccgtcccctacctctccccacgtggagggtggagcagttatgagggaggaagtcaactgctgttcagcctcagaataaaggtgccgttcactggctcagttacctcctgtgtaccggcatcttgtgttgggaatgttcccccctccctagggaccaaggaccacccctacaaaaagagtaatggttgggtgatactccctcaagccaaagaggagctccccaacctgttctagggacccaggtaacctagaagggtgggagagaatacaatgggccagatgtggtggaagcccagctctggggctcaggttcctggaagacttctactaccctccctcctcaaggcctggatacagactaaatttgtataagtcaggcaggggacctagtcagggtcttgggagctaccttgtcgttgggaccagagcaaaatagtggagggcaggctagggaaatgtgggcacatcccccctcccaggaggggccggggagagtggcagtttgcatggcgaaccccccacttcctctttgctgccccttcactttcttgctgcccctttcccagtctctcttcacacccactcctggtctgtcctgatcccctcttctgtatcaggtttattggttgtacatataaattatactttcctttctgtgt

SEQ ID NO: 117710 - DNA, 7356 bp, Homo sapiens
  Payload ID: 3000
  Gene Symbol: CHD3
  Gene Name: chromodomain helicase DNA binding protein 3
  Uniprot ID: Q12873
  ENST ID: ENST00000380358
  CDS Start-End: 2-6181
gatggcttcccctctgagggacgaggaggaggaggaggaggagatggtggtgtcggaggaggaagaagaggaggaagaagagggcgacgaggaggaggaggaggaggtggaggcggccgacgaggacgatgaggaggacgacgacgagggagtactcgggcgcgggccgggccacgaccggggccgcgaccgccacagcccccccggctgccacctcttcccgccgccgccgccgccgccgccaccgctgcccccgccgccgccgcccccgccgccagataaggatgacattcggctgctgccgtcagcattgggtgtgaagaagagaaaacgaggacccaagaagcagaaggagaacaagccaggaaaaccccgaaaacgcaagaagcgtgacagtgaggaggaatttggttctgagcgagatgagtaccgggagaagtcagagagtgggggcagtgaatatggaaccggaccgggtcggaaacgaagaaggaagcaccgagaaaaaaaggagaagaagacaaagcggcggaaaaagggggagggagatggggggcaaaagcaagtggaacagaagtcatcagcaactctgcttctgacctggggcctggaggatgtggagcatgtgttctctgaggaggattaccacacgctcaccaactacaaagccttcagccagttcatgaggcccctaattgctaagaagaatcctaagatcccaatgtctaagatgatgaccatccttggggccaaatggagagagttcagtgccaacaaccccttcaaggggtcagcagctgctgtggcggcggcagcggcagcagcagcagcagctgtagctgagcaggtgtcagctgctgtctcgtcggccacccccatagcaccctccggaccccccgcccttccaccaccccctgctgctgatatccagcccccacccatccgaagagccaaaaccaaagagggcaaaggtccaggccataagaggcggagtaagagcccccgagtgcctgatggacgcaagaagcttcggggaaagaaaatggcaccactcaaaataaaactagggcttctgggtggcaagaggaagaaaggaggctcgtatgtttttcagagcgacgaaggtcctgaaccagaggctgaggaatcagacctggacagtggcagtgtccacagtgcctcaggccggcctgatggccctgtccgcaccaagaaactaaagagaggccggccaggaaggaagaagaagaaggtcctgggctgtcctgcagtggccggggaggaggaggttgatggctacgagacggatcaccaggattactgtgaggtgtgccagcagggtggggaaattattctgtgtgacacctgccctcgtgcctaccacctcgtctgccttgatcctgagcttgaccgggctccagagggcaaatggagctgccctcactgtgagaaggagggggtccagtgggaggccaaggaggaagaagaagaatacgaagaggagggagaggaagaaggggagaaggaggaggaggatgatcacatggagtactgccgcgtatgcaaggacggcggggagctcctgtgctgtgacgcgtgcatctcctcctaccacattcattgtctaaaccctcccctgcctgacattcccaatggtgaatggctgtgtccccgatgcacatgccccgtgctgaagggtcgagtgcagaagatcctacattggcggtggggggagccacctgtagcagtgccagcccctcaacaggcagatggaaatccagatgtcccacccccccgtcctcttcaaggcagatcagagcgagagttctttgtcaagtgggtaggactatcctactggcactgctcctgggccaaggagcttcagctggaaatcttccatttggttatgtatcgaaactaccagcggaagaatgacatggatgagcccccacccctggactatggctccggcgaggatgatgggaagagcgacaagcgtaaagtgaaagacccgcactatgctgagatggaggagaagtactatcgttttggcatcaagccagagtggatgaccgtccaccgcatcatcaaccacagtgtggataaaaaggggaattaccactatctagtaaaatggagggacttaccatatgaccagtccacgtgggaggaagatgaaatgaatatccctgaatacgaagaacataagcaaagctactggagacaccgagaactaattatgggggaagaccctgcccagccccgcaagtataagaagaagaagaaggagctacagggtgatgggcctcccagttctcccactaatgatcctaccgtgaaatatgagactcagccacggtttatcacagccactggaggcaccctgcacatgtatcagttggaagggctgaactggctacgcttctcctgggcccagggcactgacaccattctagctgatgagatggggctaggcaagaccatacaaaccatcgtcttcctctactcactctacaaggagggccacacaaaaggtcccttcctggtgagtgccccactctctaccatcattaactgggagcgggagttccagatgtgggcacccaaattctatgtggtgacatacacgggtgacaaggacagccgggccatcattcgtgagaatgaattctcctttgaggacaatgccatcaaagggggcaagaaagcttttaagatgaagagggaggcacaggtgaagttccatgttctcctgacatcgtatgagctgatcaccattgatcaggcagcacttggttccatccgctgggcctgtcttgtggtagatgaggcccatcgactcaagaacaaccagtccaagtttttcagggttctcaatggttacaagatagatcataagttgctgctgacaggaaccccattgcagaataatctggaggagctcttccatctcctgaacttcctcaccccagagagatttaacaacttggagggcttcctggaggagtttgctgacatatccaaagaggaccagatcaagaaactgcatgatttgctggggccacacatgctgcggagactcaaggcagatgtctttaagaacatgccagccaagacagagctcatcgttcgggtggagctaagccccatgcagaagaaatactacaaatacatcctgactcgaaattttgaggccttgaattcacgaggtggtgggaaccaggtgtcgctgcttaatatcatgatggatcttaagaagtgctgcaaccatccatacctttttcccgtggctgctatggagtcccccaaactccccagtggggcttatgagggtggggcacttattaagtcgtctgggaagctcatgctgctccagaagatgctgcgaaagctgaaggagcaaggacaccgagtgctcatcttctcgcagatgaccaaaatgttagacttgcttgaggacttcttagactatgaaggctacaagtatgagcgcatcgatggtggtatcacgggtgccctgaggcaggaggccatcgatcggtttaatgctcctggggcccaacaattctgcttcctcctgtccacccgagctgggggcctgggcatcaatctggccactgctgacactgtcatcatctttgattctgactggaacccccataatgacatccaggcctttagccgggctcatcggattggccaggccaacaaagtgatgatttaccggtttgtgactcgcgcgtcagtggaagagcgaatcacacaagtggccaagagaaagatgatgctgacacacctggttgtgcggcctgggctgggctccaaggcaggctccatgtccaagcaggagcttgacgacattctcaaatttggcactgaagagctattcaaggatgaaaacgagggggagaacaaggaggaggacagcagtgtgattcattatgacaatgaggccatcgctcggctgttggaccggaaccaggatgcaactgaggacactgacgtgcagaacatgaatgagtatctcagctccttcaaggtggcacagtacgtcgtgcgggaagaagacaagattgaggaaattgagcgagagatcatcaagcaggaggagaatgtggaccctgactactgggagaagctgctgaggcatcactatgagcaacagcaggaagacctagcccggaatctaggcaagggcaagcgggttcgcaagcaagttaactacaatgatgctgctcaggaagaccaagacaaccagtcagagtactcggtgggttcagaggaggaggatgaagacttcgatgaacgtcctgaagggcgtagacagtcaaagaggcagctccggaatgagaaagataagccactgcctccactgctggcccgagtcgggggcaacattgaggtgctgggcttcaacacccgtcagcggaaggctttcctcaatgctgtgatgcgctgggggatgccaccacaggatgccttcaccacacagtggctggtgcgggacctgaggggcaagactgagaaggagtttaaggcctatgtgtctttgttcatgcgccatctgtgtgagcctggggcagacggctctgaaacctttgccgatggggtccctcgggagggactgagtcgccagcaggtgttgacccgcattggagtcatgtctctcgtcaaaaagaaggtgcaggagtttgagcacatcaatgggcgttggtcaatgccggaactgatgcctgaccccagcgccgattctaagcgctcctccagagcctcctctcctaccaaaacgtctcccaccactcctgaggcttctgctaccaacagtccctgcacctctaaacctgctactccagctccaagtgagaaaggagaaggcataaggacacctcttgagaaggaggaagctgaaaaccaggaggaaaagccagagaagaacagcagaattggggagaagatggagacagaggctgatgcccccagcccagccccatcacttggggagcggctggagccaaggaagattcctctagaggatgaggtgccaggggtgcctggagagatggagcctgaacctgggtaccgtggggacagagagaagtcagccacagagtcgacgccaggagaaaggggggaggagaagccgttggatggacaggaacacagggagaggccggagggggaaacaggggatttgggcaagagagaagatgtaaaaggtgaccgggagcttcgaccagggcctcgagatgagccacggtccaatgggcgacgagaggaaaagacagagaagccccggttcatgttcaatatcgccgatggtggcttcacagagcttcacacactgtggcagaatgaggaacgggcagctatttcctcggggaaactcaatgagatctggcacagaagacatgactattggcttctggctgggattgtcctccatggctatgcacggtggcaggacatccagaatgatgctcaatttgccattatcaacgagccatttaaaactgaagccaataaggggaactttctggagatgaaaaataagttcctggcccggaggttcaagctcctggagcaggcgctggtgattgaggagcagctgcggcgggcggcctacctgaacctgtcgcaggagccggcgcaccccgccatggccctccacgcccgcttcgccgaggccgagtgcctggccgagagccaccagcacctctccaaggagtcgctggcggggaacaagccggccaacgccgtcctgcacaaggttctgaaccagctggaggagttgctgagcgacatgaaggcggacgtgacccgcctgccagccacgctgtcccgaataccccccatcgcagcccgccttcagatgtccgagcgcagcatcctcagccggctggccagcaagggcacggagcctcaccccacaccggcctacccgccgggtccctacgctacacctccggggtacggggcggccttcagcgccgcacccgtaggggccctggccgccgcaggcgccaattacagccagatgcctgcagggtccttcatcacagccgccaccaacggccctccagtgcttgtgaagaaggagaaggaaatggtgggggcattggtgtcagacgggctggatcggaaggagccccgagccggggaggtgatctgtatagacgactgactggatcccaggcctgcccttcacccaggccccgtccccgaggccgacccccagctcaagcgctggggcctgctgccagccctccaccttccccaccccttgggccatcactgggctaggaacccctttgcccctctctgcagctcctctcttcaagaagggccctttgtctttctccactcccacacacctttcccaccaagccttgaagactgtgctggtgagaagaagtctgggtgggagatggctggcagggtcttccaagtaccttcctcccacactgccaagtatacacaacttcccagtaaatggttgtggggaggaaagaggtggagcctccccagccgtttccctgcagaatcagctctgtctcatgtggaagtggagaatcagccttgcctggcctttaggaacttttgtggggaagagagctttgaagagaggagggggactttagagagggatgaaaatgagccctgggagggaggaagggacgaggaggggtggctgcatgttaccgtcccctacctctccccacgtggagggtggagcagttatgagggaggaagtcaactgctgttcagcctcagaataaaggtgccgttcactggctcagttacctcctgtgtaccggcatcttgtgttgggaatgttcccccctccctagggaccaaggaccacccctacaaaaagagtaatggttgggtgatactccctcaagccaaagaggagctccccaacctgttctagggacccaggtaacctagaagggtgggagagaatacaatgggccagatgtggtggaagcccagctctggggctcaggttcctggaagacttctactaccctccctcctcaaggcctggatacagactaaatttgtataagtcaggcaggggacctagtcagggtcttgggagctaccttgtcgttgggaccagagcaaaatagtggagggcaggctagggaaatgtgggcacatcccccctcccaggaggggccggggagagtggcagtttgcatggcgaaccccccacttcctctttgctgccccttcactttcttgctgcccctttcccagtctctcttcacacccactcctggtctgtcctgatcccctcttctgtatcaggtttattggttgtacatataaattatactttcctttctgtgt

SEQ ID NO: 117711 - DNA, 1263 bp, Homo sapiens
  Payload ID: 3000
  Gene Symbol: CHD3
  Gene Name: chromodomain helicase DNA binding protein 3
  ENST ID: ENST00000439235
  CDS Start-End: 1-1152
aagagagcagaagatgtaaaaggtgaccgggagcttcgaccagggcctcgagatgagccacggtccaatgggcgacgagaggaaaagacagagaagccccggttcatgttcaatatcgccgatggtggcttcacagagcttcacacactgtggcagaatgaggaacgggcagctatttcctcggggaaactcaatgagatctggcacagaagacatgactattggcttctggctgggattgtcctccatggctatgcacggtggcaggacatccagaatgatgctcaatttgccattatcaacgagccatttaaaactgaagccaataaggggaactttctggagatgaaaaataagttcctggcccggaggttcaagctcctggagcaggcgctggtgattgaggagcagctgcggcgggcggcctacctgaacctgtcgcaggagccggcgcaccccgccatggccctccacgcccgcttcgccgaggccgagtgcctggccgagagccaccagcacctctccaaggagtcgctggcggggaacaagccggccaacgccgtcctgcacaagggtaagggccgcggcggccccgcgcgggggagggcccacaacgctgcttctgaaccagctggaggagttgctgagcgacatgaaggcggacgtgacccgcctgccagccacgctgtcccgaataccccccatcgcagcccgccttcagatgtccgagcgcagcatcctcagccggctggccagcaagggcacggagcctcaccccacaccggcctacccgccgggtccctacgctacacctccggggtacggggcggccttcagcgccgcacccgtaggggccctggccgccgcaggcgccaattacagccagatgcctgcagggtccttcatcacagccgccaccaacggccctccagtgcttgtgaagaaggagaaggaaatggtgggggcattggtgtcagacgggctggatcggaaggagccccgagccggggaggtgatctgtatagacgactgactggatcccaggcctgcccttcacccaggccccgtccccgaggccgacccccagctcaagcgctggggcctgctgccagccctccaccttccccaccccttgggccatcactgggctaggaacccctttgcccctctctgcagctcctctcttcaagaagggccctttgtctttctccactcccacacacctttcccaccaagccttgaagactgtgctggtgagaagaa

SEQ ID NO: 117712 - DNA, 1573 bp, Homo sapiens
  Payload ID: 3000
  Gene Symbol: CHD3
  Gene Name: chromodomain helicase DNA binding protein 3
  ENST ID: ENST00000452447
  CDS Start-End: 1-1573
gcaaaagcaagtggaacagaagtcatcagcaactctgcttctgacctggggcctggaggatgtggagcatgtgttctctgaggaggattaccacacgctcaccaactacaaagccttcagccagttcatgaggcccctaattgctaagaagaatcctaagatcccaatgtctaagatgatgaccatccttggggccaaatggagagagttcagtgccaacaaccccttcaaggggtcagcagctgctgtggcggcggcagcggcagcagcagcagcagctgtagctgagcaggtgtcagctgctgtctcgtcggccacccccatagcaccctccggaccccccgcccttccaccaccccctgctgctgatatccagcccccacccatccgaagagccaaaaccaaagagggcaaaggtccaggccataagaggcggagtaagagcccccgagtgcctgatggacgcaagaagcttcggggaaagaaaatggcaccactcaaaataaaactagggcttctgggtggcaagaggaagaaaggaggctcgagcgacgaaggtcctgaaccagaggctgaggaatcagacctggacagtggcagtgtccacagtgcctcaggccggcctgatggccctgtccgcaccaagaaactaaagagaggccggccaggaaggaagaagaagaaggtcctgggctgtcctgcagtggccggggaggaggaggttgatggctacgagacggatcaccaggattactgtgaggtgtgccagcagggtggggaaattattctgtgtgacacctgccctcgtgcctaccacctcgtctgccttgatcctgagcttgaccgggctccagagggcaaatggagctgccctcactgtgagaaggagggggtccagtgggaggccaaggaggaagaagaagaatacgaagaggagggagaggaagaaggggagaaggaggaggaggatgatcacatggagtactgccgcgtatgcaaggacggcggggagctcctgtgctgtgacgcgtgcatctcctcctaccacattcattgtctaaaccctcccctgcctgacattcccaatggtgaatggctgtgtccccgatgcacatgccccgtgctgaagggtcgagtgcagaagatcctacattggcggtggggggagccacctgtagcagtgccagcccctcaacaggcagatggaaatccagatgtcccacccccccgtcctcttcaaggcagatcagagcgagagttctttgtcaagtgggtaggactatcctactggcactgctcctgggccaaggagcttcagctggaaatcttccatttggttatgtatcgaaactaccagcggaagaatgacatggatgagcccccacccctggactatggctccggcgaggatgatgggaagagcgacaagcgtaaagtgaaagacccgcactatgctgagatggaggagaagtactatcgttttggcatcaagccagagtggatgaccgtccaccgcatcatcaaccacagtgtggataaaaaggggaattaccactatctagtaaaatggagg

SEQ ID NO: 117713 - DNA, 880 bp, Homo sapiens
  Payload ID: 3000
  Gene Symbol: CHD3
  Gene Name: chromodomain helicase DNA binding protein 3
  ENST ID: ENST00000449744
  CDS Start-End: 1-834
ttcaatatcgccgatggtggcttcacagagcttcacacactgtggcagaatgaggaacgggcagctatttcctcggggaaactcaatgagatctggcacagaagacatgactattggcttctggctgggattgtcctccatggctatgcacggtggcaggacatccagaatgatgctcaatttgccattatcaacgagccatttaaaactgaagccaataaggggaactttctggagatgaaaaataagttcctggcccggaggttcaagctcctggagcaggcgctggtgattgaggagcagctgcggcgggcggcctacctgaacctgtcgcaggagccggcgcaccccgccatggccctccacgcccgcttcgccgaggccgagtgcctggccgagagccaccagcacctctccaaggagtcgctggcggggaacaagccggccaacgccgtcctgcacaagggcctacccgccgggtccctacgctacacctccggggtacggggcggccttcagcgccgcacccgtaggggccctggccgccgcaggcgccaattacagccagatgcctgcagggtccttcatcacagccgccaccaacggccctccagtgcttgtgaagaaggagaaggaaatggtgggggcattggtgtcagacgggctggatcggaaggagccccgagccggggaggtgatctgtatagacgactgactggatcccaggcctgcccttcacccaggccccgtccccgaggccgacccccagctcaagcgctggggcctgctgccagccctccaccttccccaccccttgggccatcactgggctaggaacccctttgcccctctctgcagctcctctcttcaagaagggccc

SEQ ID NO: 117714 - DNA, 330 bp, Homo sapiens
  Payload ID: 3000
  Gene Symbol: CHD3
  Gene Name: chromodomain helicase DNA binding protein 3
  ENST ID: ENST00000571249
  CDS Start-End: 1-330
agagcccccgagtgcctgatggacgcaagaagcttcggggaaagaaaatggcaccactcaaaataaaactagggcttctgggtggcaagaggaagaaaggaggctcgtatgtttttcagagcgacgaaggtcctgaaccagaggctgaggaatcagacctggacagtggcagtgtccacagtgcctcaggccggcctgatggccctgtccgcaccaagaaactaaagagaggccggccaggaaggaagaagaagaaggtggccggggaggaggaggttgatggctacgagacggatcaccaggattactgtgaggtgtgccagcagggtg

SEQ ID NO: 117715 - DNA, 749 bp, Homo sapiens
  Payload ID: 3000
  Gene Symbol: CHD3
  Gene Name: chromodomain helicase DNA binding protein 3
  ENST ID: ENST00000573936
  CDS Start-End: 1-749
cgggagcttcgaccagggcctcgagatgagccacggtccaatgggcgacgagaggaaaagacagagaagccccggttcatgttcaatatcgccgatggtggcttcacagagcttcacacactgtggcagaatgaggaacgggcagctatttcctcggggaaactcaatgagatctggcacagaagacatgactattggcttctggctgggattgtcctccatggctatgcacggtggcaggacatccagaatgatgctcaatttgccattatcaacgagccatttaaaactgaagccaataaggggaactttctggagatgaaaaataagttcctggcccggaggttcaagctcctggagcaggcgctggtgattgaggagcagctgcggcgggcggcctacctgaacctgtcgcaggagccggcgcaccccgccatggccctccacgcccgcttcgccgaggccgagtgcctggccgagagccaccagcacctctccaaggagtcgctggcggggaacaagccggccaacgccgtcctgcacaaggctggaggagttgctgagcgacatgaaggcggacgtgacccgcctgccagccacgctgtcccgaataccccccatcgcagcccgccttcagatgtccgagcgcagcatcctcagccggctggccagcaagggcacggagcctcaccccacaccggcctacccgccgggtccctacgctacacctccggggtacggggcggcct

SEQ ID NO: 117716 - DNA, 3744 bp, Homo sapiens
  Payload ID: 3000
  Gene Symbol: CHD3
  Gene Name: chromodomain helicase DNA binding protein 3
  ENST ID: ENST00000470531
  CDS Start-End: 1-192
agtgtgattcattatgacaatgaggccatcgctcggctgttggaccggaaccaggatgcaactgaggacactgacgtgcagaacatgaatgagtatctcagctccttcaaggtggcacagtacgtcgtgcgggaagaagacaaggtgagactggacttcagagagaaacgtaggcacagacagtactggtaaacacagaagggtaccttctgagacagtgcaggagaaacactgtcagagggattagaggagagatttagaaaacatgaggagagcacattgcaggtaagagatggcatggaacatgcgcaatgtccagaaaatgtatgcagagccacgaagctgcaggagtggggagaccggattgggctgacgcagcagagtagggatttccttgcagtggaaggattagcaaagaaggagacccccagtgttcattcattctgttgcccttcagattgaggaaattgagcgagagatcatcaagcaggaggagaatgtggaccctgactactgggagaagctgctgaggcatcactatgagcaacagcaggaagacctagcccggaatctaggcaagggcaagcgggttcgcaagcaagttaactacaatgatgctgctcaggaagaccaagacaaccagtcagagtactcggtgggttcagaggaggaggatgaagacttcgatgaacgtcctgaagggcgtagacagtcaaagaggcagctccggaatgagaaagataagccactgcctccactgctggcccgagtcgggggcaacattgaggtgctgggcttcaacacccgtcagcggaaggctttcctcaatgctgtgatgcgctgggggatgccaccacaggatgccttcaccacacagtggctggtgcgggacctgaggggcaagactgagaaggagtttaaggcctatgtgtctttgttcatgcgccatctgtgtgagcctggggcagacggctctgaaacctttgccgatggggtccctcgggagggactgagtcgccagcaggtgttgacccgcattggagtcatgtctctcgtcaaaaagaaggtgcaggagtttgagcacatcaatgggcgttggtcaatgccggaactgatgcctgaccccagcgccgattctaagcgctcctccagagcctcctctcctaccaaaacgtctcccaccactcctgaggcttctgctaccaacagtccctgcacctctaaacctgctactccagctccaagtgagaaaggagaaggcataaggacacctcttgagaaggaggaagctgaaaaccaggaggaaaagccagagaagaacagcagaattggggagaagatggagacagaggctgatgcccccagcccagccccatcacttggggagcggctggagccaaggaagattcctctagaggatgaggtgccaggggtgcctggagagatggagcctgaacctgggtaccgtggggacagagagaagtcagccacagagtcgacgccaggagaaaggggggaggagaagccgttggatggacaggaacacagggagaggccggagggggaaacaggggatttgggcaagagagcagaagatgtaaaaggtgaccgggagcttcgaccagggcctcgagatgagccacggtccaatgggcgacgagaggaaaagacagagaagccccggttcatgttcaatatcgccgatggtggcttcacagagcttcacacactgtggcagaatgaggaacgggcagctatttcctcggggaaactcaatgagatctggcacagaagacatgactattggcttctggctgggattgtcctccatggctatgcacggtggcaggacatccagaatgatgctcaatttgccattatcaacgagccatttaaaactgaagccaataaggggaactttctggagatgaaaaataagttcctggcccggaggttcaagctcctggagcaggcgctggtgattgaggagcagctgcggcgggcggcctacctgaacctgtcgcaggagccggcgcaccccgccatggccctccacgcccgcttcgccgaggccgagtgcctggccgagagccaccagcacctctccaaggagtcgctggcggggaacaagccggccaacgccgtcctgcacaaggttctgaaccagctggaggagttgctgagcgacatgaaggcggacgtgacccgcctgccagccacgctgtcccgaataccccccatcgcagcccgccttcagatgtccgagcgcagcatcctcagccggctggccagcaagggcacggagcctcaccccacaccggcctacccgccgggtccctacgctacacctccggggtacggggcggccttcagcgccgcacccgtaggggccctggccgccgcaggcgccaattacagccagatgcctgcagggtccttcatcacagccgccaccaacggccctccagtgcttgtgaagaaggagaaggaaatggtgggggcattggtgtcagacgggctggatcggaaggagccccgagccggggaggtgatctgtatagacgactgactggatcccaggcctgcccttcacccaggccccgtccccgaggccgacccccagctcaagcgctggggcctgctgccagccctccaccttccccaccccttgggccatcactgggctaggaacccctttgcccctctctgcagctcctctcttcaagaagggccctttgtctttctccactcccacacacctttcccaccaagccttgaagactgtgctggtgagaagaagtctgggtgggagatggctggcagggtcttccaagtaccttcctcccacactgccaagtatacacaacttcccagtaaatggttgtggggaggaaagaggtggagcctccccagccgtttccctgcagaatcagctctgtctcatgtggaagtggagaatcagccttgcctggcctttaggaacttttgtggggaagagagctttgaagagaggagggggactttagagagggatgaaaatgagccctgggagggaggaagggacgaggaggggtggctgcatgttaccgtcccctacctctccccacgtggagggtggagcagttatgagggaggaagtcaactgctgttcagcctcagaataaaggtgccgttcactggctcagttacctcctgtgtaccggcatcttgtgttgggaatgttcccccctccctagggaccaaggaccacccctacaaaaagagtaatggttgggtgatactccctcaagccaaagaggagctccccaacctgttctagggacccaggtaacctagaagggtgggagagaatacaatgggccagatgtggtggaagcccagctctggggctcaggttcctggaagacttctactaccctccctcctcaaggcctggatacagactaaatttgtataagtcaggcaggggacctagtcagggtcttgggagctaccttgtcgttgggaccagagcaaaatagtggagggcaggctagggaaatgtgggcacatcccccctcccaggaggggccggggagagtggcagtttgcatggcgaaccccccacttcctctttgctgccccttcactttcttgctgcccctttcccagtctctcttcacacccactcctggtctgtcctgatcccctcttctgtatcaggtttattggttgtacatataaattatactttcctttctgtgt

SEQ ID NO: 117717 - DNA, 6496 bp, Homo sapiens
  Payload ID: 3001
  Gene Symbol: CHD4
  Gene Name: chromodomain helicase DNA binding protein 4
  Uniprot ID: Q14839
  ENST ID: ENST00000357008
  CDS Start-End: 165-5903
attttccccccttcggccgcggcgaggaggagccggagcgggagtgacaccgagccggacccagcgcgacctgcggcggctccgggtgactcgggccagtgtagaggtcctcaggccgccggcaggagcagctgggccaattccctggccgggagcggaaggggatggcgtcgggcctgggctccccgtccccctgctcggcgggcagtgaggaggaggatatggatgcacttttgaacaacagcctgcccccaccccacccagaaaatgaagaggacccagaagaggatttgtcagaaacagagactccaaagctcaagaagaagaaaaagcctaagaaacctcgggaccctaaaatccctaagagcaagcgccaaaaaaaggagcgtatgctcttatgccggcagctgggggacagctctggggaggggccagagtttgtggaggaggaggaagaggtggctctgcgctcagacagtgagggcagcgactatactcctggcaagaagaagaagaagaagcttggacctaagaaagagaagaagagcaaatccaagcggaaggaggaggaggaggaggaggatgatgatgatgattcaaaggagcctaaatcatctgctcagctcctggaagactggggcatggaagacattgaccacgtgttctcagaggaggattatcgaaccctcaccaactacaaggccttcagccagtttgtcagacccctcattgctgccaaaaatcccaagattgctgtctccaagatgatgatggttttgggtgcaaaatggcgggagttcagtaccaataaccccttcaaaggcagttctggggcatcagtggcagctgcggcagcagcagcggtagctgtggtggagagcatggtgacagccactgaggttgcaccaccacctccccctgtggaggtgcctatccgcaaggccaagaccaaggagggcaaaggtcccaatgctcggaggaagcccaagggcagccctcgtgtacctgatgccaagaagcctaaacccaagaaagtagctcccctgaaaatcaagctgggaggttttggttccaagcgtaagagatcctcgagtgaggatgatgacttagatgtggaatctgacttcgatgatgccagtatcaatagctattctgtttctgatggttccaccagccgtagtagccgcagccgcaagaaactccgaaccactaaaaagaaaaagaaaggcgaggaggaggtgactgctgtggatggttatgagacagaccaccaggactattgcgaggtgtgccagcaaggcggtgagatcatcctgtgtgatacctgtccccgtgcttaccacatggtctgcctggatcccgacatggagaaggctcccgagggcaagtggagctgcccacactgcgagaaggaaggcatccagtgggaagctaaagaggacaattcggagggtgaggagatcctggaagaggttgggggagacctcgaagaggaggatgaccaccatatggaattctgtcgggtctgcaaggatggtggggaactgctctgctgtgatacctgtccttcttcctaccacatccactgcctgaatcccccacttccagagatccccaacggtgaatggctctgtccccgttgtacgtgtccagctctgaagggcaaagtgcagaagatcctaatctggaagtggggtcagccaccatctcccacaccagtgcctcggcctccagatgctgatcccaacacgccctccccaaagcccttggaggggcggccagagcggcagttctttgtgaaatggcaaggcatgtcttactggcactgctcctgggtttctgaactgcagctggagctgcactgtcaggtgatgttccgaaactatcagcggaagaatgatatggatgagccaccttctggggactttggtggtgatgaagagaaaagccgaaagcgaaagaacaaggaccctaaatttgcagagatggaggaacgcttctatcgctatgggataaaacccgagtggatgatgatccaccgaatcctcaaccacagtgtggacaagaagggccacgtccactacttgatcaagtggcgggacttaccttacgatcaggcttcttgggagagtgaggatgtggagatccaggattacgacctgttcaagcagagctattggaatcacagggagttaatgaggggtgaggaaggccgaccaggcaagaagctcaagaaggtgaagcttcggaagttggagaggcctccagaaacgccaacagttgatccaacagtgaagtatgagcgacagccagagtacctggatgctacaggtggaaccctgcacccctatcaaatggagggcctgaattggttgcgcttctcctgggctcagggcactgacaccatcttggctgatgagatgggccttgggaaaactgtacagacagcagtcttcctgtattccctttacaaggagggtcattccaaaggccccttcctagtgagcgcccctctttctaccatcatcaactgggagcgggagtttgaaatgtgggctccagacatgtatgtcgtaacctatgtgggtgacaaggacagccgtgccatcatccgagagaatgagttctcctttgaagacaatgccattcgtggtggcaagaaggcctcccgcatgaagaaagaggcatctgtgaaattccatgtgctgctgacatcctatgaattgatcaccattgacatggctattttgggctctattgattgggcctgcctcatcgtggatgaagcccatcggctgaagaacaatcagtctaagttcttccgggtattgaatggttactcactccagcacaagctgttgctgactgggacaccattacaaaacaatctggaagagttgtttcatctgctcaactttctcacccccgagaggttccacaatttggaaggttttttggaggagtttgctgacattgccaaggaggaccagataaaaaaactgcatgacatgctggggccgcacatgttgcggcggctcaaagccgatgtgttcaagaacatgccctccaagacagaactaattgtgcgtgtggagctgagccctatgcagaagaaatactacaagtacatcctcactcgaaattttgaagcactcaatgcccgaggtggtggcaaccaggtgtctctgctgaatgtggtgatggatcttaagaagtgctgcaaccatccatacctcttccctgtggctgcaatggaagctcctaagatgcctaatggcatgtatgatggcagtgccctaatcagagcatctgggaaattattgctgctgcagaaaatgctcaagaaccttaaggagggtgggcatcgtgtactcatcttttcccagatgaccaagatgctagacctgctagaggatttcttggaacatgaaggttataaatacgaacgcatcgatggtggaatcactgggaacatgcggcaagaggccattgaccgcttcaatgcaccgggtgctcagcagttctgcttcttgctttccactcgagctgggggccttggaatcaatctggccactgctgacacagttattatctatgactctgactggaacccccataatgacattcaggcctttagcagagctcaccggattgggcaaaataaaaaggtaatgatctaccggtttgtgacccgtgcgtcagtggaggagcgcatcacgcaggtggcaaagaagaaaatgatgctgacgcatctagtggtgcggcctgggctgggctccaagactggatctatgtccaaacaggagcttgatgatatcctcaaatttggcactgaggaactattcaaggatgaagccactgatggaggaggagacaacaaagagggagaagatagcagtgttatccactacgatgataaggccattgaacggctgctagaccgtaaccaggatgagactgaagacacagaattgcagggcatgaatgaatatttgagctcattcaaagtggcccagtatgtggtacgggaagaagaaatgggggaggaagaggaggtagaacgggaaatcattaaacaggaagaaagtgtggatcctgactactgggagaaattgctgcggcaccattatgagcagcagcaagaagatctagcccgaaatctgggcaaaggaaaaagaatccgtaaacaggtcaactacaatgatggctcccaggaggaccgagattggcaggacgaccagtccgacaaccagtccgattactcagtggcttcagaggaaggtgatgaagactttgatgaacgttcagaagctccccgtaggcccagtcgtaagggcctgcggaatgataaagataagccattgcctcctctgttggcccgtgttggtgggaatattgaagtacttggttttaatgctcgtcagcgaaaagcctttcttaatgcaattatgcgatatggtatgccacctcaggatgcttttactacccagtggcttgtaagagacctgcgaggcaaatcagagaaagagttcaaggcatatgtctctcttttcatgcggcatttatgtgagccgggggcagatggggctgagacctttgctgatggtgtcccccgagaaggcctgtctcgccagcatgtccttactagaattggtgttatgtctttgattcgcaagaaggttcaggagtttgaacatgttaatgggcgctggagcatgcctgaactggctgaggtggaggaaaacaagaagatgtcccagccagggtcaccctccccaaaaactcctacaccctccactccaggggacacgcagcccaacactcctgcacctgtcccacctgctgaagatgggataaaaatagaggaaaatagcctcaaagaagaagagagcatagaaggagaaaaggaggttaaatctacagcccctgagactgccattgagtgtacacaggcccctgcccctgcctcagaggatgaaaaggtcgttgttgaaccccctgagggagaggagaaagtggaaaaggcagaggtgaaggagagaacagaggaacctatggagacagagcccaaaggtgctgctgatgtagagaaggtggaggaaaagtcagcaatagatctgacccctattgtggtagaagacaaagaagagaagaaagaagaagaagagaaaaaagaggtgatgcttcagaatggagagacccccaaggacctgaatgatgagaaacagaagaaaaatattaaacaacgtttcatgtttaacattgcagatggtggttttactgagttgcactccctttggcagaatgaagagcgggcagccacagttaccaagaagacttatgagatctggcatcgacggcatgactactggctgctagccggcattataaaccatggctatgcccggtggcaagacatccagaatgacccacgctatgccatcctcaatgagcctttcaagggtgaaatgaaccgtggcaatttcttagagatcaagaataaatttctagctcgaaggtttaagctcttagaacaagctctggtgattgaggaacagctgcgccgggctgcttacttgaacatgtcagaagacccttctcacccttccatggccctcaacacccgctttgctgaggtggagtgtttggcggaaagtcatcagcacctgtccaaggagtcaatggcaggaaacaagccagccaatgcagtcctgcacaaagttctgaaacagctggaagaactgctgagtgacatgaaagctgatgtgactcgactcccagctaccattgcccgaattcccccagttgctgtgaggttacagatgtcagagcgtaacattctcagccgcctggcaaaccgggcacccgaacctaccccacagcaggtagcccagcagcagtgaagatgcagactgataccacctccaccgctgagcagtgaccttcctcactttctcttgtcccagcttctcccctgggggcctgagagaccctcaccttccttctgcccatcttccatgttgtaaaggaacagccccagtgcactgggggaggggagggagtgaggggcagtggtgcccttcctgcagaagagacatgcagcagtagcgctggcgccatctgcaggagctggcgggctggccttctggaccctggcttctccccactgtaacgcctgttacacacaaactgttgtgggttcctgccaggcttgaagaaaatgatctgaattttttcctccttttggttttattttgttggtttattttgtgttttcttttctcctttttggggggtattcagagtgggctgggcccctgggcgagacacagctacctctgttggcatctttttaataccaggaacccagcggctctagccactgagcggctaaatgaaataaagtggaaaaaaaaaaaaaggaaaaaaccaaaagcataaaaaaccacagcaaatttcttgatgaaaattgaaaataaaagtttccttgtatttt

SEQ ID NO: 117718 - DNA, 1317 bp, Homo sapiens
  Payload ID: 3001
  Gene Symbol: CHD4
  Gene Name: chromodomain helicase DNA binding protein 4
  ENST ID: ENST00000545942
  CDS Start-End: 256-1317
atgggctgtccgtgggggggcggggcctgtgcggtgggatttcccggccggtgtttcaggccctttaagaggcgacgctggagccggagccattttccccccttcggccgcggcgaggaggagccggagcgggagtgacaccgagccggacccagcgcgacctgcggcggctccgggtgactcgggccagtgtagaggtcctcaggccgccggcaggagcagctgggccaattccctggccgggagcggaaggggatggcgtcgggcctgggctccccgtccccctgctcggcgggcagtgaggaggaggatatggatgcacttttgaacaacagcctgcccccaccccacccagaaaatgaagaggacccagaagaggatttgtcagaaacagagactccaaagctcaagaagaagaaaaagcctaagaaacctcgggaccctaaaatccctaagagcaagcgccaaaaaaaggagcgtatgctcttatgccggcagctgggggacagctctggggaggggccagagtttgtggaggaggaggaagaggtggctctgcgctcagacagtgagggcagcgactatactcctggcaagaagaagaagaagaagcttggacctaagaaagagaagaagagcaaatccaagcggaaggaggaggaggaggaggaggatgatgatgatgattcaaaggagcctaaatcatctgctcagctcctggaagactggggcatggaagacattgaccacgtgttctcagaggaggattatcgaaccctcaccaactacaaggccttcagccagtttgtcagacccctcattgctgccaaaaatcccaagattgctgtctccaagatgatgatggttttgggtgcaaaatggcgggagttcagtaccaataaccccttcaaaggcagttctggggcatcagtggcagctgcggcagcagcagcggtagctgtggtggagagcatggtgacagccactgaggttgcaccaccacctccccctgtggaggtgcctatccgcaaggccaagaccaaggagggcaaaggtcccaatgctcggaggaagcccaagggcagccctcgtgtacctgatgccaagaagcctaaacccaagaaagtagctcccctgaaaatcaagctgggaggttttggttccaagcgtaagagatcctcgagtgaggatgatgacttagatgtggaatctgacttcgatgatgccagtatcaatagctattctgtttctgatggttccaccagccgtagtagccgcagccgcaagaaactccgaaccactaaaaagaaaaagaaa

SEQ ID NO: 117719 - DNA, 6554 bp, Homo sapiens
  Payload ID: 3001
  Gene Symbol: CHD4
  Gene Name: chromodomain helicase DNA binding protein 4
  ENST ID: ENST00000544484
  CDS Start-End: 148-5961
cgcggcgaggaggagccggagcgggagtgacaccgagccggacccagcgcgacctgcggcggctccgggtgactcgggccagtgtagaggtcctcaggccgccggcaggagcagctgggccaattccctggccgggagcggaaggggatggcgtcgggcctgggctccccgtccccctgctcggcgggcagtgaggaggaggatatggatgcacttttgaacaacagcctgcccccaccccacccagaggacccagaagaggatttgtcagaaacagagactccaaagctcaagaagaagaaaaagcctaagaaacctcgggaccctaaaatccctaagagcaagcgccaaaaaaaggagcgtatgctcttatgccggcagctgggggacagctctggggaggggccagagtttgtggaggaggaggaagaggtggctctgcgctcagacagtgagggcagcgactatactcctggcaagaagaagaagaagaagcttggacctaagaaagagaagaagagcaaatccaagcggaaggaggaggaggaggaggaggatgatgatgatgattcaaaggagcctaaatcatctgctcagctcctggaagactggggcatggaagacattgaccacgtgttctcagaggaggattatcgaaccctcaccaactacaaggccttcagccagtttgtcagacccctcattgctgccaaaaatcccaagattgctgtctccaagatgatgatggttttgggtgcaaaatggcgggagttcagtaccaataaccccttcaaaggcagttctggggcatcagtggcagctgcggcagcagcagcggtagctgtggtggagagcatggtgacagccactgaggttgcaccaccacctccccctgtggaggtgcctatccgcaaggccaagaccaaggagggcaaaggtcccaatgctcggaggaagcccaagggcagccctcgtgtacctgatgccaagaagcctaaacccaagaaagtagctcccctgaaaatcaagctgggaggttttggttccaagcgtaagagatcctcgagtgaggatgatgacttagatgtggaatctgacttcgatgatgccagtatcaatagctattctgtttctgatggttccaccagccgtagtagccgcagccgcaagaaactccgaaccactaaaaagaaaaagaaaggcgaggaggaggtgactgctgtggatggttatgagacagaccaccaggactattgcgaggtgtgccagcaaggcggtgagatcatcctgtgtgatacctgtccccgtgcttaccacatggtctgcctggatcccgacatggagaaggctcccgagggcaagtggagctgcccacactgcgagaaggaaggcatccagtgggaagctaaagaggacaattcggagggtgaggagatcctggaagaggttgggggagacctcgaagaggaggatgaccaccatatggaattctgtcgggtctgcaaggatggtggggaactgctctgctgtgatacctgtccttcttcctaccacatccactgcctgaatcccccacttccagagatccccaacggtgaatggctctgtccccgttgtacgtgtccagctctgaagggcaaagtgcagaagatcctaatctggaagtggggtcagccaccatctcccacaccagtgcctcggcctccagatgctgatcccaacacgccctccccaaagcccttggaggggcggccagagcggcagttctttgtgaaatggcaaggcatgtcttactggcactgctcctgggtttctgaactgcagctggagctgcactgtcaggtgatgttccgaaactatcagcggaagaatgatatggatgagccaccttctggggactttggtggtgatgaagagaaaagccgaaagcgaaagaacaaggaccctaaatttgcagagatggaggaacgcttctatcgctatgggataaaacccgagtggatgatgatccaccgaatcctcaaccacagtgtggacaagaagggccacgtccactacttgatcaagtggcgggacttaccttacgatcaggcttcttgggagagtgaggatgtggagatccaggattacgacctgttcaagcagagctattggaatcacagggagttaatgaggggtgaggaaggccgaccaggcaagaagctcaagaaggtgaagcttcggaagttggagaggcctccagaaacgccaacagttgatccaacagtgaagtatgagcgacagccagagtacctggatgctacaggtggaaccctgcacccctatcaaatggagggcctgaattggttgcgcttctcctgggctcagggcactgacaccatcttggctgatgagatgggccttgggaaaactgtacagacagcagtcttcctgtattccctttacaaggagggtcattccaaaggccccttcctagtgagcgcccctctttctaccatcatcaactgggagcgggagtttgaaatgtgggctccagacatgtatgtcgtaacctatgtgggtgacaaggacagccgtgccatcatccgagagaatgagttctcctttgaagacaatgccattcgtggtggcaagaaggcctcccgcatgaagaaagaggcatctgtgaaattccatgtgctgctgacatcctatgaattgatcaccattgacatggctattttgggctctattgattgggcctgcctcatcgtggatgaagcccatcggctgaagaacaatcagtctaagttcttccgggtattgaatggttactcactccagcacaagctgttgctgactgggacaccattacaaaacaatctggaagagttgtttcatctgctcaactttctcacccccgagaggttccacaatttggaaggttttttggaggagtttgctgacattgccaaggaggaccagataaaaaaactgcatgacatgctggggccgcacatgttgcggcggctcaaagccgatgtgttcaagaacatgccctccaagacagaactaattgtgcgtgtggagctgagccctatgcagaagaaatactacaagtacatcctcactcgaaattttgaagcactcaatgcccgaggtggtggcaaccaggtgtctctgctgaatgtggtgatggatcttaagaagtgctgcaaccatccatacctcttccctgtggctgcaatggaagctcctaagatgcctaatggcatgtatgatggcagtgccctaatcagagcatctgggaaattattgctgctgcagaaaatgctcaagaaccttaaggagggtgggcatcgtgtactcatcttttcccagatgaccaagatgctagacctgctagaggatttcttggaacatgaaggttataaatacgaacgcatcgatggtggaatcactgggaacatgcggcaagaggccattgaccgcttcaatgcaccgggtgctcagcagttctgcttcttgctttccactcgagctgggggccttggaatcaatctggccactgctgacacagttattatctatgactctgactggaacccccataatgacattcaggcctttagcagagctcaccggattgggcaaaataaaaaggtaatgatctaccggtttgtgacccgtgcgtcagtggaggagcgcatcacgcaggtggcaaagaagaaaatgatgctgacgcatctagtggtgcggcctgggctgggctccaagactggatctatgtccaaacaggagcttgatgatatcctcaaatttggcactgaggaactattcaaggatgaagccactgatggaggaggagacaacaaagagggagaagatagcagtgttatccactacgatgataaggccattgaacggctgctagaccgtaaccaggatgagactgaagacacagaattgcagggcatgaatgaatatttgagctcattcaaagtggcccagtatgtggtacgggaagaagaaatgggggaggaagaggaggtagaacgggaaatcattaaacaggaagaaagtgtggatcctgactactgggagaaattgctgcggcaccattatgagcagcagcaagaagatctagcccgaaatctgggcaaaggaaaaagaatccgtaaacaggtcaactacaatgatggctcccaggaggaccgaggtgtgtgtggccggccccgccccccacccatgggccgttccactagagcagtgggccccgctcatctgccctctctccctccagattggcaggacgaccagtccgacaaccagtccgattactcagtggcttcagaggaaggtgatgaagactttgatgaacgttcagaagctccccgtaggcccagtcgtaagggcctgcggaatgataaagataagccattgcctcctctgttggcccgtgttggtgggaatattgaagtacttggttttaatgctcgtcagcgaaaagcctttcttaatgcaattatgcgatatggtatgccacctcaggatgcttttactacccagtggcttgtaagagacctgcgaggcaaatcagagaaagagttcaaggcatatgtctctcttttcatgcggcatttatgtgagccgggggcagatggggctgagacctttgctgatggtgtcccccgagaaggcctgtctcgccagcatgtccttactagaattggtgttatgtctttgattcgcaagaaggttcaggagtttgaacatgttaatgggcgctggagcatgcctgaactggctgaggtggaggaaaacaagaagatgtcccagccagggtcaccctccccaaaaactcctacaccctccactccaggggacacgcagcccaacactcctgcacctgtcccacctgctgaagatgggataaaaatagaggaaaatagcctcaaagaagaagagagcatagaaggagaaaaggaggttaaatctacagcccctgagactgccattgagtgtacacaggcccctgcccctgcctcagaggatgaaaaggtcgttgttgaaccccctgagggagaggagaaagtggaaaaggcagaggtgaaggagagaacagaggaacctatggagacagagcccaaaggtgctgctgatgtagagaaggtggaggaaaagtcagcaatagatctgacccctattgtggtagaagacaaagaagagaagaaagaagaagaagagaaaaaagaggtgatgcttcagaatggagagacccccaaggacctgaatgatgagaaacagaagaaaaatattaaacaacgtttcatgtttaacattgcagatggtggttttactgagttgcactccctttggcagaatgaagagcgggcagccacagttaccaagaagacttatgagatctggcatcgacggcatgactactggctgctagccggcattataaaccatggctatgcccggtggcaagacatccagaatgacccacgctatgccatcctcaatgagcctttcaagggtgaaatgaaccgtggcaatttcttagagatcaagaataaatttctagctcgaaggtttaagctcttagaacaagctctggtgattgaggaacagctgcgccgggctgcttacttgaacatgtcagaagacccttctcacccttccatggccctcaacacccgctttgctgaggtggagtgtttggcggaaagtcatcagcacctgtccaaggagtcaatggcaggaaacaagccagccaatgcagtcctgcacaaagttctgaaacagctggaagaactgctgagtgacatgaaagctgatgtgactcgactcccagctaccattgcccgaattcccccagttgctgtgaggttacagatgtcagagcgtaacattctcagccgcctggcaaaccgggcacccgaacctaccccacagcaggtagcccagcagcagtgaagatgcagactgataccacctccaccgctgagcagtgaccttcctcactttctcttgtcccagcttctcccctgggggcctgagagaccctcaccttccttctgcccatcttccatgttgtaaaggaacagccccagtgcactgggggaggggagggagtgaggggcagtggtgcccttcctgcagaagagacatgcagcagtagcgctggcgccatctgcaggagctggcgggctggccttctggaccctggcttctccccactgtaacgcctgttacacacaaactgttgtgggttcctgccaggcttgaagaaaatgatctgaattttttcctccttttggttttattttgttggtttattttgtgttttcttttctcctttttggggggtattcagagtgggctgggcccctgggcgagacacagctacctctgttggcatctttttaataccaggaacccagcggctctagccactgagcggctaaatgaaataaagtggaaaaaaaaaaaaaggaaaaaaccaaaagcataaaaaaccacagcaaatttcttgatgaaaattgaaaataaaagtttccttgtatttt

SEQ ID NO: 117720 - DNA, 6514 bp, Homo sapiens
  Payload ID: 3001
  Gene Symbol: CHD4
  Gene Name: chromodomain helicase DNA binding protein 4
  ENST ID: ENST00000544040
  CDS Start-End: 204-5921
gtttcaggccctttaagaggcgacgctggagccggagccattttccccccttcggccgcggcgaggaggagccggagcgggagtgacaccgagccggacccagcgcgacctgcggcggctccgggtgactcgggccagtgtagaggtcctcaggccgccggcaggagcagctgggccaattccctggccgggagcggaaggggatggcgtcgggcctgggctccccgtccccctgctcggcgggcagtgaggaggaggatatggatgcacttttgaacaacagcctgcccccaccccacccagaaaatgaagaggacccagaagaggatttgtcagaaacagagactccaaagctcaagaagaagaaaaagcctaagaaacctcgggaccctaaaatccctaagagcaagcgccaaaaaaaggagctgggggacagctctggggaggggccagagtttgtggaggaggaggaagaggtggctctgcgctcagacagtgagggcagcgactatactcctggcaagaagaagaagaagaagcttggacctaagaaagagaagaagagcaaatccaagcggaaggaggaggaggaggaggaggatgatgatgatgattcaaaggagcctaaatcatctgctcagctcctggaagactggggcatggaagacattgaccacgtgttctcagaggaggattatcgaaccctcaccaactacaaggccttcagccagtttgtcagacccctcattgctgccaaaaatcccaagattgctgtctccaagatgatgatggttttgggtgcaaaatggcgggagttcagtaccaataaccccttcaaaggcagttctggggcatcagtggcagctgcggcagcagcagcggtagctgtggtggagagcatggtgacagccactgaggttgcaccaccacctccccctgtggaggtgcctatccgcaaggccaagaccaaggagggcaaaggtcccaatgctcggaggaagcccaagggcagccctcgtgtacctgatgccaagaagcctaaacccaagaaagtagctcccctgaaaatcaagctgggaggttttggttccaagcgtaagagatcctcgagtgaggatgatgacttagatgtggaatctgacttcgatgatgccagtatcaatagctattctgtttctgatggttccaccagccgtagtagccgcagccgcaagaaactccgaaccactaaaaagaaaaagaaaggcgaggaggaggtgactgctgtggatggttatgagacagaccaccaggactattgcgaggtgtgccagcaaggcggtgagatcatcctgtgtgatacctgtccccgtgcttaccacatggtctgcctggatcccgacatggagaaggctcccgagggcaagtggagctgcccacactgcgagaaggaaggcatccagtgggaagctaaagaggacaattcggagggtgaggagatcctggaagaggttgggggagacctcgaagaggaggatgaccaccatatggaattctgtcgggtctgcaaggatggtggggaactgctctgctgtgatacctgtccttcttcctaccacatccactgcctgaatcccccacttccagagatccccaacggtgaatggctctgtccccgttgtacgtgtccagctctgaagggcaaagtgcagaagatcctaatctggaagtggggtcagccaccatctcccacaccagtgcctcggcctccagatgctgatcccaacacgccctccccaaagcccttggaggggcggccagagcggcagttctttgtgaaatggcaaggcatgtcttactggcactgctcctgggtttctgaactgcagctggagctgcactgtcaggtgatgttccgaaactatcagcggaagaatgatatggatgagccaccttctggggactttggtggtgatgaagagaaaagccgaaagcgaaagaacaaggaccctaaatttgcagagatggaggaacgcttctatcgctatgggataaaacccgagtggatgatgatccaccgaatcctcaaccacagtgtggacaagaagggccacgtccactacttgatcaagtggcgggacttaccttacgatcaggcttcttgggagagtgaggatgtggagatccaggattacgacctgttcaagcagagctattggaatcacagggagttaatgaggggtgaggaaggccgaccaggcaagaagctcaagaaggtgaagcttcggaagttggagaggcctccagaaacgccaacagttgatccaacagtgaagtatgagcgacagccagagtacctggatgctacaggtggaaccctgcacccctatcaaatggagggcctgaattggttgcgcttctcctgggctcagggcactgacaccatcttggctgatgagatgggccttgggaaaactgtacagacagcagtcttcctgtattccctttacaaggagggtcattccaaaggccccttcctagtgagcgcccctctttctaccatcatcaactgggagcgggagtttgaaatgtgggctccagacatgtatgtcgtaacctatgtgggtgacaaggacagccgtgccatcatccgagagaatgagttctcctttgaagacaatgccattcgtggtggcaagaaggcctcccgcatgaagaaagaggcatctgtgaaattccatgtgctgctgacatcctatgaattgatcaccattgacatggctattttgggctctattgattgggcctgcctcatcgtggatgaagcccatcggctgaagaacaatcagtctaagttcttccgggtattgaatggttactcactccagcacaagctgttgctgactgggacaccattacaaaacaatctggaagagttgtttcatctgctcaactttctcacccccgagaggttccacaatttggaaggttttttggaggagtttgctgacattgccaaggaggaccagataaaaaaactgcatgacatgctggggccgcacatgttgcggcggctcaaagccgatgtgttcaagaacatgccctccaagacagaactaattgtgcgtgtggagctgagccctatgcagaagaaatactacaagtacatcctcactcgaaattttgaagcactcaatgcccgaggtggtggcaaccaggtgtctctgctgaatgtggtgatggatcttaagaagtgctgcaaccatccatacctcttccctgtggctgcaatggaagctcctaagatgcctaatggcatgtatgatggcagtgccctaatcagagcatctgggaaattattgctgctgcagaaaatgctcaagaaccttaaggagggtgggcatcgtgtactcatcttttcccagatgaccaagatgctagacctgctagaggatttcttggaacatgaaggttataaatacgaacgcatcgatggtggaatcactgggaacatgcggcaagaggccattgaccgcttcaatgcaccgggtgctcagcagttctgcttcttgctttccactcgagctgggggccttggaatcaatctggccactgctgacacagttattatctatgactctgactggaacccccataatgacattcaggcctttagcagagctcaccggattgggcaaaataaaaaggtaatgatctaccggtttgtgacccgtgcgtcagtggaggagcgcatcacgcaggtggcaaagaagaaaatgatgctgacgcatctagtggtgcggcctgggctgggctccaagactggatctatgtccaaacaggagcttgatgatatcctcaaatttggcactgaggaactattcaaggatgaagccactgatggaggaggagacaacaaagagggagaagatagcagtgttatccactacgatgataaggccattgaacggctgctagaccgtaaccaggatgagactgaagacacagaattgcagggcatgaatgaatatttgagctcattcaaagtggcccagtatgtggtacgggaagaagaaatgggggaggaagaggaggtagaacgggaaatcattaaacaggaagaaagtgtggatcctgactactgggagaaattgctgcggcaccattatgagcagcagcaagaagatctagcccgaaatctgggcaaaggaaaaagaatccgtaaacaggtcaactacaatgatggctcccaggaggaccgagattggcaggacgaccagtccgacaaccagtccgattactcagtggcttcagaggaaggtgatgaagactttgatgaacgttcagaagctccccgtaggcccagtcgtaagggcctgcggaatgataaagataagccattgcctcctctgttggcccgtgttggtgggaatattgaagtacttggttttaatgctcgtcagcgaaaagcctttcttaatgcaattatgcgatatggtatgccacctcaggatgcttttactacccagtggcttgtaagagacctgcgaggcaaatcagagaaagagttcaaggcatatgtctctcttttcatgcggcatttatgtgagccgggggcagatggggctgagacctttgctgatggtgtcccccgagaaggcctgtctcgccagcatgtccttactagaattggtgttatgtctttgattcgcaagaaggttcaggagtttgaacatgttaatgggcgctggagcatgcctgaactggctgaggtggaggaaaacaagaagatgtcccagccagggtcaccctccccaaaaactcctacaccctccactccaggggacacgcagcccaacactcctgcacctgtcccacctgctgaagatgggataaaaatagaggaaaatagcctcaaagaagaagagagcatagaaggagaaaaggaggttaaatctacagcccctgagactgccattgagtgtacacaggcccctgcccctgcctcagaggatgaaaaggtcgttgttgaaccccctgagggagaggagaaagtggaaaaggcagaggtgaaggagagaacagaggaacctatggagacagagcccaaaggtgctgctgatgtagagaaggtggaggaaaagtcagcaatagatctgacccctattgtggtagaagacaaagaagagaagaaagaagaagaagagaaaaaagaggtgatgcttcagaatggagagacccccaaggacctgaatgatgagaaacagaagaaaaatattaaacaacgtttcatgtttaacattgcagatggtggttttactgagttgcactccctttggcagaatgaagagcgggcagccacagttaccaagaagacttatgagatctggcatcgacggcatgactactggctgctagccggcattataaaccatggctatgcccggtggcaagacatccagaatgacccacgctatgccatcctcaatgagcctttcaagggtgaaatgaaccgtggcaatttcttagagatcaagaataaatttctagctcgaaggtttaagctcttagaacaagctctggtgattgaggaacagctgcgccgggctgcttacttgaacatgtcagaagacccttctcacccttccatggccctcaacacccgctttgctgaggtggagtgtttggcggaaagtcatcagcacctgtccaaggagtcaatggcaggaaacaagccagccaatgcagtcctgcacaaagttctgaaacagctggaagaactgctgagtgacatgaaagctgatgtgactcgactcccagctaccattgcccgaattcccccagttgctgtgaggttacagatgtcagagcgtaacattctcagccgcctggcaaaccgggcacccgaacctaccccacagcaggtagcccagcagcagtgaagatgcagactgataccacctccaccgctgagcagtgaccttcctcactttctcttgtcccagcttctcccctgggggcctgagagaccctcaccttccttctgcccatcttccatgttgtaaaggaacagccccagtgcactgggggaggggagggagtgaggggcagtggtgcccttcctgcagaagagacatgcagcagtagcgctggcgccatctgcaggagctggcgggctggccttctggaccctggcttctccccactgtaacgcctgttacacacaaactgttgtgggttcctgccaggcttgaagaaaatgatctgaattttttcctccttttggttttattttgttggtttattttgtgttttcttttctcctttttggggggtattcagagtgggctgggcccctgggcgagacacagctacctctgttggcatctttttaataccaggaacccagcggctctagccactgagcggctaaatgaaataaagtggaaaaaaaaaaaaaggaaaaaaccaaaagcataaaaaaccacagcaaatttcttgatgaaaattgaaaataaaagtttccttgtatttt

SEQ ID NO: 117721 - DNA, 553 bp, Homo sapiens
  Payload ID: 3001
  Gene Symbol: CHD4
  Gene Name: chromodomain helicase DNA binding protein 4
  ENST ID: ENST00000545584
  CDS Start-End: 177-553
ttgcaccagcctgccctcggaggcgtcgctccctcgctccgtgggggcgcctgccggggagccggcttccgggctgcccccgaggagtgtggaactaatgactcgggccagtgtagaggtcctcaggccgccggcaggagcagctgggccaattccctggccgggagcggaaggggatggcgtcgggcctgggctccccgtccccctgctcggcgggcagtgaggaggaggatatggatgcacttttgaacaacagcctgcccccaccccacccagaaaatgaagaggacccagaagaggatttgtcagaaacagagactccaaagctcaagaagaagaaaaagcctaagaaacctcgggaccctaaaatccctaagagcaagcgccaaaaaaaggagctgggggacagctctggggaggggccagagtttgtggaggaggaggaagaggtggctctgcgctcagacagtgagggcagcgactatactcctggcaagaagaagaagaagaagcttggacctaagaaagagaagaagagcaaatccaagcggaa

SEQ ID NO: 117722 - DNA, 9646 bp, Homo sapiens
  Payload ID: 3002
  Gene Symbol: CHD5
  Gene Name: chromodomain helicase DNA binding protein 5
  Uniprot ID: Q8TDI0
  ENST ID: ENST00000262450
  CDS Start-End: 101-5965
tcgcccgccgcgcgcgccggtccggcagcgcacgggttaaggctggcaccgcgcccggcgggagggggggcgcccacctcccctcctccccgcgccgggcatgcggggcccagtgggcaccgaggaggagctgccgcggctgttcgccgaggagatggagaatgaggacgagatgtcagaagaagaagatggtggtcttgaagccttcgatgactttttccctgtggagcccgtgagccttcctaagaagaagaaacccaagaagctcaaggaaaacaagtgtaaagggaagcggaagaagaaagaggggagcaatgatgagctatcagagaatgaagaggatctggaagagaagtcggagagtgaaggcagtgactactccccgaataaaaagaagaagaagaaactcaaggacaagaaggagaaaaaagccaagcgaaaaaagaaggatgaggatgaggatgataatgatgatggatgcttaaaggagcccaagtcctcggggcagctcatggccgagtggggcctggacgacgtggactacctgttctcggaggaggattaccacacgctgaccaactacaaggccttcagccagttcctcaggccactcattgccaagaagaacccgaagatccccatgtccaaaatgatgaccgtcctgggtgccaagtggcgggagttcagcgccaacaaccccttcaagggcagctccgcggcagcagcggcggcggcggtggctgcggctgtagagacggtcaccatctcccctccgctagccgtcagccccccgcaggtgccccagcctgtgcctatccgcaaggccaagaccaaggagggcaaagggcctggagtgaggaagaagatcaaaggctccaaagatgggaagaaaaagggcaaagggaaaaagacggccgggctcaagttccgcttcggggggatcagcaacaagaggaagaaaggctcctcgagtgaagaagatgagagggaggagtcggacttcgacagcgccagcatccacagtgcctccgtgcgctccgaatgctctgcagccctgggcaagaagagcaagaggaggcgcaagaagaagaggattgatgatggtgacggctatgagacagaccaccaggattactgtgaggtgtgccagcagggtggggagatcatcctgtgcgacacctgcccgagggcctaccatctcgtatgcctggacccagagctggagaaggctcccgagggcaagtggagctgcccccactgtgagaaggaggggatccagtgggagccgaaggacgacgacgatgaagaggaggagggcggctgcgaggaggaggaggacgaccacatggagttctgccgcgtgtgcaaggacgggggcgagctgctctgctgcgacgcctgcccctcctcctaccacctgcattgcctcaacccgccgctgcccgagatcccaaacggtgaatggctctgcccgcgctgtacttgccccccactgaagggcaaagtccagcggattctacactggaggtggacggagccccctgcccccttcatggtggggctgccggggcctgacgtggagcccagcctccctccacctaagcccctggagggcatccctgagagagagttctttgtcaagtgggcagggctgtcctactggcattgctcctgggtgaaggagctacagctggagctgtaccacacggtgatgtatcgcaactaccaaagaaagaacgacatggatgagccgcccccctttgactacggctctggggatgaagacggcaagagcgagaagaggaagaacaaggaccccctctatgccaagatggaggagcgcttctaccgctatggcatcaagccagagtggatgatgattcaccgaatcctgaaccatagctttgacaagaagggggatgtgcactacctgatcaagtggaaagacctgccctacgaccagtgcacctgggagatcgatgacatcgacatcccctactacgacaacctcaagcaggcctactggggccacagggagctgatgctgggagaagacaccaggctgcccaagaggctgctcaagaagggcaagaagctgagggacgacaagcaggagaagccgccggacacgcccattgtggaccccacggtcaagttcgacaagcagccatggtacatcgactccacaggcggcacactgcacccgtaccagctggagggcctcaactggctgcgcttctcttgggcccagggcactgacaccatcctggccgatgagatgggtctgggcaagacggtgcagaccatcgtgttcctttactccctctacaaggagggccactccaaagggccctacctggttagcgcgcccctctccaccatcatcaactgggaacgcgagtttgagatgtgggcgcccgacttctacgtggtcacctacacgggggacaaggagagccgctcggtgattcgggagaacgagttttcctttgaggacaacgccattcggagtgggaagaaggtattccgtatgaagaaagaagtgcagatcaaattccacgtgctgctcacctcctatgagctcatcaccattgaccaggccatcctgggctccatcgagtgggcctgcctggtggtagatgaggcccaccgcctcaagaacaaccagtccaagttttttagggtcttaaacagctacaagattgattacaagctgctgctgacagggaccccccttcagaacaacctggaggagctgttccatctcctcaacttcctgactccagagaggttcaacaacctggagggcttcctggaggagtttgctgacatctccaaggaagaccagatcaagaagctgcatgacctgctggggccgcacatgctcaggcggctcaaggctgacgtgttcaagaacatgccggccaagaccgagctcattgtccgggtggagctgagccagatgcagaagaagtactacaagttcatcctcacacggaactttgaggcactgaactccaaggggggcgggaaccaagtatcgctgctcaacatcatgatggacctgaaaaagtgctgcaaccacccctacctcttccctgtggctgccgtggaggcccctgtcttgcccaatggctcctacgatggaagctccctggtcaagtcttcagggaagctcatgctgctacagaagatgctgaagaaactgcgggatgaggggcaccgtgtgctcatcttctcccagatgaccaagatgctggacctcctggaggacttcctggagtacgaaggctacaagtatgagcggattgatggtggcatcaccgggggcctccggcaggaggcaatcgacagattcaatgcccccggggcccagcagttctgcttcctcctctcaacccgggcaggtggtctgggcatcaacctggccacggcggacactgtcatcatctacgactcggactggaacccgcacaatgacatccaggccttcagccgcgcccaccgcatcggccagaacaagaaggtgatgatctaccgcttcgtgactcgggcctcggtggaggagcgcatcacgcaggtggccaagcgcaagatgatgctcacccacctggtggtgcggcccggcctcggctccaagtcggggtccatgaccaagcaggagctggacgacatcctcaagttcggcacggaggaactcttcaaggacgacgtggagggcatgatgtctcagggccagaggccggtcacacccatccctgatgtccagtcctccaaaggggggaacttggccgccagtgcaaagaagaagcacggtagcaccccgccaggtgacaacaaggacgtggaggacagcagtgtgatccactatgacgatgcggccatctccaagctgctggaccggaaccaggacgctacagatgacacggagctacagaacatgaacgagtacctgagctccttcaaggtggcgcagtacgtggtgcgcgaggaggacggcgtggaggaggtggagcgggaaatcatcaagcaggaggagaacgtggaccccgactactgggagaagctgctgcggcaccactatgagcagcagcaggaggacctggcccgcaacctgggcaagggcaagcgcatccgcaagcaggtcaactacaacgatgcctcccaggaggaccaggagtggcaggatgagctctctgataaccagtcagaatattccattggctctgaggatgaggatgaggactttgaagagaggccggaagggcagagtggacgacgacaatcccggaggcagctgaagagtgacagggacaagcccctgcccccgcttctcgcccgagttggtggcaacatcgaggtgctgggcttcaatgcccgacagcggaaggcctttctgaacgccatcatgcgctggggcatgcccccgcaggacgccttcaactcccactggctggtgcgggaccttcgagggaagagcgagaaggagtttagagcctatgtgtccctcttcatgcggcacctgtgtgagccgggggcggatggtgcagagaccttcgcagacggcgtgccccgggagggcctctccaggcagcacgtgctgacccgcatcggggtcatgtcactagttaggaagaaggttcaggagtttgagcatgtcaacgggaagtacagcaccccagacttgatccctgaggggcccgaggggaagaagtcgggcgaggtgatctcctcggaccccaacacaccagtgcccgccagccctgcccacctcctgccagccccgctgggcctgccagacaaaatggaagcccagctgggctacatggatgagaaagaccccggggcacagaagccaaggcagcccctggaagtccaggcccttccagccgccttggatagagtggagagtgaggacaagcacgagagcccagccagcaaggagagagcccgagaggagcggccagaggagacggagaaggccccgccctccccggagcagctgccgagagaggaggtgcttcctgagaaggagaagatcctggacaagctggagctgagcttgatccacagcagaggggacagttccgaactcaggccagatgacaccaaggctgaggagaaggagcccattgaaacacagcaaaatggtgacaaagaggaagatgacgaggggaagaaggaggacaagaaggggaaattcaagttcatgttcaacatcgcggacgggggcttcacggagttgcacacgctgtggcagaacgaggagcgggctgctgtatcctctgggaaaatctacgacatctggcaccggcgccatgactactggctgctggcgggcatcgtgacgcacggctacgcccgctggcaggacatccagaatgacccacggtacatgatcctcaacgagcccttcaagtctgaggtccacaagggcaactacctggagatgaagaacaagttcctggcccgcaggtttaagctgctggagcaggcgttggtcattgaggagcagctccggagggccgcgtacctgaacatgacgcaggaccccaaccaccccgccatggccctcaacgcccgcctggctgaagtggagtgcctcgccgagagccaccagcacctgtccaaggagtcccttgctgggaacaagcctgccaatgccgtcctgcacaaggtcctgaaccagctggaggagctgctgagcgacatgaaggccgacgtgacccggctgccatccatgctgtcccgcatccccccggtggccgcccggctgcagatgtcggagcgcagcatcctgagccgcctgaccaaccgcgccggggaccccaccatccagcagggcgctttcggctcctcccagatgtacagcaacaactttgggcccaacttccggggccctggaccgggagggattgtcaactacaaccagatgcccctggggccctatgtgaccgatatctagccgtcctcgagacttccctgtgttgcagcgctcatttccagctgagccacgcctgccgggccacctgcccgacccacatgggagagaaaagctgccacctttttaggagccagcgccaccttgggacaaaaagggaaacctagtaatgccatcacatggaggacgaggcccagctcagctgggccagagcccagaagtgccacctcatcataattcaagtgttcttccacacagcgttgcccccacaaccacgccggacgtgccccctcgccaccttttccagacgacttcttagaagagatttcatttatttgtacatcttttgcactttcctattgaagacttgaacacgtttgtcttgataaaagttggatgacgtatggaagattcgaacctgcagcactgatgtctctttaccgatgggttccagacccaaggtagtcctggcactgccctgtggactcagcccagctggggaggacatggcgcccggtgccctaggagccctcagtgtcccctacctgacctgtctgcacctgtgtgacagccccttctgatttggccccctgcccgcttggagcctcccagcaccagacagggcaggtttggggagccgctgtccagccctatggtgagaccctggctgacatttcccctccttcctgccaaggctggaggccgccaggtgtttgctctctccttgtggggaggtggatcctctgccagcaggtgtctgtccccggcccagcgcatcttgaaggccctggactctgttaccagtggggggcctgtggccccggctcttcacagcaggcagaagcgtatgatcccagggagggtgggctggggggggggcagcacttgcctcggagccactgctgcgttgggtttgccttctgccagaggtgtggttaagggcagtgatagctgcgccccagcaaggagggtcatgggccctgagctggcccaggagaccctggccctgccctgtgccctgggatgcctaccctgcccacctccggaggtggaaccgggctgcccctgggggcctggacttgtcccattcccctgtccctggaaaggccttcccgggggctttttgcctgaggctgcactcttggaaggcgtggggagagttctgcctggagggggactggacccagtgccctctgcagacccctcccagccgcagcaccaagggcttgctgccttgtttcctgccaggagcgccctgacatcccaaaaccatcttcccacatgtgggttgttggaatcccacccactcccccggaccctgcccctccaagttggggacggagatggggagcaggtcaggccctccctaggcctgtttgtgtgtgatccttctcctggccccaggtcgacctggaaggcgtttctgagtcttgtactgggaccttcccagggaaggtgccttggggtgcagaatcctgggaatgttaggaaagggctgcgtgaaaaacccagctgggcctggggtggaggtgcacacgggctggggctcagctccttggagagggcctgcctgggactgagggggccagggctgggtcaggattcaccagcttgtgttgcagacactggagcgattgcctggccctccctaagccctatatgcctcactcataatgaggctgtctctgaaccccggagggcgggacctacaagtccttcctcttggcgcattcccacactccagtctggatccaggtctgcaaggccagcccgaccctgacactgcacgtgggcgtagtggggagcaccctggagtggagatgattgtcagcgggctcacatgttatggttcatccacatgcgtgttgtgtgctctgcggtgcctcctggcaaagggtcctggctcgggtcagaagctcactcccgtgccctcgtccccaaacaagcagtggcaagcactggggttggccctcgttgggagcagtgcccaccttccttggcccacagcagataggtcccgagcagcaggactggaggcctgtggcggtcagggcaggggtctgtgtctccaccccaagggctgatggtccctcccctgtgcgccttcctctcaggcaggcttgctctgtcccttcctctctgcttccctcccaggcctcgccagggctcccttctcctctgcctggttagactcgggcacccaggaaagcctggccagggctcctttgggcctgggccccctgcactgcctggtccagaaggggtggtgctgtccgtggccagcaccccggggcccgggaggggtgggctactagagtcagagcgggtttggggctgaccagtttgggagaggagaaaagatctgagaatgtccttcttggtttgtcagtcatctctgccaaaagtggtgatggtggtgtccgtatgtttggcgtctttgggctgggtttggtttttgctgctggtagaatcagggtcctcgggcatgaacgcgagcccaaagtgccagtctgcgattggaaatttccagccactttaagccagtgctgagtagggcttctgcagagccatgtttgagccaaggtcttggaaggcattgccccatgggctcaggtgactcggggtggagtgagcacgtctgcagggccctctcatacacgcctgaggcagaagcagcgtcccccgtgaaagccaccttccgaagctcctgcgttttttgcaaacttggcttcccccaggggcaggctggactttccctgccccctatgattgaagtcctcctgcttttgggggctgccttcccagagtcccccgggtgctcccctgccgaggtcaggagctgaccaagccttggcccggtgacacctgcagccctcactcctgtcatcccaggacacttgaggcccaaggaggtggagtggagagtgggctcgggtacatgggagccagaagccagatggacttggtcaagtgtcggtcacttggagcctccagtgtgcgtcagggtctgtgggcaggggacagggcgtgggtgggggccgaggctggcacgcccctctgccctcaccgtcttggtgacctggcctcggcccctcccccaagtctcttctgtgcaaggcccgcctcggcctcggcagctggttcctgtcctgttttctgtgtctgaaagtttacaggttgtggtgcatcagcccaaactcactggcgttgtgttttttttttctttaattttcagattttttttttaaacaaagtatttttttaggtgcgataacccagaaagggcccgttgggtgtgtgtgtgtgtcctgaactcctcaagcagcgattggagcccaagcacccctggagaggaagggagggtccccactggcccgtggggtctgagttcaggggtgtggagggagcagactccaccggcccaggcccagctaagagggggccgacccctttccccaggcacagccccaggctggcaaagggagggccctgggctgggtgcaaggcgcgccaggagtcccagccagggtggccccggcgggggcgggtccagctttggaagccaggctcccctgtgagccgtggcttgtctggtcttcgcccacgggaggctggacagaggctgtagccaacacaatcacctttactttgtactctgtgtgtatgttttggttttctgtgttttaataaatcctttgggaaagg

SEQ ID NO: 117723 - DNA, 3044 bp, Homo sapiens
  Payload ID: 3002
  Gene Symbol: CHD5
  Gene Name: chromodomain helicase DNA binding protein 5
  ENST ID: ENST00000377999
  CDS Start-End: 1-333
atgctggacctcctggaggacttcctggagtacgaaggctacaagtatgagcggattgatggtggcatcaccgggggcctccggcaggaggcaatcgacagattcaatgcccccggggcccagcagttctgcttcctcctctcaacccgggcaggtggtctgggcatcaacctggccacggcggacactgtcatcatctacgactcggactggaacccgcacaatgacatccaggtctgtgctgctgccgcccaccaccctcccagggggcctctcatcccgggcctcaggccttcagccgcgcccaccgcatcggccagaacaagaaggtgatgatctaccgcttcgtgactcgggcctcggtggaggagcgcatcacgcaggtggccaagcgcaagatgatgctcacccacctggtggtgcggcccggcctcggctccaagtcggggtccatgaccaagcaggagctggacgacatcctcaagttcggcacggaggaactcttcaaggacgacgtggagggcatgatgtctcagggccagaggccggtcacacccatccctgatgtccagtcctccaaaggggggaacttggccgccagtgcaaagaagaagcacggtagcaccccgccaggtgacaacaaggacgtggaggacagcagtgtgatccactatgacgatgcggccatctccaagctgctggaccggaaccaggacgctacagatgacacggagctacagaacatgaacgagtacctgagctccttcaaggtggcgcagtacgtggtgcgcgaggaggacggcgtggaggaggtggagcgggaaatcatcaagcaggaggagaacgtggaccccgactactgggagaagctgctgcggcaccactatgagcagcagcaggaggacctggcccgcaacctgggcaagggcaagcgcatccgcaagcaggtcaactacaacgatgcctcccaggaggaccaggagtggcaggatgagctctctgataaccagtcagaatattccattggctctgaggatgaggatgaggactttgaagagaggccggaagggcagagtggacgacgacaatcccggaggcagctgaagagtgacagggacaagcccctgcccccgcttctcgcccgagttggtggcaacatcgaggtgctgggcttcaatgcccgacagcggaaggcctttctgaacgccatcatgcgctggggcatgcccccgcaggacgccttcaactcccactggctggtgcgggaccttcgagggaagagcgagaaggagtttagagcctatgtgtccctcttcatgcggcacctgtgtgagccgggggcggatggtgcagagaccttcgcagacggcgtgccccgggagggcctctccaggcagcacgtgctgacccgcatcggggtcatgtcactagttaggaagaaggttcaggagtttgagcatgtcaacgggaagtacagcaccccagacttgatccctgaggggcccgaggggaagaagtcgggcgaggtgatctcctcggaccccaacacaccagtgcccgccagccctgcccacctcctgccagccccgctgggcctgccagacaaaatggaagcccagctgggctacatggatgagaaagaccccggggcacagaagccaaggcagcccctggaagtccaggcccttccagccgccttggatagagtggagagtgaggacaagcacgagagcccagccagcaaggagagagcccgagaggagcggccagaggagacggagaaggccccgccctccccggagcagctgccgagagaggaggtgcttcctgagaaggagaagatcctggacaagctggagctgagcttgatccacagcagaggggacagttccgaactcaggccagatgacaccaaggctgaggagaaggagcccattgaaacacagcaaaatggtgacaaagaggaagatgacgaggggaagaaggaggacaagaaggggaaattcaagttcatgttcaacatcgcggacgggggcttcacggagttgcacacgctgtggcagaacgaggagcgggctgctgtatcctctgggaaaatctacgacatctggcaccggcgccatgactactggctgctggcgggcatcgtgacgcacggctacgcccgctggcaggacatccagaatgacccacggtacatgatcctcaacgagcccttcaagtctgaggtccacaagggcaactacctggagatgaagaacaagttcctggcccgcaggtttaagctgctggagcaggcgttggtcattgaggagcagctccggagggccgcgtacctgaacatgacgcaggaccccaaccaccccgccatggccctcaacgcccgcctggctgaagtggagtgcctcgccgagagccaccagcacctgtccaaggagtcccttgctgggaacaagcctgccaatgccgtcctgcacaaggtcctgaaccagctggaggagctgctgagcgacatgaaggccgacgtgacccggctgccatccatgctgtcccgcatccccccggtggccgcccggctgcagatgtcggagcgcagcatcctgagccgcctgaccaaccgcgccggggaccccaccatccagcagatatctagccgtcctcgagacttccctgtgttgcagcgctcatttccagctgagccacgcctgccgggccacctgcccgacccacatgggagagaaaagctgccacctttttaggagccagcgccaccttgggacaaaaagggaaacctagtaatgccatcacatggaggacgaggcccagctcagctgggccagagcccagaagtgccacctcatcataattcaagtgttcttccacacagcgttgcccccacaaccacgccggacgtgccccctcgccaccttttccagacgacttcttagaagagatttcatttatttgtacatcttttgcactttcctattgaagacttgaacacgtttgtcttgataaaagttggatgacgtatggaagattcg

SEQ ID NO: 117724 - DNA, 4966 bp, Homo sapiens
  Payload ID: 3002
  Gene Symbol: CHD5
  Gene Name: chromodomain helicase DNA binding protein 5
  ENST ID: ENST00000496404
  CDS Start-End: 1-3678
atgcggggcccagtgggcaccgaggaggagctgccgcggctgttcgccgaggagatggagaatgaggacgagatgtcagaagaagaagatggtggtcttgaagccttcgatgactttttccctgtggagcccgtgagccttcctaagaagaagaaacccaagaagctcaaggaaaacaagtgtaaagggaagcggaagaagaaagaggggagcaatgatgagctatcagagaatgaagaggatctggaagagaagtcggagagtgaaggcagtgactactccccgaataaaaagaagaagaagaaactcaaggacaagaaggagaaaaaagccaagcgaaaaaagaaggatgaggatgaggatgataatgatgatggatgcttaaaggagcccaagtcctcggggcagctcatggccgagtggggcctggacgacgtggactacctgttctcggaggaggattaccacacgctgaccaactacaaggccttcagccagttcctcaggccactcattgccaagaagaacccgaagatccccatgtccaaaatgatgaccgtcctgggtgccaagtggcgggagttcagcgccaacaaccccttcaagggcagctccgcggcagcagcggcggcggcggtggctgcggctgtagagacggtcaccatctcccctccgctagccgtcagccccccgcaggtgccccagcctgtgcctatccgcaaggccaagaccaaggagggcaaagggcctggagtgaggaagaagatcaaaggctccaaagatgggaagaaaaagggcaaagggaaaaagacggccgggctcaagttccgcttcggggggatcagcaacaagaggaagaaaggctcctcgagtgaagaagatgagagggaggagtcggacttcgacagcgccagcatccacagtgcctccgtgcgctccgaatgctctgcagccctgggcaagaagagcaagaggaggcgcaagaagaagaggattgatgatggtgacggctatgagacagaccaccaggattactgtgaggtgtgccagcagggtggggagatcatcctgtgcgacacctgcccgagggcctaccatctcgtatgcctggacccagagctggagaaggctcccgagggcaagtggagctgcccccactgtgagaaggaggggatccagtgggagccgaaggacgacgacgatgaagaggaggagggcggctgcgaggaggaggaggacgaccacatggagttctgccgcgtgtgcaaggacgggggcgagctgctctgctgcgacgcctgcccctcctcctaccacctgcattgcctcaacccgccgctgcccgagatcccaaacggtgaatggctctgcccgcgctgtacttgccccccactgaagggcaaagtccagcggattctacactggaggtggacggagccccctgcccccttcatggtggggctgccggggcctgacgtggagcccagcctccctccacctaagcccctggagggcatccctgagagagagttctttgtcaagtgggcagggctgtcctactggcattgctcctgggtgaaggagctacagctggagctgtaccacacggtgatgtatcgcaactaccaaagaaagaacgacatggatgagccgcccccctttgactacggctctggggatgaagacggcaagagcgagaagaggaagaacaaggaccccctctatgccaagatggaggagcgcttctaccgctatggcatcaagccagagtggatgatgattcaccgaatcctgaaccatagctttgacaagaagggggatgtgcactacctgatcaagtggaaagacctgccctacgaccagtgcacctgggagatcgatgacatcgacatcccctactacgacaacctcaagcaggcctactggggccacagggagctgatgctgggagaagacaccaggctgcccaagaggctgctcaagaagggcaagaagctgagggacgacaagcaggagaagccgccggacacgcccattgtggaccccacggtcaagttcgacaagcagccatggtacatcgactccacaggcggcacactgcacccgtaccagctggagggcctcaactggctgcgcttctcttgggcccagggcactgacaccatcctggccgatgagatgggtctgggcaagacggtgcagaccatcgtgttcctttactccctctacaaggagggccactccaaagggccctacctggttagcgcgcccctctccaccatcatcaactgggaacgcgagtttgagatgtgggcgcccgacttctacgtggtcacctacacgggggacaaggagagccgctcggtgattcgggagaacgagttttcctttgaggacaacgccattcggagtgggaagaaggtattccgtatgaagaaagaagtgcagatcaaattccacgtgctgctcacctcctatgagctcatcaccattgaccaggccatcctgggctccatcgagtgggcctgcctggtggtagatgaggcccaccgcctcaagaacaaccagtccaagttttttagggtcttaaacagctacaagattgattacaagctgctgctgacagggaccccccttcagaacaacctggaggagctgttccatctcctcaacttcctgactccagagaggttcaacaacctggagggcttcctggaggagtttgctgacatctccaaggaagaccagatcaagaagctgcatgacctgctggggccgcacatgctcaggcggctcaaggctgacgtgttcaagaacatgccggccaagaccgagctcattgtccgggtggagctgagccagatgcagaagaagtactacaagttcatcctcacacggaactttgaggcactgaactccaaggggggcgggaaccaagtatcgctgctcaacatcatgatggacctgaaaaagtgctgcaaccacccctacctcttccctgtggctgccgtggaggcccctgtcttgcccaatggctcctacgatggaagctccctggtcaagtcttcagggaagctcatgctgctacagaagatgctgaagaaactgcgggatgaggggcaccgtgtgctcatcttctcccagatgaccaagatgctggacctcctggaggacttcctggagtacgaaggctacaagtatgagcggattgatggtggcatcaccgggggcctccggcaggaggcaatcgacagattcaatgcccccggggcccagcagttctgcttcctcctctcaacccgggcaggtggtctgggcatcaacctggccacggcggacactgtcatcatctacgactcggactggaacccgcacaatgacatccaggccttcagccgcgcccaccgcatcggccagacaaaatggaagcccagctgggctacatggatgagaaagaccccggggcacagaagccaaggcagcccctggaagtccaggcccttccagccgccttggatagagtggagagtgaggacaagcacgagagcccagccagcaaggagagagcccgagaggagcggccagaggagacggagaaggccccgccctccccggagcagctgccgagagaggaggtgcttcctgagaaggagaagatcctggacaagctggagctgagcttgatccacagcagaggggacagttccgaactcaggccagatgacaccaaggctgaggagaaggagcccattgaaacacagcaaaatggtgacaaagaggaagatgacgaggggaagaaggaggacaagaaggggaaattcaagttcatgttcaacatcgcggacgggggcttcacggagttgcacacgctgtggcagaacgaggagcgggctgctgtatcctctgggaaaatctacgacatctggcaccggcgccatgactactggctgctggcgggcatcgtgacgcacggctacgcccgctggcaggacatccagaatgacccacggtacatgatcctcaacgagcccttcaagtctgaggtccacaagggcaactacctggagatgaagaacaagttcctggcccgcaggtttaagctgctggagcaggcgttggtcattgaggagcagctccggagggccgcgtacctgaacatgacgcaggaccccaaccaccccgccatggccctcaacgcccgcctggctgaagtggagtgcctcgccgagagccaccagcacctgtccaaggagtcccttgctgggaacaagcctgccaatgccgtcctgcacaaggtcctgaaccagctggaggagctgctgagcgacatgaaggccgacgtgacccggctgccatccatgctgtcccgcatccccccggtggccgcccggctgcagatgtcggagcgcagcatcctgagccgcctgaccaaccgcgccggggaccccaccatccagcagggcgctttcggctcctcccagatgtacagcaacaactttgggcccaacttccggggccctggaccgggagggattgtcaactacaaccagatgcccctggggccctatgtgaccgatatctagccgtcctcgagacttccctgtgttgcagcgctcatttccagctgagccacgcctgccgggccacctgcccgacccacatgggagagaaaagctgccacctttttaggagccagcgccaccttgggacaaaaagggaaacctagtaatgccatcacatggaggacgaggcccagctcagctgggccagagcccagaagtgccacctcatcataattcaagtgttcttccacacagcgttgcccccacaaccacgccggacgtgccccctcgccaccttttccagacgacttcttagaagagatttcatttatttgtacatcttttgcactttcctattgaagacttgaacacgtttgtcttgataaaagttggatgacgtatgg

SEQ ID NO: 117725 - DNA, 558 bp, Homo sapiens
  Payload ID: 3002
  Gene Symbol: CHD5
  Gene Name: chromodomain helicase DNA binding protein 5
  ENST ID: ENST00000475121
  CDS Start-End: 1-271
ccagctggaggagctgctgagcgacatgaaggccgacgtgacccggctgccatccatgctgtcccgcatccccccggtggccgcccggctgcagatgtcggagcgcagcatcctgagccgcctgaccaaccgcgccggggaccccaccatccagcagatatctagccgtcctcgagacttccctgtgttgcagcgctcatttccagctgagccacgcctgccgggccacctgcccgacccacatgggagagaaaagctgccacctttttaggagccagcgccaccttgggacaaaaagggaaacctagtaatgccatcacatggaggacgaggcccagctcagctgggccagagcccagaagtgccacctcatcataattcaagtgttcttccacacagcgttgcccccacaaccacgccggacgtgccccctcgccaccttttccagacgacttcttagaagagatttcatttatttgtacatcttttgcactttcctattgaagacttgaacacgtttgtcttgataaaagttggatgacgtatggaagattcgaa

SEQ ID NO: 117726 - DNA, 4396 bp, Homo sapiens
  Payload ID: 3002
  Gene Symbol: CHD5
  Gene Name: chromodomain helicase DNA binding protein 5
  ENST ID: ENST00000462991
  CDS Start-End: 1-3181
ctacgaccagtgcacctgggagatcgatgacatcgacatcccctactacgacaacctcaagcaggcctactggggccacagggagctgatgctgggagaagacaccaggctgcccaagaggctgctcaagaagggcaagaagctgagggacgacaagcaggagaagccgccggacacgcccattgtggaccccacggtcaagttcgacaagcagccatggtacatcgactccacaggcggcacactgcacccgtaccagctggagggcctcaactggctgcgcttctcttgggcccagggcactgacaccatcctggccgatgagatgggtctgggcaagacggtgcagaccatcgtgttcctttactccctctacaaggagggccactccaaagggccctacctggttagcgcgcccctctccaccatcatcaactgggaacgcgagtttgagatgtgggcgcccgacttctacgtggtcacctacacgggggacaaggagagccgctcggtgattcgggagaacgagttttcctttgaggacaacgccattcggagtgggaagaaggtattccgtatgaagaaagaagtgcagatcaaattccacgtgctgctcacctcctatgagctcatcaccattgaccaggccatcctgggctccatcgagtgggcctgcctggtggtagatgaggcccaccgcctcaagaacaaccagtccaagttttttagggtcttaaacagctacaagattgattacaagctgctgctgacagggaccccccttcagaacaacctggaggagctgttccatctcctcaacttcctgactccagagaggttcaacaacctggagggcttcctggaggagtttgctgacatctccaaggaagaccagatcaagaagctgcatgacctgctggggccgcacatgctcaggcggctcaaggctgacgtgttcaagaacatgccggccaagaccgagctcattgtccgggtggagctgagccagatgcagaagaagtactacaagttcatcctcacacggaactttgaggcactgaactccaaggggggcgggaaccaagtatcgctgctcaacatcatgatggacctgaaaaagtgctgcaaccacccctacctcttccctgtggctgccgtggaggcccctgtcttgcccaatggctcctacgatggaagctccctggtcaagtcttcagggaagctcatgctgctacagaagatgctgaagaaactgcgggatgaggggcaccgtgtgctcatcttctcccagatgaccaagatgctggacctcctggaggacttcctggagtacgaaggctacaagtatgagcggattgatggtggcatcaccgggggcctccggcaggaggcaatcgacagattcaatgcccccggggcccagcagttctgcttcctcctctcaacccgggcaggtggtctgggcatcaacctggccacggcggacactgtcatcatctacgactcggactggaacccgcacaatgacatccaggccttcagccgcgcccaccgcatcggccagaacaagaaggtgatgatctaccgcttcgtgactcgggcctcggtggaggagcgcatcacgcaggtggccaagcgcaagatgatgctcacccacctggtggtgcggcccggcctcggctccaagtcggggtccatgaccaagcaggagctggacgacatcctcaagttcggcacggaggaactcttcaaggacgacgtggagggcatgatgtctcagggccagaggccggtcacacccatccctgatgtccagtcctccaaaggggggaacttggccgccagtgcaaagaagaagcacggtagcaccccgccaggtgacaacaaggacgtggaggacagcagtgtgatccactatgacgatgcggccatctccaagctgctggaccggaaccaggacgctacagatgacacggagctacagaacatgaacgagtacctgagctccttcaaggtggcgcagtacgtggtgcgcgaggaggacggcgtggaggaggtggagcgggaaatcatcaagcaggaggagaacgtggaccccgactactgggagaagctgctgcggcaccactatgagcagcagcaggaggacctggcccgcaacctgggcaagggcaagcgcatccgcaagcaggtcaactacaacgatgcctcccaggaggaccaggagtggcaggatgagctctctgataaccagtcagaatattccattggctctgaggatgaggatgaggactttgaagagaggccggaagggcagagtggacgacgacaatcccggaggcagctgaagagtgacagggacaagcccctgcccccgcttctcgcccgagttggtggcaacatcgaggtgctgggcttcaatgcccgacagcggaaggcctttctgaacgccatcatgcgctggggcatgcccccgcaggacgccttcaactcccactggctggtgcgggaccttcgagggaagagcgagaaggagtttagagcctatgtgtccctcttcatgcggcacctgtgtgagccgggggcggatggtgcagagaccttcgcagacggcgtgccccgggagggcctctccaggcagcacgtgctgacccgcatcggggtcatgtcactagttaggaagaaggttcaggagtttgagcatgtcaacgggaagtacagcaccccagacttgatccctgaggggcccgaggggaagaagtcgggcgaggtgatctcctcggaccccaacacaccagtgcccgccagccctgcccacctcctgccagccccgctgggcctgccagacaaaatggaagcccagctgggctacatggatgagaaagaccccggggcacagaagccaaggcagcccctggaagtccaggcccttccagccgccttggatagagtggagagtgaggacaagcacgagagcccagccagcaaggagagagcccgagaggagcggccagaggagacggagaaggccccgccctccccggagcagctgccgagagcgtcttgctctgtcactcaggctggagtgcagtggcgccatctcggctcatgggagcctttatctcctcggctcaagcgaccctcccacctcagcttcctgaacagaggaggtgcttcctgagaaggagaagatcctggacaagctggagctgagcttgatccacagcagaggggacagttccgaactcaggccagatgacaccaaggctgaggagaaggagcccattgaaacacagcaaaatggtgacaaagaggaagatgacgaggggaagaaggaggacaagaaggggaaattcaagttcatgttcaacatcgcggacgggggcttcacggagttgcacacgctgtggcagaacgaggagcgggctgctgtatcctctgggaaaatctacgacatctggcaccggcgccatgactactggctgctggcgggcatcgtgacgcacggctacgcccgctggcaggacatccagaatgacccacggtacatgatcctcaacgagcccttcaagtctgaggtccacaagggcaactacctggagatgaagaacaagttcctggcccgcaggtttaagctgctggagcaggcgttggtcattgaggagcagctccggagggccgcgtacctgaacatgacgcaggaccccaaccaccccgccatggccctcaacgcccgcctggctgaagtggagtgcctcgccgagagccaccagcacctgtccaaggagtcccttgctgggaacaagcctgccaatgccgtcctgcacaaggtcctgaaccagctggaggagctgctgagcgacatgaaggccgacgtgacccggctgccatccatgctgtcccgcatccccccggtggccgcccggctgcagatgtcggagcgcagcatcctgagccgcctgaccaaccgcgccggggaccccaccatccagcagatatctagccgtcctcgagacttccctgtgttgcagcgctcatttccagctgagccacgcctgccgggccacctgcccgacccacatgggagagaaaagctgccacctttttaggagccagcgccaccttgggacaaaaagggaaacctagtaatgccatcacatggaggacgaggcccagctcagctgggccagagcccagaagtgccacctcatcataattcaagtgttcttccacacagcgttgcccccacaaccacgccggacgtgccccctcgccaccttttccagacgacttcttagaagagatttcatttatttgtacatcttttgcactttcctattgaagacttgaacacgtttgtcttgataaaagttggatgacgtatggaagattcgaa

SEQ ID NO: 117727 - DNA, 646 bp, Homo sapiens
  Payload ID: 3002
  Gene Symbol: CHD5
  Gene Name: chromodomain helicase DNA binding protein 5
  ENST ID: ENST00000491020
  CDS Start-End: 1-382
cttggccgccagtgcaaagaagaagcacggtagcaccccgccaggtgacaacaaggacgtggaggacagcagtgtgatccactatgacgatgcggccatctccaagctgctggaccggaaccaggacgctacagatgacacggagctacagaacatgaacgagtacctgagctccttcaaggtggcgcagtacgtggtgcgcgaggaggacggcgtgctgtccccgaagagctccttgtgggtctctcctggaggcctttccgtttcctcctctgctccccaccctccgtgcagacctggaggaggtggagcgggaaatcatcaagcaggaggagaacgtggaccccgactactgggagaagctgctgcggcaccactatgagcagcagcaggaggacctggcccgcaacctgggcaagggcaagcgcatccgcaagcaggtcaactacaacgatgcctcccaggaggaccaggagtggcaggatgagctctctgataaccagtcagaatattccattggctctgaggatgaggatgaggactttgaagagaggccggaagggcagagtggacgacgacaatcccggaggcagctgaagagtgacagggacaagcccctgcccccgcttctcgcccgagttggtgg

SEQ ID NO: 117728 - DNA, 1635 bp, Homo sapiens
  Payload ID: 3003
  Gene Symbol: CHD6
  Gene Name: chromodomain helicase DNA binding protein 6
  ENST ID: ENST00000309279
  CDS Start-End: 111-1577
tggcatctaagactgtccaggaggttcacccaggagaacctccgttcgacttggagctgttctacgttaagtatagaaatttttcctacttacattgtaaatgggccacaatggaagagctcgaaaaggatcctcgcatcgcacagaagatcaagcgatttaggaataaacaagcccagatgaagcacatttttacggagcctgatgaagacttgttcaatccagactatgtagaagttgatcgcatcttggaggtggcccacaccaaggatgcagaaacaggggaggaggtaacacattacctggtgaagtggtgctcactaccatatgaagaaagcacgtgggagctagaggaagatgtagatcctgcaaaagttaaagaatttgaatctcttcaagttctccctgaaattaagcatgtggagcggcctgcttcagactcctggcagaaacttgagaagtctcgcgagtataagaacagtaaccagctccgggagtaccagctggaagggatgaactggcttctttttaactggtataacagaaaaaactgtattttggctgatgagatgggcctagggaaaaccatccagtccatcacattcctttcagaaatatttctgagaggaatccacggcccttttctcattatcgcccctctctccaccatcactaactgggagcgggagttccggacatggacagagatgaatgccattgtgtaccacggcagccagatcagcaggcagatgatccagcagtatgaaatggtgtacagagacgcccagggaaaccccctttcaggagtcttcaagttccacgtcgtcatcacaacatttgaaatgatcctagcagactgcccagagttgaagaagattcactggggccggtggaaggacatcctgactcatggccgattcaagtggcatctgaacgagaaggacatggagatgatttgccgtgccctcctggtgtactgtgtcaagcattataagggggacgagaagatcaagagtttcatttgggaactgatcacacctaccaaagatgggcaagcccagaccctccagaaccactcaggcttatctgccccagtccccagagggaggaaggggaagaagacgaagaaccagttgctaatcccagagctaaaggatgcagattggctagccacctgcaaccccgaggtggtcttgcatgatgatggctataagaaacacctcaaacagcactgcaacaaagtacttttgcgagtccggatgctgtactacctaaaagctgaaatactgggagaagcagctgagaaagcatttgaaggatctcctgccagggagctggatgtacctctgcctgacatcgactacatggagatcccagtggactggtgggatgctgaagccgataagtcacttctcattggcgtgttcaagcatggttatgaaaggtacaatgccatgcgagcagacccagcactttgcttcctggagaaagttgggatgcccgatgagaagtccctttctgcagaacagggtgttacagatgggacctcagacattcctgaaaggcaacacagataaagaagacaatgctgaggacaaagtagatggcctccagaaacaaacggtgagtcaaatg

SEQ ID NO: 117729 - DNA, 2477 bp, Homo sapiens
  Payload ID: 3003
  Gene Symbol: CHD6
  Gene Name: chromodomain helicase DNA binding protein 6
  Uniprot ID: Q8TD26
  ENST ID: ENST00000373222
  CDS Start-End: 40-1161
ctgtttgtattttggctgctgcaggagccattttagcccatgtgtcagtctcatatgattggcttttgtaccagttctgtaaatgaagaaactgagacccagggagatcaaataagttgcccaaatcccacaacgcttgtgttcagaacccagatatcttcactcccaagtctacagttgtcaaatttaaaagttttgaatcactccccaatgtctgatgcctctgtcaattttgactacaaatctccatccccatttgactgcagcactgatcaagaagagaaaattgaagatgttgctagtcactgtctgcctcagaaggacctgtatactgctgaagaggaagctgctaccctttttcctaggaaaatgacatcccataatgggatggaggacagtggaggaggaggtactggagtgaagaagaaacggaagaaaaaggagccaggagaccaagagggtgcagcaaagggaagcaaggacagagagcccaagccaaagaggaaacgagaaccgaaagagccaaaggaacccagaaaggccaaggagccgaagaaggccaaggagcacaaggagccgaagcaaaaagatggggcaaagaaggcacggaagccccgggaggcctcgggcaccaaggaggccaaagagaagaggagctgcactgactctgcagccaggacgaagtccaggaaggccagcaaggagcaaggaccaaccccagtggagaaaaagaagaaaggaaaaaggaaaagtgaaactacagtggagagtttagagctggatcagggcctgacgaacccatctctgcggagtcctgaggagtccactgagtctacagacagccagaaacgacgctcgggaaggcaagtaaagcgcagaaaatacaatgaggacctggacttcaaagtggtggatgatgatggggaaacaattgctgttcttggagctggtcgaacatctgcactctcagcctctacactggcctggcaggcggaggagcctccagaagatgatgcaaacatcattgagaagatcctggcatctaagactgtccaggaggttcacccaggagaacctccgttcgacttggagctgttctacgttaagtatagaaatttgtacgtctatttaaagtattctctgtatttgggttttatatgaataaaactttttttctcttgtgactttattatcttctacatcttcagagtcttgcctctaaggcatgacccacaggtcttggctgactcaagtttaccttaggcagtaacgctcaattatagctgcacacagaattacctggagagcttttttaaacctctaaagcctttgctccacccaagaccattggctcagactcagtggggcccaaggattgttgtgtttttaaaaactccttgggcaattctcatatgcaaccagggtagagaaccactctcctgtagcatatgctcttttcccctcttgtatattttcctttctgctacagacccactttcactaatgtgtgttaatgataacctgcccacagctgccctgcctctgttctcagccagtttctctagaagctgcagagagatcagttgcttggaattactccgttttgttttgttttctgttgttgcccttaaggggaaggtctttctaagcccaatctccagcagtttcacaataaaccattttactatttctgtgttaggtggtcaccgtgtttattgaacaccttaaagctcgatcatttgctagttatgtgcttgcctgacaatttgtatgtctttggatagttcctacttacattgtaaatgggccacaatggaagagctcgaaaaggatcctcgcatcgcacagaagatcaagcgatttaggaataaacaagcccagatgaagcacatttttacggaggtgaagcaatatttactgactcatttgactgctgcttttcttgcagcagtaaatactgtgtttacgtttctaagtccaagttaaattcctatacagatctgttgctcaagtcaaattgataaatgtgtgctgatttgcaacaaaactagtctagattcaagtcaaagaaaactatccaccaaagttaaggatcaaaccttataaactgacaactcataacggcgtgcatcttggtctgaatactaataaatagctagagtgagaggaatacgcacacaattcttttgtccctgctccctcaacccactgcaacccaaaaaggacatttcagaaggtcctaaagtttgaatgtaaaaaacaaaacaaatctaaaagtgagagaaagtaaacaaataaataattttatttatgtaaacttgggaatttctaagtattgtacctatagcaagaggaaggactgatggattttaatattaaacaaatctataatgctatatatcagaaaatgccacaaaccttaaccttaatgtgttattcttggaataaagactaaaccctgtaatagagcctacaca

SEQ ID NO: 117730 - DNA, 10818 bp, Homo sapiens
  Payload ID: 3003
  Gene Symbol: CHD6
  Gene Name: chromodomain helicase DNA binding protein 6
  Uniprot ID: Q8TD26
  ENST ID: ENST00000373233
  CDS Start-End: 179-8326
atgaccaatgggtctgtgttttggaccggcgaagcccaatggcgcgacagggaaggcgggcccgagatgggttagggtgtccttgcagggtgtctgagctaaacttcaccaaataatagctgtttgtattttggctgctgcaggagccattttagaaataaatatcttccttcaatagatgaaaatgaaaatacagaaaaaagagaagcagttgtcaaatttaaaagttttgaatcactccccaatgtctgatgcctctgtcaattttgactacaaatctccatccccatttgactgcagcactgatcaagaagagaaaattgaagatgttgctagtcactgtctgcctcagaaggacctgtatactgctgaagaggaagctgctaccctttttcctaggaaaatgacatcccataatgggatggaggacagtggaggaggaggtactggagtgaagaagaaacggaagaaaaaggagccaggagaccaagagggtgcagcaaagggaagcaaggacagagagcccaagccaaagaggaaacgagaaccgaaagagccaaaggaacccagaaaggccaaggagccgaagaaggccaaggagcacaaggagccgaagcaaaaagatggggcaaagaaggcacggaagccccgggaggcctcgggcaccaaggaggccaaagagaagaggagctgcactgactctgcagccaggacgaagtccaggaaggccagcaaggagcaaggaccaaccccagtggagaaaaagaagaaaggaaaaaggaaaagtgaaactacagtggagagtttagagctggatcagggcctgacgaacccatctctgcggagtcctgaggagtccactgagtctacagacagccagaaacgacgctcgggaaggcaagtaaagcgcagaaaatacaatgaggacctggacttcaaagtggtggatgatgatggggaaacaattgctgttcttggagctggtcgaacatctgcactctcagcctctacactggcctggcaggcggaggagcctccagaagatgatgcaaacatcattgagaagatcctggcatctaagactgtccaggaggttcacccaggagaacctccgttcgacttggagctgttctacgttaagtatagaaatttttcctacttacattgtaaatgggccacaatggaagagctcgaaaaggatcctcgcatcgcacagaagatcaagcgatttaggaataaacaagcccagatgaagcacatttttacggagcctgatgaagacttgttcaatccagactatgtagaagttgatcgcatcttggaggtggcccacaccaaggatgcagaaacaggggaggaggtaacacattacctggtgaagtggtgctcactaccatatgaagaaagcacgtgggagctagaggaagatgtagatcctgcaaaagttaaagaatttgaatctcttcaagttctccctgaaattaagcatgtggagcggcctgcttcagactcctggcagaaacttgagaagtctcgcgagtataagaacagtaaccagctccgggagtaccagctggaagggatgaactggcttctttttaactggtataacagaaaaaactgtattttggctgatgagatgggcctagggaaaaccatccagtccatcacattcctttcagaaatatttctgagaggaatccacggcccttttctcattatcgcccctctctccaccatcactaactgggagcgggagttccggacatggacagagatgaatgccattgtgtaccacggcagccagatcagcaggcagatgatccagcagtatgaaatggtgtacagagacgcccagggaaaccccctttcaggagtcttcaagttccacgtcgtcatcacaacatttgaaatgatcctagcagactgcccagagttgaagaagattcactggagctgtgtgataattgatgaagcccacagactgaagaataggaactgcaaacttctggagggtctaaagcttatggccctggaacataaagtgcttctcactggaacacccttgcagaactctgtggaggagctcttcagtttgttaaattttctggagccatcacagtttccttcagagaccgctttcttggaggaatttggagatctgaaaacagaggagcaggtaaagaaactgcagtctatcctaaaaccaatgatgcttcggcggctgaaagatgatgtggaaaagaaccttgctcccaaacaagagacgatcattgaggtggaactgaccaatatccagaaaaagtactaccgtgccatcctcgagaagaacttttccttcctgaccaagggggcaaatcagcacaacatgcccaatctcatcaacaccatgatggagctgaggaagtgctgtaaccatccctacctgatcaatggagcagaggagaaaattctagaagatttccgaaaaacccacagccctgatgcccctgactttcagctgcaggccatgattcaggcagcaggaaagcttgtgttgattgataaactactccctaagctgattgcaggtggccacaaagtactcatcttctcccagatggtgcgctgcctcgacatcctagaagattacctcatccagagaagatacacctatgagcgaattgatgggcgagtacggggaaacctgcgccaggcagccatcgaccggttctgtaagccagattcagaccgctttgtctttcttctgtgcaccagagcgggaggcctggggatcaatctcacagctgctgatacctgcatcatatttgattctgactggaacccacaaaatgacttgcaggctcaggcccgatgtcaccgcataggccagagcaaagctgtgaaggtgtatcgcctcatcactcgaaattcctacgagcgcgagatgtttgacaaggccagcctaaagctggggctggacaaggctgttcttcaggacatcaaccgaaagggcggcaccaatggggtacagcagctctcaaaaatggaggtggaggacctactccggaaaggtgcttatggagccttaatggatgaagaagatgaaggctccaagttctgtgaagaagacatagaccagattctgcagaggcgaacgcacaccatcaccatccagtctgaggggaaagggtccacttttgccaaggctagctttgtggcttcaggaaacagaacagatatttccttagatgatcctaacttttggcagaaatgggctaaaatagctgaactagacactgaagcaaagaatgaaaaggaaagcttagtgatcgaccgacctcgcgtgagaaagcagaccaaacactacaactcgtttgaggaagacgagctcatggagttttcagagttagacagcgactcagacgaaaggcccacgagatccaggcgcctcaatgacaaagccaggcgctacctccgagcggagtgcttccgggtagagaagaacctgctcatctttggctggggccggtggaaggacatcctgactcatggccgattcaagtggcatctgaacgagaaggacatggagatgatttgccgtgccctcctggtgtactgtgtcaagcattataagggggacgagaagatcaagagtttcatttgggaactgatcacacctaccaaagatgggcaagcccagaccctccagaaccactcaggcttatctgccccagtccccagagggaggaaggggaagaagacgaagaaccagttgctaatcccagagctaaaggatgcagattggctagccacctgcaaccccgaggtggtcttgcatgatgatggctataagaaacacctcaaacagcactgcaacaaagtacttttgcgagtccggatgctgtactacctaaaagctgaaatactgggagaagcagctgagaaagcatttgaaggatctcctgccagggagctggatgtacctctgcctgacatcgactacatggagatcccagtggactggtgggatgctgaagccgataagtcacttctcattggcgtgttcaagcatggttatgaaaggtacaatgccatgcgagcagacccagcactttgcttcctggagaaagttgggatgcccgatgagaagtccctttctgcagaacagggtgttacagatgggacctcagacattcctgaaagaggcaacacagataaagaagacaatgctgaggacaaagtagatggcctccagaaacaaacggagagttccagtgatggaggtgatggcgtttttagcgaaaagaaggatgacagccgggcagcccaggatggctccgacccagacaaatcgccctggccagtttcctccgccctcacagctcgtctcagacgtctggtcactgtttaccagcgctgcaaccgcaaggaactgtgccggcctgaaattctgggaccaggtaaccaaggatattgggttcaggaagagatgttcaggagaacctcagaaatggacctcatcaacaaggaagcccaaaagaggtggactaggagagaacaagcagacttctatagaacagtgtcttcctttggtgttgtttacgatcaagaaaagaaaacctttgactggacacagttccgcatcatttcccgtttggacaagaagtcggatgagagcctggaacagtatttttatagttttgtggccatgtgccggaatgtctgtcgtctacccacatggaaagatggcggtcccccagataccaccatctacgttgaacccatcactgaggaacgtgctgcaagaactctgtaccgcattgaactgttacggaaagtccgagagcaagtgctcaagtgccctcagctgcatgaacgcctccagctgtgcaggcccagcctctacctcccagtctggtgggagtgtgggaagcatgatcgagacctgctcatcggcactgccaaacatgggctgaaccgcactgactgttacatcatgaacgacccccagctgtccttcctggatgcctatagaaactatgcccagcataaaagatctggcacccaggcaccaggaaatctctgttgcctttaccagaccaactccaagttatatgaatctcttacatattctcaaatgagtaggacttcagagtcccttgaaaatgaacctgaaaatctagtgagagtagaaagcagagatgatcatctcagcctgcctgatgtgacatgtgaaaactttatttctaaagttcaggatgtcatttccatcaaccatgatgaaagtctgctgcctgagtccttagagagcatgatgtatggtaagaaggtgctcagccaagaaccaagctcttttcaggagagcccaagtaccaatactgaatctagaaaagatgttattaccatctcaataagcaaagatgggaactgccagtctggtggccctgaggcagaaatagcttctggccctacttttatgggtagcttagaagcaggaggagtagctcaagcaaacatcaaaaatggaaaacatttgttgatgtctatttcaaaggaaggggagctctgctgcagtgaggcaggacagagacctgaaaacattggccagctggaagccaagtgtttagcttccccttccttgaatccaggaaatgaaagtgggtttgtagatatgtgcagtcttagtgtctgtgactccaaaagaaacctgtcatcagatcagcaattaattgatttattggaaaacaaaagcttagaaagtaaattgattttgagtcagaaccacagtgatgaggaggaagaagaggaggaaaacgaggaggaaaacttagccatggcagtaggcatgggggaaaggccagaggtattgcatctcacggagcccactactaacatctcaagggaaaagaaccaaggcttccaagatgaaaccaagaaaggaagcttagaggtggcaaaccagactcctgggctacagagggctttccccgctccagcagcctgtcagtgccactgcaaacacatggagaggtggatgcatggcctcgagaatgatgaatttgaaatcgagaaacccaaggcttatatcccagatctgttcaaaagtaaaaccaatactatcgccatggagggtgaacccactgctattccatcacagccgtttaaagtgaagcatgagcttttaaaagaaccttggaaagaaagtgcagaggggcaaaacgttttccccacatatcctcttgaaggaagtgagctcaaatcagaagacatggattttgagaataaagatgattatgatagagacggaaactgccatagtcaagattatccagggaagtactctgaagaggagagcaagagctcaacatcgggcatcacaggagacattggggatgagctacaggaggctcgagctcccactattgctcagctgctacaggagaaaactctctattccttctctgagtggccaaaggaccgcgtgataattaaccgcctagataatatctgccacgtggtgttaaaggggaagtggccctctagccagcagtatgagccctcaggcacactgcccaccccggtattaaccagcagtgctggttctcgaaccagcctctcagagccggaagcagcagaacacagcttcagcaacggcgcagcattggcggcccagatccacaaggagagcttcttagctccagtattcacaaaggatgaacaaaagcacaggcgtccctatgagtttgaggtggagagggatgcaaaggctcggggcctggagcagttctctgccacccacgggcacacccctatcatcctcaatggctggcatggggagtcagctatggacctctcctgctcatcagaggggtccccaggagccacatcccctttcccagtgagcgccagcacccctaagattggggctatcagttcacttcagggagcccttggcatggacttgtctgggattctgcaagctggcctgatccatcctgtgactggacagattgtcaatggaagcctcagaagagatgatgcagccacgaggaggcggagagggaggcggaaacatgttgaaggagggatggacctcatctttttgaaggagcagacacttcaggcgggaatcttggaagtccatgaagacccagggcaggccaccttgagcaccacacaccctgaggggccagggcctgccacctcggctcctgagccagctacggcagccagcagccaagccgagaaatccattcccagcaagagtctgcttgactggctaaggcagcaggctgactactccttagaagttcctggctttggggcaaatttttcagacaaaccaaagcagaggaggccacgctgtaaagaacctggaaaattagatgtcagctccctgagcggggaagagagagttcctgccatccccaaggagccaggactgagggggtttcttccagaaaacaagttcaatcacactctggctgagcctattcttcgagatacgggcccccgcaggagggggaggcggcctcggagcgaactcctgaaggctccttccattgtggcagactctccctctggaatggggccactgttcatgaatggactgattgctgggatggacctggtaggacttcagaacatgagaaatatgccaggcatccccctcaccgggctggtggggtttccagctggctttgccacgatgccaacaggtgaagaggtcaaaagtaccctgagcatgctgcccatgatgctgccaggcatggctgctgtgccccagatgtttggtgttgggggactcctcagtccacccatggcaaccacctgcacttccactgctccggcgtctctatcaagcacaacgaaaagtggtacggcagtgactgaaaagactgcggaagacaagccgagtagccatgatgtgaaaacagacactttagctgaggacaagcctggtccaggtccattttctgatcagtctgaacctgcaataactactagtagtcctgtggcttttaacccatttctcatcccaggagtatctcctggactcatttacccatccatgttcctctcccctggtatgggcatggctctgccagccatgcagcaggccagacactcggaaatagtaggtctggagagccagaagaggaagaagaagaagacaaagggggacaaccccaactcccacccagagcctgctcccagctgtgaaagggagcccagcggtgatgagaactgtgccgaacccagtgcccctttgcccgcagagagagaacatggggcacaggctggggagggggcactcaaagactccaacaacgacaccaattagaacttttttcatttaagaaattattgtgacttgtaagtttcttatcccataaaggtttgttacttccctcacttcacctccataagaacctgtgtttccataagtaagattacgtacctgatttcctgtctgagaactatggtaacagatgttaatagttgcagggtctcaccacttcattagataagtgttgtctacctagtctaggaggcacagaattctcattctgttatccagttcattccagcaatcatagttaatacagtacttggtgacacgccctacccccttctcttccaagtttcccactcacttgaggaggaaaaatggcaaaagaaagctgtctagggttttaccattgaagggtggaagaacagagacaaagaggagctctttttctgtgagctgggttgcacaggaagaatgtcacagggaaccaaaaagcacagaaaaaggaagtgctggtgcatatttttgagttaaaatatttccctattttatcatgattactaagtgagtagtatagacagaagtatataactaatggttgaaaatacatatattcatttctttataaaaaacaaaaaccttaccggtagtaatataatttcccccttggtggtttttcagacacctgcagcaagaagaaatactgactgactaggcattattttctatacatccctctcaccagtgaaaagattcctcttgctgcgagaaagctttacccaccatgagttattgctgtcgacgggggtggggcaaggacccgcgctccgtagagctacacgctgcttcacaagcacacggctagcgctctgctctcacctggttcgcttacagatttctctagccattaatttgcctctctgtgtttaaagagcaccaggaccgaatggattttcacttcaggctttccttcaccaagaataaggttctttctggagcctgcaagaagacagttgcccaacactttgacacttgctagtaggtcctttgatcaagagtgtctgaggctgtcaaatgtgtgccaccctttataatacagctatgaaaagttacttctccattaatttctccattctgtttatatcttacagttggacccaaattccaaattatcagttaatcgaaactacattgcaagtcaacattattttctcttcttcctcagcttctccatgtttaggaactgagaaagaaactgcctaagcagcacttccccatgtcctttcaccttcatgttaacgtcccttctgatggtctcactcttcacaggtagttcacactctgagacttgaagtaagctcatggttcagtactctgggggcgcagggctgcgcaggacccttggaaatgttgcaagtgttactagtaccagtttcactttttgttgtcacaatttactgtattttttactttttctgttacagttttgctaatttatcagaaggtccaaaagtctgacataactatttcattttgcattatttatttatgatgcttttttcattgtcttttatacatttgggattataaattatgtaaatgttaaaatgagcatctcaaagaagtctgttaaatcatgactgaaaaaaatcaatcagatgtatcttcaaaaagtggagtcccagttttatgaatcagagatataaaccagaaattctataactgatcatagaagaagaatccagtaattgaacaaatcctatttaatgacatccttgtagcatagatggtctataatgctgaccacagatttcttagaaatgctgctctctctatttaactaacattttgttcagttttgcctccagtggaagcagaaagggttttttcagctgttaaatcctaaaaatcaatataatttatttatgtaagaaaaataactcaatcaatatatttttgaaccttttaagtactaattttctttttatcaagtagaaaaaaaaatgtatttgccctaaatccttaaaatacaaatgctataaaaattcctgtatcttgaaagccttactgcaaatgagtattatagacatccagcagagtctggttttctttgttgtcgttgtgttgttgttgttttgtatggaaaagctgctttccccgggttccacttataacctccggtaggtcacagggttcaatgtggatctgacttaaaaacccaccagcatgctcaatcccttgttatccttatggaatctgtatgttaactctctgggtgttcaggcttctatttgactgctgttgtgaccctgtttgcaaaatgaatatgacactctgtggattatttgctctgtaaggcacaagtgcttcttatgattattttgacgtttccaagagcaaaagccaaatttaaactctcttcagcaaacttgagccttttcatctaattccatgtcactcacggccataactttccttgaccattcttcaccccatgtcttacataataaattgtggtcttgatcctggatttaaaaacaaaa

SEQ ID NO: 117731 - DNA, 536 bp, Homo sapiens
  Payload ID: 3003
  Gene Symbol: CHD6
  Gene Name: chromodomain helicase DNA binding protein 6
  ENST ID: ENST00000440647
  CDS Start-End: 89-536
gttcatgttgtggaggcgttgataccctcatgagaaattctgttacttccataaaagtcctgaagaaataaatatcttccttcaatagatgaaaatgaaaatacagaaaaaagagaagcagttgtcaaatttaaaagttttgaatcactccccaatgtctgatgcctctgtcaattttgactacaaatctccatccccatttgactgcagcactgatcaagaagagaaaattgaagatgttgctagtcactgtctgcctcagaaggacctgtatactgctgaagaggaagctgctaccctttttcctaggaaaatgacatcccataatgggatggaggacagtggaggaggaggtactggagtgaagaagaaacggaagaaaaaggagccaggagaccaagagggtgcagcaaagggaagcaaggacagagagcccaagccaaagaggaaacgagaaccgaaagagccaaaggaacccagaaaggccaaggagccgaagaaggccaaggagcacaaggagccgaagcaaaaagatg

SEQ ID NO: 117732 - DNA, 1635 bp, Homo sapiens
  Payload ID: 3003
  Gene Symbol: CHD6
  Gene Name: chromodomain helicase DNA binding protein 6
  ENST ID: ENST00000440697
  CDS Start-End: 1-1577
tggcatctaagactgtccaggaggttcacccaggagaacctccgttcgacttggagctgttctacgttaagtatagaaatttttcctacttacattgtaaatgggccacaatggaagagctcgaaaaggatcctcgcatcgcacagaagatcaagcgatttaggaataaacaagcccagatgaagcacatttttacggagcctgatgaagacttgttcaatccagactatgtagaagttgatcgcatcttggaggtggcccacaccaaggatgcagaaacaggggaggaggtaacacattacctggtgaagtggtgctcactaccatatgaagaaagcacgtgggagctagaggaagatgtagatcctgcaaaagttaaagaatttgaatctcttcaagttctccctgaaattaagcatgtggagcggcctgcttcagactcctggcagaaacttgagaagtctcgcgagtataagaacagtaaccagctccgggagtaccagctggaagggatgaactggcttctttttaactggtataacagaaaaaactgtattttggctgatgagatgggcctagggaaaaccatccagtccatcacattcctttcagaaatatttctgagaggaatccacggcccttttctcattatcgcccctctctccaccatcactaactgggagcgggagttccggacatggacagagatgaatgccattgtgtaccacggcagccagatcagcaggcagatgatccagcagtatgaaatggtgtacagagacgcccagggaaaccccctttcaggagtcttcaagttccacgtcgtcatcacaacatttgaaatgatcctagcagactgcccagagttgaagaagattcactggggccggtggaaggacatcctgactcatggccgattcaagtggcatctgaacgagaaggacatggagatgatttgccgtgccctcctggtgtactgtgtcaagcattataagggggacgagaagatcaagagtttcatttgggaactgatcacacctaccaaagatgggcaagcccagaccctccagaaccactcaggcttatctgccccagtccccagagggaggaaggggaagaagacgaagaaccagttgctaatcccagagctaaaggatgcagattggctagccacctgcaaccccgaggtggtcttgcatgatgatggctataagaaacacctcaaacagcactgcaacaaagtacttttgcgagtccggatgctgtactacctaaaagctgaaatactgggagaagcagctgagaaagcatttgaaggatctcctgccagggagctggatgtacctctgcctgacatcgactacatggagatcccagtggactggtgggatgctgaagccgataagtcacttctcattggcgtgttcaagcatggttatgaaaggtacaatgccatgcgagcagacccagcactttgcttcctggagaaagttgggatgcccgatgagaagtccctttctgcagaacagggtgttacagatgggacctcagacattcctgaaaggcaacacagataaagaagacaatgctgaggacaaagtagatggcctccagaaacaaacggagagttccagt

SEQ ID NO: 117733 - DNA, 11568 bp, Homo sapiens
  Payload ID: 3004
  Gene Symbol: CHD7
  Gene Name: chromodomain helicase DNA binding protein 7
  Uniprot ID: Q9P2D1
  ENST ID: ENST00000423902
  CDS Start-End: 480-9473
cggcggcggcggcagcggcggcggcggcggcggcgcgggggttgagtcgtggtggtgcggacgcgctcgtgctcgggaactatcggattaaacttgaatcgagtgaaattacacaaaggagcgccgcggaggaggcggcccggggacccggacaccctgaaactcaccagagacccgttcgcccccggccaactccgtgcccgtggattcagccccctggccgcagctgccgagccaactccggagcccgctctgcgttttgttttcccctcggcactaggcagcggaggagcccgaccgacccggacctatatccagactttgcctgacactgcagggtccaagagaattaaagaaatatggaatgacatgaagaagattagttaaggattataggctttgagggcaaacacctcagtgaagtgaagcacaggcaagctcctgagctgtggtttggaggagccgtgtgttggaagaagatggcagatccaggaatgatgagtctttttggcgaggatgggaatattttcagtgaaggtcttgaaggcctcggagaatgtggttacccggaaaatccagtaaatcctatgggtcagcaaatgccaatagaccaaggctttgcctctttacagccatcccttcatcatccttcaactaatcaaaatcaaacaaagctgacacattttgatcactataatcagtatgaacaacaaaagatgcatctgatggatcagccgaacagaatgatgagcaacacccctgggaacggactcgcgtctccgcactcgcagtatcacacccctcccgttcctcaggtgccccatggtggcagtggtggcggtcagatgggtgtctaccctggcatgcagaatgagaggcatgggcaatcctttgtggacagcagctccatgtggggccccagggctgttcaggtaccagaccagatacgagccccctaccagcagcagcagccacagccgcagccaccgcagccggctccgtcggggccccctgcacagggccaccctcagcacatgcagcagatgggcagctatatggcacgtggggatttttccatgcagcagcatggtcagccacagcagaggatgagccagttttcccaaggccaagagggcctcaatcagggaaatccttttattgccacctcaggacctggccacttgtcccacgtgccccagcagagtcccagcatggcaccttccttgcgtcactcggtgcagcagttccatcaccacccctctactgctctccatggagaatccgttgcccacagtcccagattctccccgaatcctccccaacaaggggctgttaggccgcaaacccttaactttagttctcggagccagacagtcccctctcctactataaacaactcagggcagtattctcgatatccttacagtaacctaaatcagggattagttaacaatacagggatgaatcaaaatttaggccttacaaataatactccaatgaatcagtccgtaccaagataccccaatgctgtaggattcccatcaaacagtggtcaaggactaatgcaccagcagcccatccaccccagtggctcacttaaccaaatgaacacacaaactatgcatccttcacagcctcagggaacttatgcctctccacctcccatgtcacccatgaaagcaatgagtaatccagcaggcactcctcctccacaagtcaggccgggaagtgctgggataccaatggaagttggcagttatccaaatatgccccatcctcagccatctcaccagccccctggtgccatgggaatcggacagaggaatatgggccccagaaacatgcagcagtctcgtccatttataggcatgtcctcggcaccaagggaattgactgggcacatgaggccaaatggttgtcctggtgttggccttggagacccacaagcaatccaggaacgactgatacctggccaacaacatcctggtcaacagccatcttttcagcagttgccaacctgtcctccactgcagcctcacccgggcttgcaccaccagtcttcacctccacaccctcatcaccagccttgggcacagctccacccatcaccccagaacaccccgcagaaagtgcctgtgcatcagcattccccgtcggagccctttctagagaaaccagtgccggatatgactcaggttagtggaccgaatgctcagctagtgaagagtgatgattacctgccatcaatagaacagcagccacaacaaaagaagaagaaaaagaaaaacaaccacattgtagcagaggatcccagtaaaggttttggtaaagatgacttccctggtggggtagataaccaagaactaaataggaactcactggatgggtcccaagaagaaaaaaagaaaaagaaaaggtcaaaggcaaaaaaagacccgaaggaaccgaaagaacccaaggagaaaaaagagcccaaggaacccaagaccccgaaagcccctaagattcccaaagagccaaaggaaaagaaagcaaaaactgccacgccaaaacccaaatccagcaaaaagtcaagtaataagaaacctgactcagaagcaagtgctttgaagaaaaaggtcaacaagggaaaaacagaaggttctgaaaattcagacttagacaaaacacccccaccatctcctcctcctgaagaagatgaggacccaggtgttcagaagagacggtccagcagacaggtgaagagaaagcgctacactgaagacctggagttcaagatttctgatgaggaggcagatgatgcagatgctgctgggagggattccccctccaacacctcccagtcagaacagcaggaatctgttgatgcagaaggcccagtggtagaaaaaattatgagcagtcgttcagtaaaaaagcagaaggaatctggagaggaggtagaaattgaggaattctatgtgaaatacaaaaacttctcttatcttcattgtcagtgggcatctatagaagatctggaaaaagataagagaattcagcaaaaaattaaacgatttaaggcaaagcagggccagaacaagttcctttcagagattgaggatgagctttttaatccagattatgtggaggttgaccggataatggactttgcacgtagcacagatgaccggggagagcctgtgactcactatctggtgaagtggtgttcacttccttatgaagacagcacgtgggagcggaggcaggacatagatcaagcaaagatcgaggagtttgagaaactaatgtccagggagccggaaacagagcgtgtggagcgacctcctgctgatgattggaagaaatcggagagttccagggagtataaaaacaataacaaactcagggaataccagttggagggagtaaactggctacttttcaattggtacaacatgcgaaactgcattttagcagatgaaatgggtttgggaaaaactatccagtccattacatttctctatgagatatatttgaaaggaatccatggcccttttttagtaattgccccattgtccacaatccccaactgggaaagggaattccgaacctggacagagttgaacgtggttgtgtatcatgggagtcaagctagtcgtcggaccattcagttgtatgaaatgtacttcaaagatccccagggtcgagtgataaaggggtcctataagtttcatgccatcatcactacatttgagatgattttgactgattgtcctgagctgcggaatattccatggcgctgtgtagtcattgatgaagcccacaggctgaagaacaggaactgcaagctgttggagggactcaagatgatggacttggaacacaaagtgctgctgacgggaaccccactccagaacactgtggaagaactcttcagcttgcttcatttcttggaaccaagtcgcttcccttcagaaaccacatttatgcaagaatttggtgatctaaaaacagaagagcaggtgcaaaaacttcaagctattctaaagccaatgatgttgagacgtctcaaagaggatgtagaaaagaacttggcccccaaagaagaaactattattgaagttgagctaacaaacattcagaagaaatattaccgagccatccttgagaagaatttcacatttctttccaaaggcggtggtcaagctaacgtacctaacctattaaacactatgatggaattgcggaagtgctgcaatcatccgtaccttatcaatggtgctgaagagaaaattttggaagagtttaaagaaacacacaatgcagagtctccagattttcagctccaggcaatgatccaggctgctggcaagctagtgctgattgacaagctgctgccaaaactgaaggctggtggccacagggtgcttatcttttcccagatggtgcgctgcttggacatactggaagactacctcattcaaagacggtacccatatgaaaggatcgacggccgagtaagaggcaacctccgccaggcagctatcgacagattctccaaacctgattctgataggtttgttttcctcctgtgtacaagggcaggaggtttaggcattaacctcactgctgctgatacctgcatcatctttgattcagactggaatccccaaaatgacctccaggctcaggctagatgtcatagaataggacagagcaaatctgtgaaaatctacaggctgattacaagaaattcctatgaaagggaaatgttcgacaaggctagtttgaaactgggcctggataaagctgtgctacagtctatgagtggaagagaaaatgctaccaatggggtacaacagctttccaagaaagaaatagaggatcttctacgaaaaggggcctatggtgcactcatggatgaggaggatgaagggtctaaattctgtgaagaagatattgatcagatcctcctacgtcgaacccacaccattaccattgagtcagaagggaaaggttccacatttgctaaggccagttttgttgcatctggaaataggacagatatttccttggatgatccaaatttctggcaaaagtgggctaagaaggctgaattggatattgatgccttaaatgggaggaacaacctggttattgatactccaagagtgagaaagcagaccaggctctacagtgcagtgaaggaagatgagctgatggagttctcagacttggaaagtgattctgaagaaaagccctgtgcaaagccacggcgtccccaggataagtcacagggctatgcaaggagtgaatgtttcagggtggagaagaatctgcttgtctatggttggggacggtggacagacattctttcccacggacgctataaacgccaactcactgagcaagatgtagaaaccatctgcagaaccatcctggtgtactgtcttaatcattacaaaggggatgagaatatcaaaagcttcatctgggatctgatcacacccacagcggatggccagactcgagccttggtcaaccattccggtttgtcagctcctgtgccaaggggaaggaagggaaagaaggtgaaagcccagagcacacagccggtggtgcaggatgccgactggctggccagctgcaacccagatgccctgttccaggaggacagctacaagaaacacctgaagcatcactgtaacaaggtcctgctgcgtgtccgcatgctgtactacctaagacaagaagtgataggagaccaggcggataagatcttagagggtgctgactcaagtgaagccgatgtgtggatccctgaacctttccatgctgaagttcctgcagattggtgggataaggaagcagacaaatccctcttaattggagtgttcaaacatggctatgagaagtacaactccatgcgagctgaccccgcgctgtgctttctggaacgagtcggtatgcctgatgccaaggccatagctgccgagcaaagaggaacagacatgctagcagatggtggtgacgggggagaatttgatagagaagatgaagacccagaatataaaccaaccagaacaccgttcaaagatgaaatagatgaatttgcaaattctccttcagaggataaggaagaatccatggaaatacatgccacaggcaagcacagtgagagtaatgctgagttaggccaactttactggcctaacacttcaaccctgactacacgtctgcgccggctcattactgcctatcagcgcagctataaaaggcaacagatgaggcaagaggccctaatgaagactgaccggcgcagacggcggcctcgagaggaagtgagagctctggaagcggaaagggaagctattatatctgagaagcggcaaaagtggacaagaagagaagaggctgatttttaccgtgtggtatccacctttggggttatttttgaccctgtgaaacagcaatttgactggaaccaatttagagcctttgccaggcttgacaaaaaatctgatgagagtttggagaaatacttcagttgttttgtggccatgtgtaggcgagtatgtcgaatgcccgtcaagccagatgatgaaccgcccgacctctcctccataattgagccgatcacagaggagcgagcctctcgaactctgtaccgcattgagctgctacggaagatccgcgagcaggttctccatcacccccagctgggagagaggcttaagctctgccagccaagcttggatctgccagagtggtgggagtgtggacggcatgaccgagacttgctggttggtgctgctaaacacggggtcagtcggacggattatcacatcctcaatgaccctgagttatccttcttggatgcacataaaaactttgctcaaaacagaggggcaggtaatacatcttccttgaacccactggcagttggatttgtccagactcctccagtcatctcatctgctcatattcaagatgagagggtactggaacaagccgaaggcaaagtggaggagcctgaaaacccagctgccaaggagaaatgtgagggcaaagaagaggaagaagaaaccgatggcagcgggaaggagagcaagcaggaatgtgaggcagaggccagctctgtgaaaaatgaactgaaaggtgttgaggtcggcgcagacactgggtccaaatctatttcagagaaaggttccgaagaggatgaagaggaaaagctggaggatgacgataagtcggaagagtcttcccagcccgaagcaggagctgtctctagagggaagaattttgatgaagaaagcaatgcttccatgagcactgctagagatgaaacccgagatggattctacatggaggacggagatccttcagtagctcagctccttcatgaaagaacatttgccttctcgttttggcctaaggatagagtaatgataaaccgcttagacaacatctgtgaagcagtgttgaaaggcaaatggccagtaaataggcgccagatgtttgatttccaaggcctcatcccaggttacacacccaccacagtggacagccccttgcagaagaggagctttgctgagctctccatggtcggccaagccagcattagtgggagtgaggacatcactacgtctcctcagttgtcaaaggaagatgccctcaacctctctgtccctcgccagcggaggaggaggaggagaaaaatcgaaattgaggccgaaagagctgccaagaggcgaaatctcatggagatggttgcccagcttcgagagtctcaggtggtctcagaaaatggacaagaaaaagttgtagatttatcaaaggcctcaagagaggcaacaagctctacctcaaatttttcatctctttcttcaaagtttatcttgcctaatgtctcaacaccagtgtctgatgcctttaagactcaaatggaactgctccaagcaggcctttcgcgcacacccacaaggcatctccttaatggctccctagtggatggagagcctcccatgaagaggaggcggggaaggaggaaaaatgtggagggacttgatctgcttttcatgagccacaaacggacgtcattgagtgcagaggatgctgaggtgaccaaagcttttgaagaagatatagagaccccaccaacaagaaacattccttctcccggacagctggacccagacacacggatccctgttatcaatcttgaagatgggactaggctggtgggggaagatgctcctaaaaataaggatttagttgaatggctgaagctgcaccctacttacactgttgatatgccaagttatgtaccaaagaatgcagatgtgctgttttcctcatttcagaaaccgaaacagaaacgacatagatgtcgaaaccctaataaattggatataaacactttgacaggagaagaaagggtgcctgttgtcaataaacgaaatgggaagaagatgggtggagctatggcgcctccaatgaaggatctacccaggtggctggaagaaaatcctgaatttgcagttgctccagactggactgatatagttaagcagtctggttttgttcctgagtcgatgtttgaccgccttctcactgggcctgtagtgcggggagagggagcgagcagaagaggaagaaggcccaaaagtgagatcgccagagcagccgcggccgccgctgctgtggcctccacgtcagggatcaaccctttgctggtgaacagcctgtttgctggaatggacctgacgagccttcagaatctccagaatctccagtcgctccagctggcaggcctcatgggcttccctccaggactggcaacagctgccaccgccggaggcgatgcgaagaaccctgctgctgtgctgcccctgatgctgccaggaatggcgggcctgcccaacgtgtttggcttgggcgggctgttgaataaccctctgtcagctgctactggaaacaccactactgcttctagtcaaggagaaccggaagacagcacttcaaaaggagaggagaaaggaaatgagaatgaagacgagaacaaagactctgagaaaagcacagatgctgtttcggctgctgactctgcgaatggatctgttggtgctgctactgccccggctggattgccctcaaacccgctagccttcaaccctttcctcctgtccacaatggccccgggcctcttctacccatccatgtttctacctccaggactggggggattgacgctgcctgggttcccagcattggcaggacttcagaatgccgtgggctccagcgaagaaaaggctgctgacaaggctgagggaggaccctttaaagatggagagacccttgaaggcagcgatgccgaggagagcctggataagactgcagagtcctccctcttagaagacgaaatagcacagggtgaagagctagactcacttgatgggggggatgaaatagaaaacaatgaaaatgatgaataaccagtaccagttccagttcaagtgtttaaaacttttgacaagtggtagtcctactgtttacactcacagttaatgttcatacctagttttataagctgttctgtaacatagtgtagcaaaaaaaaaagttcaagtcatgttatacaggtgtgtcaaaaggtatcttggtcattaagtattgtgcagtgcattatttattatccctaggagagatgaaatttgagaggtgatcatgtctttttaaggaaacttacataatgctctgctttttttttttctcttggtaccattggtattataataaagagcaatttgtaactgagtggcactaatggaagaaagtgctgctcaaaggaagtatgaagttatatatttaattttttaattttaatttttaatttttttgctgtgaaggtcaagctgaaatttaccatacatatcatacttgctcatttgtttccctttttgactgtatgggggttcccacactcgtgcatacacacacatccatacactctgacaatctccacgctagtgtgaacgcctctgtcccgaggcgcagcaataataaggcagctgttgaatgtgaagggtccctttggaaaattaacctactgggagggttcttgccagacagaactacagttccattgtctcgtggtcttgtaatgcactggtaaaaacaaaataaatagatgaataaataaagagtgagagaagagagaatcaggtaccttttttaaattaaaggactttgttactttagccacaaagctaaaacagcattacctcagctctaaactagccttgaagtttacagacatgactttgtaaatgtattgtttttctttgttgtgatgtccttttatttttttctttgaaaactgctatcatgtaagataaaatgtaaattgctgccaactgtagtaatgatgcttttaataaaagtgacccatgatatgcagagatgtaattatagaatgtagtatatagggaaactggtgttcactctattttttttgtattcgcaatagatgcaaatacagcattctggcttttgtacagtttcttgatatatcctcttatactagattagcttttggtaagacactaaactgtctcgaagactagacaggaaggaaaaccttgaattactctcacataattccactccagatatctcaacagaaatgcatacaaaaagctcctattactccctcaaaagggcatctgagaccgagaatacttagaaatgtgtgcagcgtgtgataatgtggtacactgaagaacaaaagggcaaaagaaaaatgaggctttaacaggcacaatatctaggtcatttatccttggttaatgggtagaaaaacacaatgcggtagtgtcagcaagggacacaaaggcactctggtgtcctgcagaccagcgctcgatgccagaaaccagtgtgtggaaaaacccatgtggaattgaaacagacccacttaagcacgcacgcgcgcacgcacggtctcaggagctactgatttgtggacccctttttgacctttggtatttaaagtaaaatataatttgagatctactgttttcacctttttatgtcacctgaaccaacacaaagccatatttccatccagttaaaaagcaggggaagggatgtggacgagagtgtttcgtgtgtgttgccttcctccacacccttcccccaggacgtccgcacacagtccacctccagccagtgtgctgccagacaggtggtctaaattcctcccagactgtgagattcagttcgtttatgccccaagatgaaaatatgccccttaatgattctgggaaagaaacaacctgaaccctccaccttacagatcctgtgattgcttttatttatcatcgtcgttgtctgctgaaagtgaatgggccgtgcacactggaggaaagtgccttgaagagaatattttttgaaagggaattatttgaacacgggaaagtgaaactaggtctgcatgaagtataggaaatttaagtatttaagtaacaaagatgttagcagggagaatttgcttaataaaatgagtcattaaagggtgttttttttaaa

SEQ ID NO: 117734 - DNA, 434 bp, Homo sapiens
  Payload ID: 3004
  Gene Symbol: CHD7
  Gene Name: chromodomain helicase DNA binding protein 7
  ENST ID: ENST00000527825
  CDS Start-End: 1-58
cagctccatgtggggccccagggctgttcaggcatgtcctcggcaccaagggaattgactgggcacatgaggccaaatggttgtcctggtgttggccttggagacccacaagcaatccaggaacgactgatacctggccaacaacatcctggtcaacagccatcttttcagcagttgccaacctgtcctccactgcagcctcacccgggcttgcaccaccagtcttcacctccacaccctcatcaccagccttgggcacagctccacccatcaccccagaacaccccgcagaaagtgcctgtgcatcagcattccccgtcggagccctttctagagaaaccagtgccggatatgactcaggttagtggaccgaatgctcagctagtgaagagtgatgattacctgccatcaatagaacagcagccacaacaaaa

SEQ ID NO: 117735 - DNA, 398 bp, Homo sapiens
  Payload ID: 3004
  Gene Symbol: CHD7
  Gene Name: chromodomain helicase DNA binding protein 7
  ENST ID: ENST00000527900
  CDS Start-End: 1-120
caccagccttgggcacagctccacccatcaccccagaacaccccgcagaaagtgcctgtgcatcagcattccccgtcggagccctttctagagaaaccagtgccggatatgactcagtaataagaaacctgactcagaagcaagtgctttgaagaaaaaggtcaacaagggaaaaacagaaggttctgaaaattcagacttagacaaaacacccccaccatctcctcctcctgaagaagatgaggacccaggtgttcagaagagacggtccagcagacaggtgaagagaaagcgctacactgaagacctggagttcaagatttctgatgaggaggcagatgatgcagatgctgctgggagggattccccctccaacacctcccagtcagaacagcagg

SEQ ID NO: 117736 - DNA, 4777 bp, Homo sapiens
  Payload ID: 3004
  Gene Symbol: CHD7
  Gene Name: chromodomain helicase DNA binding protein 7
  Uniprot ID: Q9P2D1
  ENST ID: ENST00000525508
  CDS Start-End: 1-3417
atggcagatccaggaatgatgagtctttttggcgaggatgggaatattttcagtgaaggtcttgaaggcctcggagaatgtggttacccggaaaatccagtaaatcctatgggtcagcaaatgccaatagaccaaggctttgcctctttacagccatcccttcatcatccttcaactaatcaaaatcaaacaaagctgacacattttgatcactataatcagtatgaacaacaaaagatgcatctgatggatcagccgaacagaatgatgagcaacacccctgggaacggactcgcgtctccgcactcgcagtatcacacccctcccgttcctcaggtgccccatggtggcagtggtggcggtcagatgggtgtctaccctggcatgcagaatgagaggcatgggcaatcctttgtggacagcagctccatgtggggccccagggctgttcaggtaccagaccagatacgagccccctaccagcagcagcagccacagccgcagccaccgcagccggctccgtcggggccccctgcacagggccaccctcagcacatgcagcagatgggcagctatatggcacgtggggatttttccatgcagcagcatggtcagccacagcagaggatgagccagttttcccaaggccaagagggcctcaatcagggaaatccttttattgccacctcaggacctggccacttgtcccacgtgccccagcagagtcccagcatggcaccttccttgcgtcactcggtgcagcagttccatcaccacccctctactgctctccatggagaatccgttgcccacagtcccagattctccccgaatcctccccaacaaggggctgttaggccgcaaacccttaactttagttctcggagccagacagtcccctctcctactataaacaactcagggcagtattctcgatatccttacagtaacctaaatcagggattagttaacaatacagggatgaatcaaaatttaggccttacaaataatactccaatgaatcagtccgtaccaagataccccaatgctgtaggattcccatcaaacagtggtcaaggactaatgcaccagcagcccatccaccccagtggctcacttaaccaaatgaacacacaaactatgcatccttcacagcctcagggaacttatgcctctccacctcccatgtcacccatgaaagcaatgagtaatccagcaggcactcctcctccacaagtcaggccgggaagtgctgggataccaatggaagttggcagttatccaaatatgccccatcctcagccatctcaccagccccctggtgccatgggaatcggacagaggaatatgggccccagaaacatgcagcagtctcgtccatttataggcatgtcctcggcaccaagggaattgactgggcacatgaggccaaatggttgtcctggtgttggccttggagacccacaagcaatccaggaacgactgatacctggccaacaacatcctggtcaacagccatcttttcagcagttgccaacctgtcctccactgcagcctcacccgggcttgcaccaccagtcttcacctccacaccctcatcaccagccttgggcacagctccacccatcaccccagaacaccccgcagaaagtgcctgtgcatcagcattccccgtcggagccctttctagagaaaccagtgccggatatgactcaggttagtggaccgaatgctcagctagtgaagagtgatgattacctgccatcaatagaacagcagccacaacaaaagaagaagaaaaagaaaaacaaccacattgtagcagaggatcccagtaaaggttttggtaaagatgacttccctggtggggtagataaccaagaactaaataggaactcactggatgggtcccaagaagaaaaaaagaaaaagaaaaggtcaaaggcaaaaaaagacccgaaggaaccgaaagaacccaaggagaaaaaagagcccaaggaacccaagaccccgaaagcccctaagattcccaaagagccaaaggaaaagaaagcaaaaactgccacgccaaaacccaaatccagcaaaaagtcaagtaataagaaacctgactcagaagcaagtgctttgaagaaaaaggtcaacaagggaaaaacagaaggttctgaaaattcagacttagacaaaacacccccaccatctcctcctcctgaagaagatgaggacccaggtgttcagaagagacggtccagcagacaggtgaagagaaagcgctacactgaagacctggagttcaagatttctgatgaggaggcagatgatgcagatgctgctgggagggattccccctccaacacctcccagtcagaacagcaggaatctgttgatgcagaaggcccagtggtagaaaaaattatgagcagtcgttcagtaaaaaagcagaaggaatctggagaggaggtagaaattgaggaattctatgtgaaatacaaaaacttctcttatcttcattgtcagtgggcatctatagaagatctggaaaaagataagagaattcagcaaaaaattaaacgatttaaggcaaagcagggccagaacaagttcctttcagagattgaggatgagctttttaatccagattatgtggaggttgaccggataatggactttgcacgtagcacagatgaccggggagagcctgtgactcactatctggtgaagtggtgttcacttccttatgaagacagcacgtgggagcggaggcaggacatagatcaagcaaagatcgaggagtttgagaaactaatgtccagggagccggaaacagagcgtgtggagcgacctcctgctgatgattggaagaaatcggagagttccagggagtataaaaacaataacaaactcagggaataccagttggagggagtaaactggctacttttcaattggtacaacatgcgaaactgcattttagcagatgaaatgggtttgggaaaaactatccagtccattacatttctctatgagatatatttgaaaggaatccatggcccttttttagtaattgccccattgtccacaatccccaactgggaaagggaattccgaacctggacagagttgaacgtggttgtgtatcatgggagtcaagctagtcgtcggaccattcagttgtatgaaatgtacttcaaagatccccagggtcgagtgataaaggggtcctataagtttcatgccatcatcactacatttgagatgattttgactgattgtcctgagctgcggaatattccatggcgctgtgtagtcattgatgaagcccacaggctgaagaacaggaactgcaagctgttggagggactcaagatgatggacttggtcagtgaccatattggtgattgcactgaacctgaatagaattgttgctgacttgatagtcccgttgctcagaatttgatgcctgtaaacagtatttgaaaagcttgtcaaatattgtgatatattctctggcactttcagttattcaaaagttgttgccttttggattcttacattgttggctagtgtctgttaaacagttgtattatagcagagtgtaatcatgatagtttcactaaagtgagtttcaagtatttgttttaccctttgttcataaatacaggttgatcataccaaatacaaaaatcccagaatccaaaacgttttgagtacccacataatgctaaaaggaaatgctcattggagcattttggattttggattttctcatttgggatgttcaacccgtaagtataaatgcagatattccaaaatctaaaaatatctgaaatctgaaacactctggtcccaagaattttggataagggatacttaacctgtactgccatttcattaactgttgggccaagctttacttcagtgatgatagtccagttatttttcagtgctcataggttttgccatactgtggccagcaggacttgtagatgcaagttctcaatgagttgggtaggatatctggggttggtttagttcgcacagatgcttagaagtttggggcattacagtgcctcagatttgatctggagttttacaccacacttatcccatagtcttccagcttcccaagagatgatcaggtcttcctgattagattttctagatttttttttcagcaggagcatcatggaataacatatcgtaggagtagaaggatttgatttattttctgtctgatactgctgtgtgtgatttcctagtgggaattgcaacatgacctgtcatcctcaggcttcttttcactccatagtttatatagtggttatgatcacttatattttatttttaatgtacatttggaaagcaaagctcctgtcatttagcatgccttggatgatttgatgagtttcacggaagtacaaaaagggtttcaaagtatttttaatgctaatttctgcaggctaatttgatcttttgttaactgagagtttgagatgagaaggagtgttctgtatattcatggccatatgtttttagctgaagactggtattaccaaaaaacacctaaaagctttttgttgcagctgattctctgaaagagcagcttattttattcttaaagagattagaattgccagctatgcttttagtttaaaacaaacaaaatctagttttgcttaaaggaaaaagtctgactgaattatcctatttagggtgggatttcccatttttcttcctaatgaattattattaaagcgatcctaagatctgtctcaaa

SEQ ID NO: 117737 - DNA, 500 bp, Homo sapiens
  Payload ID: 3004
  Gene Symbol: CHD7
  Gene Name: chromodomain helicase DNA binding protein 7
  ENST ID: ENST00000526846
  CDS Start-End: 403-500
ttgggctccaactcaagtgcgagcgggcgatgggcgcgcgggcgcggggcggctgagcagcggcggcggcggctcggggacggcggcgacccccgcctcccgcccccgccccccgctccggaccgaccacgccgcgctcgccgggagctgcggccgcaccggcgcgaacaaagtgcgttcctcccggcgcggcggcgccagcccgcgcggggaccgccaccgagcgaggacctatatccagactttgcctgacactgcagggtccaagagaattaaagaaatatggaatgacatgaagaagattagttaaggattataggctttgagggcaaacacctcagtgaagtgaagcacaggcaagctcctgagctgtggtttggaggagccgtgtgttggaagaagatggcagatccaggaatgatgagtctttttggcgaggatgggaatattttcagtgaaggtcttgaaggcctcggagaatgtggttacccggaaaatcc

SEQ ID NO: 117738 - DNA, 3456 bp, Homo sapiens
  Payload ID: 3004
  Gene Symbol: CHD7
  Gene Name: chromodomain helicase DNA binding protein 7
  Uniprot ID: Q9P2D1
  ENST ID: ENST00000524602
  CDS Start-End: 69-2915
acctcagtgaagtgaagcacaggcaagctcctgagctgtggtttggaggagccgtgtgttggaagaagatggcagatccaggaatgatgagtctttttggcgaggatgggaatattttcagtgaaggtcttgaaggcctcggagaatgtggttacccggaaaatccagtaaatcctatgggtcagcaaatgccaatagaccaaggctttgcctctttacagccatcccttcatcatccttcaactaatcaaaatcaaacaaagctgacacattttgatcactataatcagtatgaacaacaaaagatgcatctgatggatcagccgaacagaatgatgagcaacacccctgggaacggactcgcgtctccgcactcgcagtatcacacccctcccgttcctcaggtgccccatggtggcagtggtggcggtcagatgggtgtctaccctggcatgcagaatgagaggcatgggcaatcctttgtggacagcagctccatgtggggccccagggctgttcaggtaccagaccagatacgagccccctaccagcagcagcagccacagccgcagccaccgcagccggctccgtcggggccccctgcacagggccaccctcagcacatgcagcagatgggcagctatatggcacgtggggatttttccatgcagcagcatggtcagccacagcagaggatgagccagttttcccaaggccaagagggcctcaatcagggaaatccttttattgccacctcaggacctggccacttgtcccacgtgccccagcagagtcccagcatggcaccttccttgcgtcactcggtgcagcagttccatcaccacccctctactgctctccatggagaatccgttgcccacagtcccagattctccccgaatcctccccaacaaggggctgttaggccgcaaacccttaactttagttctcggagccagacagtcccctctcctactataaacaactcagggcagtattctcgatatccttacagtaacctaaatcagggattagttaacaatacagggatgaatcaaaatttaggccttacaaataatactccaatgaatcagtccgtaccaagataccccaatgctgtaggattcccatcaaacagtggtcaaggactaatgcaccagcagcccatccaccccagtggctcacttaaccaaatgaacacacaaactatgcatccttcacagcctcagggaacttatgcctctccacctcccatgtcacccatgaaagcaatgagtaatccagcaggcactcctcctccacaagtcaggccgggaagtgctgggataccaatggaagttggcagttatccaaatatgccccatcctcagccatctcaccagccccctggtgccatgggaatcggacagaggaatatgggccccagaaacatgcagcagtctcgtccatttataggcatgtcctcggcaccaagggaattgactgggcacatgaggccaaatggttgtcctggtgttggccttggagacccacaagcaatccaggaacgactgatacctggccaacaacatcctggtcaacagccatcttttcagcagttgccaacctgtcctccactgcagcctcacccgggcttgcaccaccagtcttcacctccacaccctcatcaccagccttgggcacagctccacccatcaccccagaacaccccgcagaaagtgcctgtgcatcagcattccccgtcggagccctttctagagaaaccagtgccggatatgactcagaaaccgaaacagaaacgacatagatgtcgaaaccctaataaattggatataaacactttgacaggagaagaaagggtgcctgttgtcaataaacgaaatgggaagaagatgggtggagctatggcgcctccaatgaaggatctacccaggtggctggaagaaaatcctgaatttgcagttgctccagactggactgatatagttaagcagtctggttttgttcctgagtcgatgtttgaccgccttctcactgggcctgtagtgcggggagagggagcgagcagaagaggaagaaggcccaaaagtgagatcgccagagcagccgcggccgccgctgctgtggcctccacgtcagggatcaaccctttgctggtgaacagcctgtttgctggaatggacctgacgagccttcagaatctccagaatctccagtcgctccagctggcaggcctcatgggcttccctccaggactggcaacagctgccaccgccggaggcgatgcgaagaaccctgctgctgtgctgcccctgatgctgccaggaatggcgggcctgcccaacgtgtttggcttgggcgggctgttgaataaccctctgtcagctgctactggaaacaccactactgcttctagtcaaggagaaccggaagacagcacttcaaaaggagaggagaaaggaaatgagaatgaagacgagaacaaagactctgagaaaagcacagatgctgtttcggctgctgactctgcgaatggatctgttggtgctgctactgccccggctggattgccctcaaacccgctagccttcaaccctttcctcctgtccacaatggccccgggcctcttctacccatccatgtttctacctccaggactggggggattgacgctgcctgggttcccagcattggcaggacttcagaatgccgtgggctccagcgaagaaaaggctgctgacaaggctgagggaggaccctttaaagatggagagacccttgaaggcagcgatgccgaggagagcctggataagactgcagagtcctccctcttagaagacgaaatagcacagggtgaagagctagactcacttgatgggggggatgaaatagaaaacaatgaaaatgatgaataaccagtaccagttccagttcaagtgtttaaaacttttgacaagtggtagtcctactgtttacactcacagttaatgttcatacctagttttataagctgttctgtaacatagtgtagcaaaaaaaaaagttcaagtcatgttatacaggtgtgtcaaaaggtatcttggtcattaagtattgtgcagtgcattatttattatccctaggagagatgaaatttgagaggtgatcatgtctttttaaggaaacttacataatgctctgctttttttttttctcttggtaccattggtattataataaagagcaatttgtaactgagtggcactaatggaagaaagtgctgctcaaaggaagtatgaagttatatatttaattttttaattttaatttttaatttttttgctgtgaaggtcaagctgaaatttaccatacatatcatacttgctcatttgtttccctttttgactgtatgggggttcccacactcgtgcatacacacacatccatacactctgacaatctccacgctagtgtgaa

SEQ ID NO: 117739 - DNA, 8229 bp, Homo sapiens
  Payload ID: 3005
  Gene Symbol: CHD8
  Gene Name: chromodomain helicase DNA binding protein 8
  Uniprot ID: Q9HCK8
  ENST ID: ENST00000399982
  CDS Start-End: 66-7811
gccagtaccccccctccccttccctccctagaccttggagaagtaccctccattactttcccaagatggcagaccccatcatggatctgttcgatgacccaaatttatttggcctggactctctgactgatgacagctttaaccaggtcacacaagaccccattgaggaagcccttggactgccaagctctctggactccttggatcagatgaaccaggatggtggaggtggtgatgtggggaattcatcagcaagtgaactggtccctccaccagaggaaacagctcccacagaactttccaaagaatccacagctccagctccagaatccataaccttgcatgattataccactcagcctgccagccaggagcagccagcccaacctgtcttacagacatcgacgccaacatcaggacttttgcaagtctccaagagccaggagatcctgagccaagggaatcctttcatgggtgtctctgccacagctgtctcctccagtagtgctggagggcagccacctcagtcagcccctaagattgttatccttaaggccccaccaagctcctcagtcactggtgcccatgtggcacaaattcaggcccaaggtatcaccagcacagctcagcccctggtggcaggcacagccaatggtggaaaagtcacttttaccaaagtgctaaccggcacaccccttcgaccaggtgtttccattgtctctggtaatacagtgttggccgccaaggtccctgggaaccaggctgctgttcagcgcattgtccagcccagccgaccagtaaagcagctggtcctccagccagttaagggttcagctcctgctggaaaccctggggccacagggcccccactgaagcctgcagttacactgacctctacacctacccagggtgaatcgaaacgcatcaccctggtcctccagcagccacagtctggaggtccccaaggacatcggcatgttgtgctagggagtctaccaggcaagatagtgttacagggcaaccagctggcagccctgactcaagccaagaatgcccaagggcagcctgccaaggtagtaactatccagctgcaggtgcagcagccacagcaaaaaatccagattgtaccacaaccaccatcatcgcagccacagccccagcagccaccctccacccagccagtgactctgtcctctgtacagcaggctcagataatgggaccaggacaaagcccaggacaaagactttcagtaccagtcaaggtggtactgcagccacaggctggctcttcccaaggggcctcttctgggctctctgtagttaaagttctgagtgccagtgaagtggcagctttgtcatcaccagcaagctctgctcctcattcggggggaaagacaggaatggaggaaaaccgcagattggaacaccagaagaagcaagagaaagcaaatcggattgtagcagaggccattgcgagagcccgtgcccgcggtgagcagaacatacctcgagtcttaaatgaggacgagttgcccagcgttcggccagaggaggaaggcgagaagaaacgcaggaagaagagtgctggggagaggctgaaagaggagaagccaaagaagagtaaaacatctggtgcctccaaaacaaagggcaagagcaagctcaacaccatcactcctgtagtgggtaagaagagaaaacgtaatacctcatctgataattcagatgtggaagtcatgcctgcacagtcacctcgagaagatgaagaaagcagcattcagaagagacgctcaaaccgccaagttaagcgaaaaaaatatacagaggacctggatataaagatcacagatgatgaagaagaagaagaggtggatgtaactggtccaataaaacctgagcctatcctccctgaaccagtgcaagaaccagatggcgagactttgccttccatgcagttctttgtggagaatcccagtgaagaagatgcagccattgtagacaaagtgctttctatgcggattgtgaagaaggagctcccttctggacaatatactgaagcagaagaattctttgtcaagtacaagaactactcctatctgcattgtgaatgggctactatctcccaactagagaaggataagaggatacatcaaaaattaaagcgcttcaaaaccaaaatggctcagatgagacacttcttccatgaggatgaagagccctttaatccagactacgtagaggtggataggatattggatgagtctcacagtattgacaaggacaatggggagcccgttatttactacctggtgaaatggtgctctctgccctatgaggatagcacatgggagctaaaagaagatgttgatgagggcaagattcgagaatttaaacggattcagtcaaggcacccagaactcaaaagggtgaatcgtccgcaggcaagtgcctggaagaaattggagctatcacatgaatataaaaacagaaaccagctacgggaatatcagttggaaggggttaattggctgctctttaattggtataacaggcagaactgcatcctggctgatgagatgggattgggcaaaactattcagtccattgccttcttgcaggaagtatataatgtgggcatccatggtcccttcttggtcattgccccactgtccacaattactaactgggagcgagaatttaatacatggacagaaatgaacactattgtgtaccatggcagtctggccagcaggcagatgattcaacagtatgaaatgtactgcaaagattcacggggacgcctcatcccaggcgcatacaagtttgacgctctgatcaccacttttgagatgattttgtcagattgtcctgagcttcgtgaaattgaatggcgttgtgttatcattgatgaagcccatcgactgaaaaaccgtaattgcaagctgcttgatagtctcaagcacatggacctggaacacaaggtgctactcacaggaacaccattgcaaaatactgtagaagaactgtttagcttgcttcatttcttggaaccgtcacaatttccctcagaatcagagtttctcaaggactttggggatctcaagacagaggaacaggttcaaaagctacaggccattcttaagccaatgatgctgagaagactcaaagaggatgttgaaaaaaacttggcacccaaacaggaaacaattattgaagtagagctgactaatatccagaagaaatactatcgggctattttggagaagaatttctccttcctttccaaaggggcaggtcataccaacatgcctaatctacttaacacaatgatggagttgcgcaagtgctgcaaccacccatatctcatcaatggtgctgaagaaaaaatcctaacagaattccgtgaagcttgccatattatacctcatgactttcacctgcaggccatggttcgttcagccggcaaactggttcttattgacaagttgcttccaaagcttaaagctggtggccataaagttctgatcttctctcagatggtgcgctgcctagacatcctagaggattatttaatccagaggaggtacttatatgaacgtattgatgggcgagttagaggcaaccttcgacaggctgccattgaccgcttcagcaagcctgactcagaccgctttgtcttcttactgtgtacccgggctggtggacttggtattaatcttacagctgctgatacctgcatcatctttgattcagactggaatccacaaaatgacctgcaggcccaggcacgatgtcatcgaattgggcagagcaaagctgtgaaggtgtaccgcctcatcactcgtaattcctacgagagagagatgtttgataaggccagcctcaagttggggttggataaggctgtgcttcaatccatgagtggtcgggatggcaacattactggaatccaacagttctctaagaaggagattgaagatcttttaagaaaaggagcatatgcagccatcatggaggaagatgatgaaggctccaagttttgtgaagaggacattgaccagatcttgttaagacgaactacaaccatcaccattgaatctgaaggaaaaggttccacctttgctaaggcaagctttgttgcttctgaaaacaggacagatatttctttggatgaccccaacttttggcaaaagtgggccaaaaaggctgacctagacatggatctgctcaacagcaagaataatttggtaattgacacacctagagtacgaaaacaaacgcgccactttagcactctgaaagatgatgacctggtggaattctctgatttggaaagtgaggatgatgagcggccacgctcccgcagacatgaccgtcatcatgcctatgggcgcactgactgctttcgggtggaaaagcatctcctggtatatggttggggacgatggcgagatattttatctcatggacgcttcaagcgacgtatgactgaacgagatgtggagaccatttgtcgggccattctcgtgtactgtcttctacactaccgtggggatgaaaatattaaaggcttcatctgggacttgattagcccagctgaaaatggcaagacaaaagaattgcagaatcattcaggtctatctatccctgtgcctcgtggacgcaaaggaaaaaaagtaaagtcacaaagcacttttgatatccataaggcagattggatccggaaatataaccctgacactttgttccaagatgaaagttataagaagcacttgaaacatcagtgtaacaaggtactgttgcgggtacgaatgctatactacctgaggcaggaggttattggagaccaagcagaaaaggtgttagggggtgcgattgccagtgagattgacatatggttcccagtagtggatcaactggaggttccaacaacttggtgggacagtgaggctgacaagtcgctgctcattggagtctttaaacatggctatgagaaatataataccatgagggcagacccagccttatgtttcctagaaaaggctggccgaccagatgacaaagcaattgcagcagaacatcgagtgttggataacttctctgacatagtagaaggggttgactttgataaagattgtgaagatcctgaatataaaccactccaaggtcccccaaaggaccaagatgatgagggtgatcccttgatgatgatggatgaggagatctcagtgattgatggagatgaagcccaggtgacccaacagccaggccatttattctggcctccgggctctgccctaacagctaggcttcggcgtctagtaacagcgtatcagcgcagctacaagagagaacaaatgaagatagaggctgcagaacgtggggaccggcgaaggcggcgttgtgaagcagccttcaagctgaaagaaattgcacggcgggagaaacaacaacgatggacaaggcgtgaacaaactgatttttatcgagtggtgtctacgtttggtgtggaatatgaccctgacaccatgcagttccattgggatcgcttccgcacttttgctcgactagacaaaaagacagatgaaagccttaccaagtacttccatggctttgtggccatgtgccgccaagtatgccgccttcccccagcagctggagatgaaccccccgaccctaacctgttcattgagcccatcactgaggagagagcctcacggactctctaccgtatagaattgcttcggcgcttacgggaacaagttttatgccacccccttttggaagatcggctggcattgtgtcagcctcctggtcctgaattgcccaaatggtgggagcctgttcggcatgatggggagcttctaagaggggcagcccgccatggggtgagccaaacagactgcaacatcatgcaggacccagacttctcttttctggctgcccgtatgaattatatgcagaaccatcaagcaggagcaccagctccatccttgtcacgctgctctactccactgctgcaccagcagtatacctcacgcactgcctcaccactgcccctgcgcccagatgctcctgttgaaaagtcacccgaggagacagctacccaggtccccagtctggagagtctgactttaaagctagagcacgaggtggtggccaggagccgaccaaccccacaagactatgagatgcgagtatccccctctgatactacccctctggtttcccggagtgttccaccagtcaaactggaggatgaggatgattcggactctgagctggacttgagcaagctgtcaccatcttcttcttcttcctcatcctcatccagctccagctccagcactgatgagagtgaggatgagaaggaagagaagctaactgaccagtcccgctcaaagctctatgatgaagagagtctcctgtccctcactatgtcccaagatggattcccaaatgaagatggagaacaaatgacccctgagcttctgctactgcaggaaagacaaagagcctctgagtggcccaaggatcgtgtcctgataaaccgtattgacctcgtctgccaggctgtactctcagggaagtggccttctagccgtaggagccaggaaatggtaacaggaggaattttggggccaggcaaccacttgctagacagtccctcattgactcctggagaatatggtgactctccagtccccacaccacgaagtagtagtgcagcttccatggcagaggaggaagcatctgcagtcagcacagcggcagcccagttcaccaaacttcgccgaggcatggatgaaaaggagtttacagttcaaatcaaagatgaggaaggattgaagttaacattccagaagcacaagttgatggcgaatggagtaatgggagatggacatccactgtttcataagaagaaggggaacagaaagaagctagtagagctggaggtggagtgcatggaagagcctaatcaccttgatgtggacctggagacccggatccctgtcatcaataaggtggatggtactttgctggtgggtgaggatgcccctcgccgggctgaactggagatgtggttacagggtcatccagagtttgctgttgatccccgatttctagcgtatatggaggatcgcagaaaacagaagtggcaaagatgtaaaaaaaataataaggcagaattgaactgtttgggaatggaaccagtacagacagctaactctagaaatgggaaaaagggtcatcacactgaaacggtgttcaaccgggttttgccagggcctattgcaccagagagcagcaagaagcgggcccgtaggatgcgaccagacctttctaagatgatggccctcatgcagggtggaagcactgggtctctatctctgcataacacgttccaacacagcagtagtggcctacagtctgtgtcatctttgggtcacagcagtgccacttctgcatctttgccttttatgccatttgtgatgggtggtgcaccatcatcccctcatgtagactccagcaccatgcttcatcaccaccaccaccacccccacccccaccatcaccaccatcaccatccaggcttgagagcccctggctacccctcttcaccagtgactaccgcctctggtactaccttgcggttgccaccactgcaacctgaggaggatgacgatgaggatgaagaagatgatgatgacttatctcagggctatgatagctcagaaagggacttctcactcattgatgatcctatgatgccagctaactcagactccagtgaagatgctgatgactgaagccccagcatgggccccattgcttgggcggctgctgtattttcatttactctggcccttggactatggaaacgtgggaggggcaggggagatgtggggaagtccaggactccaggaggtgaaaaggaaaaaaaaaaaaaaatgtacctgattgctcccaattatgagaggattgggtgggcaggggaactcctaaaataatacatgaccacttcctcatttctggggaaggaaaggagactagagcagctggtgtgctcacccctccctagtcacctccattaaccacagactatgtagcgctggccctagcctctggcagagcctgttcctggccgaactgtggatacagctggagggtcaggaactgttaccttctttccccttggcattaataaatttaagttaatccttttcc

SEQ ID NO: 117740 - DNA, 7420 bp, Homo sapiens
  Payload ID: 3005
  Gene Symbol: CHD8
  Gene Name: chromodomain helicase DNA binding protein 8
  Uniprot ID: Q9HCK8
  ENST ID: ENST00000430710
  CDS Start-End: 93-7001
tgctggagagacagggagaggggcgaaccggccccccacagccactgcaggagttccaccatcttcctctgaagacgtagccatcttgctccatgaagggtgaatcgaaacgcatcaccctggtcctccagcagccacagtctggaggtccccaaggacatcggcatgttgtgctagggagtctaccaggcaagatagtgttacagggcaaccagctggcagccctgactcaagccaagaatgcccaagggcagcctgccaaggtagtaactatccagctgcaggtgcagcagccacagcaaaaaatccagattgtaccacaaccaccatcatcgcagccacagccccagcagccaccctccacccagccagtgactctgtcctctgtacagcaggctcagataatgggaccaggacaaagcccaggacaaagactttcagtaccagtcaaggtggtactgcagccacaggctggctcttcccaaggggcctcttctgggctctctgtagttaaagttctgagtgccagtgaagtggcagctttgtcatcaccagcaagctctgctcctcattcggggggaaagacaggaatggaggaaaaccgcagattggaacaccagaagaagcaagagaaagcaaatcggattgtagcagaggccattgcgagagcccgtgcccgcggtgagcagaacatacctcgagtcttaaatgaggacgagttgcccagcgttcggccagaggaggaaggcgagaagaaacgcaggaagaagagtgctggggagaggctgaaagaggagaagccaaagaagagtaaaacatctggtgcctccaaaacaaagggcaagagcaagctcaacaccatcactcctgtagtgggtaagaagagaaaacgtaatacctcatctgataattcagatgtggaagtcatgcctgcacagtcacctcgagaagatgaagaaagcagcattcagaagagacgctcaaaccgccaagttaagcgaaaaaaatatacagaggacctggatataaagatcacagatgatgaagaagaagaagaggtggatgtaactggtccaataaaacctgagcctatcctccctgaaccagtgcaagaaccagatggcgagactttgccttccatgcagttctttgtggagaatcccagtgaagaagatgcagccattgtagacaaagtgctttctatgcggattgtgaagaaggagctcccttctggacaatatactgaagcagaagaattctttgtcaagtacaagaactactcctatctgcattgtgaatgggctactatctcccaactagagaaggataagaggatacatcaaaaattaaagcgcttcaaaaccaaaatggctcagatgagacacttcttccatgaggatgaagagccctttaatccagactacgtagaggtggataggatattggatgagtctcacagtattgacaaggacaatggggagcccgttatttactacctggtgaaatggtgctctctgccctatgaggatagcacatgggagctaaaagaagatgttgatgagggcaagattcgagaatttaaacggattcagtcaaggcacccagaactcaaaagggtgaatcgtccgcaggcaagtgcctggaagaaattggagctatcacatgaatataaaaacagaaaccagctacgggaatatcagttggaaggggttaattggctgctctttaattggtataacaggcagaactgcatcctggctgatgagatgggattgggcaaaactattcagtccattgccttcttgcaggaagtatataatgtgggcatccatggtcccttcttggtcattgccccactgtccacaattactaactgggagcgagaatttaatacatggacagaaatgaacactattgtgtaccatggcagtctggccagcaggcagatgattcaacagtatgaaatgtactgcaaagattcacggggacgcctcatcccaggcgcatacaagtttgacgctctgatcaccacttttgagatgattttgtcagattgtcctgagcttcgtgaaattgaatggcgttgtgttatcattgatgaagcccatcgactgaaaaaccgtaattgcaagctgcttgatagtctcaagcacatggacctggaacacaaggtgctactcacaggaacaccattgcaaaatactgtagaagaactgtttagcttgcttcatttcttggaaccgtcacaatttccctcagaatcagagtttctcaaggactttggggatctcaagacagaggaacaggttcaaaagctacaggccattcttaagccaatgatgctgagaagactcaaagaggatgttgaaaaaaacttggcacccaaacaggaaacaattattgaagtagagctgactaatatccagaagaaatactatcgggctattttggagaagaatttctccttcctttccaaaggggcaggtcataccaacatgcctaatctacttaacacaatgatggagttgcgcaagtgctgcaaccacccatatctcatcaatggtgctgaagaaaaaatcctaacagaattccgtgaagcttgccatattatacctcatgactttcacctgcaggccatggttcgttcagccggcaaactggttcttattgacaagttgcttccaaagcttaaagctggtggccataaagttctgatcttctctcagatggtgcgctgcctagacatcctagaggattatttaatccagaggaggtacttatatgaacgtattgatgggcgagttagaggcaaccttcgacaggctgccattgaccgcttcagcaagcctgactcagaccgctttgtcttcttactgtgtacccgggctggtggacttggtattaatcttacagctgctgatacctgcatcatctttgattcagactggaatccacaaaatgacctgcaggcccaggcacgatgtcatcgaattgggcagagcaaagctgtgaaggtgtaccgcctcatcactcgtaattcctacgagagagagatgtttgataaggccagcctcaagttggggttggataaggctgtgcttcaatccatgagtggtcgggatggcaacattactggaatccaacagttctctaagaaggagattgaagatcttttaagaaaaggagcatatgcagccatcatggaggaagatgatgaaggctccaagttttgtgaagaggacattgaccagatcttgttaagacgaactacaaccatcaccattgaatctgaaggaaaaggttccacctttgctaaggcaagctttgttgcttctgaaaacaggacagatatttctttggatgaccccaacttttggcaaaagtgggccaaaaaggctgacctagacatggatctgctcaacagcaagaataatttggtaattgacacacctagagtacgaaaacaaacgcgccactttagcactctgaaagatgatgacctggtggaattctctgatttggaaagtgaggatgatgagcggccacgctcccgcagacatgaccgtcatcatgcctatgggcgcactgactgctttcgggtggaaaagcatctcctggtatatggttggggacgatggcgagatattttatctcatggacgcttcaagcgacgtatgactgaacgagatgtggagaccatttgtcgggccattctcgtgtactgtcttctacactaccgtggggatgaaaatattaaaggcttcatctgggacttgattagcccagctgaaaatggcaagacaaaagaattgcagaatcattcaggtctatctatccctgtgcctcgtggacgcaaaggaaaaaaagtaaagtcacaaagcacttttgatatccataaggcagattggatccggaaatataaccctgacactttgttccaagatgaaagttataagaagcacttgaaacatcagtgtaacaaggtactgttgcgggtacgaatgctatactacctgaggcaggaggttattggagaccaagcagaaaaggtgttagggggtgcgattgccagtgagattgacatatggttcccagtagtggatcaactggaggttccaacaacttggtgggacagtgaggctgacaagtcgctgctcattggagtctttaaacatggctatgagaaatataataccatgagggcagacccagccttatgtttcctagaaaaggctggccgaccagatgacaaagcaattgcagcagaacatcgagtgttggataacttctctgacatagtagaaggggttgactttgataaagattgtgaagatcctgaatataaaccactccaaggtcccccaaaggaccaagatgatgagggtgatcccttgatgatgatggatgaggagatctcagtgattgatggagatgaagcccaggtgacccaacagccaggccatttattctggcctccgggctctgccctaacagctaggcttcggcgtctagtaacagcgtatcagcgcagctacaagagagaacaaatgaagatagaggctgcagaacgtggggaccggcgaaggcggcgttgtgaagcagccttcaagctgaaagaaattgcacggcgggagaaacaacaacgatggacaaggcgtgaacaaactgatttttatcgagtggtgtctacgtttggtgtggaatatgaccctgacaccatgcagttccattgggatcgcttccgcacttttgctcgactagacaaaaagacagatgaaagccttaccaagtacttccatggctttgtggccatgtgccgccaagtatgccgccttcccccagcagctggagatgaaccccccgaccctaacctgttcattgagcccatcactgaggagagagcctcacggactctctaccgtatagaattgcttcggcgcttacgggaacaagttttatgccacccccttttggaagatcggctggcattgtgtcagcctcctggtcctgaattgcccaaatggtgggagcctgttcggcatgatggggagcttctaagaggggcagcccgccatggggtgagccaaacagactgcaacatcatgcaggacccagacttctcttttctggctgcccgtatgaattatatgcagaaccatcaagcaggagcaccagctccatccttgtcacgctgctctactccactgctgcaccagcagtatacctcacgcactgcctcaccactgcccctgcgcccagatgctcctgttgaaaagtcacccgaggagacagctacccaggtccccagtctggagagtctgactttaaagctagagcacgaggtggtggccaggagccgaccaaccccacaagactatgagatgcgagtatccccctctgatactacccctctggtttcccggagtgttccaccagtcaaactggaggatgaggatgattcggactctgagctggacttgagcaagctgtcaccatcttcttcttcttcctcatcctcatccagctccagctccagcactgatgagagtgaggatgagaaggaagagaagctaactgaccagtcccgctcaaagctctatgatgaagagagtctcctgtccctcactatgtcccaagatggattcccaaatgaagatggagaacaaatgacccctgagcttctgctactgcaggaaagacaaagagcctctgagtggcccaaggatcgtgtcctgataaaccgtattgacctcgtctgccaggctgtactctcagggaagtggccttctagccgtaggagccaggaaatggtaacaggaggaattttggggccaggcaaccacttgctagacagtccctcattgactcctggagaatatggtgactctccagtccccacaccacgaagtagtagtgcagcttccatggcagaggaggaagcatctgcagtcagcacagcggcagcccagttcaccaaacttcgccgaggcatggatgaaaaggagtttacagttcaaatcaaagatgaggaaggattgaagttaacattccagaagcacaagttgatggcgaatggagtaatgggagatggacatccactgtttcataagaagaaggggaacagaaagaagctagtagagctggaggtggagtgcatggaagagcctaatcaccttgatgtggacctggagacccggatccctgtcatcaataaggtggatggtactttgctggtgggtgaggatgcccctcgccgggctgaactggagatgtggttacagggtcatccagagtttgctgttgatccccgatttctagcgtatatggaggatcgcagaaaacagaagtggcaaagatgtaaaaaaaataataaggcagaattgaactgtttgggaatggaaccagtacagacagctaactctagaaatgggaaaaagggtcatcacactgaaacggtgttcaaccgggttttgccagggcctattgcaccagagagcagcaagaagcgggcccgtaggatgcgaccagacctttctaagatgatggccctcatgcagggtggaagcactgggtctctatctctgcataacacgttccaacacagcagtagtggcctacagtctgtgtcatctttgggtcacagcagtgccacttctgcatctttgccttttatgccatttgtgatgggtggtgcaccatcatcccctcatgtagactccagcaccatgcttcatcaccaccaccaccacccccacccccaccatcaccaccatcaccatccaggcttgagagcccctggctacccctcttcaccagtgactaccgcctctggtactaccttgcggttgccaccactgcaacctgaggaggatgacgatgaggatgaagaagatgatgatgacttatctcagggctatgatagctcagaaagggacttctcactcattgatgatcctatgatgccagctaactcagactccagtgaagatgctgatgactgaagccccagcatgggccccattgcttgggcggctgctgtattttcatttactctggcccttggactatggaaacgtgggaggggcaggggagatgtggggaagtccaggactccaggaggtgaaaaggaaaaaaaaaaaaaaatgtacctgattgctcccaattatgagaggattgggtgggcaggggaactcctaaaataatacatgaccacttcctcatttctggggaaggaaaggagactagagcagctggtgtgctcacccctccctagtcacctccattaaccacagactatgtagcgctggccctagcctctggcagagcctgttcctggccgaactgtggatacagctggagggtcaggaactgttaccttctttccccttggcattaataaatttaagttaatccttttcca

SEQ ID NO: 117741 - DNA, 543 bp, Homo sapiens
  Payload ID: 3005
  Gene Symbol: CHD8
  Gene Name: chromodomain helicase DNA binding protein 8
  ENST ID: ENST00000553283
  CDS Start-End: 249-543
gtgctggagagacagggagaggggcgaaccggccccccacagccactgcaggtaaagccacctctctcctccactggggtgaggcacagctcgttttctccttcagggcttgtcgggcctctcggcctgcagcttccgccctaacattgctcctatcccgggcatccacaccccccaccccccgcatcttcccgtcttggccatccccaccctggagggcacccccgctagctccttacctcaagtgcatgtacctcatttccattttggggtctccagttaccagaaatcttccgcctctgctgtatggaccttactggcaccaaccccggcagtatgagcagggtgaatcgaaacgcatcaccctggtcctccagcagccacagtctggaggtccccaaggacatcggcatgttgtgctagggagtctaccaggcaagatagtgttacagggcaaccagctggcagccctgactcaagccaagaatgcccaagggcagcctgccaaggtagtaactatccagctgcaggtgcagcagccac

SEQ ID NO: 117742 - DNA, 633 bp, Homo sapiens
  Payload ID: 3005
  Gene Symbol: CHD8
  Gene Name: chromodomain helicase DNA binding protein 8
  ENST ID: ENST00000553622
  CDS Start-End: 180-633
gcgcaggaggagggggaactggtgctggagagacagggagaggggcgaaccggccccccacagccactgcagttaccagaaatcttccgcctctgctgtatggaccttactggcaccaaccccggcagtatgagcaggagttccaccatcttcctctgaagacgtagccatcttgctccatgaaggtcacacaagaccccattgaggaagcccttggactgccaagctctctggactccttggatcagatgaaccaggatggtggaggtggtgatgtggggaattcatcagcaagtgaactggtccctccaccagaggaaacagctcccacagaactttccaaagaatccacagctccagctccagaatccataaccttgcatgattataccactcagcctgccagccaggagcagccagcccaacctgtcttacagacatcgacgccaacatcaggacttttgcaagtctccaagagccaggagatcctgagccaagggaatcctttcatgggtgtctctgccacagctgtctcctccagtagtgctggagggcagccacctcagtcagcccctaagattgttatccttaaggccccaccaagctcctcagtcactggtgcccatgtggcac

SEQ ID NO: 117743 - DNA, 679 bp, Homo sapiens
  Payload ID: 3005
  Gene Symbol: CHD8
  Gene Name: chromodomain helicase DNA binding protein 8
  ENST ID: ENST00000553870
  CDS Start-End: 1-679
attgacctcgtctgccaggctgtactctcagggaagtggccttctagccgtaggagccaggaaatggtaacaggaggaattttggggccaggcaaccacttgctagacagtccctcattgactcctggagaatatggtgactctccagtccccacaccacgaagtagtagtgcagcttccatggcagaggaggaagcatctgcagtcagcacagcggcagcccagttcaccaaacttcgccgaggcatggatgaaaaggagtttacagttcaaatcaaagatgaggaaggattgaagttaacattccagaagcacaagttgatggcgaatggagtaatgggagatggacatccactgtttcataagaagaaggggaacagaaagaagctagtagagtatatggaggatcgcagaaaacagaagtggcaaagatgtaaaaaaaataataaggcagaattgaactgtttgggaatggaaccagtacagacagctaactctagaaatgggaaaaagggtcatcacactgaaacggtgttcaaccgggttttgccagggcctattgcaccagagagcagcaagaagcgggcccgtaggatgcgaccagacctttctaagatgatggccctcatgcagggtggaagcactgggtctctatctctgcataacacgttccaacaca

SEQ ID NO: 117744 - DNA, 2617 bp, Homo sapiens
  Payload ID: 3005
  Gene Symbol: CHD8
  Gene Name: chromodomain helicase DNA binding protein 8
  ENST ID: ENST00000555935
  CDS Start-End: 1-2617
taaacggattcagtcaaggcacccagaactcaaaagggtgaatcgtccgcaggcaagtgcctggaagaaattggagctatcacatgaatataaaaacagaaaccagctacgggaatatcagttggaaggggttaattggctgctctttaattggtataacaggcagaactgcatcctggctgatgagatgggattgggcaaaactattcagtccattgccttcttgcaggaagtatataatgtgggcatccatggtcccttcttggtcattgccccactgtccacaattactaactgggagcgagaatttaatacatggacagaaatgaacactattgtgtaccatggcagtctggccagcaggcagatgattcaacagtatgaaatgtactgcaaagattcacggggacgcctcatcccaggcgcatacaagtttgacgctctgatcaccacttttgagatgattttgtcagattgtcctgagcttcgtgaaattgaatggcgttgtgttatcattgatgaagcccatcgactgaaaaaccgtaattgcaagctgcttgatagtctcaagcacatggacctggaacacaaggtgctactcacaggaacaccattgcaaaatactgtagaagaactgtttagcttgcttcatttcttggaaccgtcacaatttccctcagaatcagagtttctcaaggactttggggatctcaagacagaggaacaggttcaaaagctacaggccattcttaagccaatgatgctgagaagactcaaagaggatgttgaaaaaaacttggcacccaaacaggaaacaattattgaagtagagctgactaatatccagaagaaatactatcgggctattttggagaagaatttctccttcctttccaaaggggcaggtcataccaacatgcctaatctacttaacacaatgatggagttgcgcaagtgctgcaaccacccatatctcatcaatggtgctgaagaaaaaatcctaacagaattccgtgaagcttgccatattatacctcatgactttcacctgcaggccatggttcgttcagccggcaaactggttcttattgacaagttgcttccaaagcttaaagctggtggccataaagttctgatcttctctcagatggtgcgctgcctagacatcctagaggattatttaatccagaggaggtacttatatgaacgtattgatgggcgagttagaggcaaccttcgacaggctgccattgaccgcttcagcaagcctgactcagaccgctttgtcttcttactgtgtacccgggctggtggacttggtattaatcttacagctgctgatacctgcatcatctttgattcagactggaatccacaaaatgacctgcaggcccaggcacgatgtcatcgaattgggcagagcaaagctgtgaaggtgtaccgcctcatcactcgtaattcctacgagagagagatgtttgataaggccagcctcaagttggggttggataaggctgtgcttcaatccatgagtggtcgggatggcaacattactggaatccaacagttctctaagaaggagattgaagatcttttaagaaaaggagcatatgcagccatcatggaggaagatgatgaaggctccaagttttgtgaagaggacattgaccagatcttgttaagacgaactacaaccatcaccattgaatctgaaggaaaaggttccacctttgctaaggcaagctttgttgcttctgaaaacaggacagatatttctttggatgaccccaacttttggcaaaagtgggccaaaaaggctgacctagacatggatctgctcaacagcaagaataatttggtaattgacacacctagagtacgaaaacaaacgcgccactttagcactctgaaagatgatgacctggtggaattctctgatttggaaagtgaggatgatgagcggccacgctcccgcagacatgaccgtcatcatgcctatgggcgcactgactgctttcgggtggaaaagcatctcctggtatatggttggggacgatggcgagatattttatctcatggacgcttcaagcgacgtatgactgaacgagatgtggagaccatttgtcgggccattctcgtgtactgtcttctacactaccgtggggatgaaaatattaaaggcttcatctgggacttgattagcccagctgaaaatggcaagacaaaagaattgcagaatcattcagtctttgatgtctcccctttcccaggtctatctatccctgtgcctcgtggacgcaaaggaaaaaaagtaaagtcacaaagcacttttgatatccataaggcagattggatccggaaatataaccctgacactttgttccaagatgaaagttataagaagcacttgaaacatcagtgtaacaaggtactgttgcgggtacgaatgctatactacctgaggcaggaggttattggagaccaagcagaaaaggtgttagggggtgcgattgccagtgagattgacatatggttcccagtagtggatcaactggaggttccaacaacttggtgggacagtgaggctgacaagtcgctgctcattggagtctttaaa

SEQ ID NO: 117745 - DNA, 8137 bp, Homo sapiens
  Payload ID: 3005
  Gene Symbol: CHD8
  Gene Name: chromodomain helicase DNA binding protein 8
  Uniprot ID: Q9HCK8
  ENST ID: ENST00000557364
  CDS Start-End: 265-8010
agggtgagttgaaacgctgcctggaaaggaagtaccaggacttgcacaggagttccaccatcttcctctgaagacgtagccatcttgctccatgaaggtcaggacaatctgacatgcacttgtttcttgcctctatacttgaagagtagtcctcttacattgtgtacatttttttcttaataggggaggggaggggagagccagtaccccccctccccttccctccctagaccttggagaagtaccctccattactttcccaagatggcagaccccatcatggatctgttcgatgacccaaatttatttggcctggactctctgactgatgacagctttaaccaggtcacacaagaccccattgaggaagcccttggactgccaagctctctggactccttggatcagatgaaccaggatggtggaggtggtgatgtggggaattcatcagcaagtgaactggtccctccaccagaggaaacagctcccacagaactttccaaagaatccacagctccagctccagaatccataaccttgcatgattataccactcagcctgccagccaggagcagccagcccaacctgtcttacagacatcgacgccaacatcaggacttttgcaagtctccaagagccaggagatcctgagccaagggaatcctttcatgggtgtctctgccacagctgtctcctccagtagtgctggagggcagccacctcagtcagcccctaagattgttatccttaaggccccaccaagctcctcagtcactggtgcccatgtggcacaaattcaggcccaaggtatcaccagcacagctcagcccctggtggcaggcacagccaatggtggaaaagtcacttttaccaaagtgctaaccggcacaccccttcgaccaggtgtttccattgtctctggtaatacagtgttggccgccaaggtccctgggaaccaggctgctgttcagcgcattgtccagcccagccgaccagtaaagcagctggtcctccagccagttaagggttcagctcctgctggaaaccctggggccacagggcccccactgaagcctgcagttacactgacctctacacctacccagggtgaatcgaaacgcatcaccctggtcctccagcagccacagtctggaggtccccaaggacatcggcatgttgtgctagggagtctaccaggcaagatagtgttacagggcaaccagctggcagccctgactcaagccaagaatgcccaagggcagcctgccaaggtagtaactatccagctgcaggtgcagcagccacagcaaaaaatccagattgtaccacaaccaccatcatcgcagccacagccccagcagccaccctccacccagccagtgactctgtcctctgtacagcaggctcagataatgggaccaggacaaagcccaggacaaagactttcagtaccagtcaaggtggtactgcagccacaggctggctcttcccaaggggcctcttctgggctctctgtagttaaagttctgagtgccagtgaagtggcagctttgtcatcaccagcaagctctgctcctcattcggggggaaagacaggaatggaggaaaaccgcagattggaacaccagaagaagcaagagaaagcaaatcggattgtagcagaggccattgcgagagcccgtgcccgcggtgagcagaacatacctcgagtcttaaatgaggacgagttgcccagcgttcggccagaggaggaaggcgagaagaaacgcaggaagaagagtgctggggagaggctgaaagaggagaagccaaagaagagtaaaacatctggtgcctccaaaacaaagggcaagagcaagctcaacaccatcactcctgtagtgggtaagaagagaaaacgtaatacctcatctgataattcagatgtggaagtcatgcctgcacagtcacctcgagaagatgaagaaagcagcattcagaagagacgctcaaaccgccaagttaagcgaaaaaaatatacagaggacctggatataaagatcacagatgatgaagaagaagaagaggtggatgtaactggtccaataaaacctgagcctatcctccctgaaccagtgcaagaaccagatggcgagactttgccttccatgcagttctttgtggagaatcccagtgaagaagatgcagccattgtagacaaagtgctttctatgcggattgtgaagaaggagctcccttctggacaatatactgaagcagaagaattctttgtcaagtacaagaactactcctatctgcattgtgaatgggctactatctcccaactagagaaggataagaggatacatcaaaaattaaagcgcttcaaaaccaaaatggctcagatgagacacttcttccatgaggatgaagagccctttaatccagactacgtagaggtggataggatattggatgagtctcacagtattgacaaggacaatggggagcccgttatttactacctggtgaaatggtgctctctgccctatgaggatagcacatgggagctaaaagaagatgttgatgagggcaagattcgagaatttaaacggattcagtcaaggcacccagaactcaaaagggtgaatcgtccgcaggcaagtgcctggaagaaattggagctatcacatgaatataaaaacagaaaccagctacgggaatatcagttggaaggggttaattggctgctctttaattggtataacaggcagaactgcatcctggctgatgagatgggattgggcaaaactattcagtccattgccttcttgcaggaagtatataatgtgggcatccatggtcccttcttggtcattgccccactgtccacaattactaactgggagcgagaatttaatacatggacagaaatgaacactattgtgtaccatggcagtctggccagcaggcagatgattcaacagtatgaaatgtactgcaaagattcacggggacgcctcatcccaggcgcatacaagtttgacgctctgatcaccacttttgagatgattttgtcagattgtcctgagcttcgtgaaattgaatggcgttgtgttatcattgatgaagcccatcgactgaaaaaccgtaattgcaagctgcttgatagtctcaagcacatggacctggaacacaaggtgctactcacaggaacaccattgcaaaatactgtagaagaactgtttagcttgcttcatttcttggaaccgtcacaatttccctcagaatcagagtttctcaaggactttggggatctcaagacagaggaacaggttcaaaagctacaggccattcttaagccaatgatgctgagaagactcaaagaggatgttgaaaaaaacttggcacccaaacaggaaacaattattgaagtagagctgactaatatccagaagaaatactatcgggctattttggagaagaatttctccttcctttccaaaggggcaggtcataccaacatgcctaatctacttaacacaatgatggagttgcgcaagtgctgcaaccacccatatctcatcaatggtgctgaagaaaaaatcctaacagaattccgtgaagcttgccatattatacctcatgactttcacctgcaggccatggttcgttcagccggcaaactggttcttattgacaagttgcttccaaagcttaaagctggtggccataaagttctgatcttctctcagatggtgcgctgcctagacatcctagaggattatttaatccagaggaggtacttatatgaacgtattgatgggcgagttagaggcaaccttcgacaggctgccattgaccgcttcagcaagcctgactcagaccgctttgtcttcttactgtgtacccgggctggtggacttggtattaatcttacagctgctgatacctgcatcatctttgattcagactggaatccacaaaatgacctgcaggcccaggcacgatgtcatcgaattgggcagagcaaagctgtgaaggtgtaccgcctcatcactcgtaattcctacgagagagagatgtttgataaggccagcctcaagttggggttggataaggctgtgcttcaatccatgagtggtcgggatggcaacattactggaatccaacagttctctaagaaggagattgaagatcttttaagaaaaggagcatatgcagccatcatggaggaagatgatgaaggctccaagttttgtgaagaggacattgaccagatcttgttaagacgaactacaaccatcaccattgaatctgaaggaaaaggttccacctttgctaaggcaagctttgttgcttctgaaaacaggacagatatttctttggatgaccccaacttttggcaaaagtgggccaaaaaggctgacctagacatggatctgctcaacagcaagaataatttggtaattgacacacctagagtacgaaaacaaacgcgccactttagcactctgaaagatgatgacctggtggaattctctgatttggaaagtgaggatgatgagcggccacgctcccgcagacatgaccgtcatcatgcctatgggcgcactgactgctttcgggtggaaaagcatctcctggtatatggttggggacgatggcgagatattttatctcatggacgcttcaagcgacgtatgactgaacgagatgtggagaccatttgtcgggccattctcgtgtactgtcttctacactaccgtggggatgaaaatattaaaggcttcatctgggacttgattagcccagctgaaaatggcaagacaaaagaattgcagaatcattcaggtctatctatccctgtgcctcgtggacgcaaaggaaaaaaagtaaagtcacaaagcacttttgatatccataaggcagattggatccggaaatataaccctgacactttgttccaagatgaaagttataagaagcacttgaaacatcagtgtaacaaggtactgttgcgggtacgaatgctatactacctgaggcaggaggttattggagaccaagcagaaaaggtgttagggggtgcgattgccagtgagattgacatatggttcccagtagtggatcaactggaggttccaacaacttggtgggacagtgaggctgacaagtcgctgctcattggagtctttaaacatggctatgagaaatataataccatgagggcagacccagccttatgtttcctagaaaaggctggccgaccagatgacaaagcaattgcagcagaacatcgagtgttggataacttctctgacatagtagaaggggttgactttgataaagattgtgaagatcctgaatataaaccactccaaggtcccccaaaggaccaagatgatgagggtgatcccttgatgatgatggatgaggagatctcagtgattgatggagatgaagcccaggtgacccaacagccaggccatttattctggcctccgggctctgccctaacagctaggcttcggcgtctagtaacagcgtatcagcgcagctacaagagagaacaaatgaagatagaggctgcagaacgtggggaccggcgaaggcggcgttgtgaagcagccttcaagctgaaagaaattgcacggcgggagaaacaacaacgatggacaaggcgtgaacaaactgatttttatcgagtggtgtctacgtttggtgtggaatatgaccctgacaccatgcagttccattgggatcgcttccgcacttttgctcgactagacaaaaagacagatgaaagccttaccaagtacttccatggctttgtggccatgtgccgccaagtatgccgccttcccccagcagctggagatgaaccccccgaccctaacctgttcattgagcccatcactgaggagagagcctcacggactctctaccgtatagaattgcttcggcgcttacgggaacaagttttatgccacccccttttggaagatcggctggcattgtgtcagcctcctggtcctgaattgcccaaatggtgggagcctgttcggcatgatggggagcttctaagaggggcagcccgccatggggtgagccaaacagactgcaacatcatgcaggacccagacttctcttttctggctgcccgtatgaattatatgcagaaccatcaagcaggagcaccagctccatccttgtcacgctgctctactccactgctgcaccagcagtatacctcacgcactgcctcaccactgcccctgcgcccagatgctcctgttgaaaagtcacccgaggagacagctacccaggtccccagtctggagagtctgactttaaagctagagcacgaggtggtggccaggagccgaccaaccccacaagactatgagatgcgagtatccccctctgatactacccctctggtttcccggagtgttccaccagtcaaactggaggatgaggatgattcggactctgagctggacttgagcaagctgtcaccatcttcttcttcttcctcatcctcatccagctccagctccagcactgatgagagtgaggatgagaaggaagagaagctaactgaccagtcccgctcaaagctctatgatgaagagagtctcctgtccctcactatgtcccaagatggattcccaaatgaagatggagaacaaatgacccctgagcttctgctactgcaggaaagacaaagagcctctgagtggcccaaggatcgtgtcctgataaaccgtattgacctcgtctgccaggctgtactctcagggaagtggccttctagccgtaggagccaggaaatggtaacaggaggaattttggggccaggcaaccacttgctagacagtccctcattgactcctggagaatatggtgactctccagtccccacaccacgaagtagtagtgcagcttccatggcagaggaggaagcatctgcagtcagcacagcggcagcccagttcaccaaacttcgccgaggcatggatgaaaaggagtttacagttcaaatcaaagatgaggaaggattgaagttaacattccagaagcacaagttgatggcgaatggagtaatgggagatggacatccactgtttcataagaagaaggggaacagaaagaagctagtagagctggaggtggagtgcatggaagagcctaatcaccttgatgtggacctggagacccggatccctgtcatcaataaggtggatggtactttgctggtgggtgaggatgcccctcgccgggctgaactggagatgtggttacagggtcatccagagtttgctgttgatccccgatttctagcgtatatggaggatcgcagaaaacagaagtggcaaagatgtaaaaaaaataataaggcagaattgaactgtttgggaatggaaccagtacagacagctaactctagaaatgggaaaaagggtcatcacactgaaacggtgttcaaccgggttttgccagggcctattgcaccagagagcagcaagaagcgggcccgtaggatgcgaccagacctttctaagatgatggccctcatgcagggtggaagcactgggtctctatctctgcataacacgttccaacacagcagtagtggcctacagtctgtgtcatctttgggtcacagcagtgccacttctgcatctttgccttttatgccatttgtgatgggtggtgcaccatcatcccctcatgtagactccagcaccatgcttcatcaccaccaccaccacccccacccccaccatcaccaccatcaccatccaggcttgagagcccctggctacccctcttcaccagtgactaccgcctctggtactaccttgcggttgccaccactgcaacctgaggaggatgacgatgaggatgaagaagatgatgatgacttatctcagggctatgatagctcagaaagggacttctcactcattgatgatcctatgatgccagctaactcagactccagtgaagatgctgatgactgaagccccagcatgggccccattgcttgggcggctgctgtattttcatttactctggcccttggactatggaaacgtgggaggggcaggggagatgtggggaagtccaggactccaggaggtgaaaagg

SEQ ID NO: 117746 - DNA, 11337 bp, Homo sapiens
  Payload ID: 3006
  Gene Symbol: CHD9
  Gene Name: chromodomain helicase DNA binding protein 9
  Uniprot ID: Q3L8U1
  ENST ID: ENST00000398510
  CDS Start-End: 88-8781
cggaaatgatccaataatatctactatagagaagctgaatatactccatttggagtgaacagcccggattgttacagaattttcaagatgacagatccaatgatggacttttttgatgatgccaatctttttggtgagaccttagaaggtttgtcagatgatgcatttgtacaaccaggacctgtttcactagttgatgaattgaatttgggtgcagaatttgaaccgttgcacatagattcactgaaccatgttcaaggtactccaacacatcagaagatgactgattttgaacagttaaatcaatttgattcaataaaatttcaccatgttaatcaatcttttggtagcccagctgaacatgtgttatctccacactctcagtttaattgttctccaatccatccccaaaaccaacccaatggtttgtttccagatgtatcagatggcagtccaatgtggggccatcagacagctactaccatttcaaatcaaaatggatctccttttcaccaacaaggacattcacactctatgcatcaaaataaaagctttgtggcacaccatgactttgccttatttcaggccaatgaacaacaaacacagtgtacttcactacgctcacaacaaaacagaaataatctcaacccagggcagaattctcttagccagtctaaaaattttatgaatgtttctggtccacatagagtcaatgttaaccacccaccacagatgactaatgcatctaattcacaacagtctatttcaatgcagcaattttctcaaacgtcaaatccttcagcacacttccacaagtgtagcagtcatcaagaaggaaattttaatggaccttccccaaatatgacttcttgttctgtcagtaattcacagcaattttcttcacattattccttttccagtaatcatatatcaccaaacagtctacttcagtcctctgcagttcttgcatctaatcatacaaatcagactttatctgattttactggaagtaattccttttcacctcatagaggaatcaagcaagaatctactcagcatatcctaaaccccaatacatcattgaattcaaataatttccaaatattgcattcatcacatcctcagggtaattatagcaattcaaaattatctcctgtgcacatgaacttcccagatcctgttgactcaggaactcaaatgggccatttcaatgatcatgtagaaactaatggcttttcatctttagaagagaatttacttcatcaagtggaatctcaaactgagccattcacaggacttgaccccgaggacctccttcaggagggtcttcttcctcactttgatgagtcaacattcggacaagataattcaagtcacattttagatcatgaccttgatcggcagtttacttcgcatctggtaacacggccttctgatatggctcagactcagttgcaaagtcaggctcggagttggcattcatcattttctaatcatcagcatttacatgacagaaatcacctatgtttacagcgacagcctccatcttccaagaagagcgatggttctgggacatatactaagttgcagaatacccaggtgagggtcatgtctgagaagaagcagagaaaaaaggtggaatcagaaagcaagcaagaaaaggctaatcgtataatatcagaggccatagcaaaagcaaaggagcgtggggaacgcaatattccacgagtaatgagccctgaaaactttcctactgcttcagttgaaggaaaagaggaaaagaaaggtagaaggatgaaatccaagccaaaggacaaagacagcaaaaaaacaaaaacatgttctaagttaaaagagaagacaaaaattggcaaactcattattacattgggtaagaaacaaaaaagaaagaatgagtcttcagatgaaatatctgatgcagaacagatgccacagcatacattaaaagatcaagactctcaaaaaagaagatcaaatcgacaaattaaaagaaaaaaatacgcagaagatatagaagggaagcaatctgaagaagaggttaaaggttctatgaaaataaaaaagaattcagctcctttacctggtgaacagcctttacaattgtttgtggagaatccgagtgaagaagatgctgcaattgtagacaaaattctatcttctagaaccgtaaaaaaggaaatatcacctggagtgatgattgatacagaagaattttttgtaaaatacaagaattactcctatcttcactgtgagtgggccacagaagagcagcttttgaaagataaaaggatccagcagaaaatcaaacgattcaaattgagacaagcacaaagagcacatttttttgcagacatggaagaagaaccatttaacccagactacgttgaagtagacagagtattagaagtctctttttgtgaagataaggatactggtgagcctgttatttactacttagtaaaatggtgctcattgccatatgaagatagtacttgggaactaaaagaagatgtagatcttgcaaaaatagaagagtttgaacaactgcaagcttcaaggcctgacacaagacgtttggaccgtcctccttctaatatttggaagaaaatagatcaatccagggactataaaaatggcaatcaactcagggaatatcaactggaaggactcaactggctcttgttcaattggtacaatagacgaaactgcatcttagcagatgaaatgggtcttggcaaaactattcaatcaattacattcctctatgaaatccttctgactggtataagaggacctttcctgattattgctccactttctactattgcaaactgggagagagaatttcgtacgtggactgatattaacgttgtggtttatcatgggagcctgattagcagacaaatgatacagcaatacgagatgtacttcagggattcacaggggcgtatcattcgaggagcttacagattccaagccatcatcaccacttttgaaatgattcttggaggctgtggagagcttaatgcaattgaatggcgatgtgtgattattgatgaagcacataggttaaaaaataaaaattgtaaactcttagagggcctgaaactcatgaatctggaacacaaggtgcttttgactggcacccctctccaaaatacagttgaagaactatttagtcttcttcactttcttgaacccttaaggtttccttctgaatcaacatttatgcaagaatttggggatctgaaaacagaggaacaggtacagaaacttcaggctatcctgaaaccaatgatgttgagacgattaaaagaagatgtggaaaagaagttggcacctaaagaagaaaccatcattgaagtagaacttactaatattcaaaagaaatactaccgggctatcttggaaaagaacttttcttttttatccaaaggagcaggacaaactaatgtacctaacttggtcaataccatgatggagctcaggaaatgttgtaatcatccatatcttataaaaggtgctgaggagaaaatacttggagaatttagagatacttacaatccagctgcttctgattttcatcttcaagcaatgatccagtctgctggtaaattggtccttattgataaattgcttcccaaaatgaaagccggaggtcataaagtgctcatcttctctcaaatggttcgttgccttgacattctggaggactatctcatacataaaagatacttatatgagcgaattgatggcagagtcagaggaaatcttcggcaagctgctatagatagatttagtaaacctgattcagatagatttgtttttctcctgtgtacccgagctggtgggttgggcatcaacttaactgcagctgatacatgtataatttttgattctgattggaatcctcagaatgatcttcaggcccaagctcgttgccacagaattggtcagaacaaagcagttaaagtctacagactggtaactcgtaactcatatgagagagagatgtttgaccgagccagtttgaaactgggcctagataaagctgtgttacagagcatgagtggaagagaaagtaatgttggtggtattcagcagctttccaaaaaggaaatagaagatctgcttcgaagaggtgcttatggtgctattatggaggaagaagatgaaggctctaaattctgcgaagaggatatcgatcagattttactacgtcgtacaaaaactattacaattgaatcagaaggacgtgggtcaacatttgccaaggcgagttttgtggcatctggaaaccggacagatatttctttagatgatcccaacttctggcaaaaatgggctaaaaaggcagaaatagatatagaggccatcagtggcagaaacagcttggttattgacactccaagaattaggaagcaaacaagaccttttagtgccacaaaagatgaattggctgaattatctgaagctgaaagtgaaggagatgaaaagcccaaactccggagaccctgtgaccgttccaatggctatggaagaactgaatgctttagagttgagaaaaacctgctagtttatgggtggggccgatggagagagattctatctcatggccgtttcaaaaggcagctaaatgaacacgatgtagagataatttgccgagctctcttagcatattgccttgttcactaccgaggagatgagaagattaaaggtttcatatgggatctcattactccaactgaagatggacagacacgagagctacagaatcatctaggcctatcagctcctgtacccaggggtcgaaaagggaagaaagtaaaaactcaaacaagctcatttgatatacaaaaagcagaatggcttcgaaaatataatcccgagcagctccttcaagatgaaggctacaaaaaacatataaaacaccactgtaataaggttttgcttcgtgtgagaatgctgtattatctaaagcaagaagttattggaaatgagtgtcagaaagtatttgatggagttgatgcaagtgacattgatgtttgggtaccagaaccagaccactcagaagttcctgctgagtggtgggattttgatgctgataagtcactccttattggagtttttaaacatggatatgaaaaatataacactattcgagcagacccagcattatgcttcttggaaagagtgggaaaacctgatgagaaagcagttgctgctgaacagagagcgaatgattatatggatggggatgtggaagatccagaatacaaacctgccccagccatctttaaagatgatatagaggatgatgtttcctcaccaggagatcttgttatagcagatggagatggtcaactgatggagggtgataaagtatattggcctactcaatcagctttaaccacacgtttgaggcgtctcatcactgcataccagcgtactaataaaaacagacaaattcagcagatacaaccgactttctcggtgcctaccagtgtaatgcagcctatttatgaggaagccactcttaatcctaaaatggcagccaagatagaaagacagcaaagatggacaagaagagaagaagctgacttttatagggttgtatctacatttggagtggtttttgaccctgacagaggccaatttgattggacaaaatttagagctatggctaggctacataagaaaactgatgatagtttggaaaaatatttgtacgcattcatgtccatgtgtcggagggtttgtcgtcttccttccaaagaagaattggtggatccaaatatttttatccagcccatcacagaagaacgtgcttctaggactttgtatcgcattgaacttctaaggaaagtacgggaacaggcccttcgacatccacagttgtttgaacgcttgaagctttgccatccaaatccagatttaccagtctggtgggaatgtggccctcatgatagggatttgcttattggtgctgccaaacacggggtgagccgaacagactatcacattcttcgtgatcctgaactctcatttatggcagctcagaggaactacagtcaaagtaagatggctcattcaaggacttctaccccacttctacagcaatatcaagtagcactttctgcttctcctcttacctctctacctaggctcctagatgctaaaggtattattctagaggagatgaaagttaaaagtgaaaaccttaaagaggagcctcagtcttctgaagaagaatctatgtcttctgtggaaaccaggacactaataaaatctgagcctgtaagtccaaagaatggtgttttaccacaggctactggagaccagaaatctggtggaaaatgtgaaacagacagacgcatggttgcagccagaacagaacccctaactccaaacccagcttctaagaaaccaagagtccacaaaaggggatcagaatctagttctgattctgactcagattctgagagatcatcttgttcttccagatcatcttcttcctcatcatcctcttcttgctcccactctcgatcaggctctagttcttcttcatcttcatcttgttcttcagcatcttcttcatcctcttcctccacctcttcctcctcctcctcctcttcatcttcatcagaagaaagtgacagtgatgaagaagaagcccaaaaacgagaaagtactactcacatgaaagcctatgatgaagaaagcgtcgcgtcactgagcactacccaggatgagactcaggatagttttcagatgaacaatgggacaccagagtctgcttatatcttacaaggtggatatatgctggcagcctcgtattggccaaaggatcgtgtgatgatcaataggttggacagtatttgtcaaacagttctgaaaggaaagtggccttcagctagaagaagttatgatgctaacacagtggcttctttctataccacaaaactgctggacagccctggagcagctacagaatacagcgatcccagtgtacccactcccccaggtgccggtgttaaagaagaacatgatcagtcaacacagatgtcaaaggtgaagaagcatgtacgagaaaaggagtttacagtgaaaatcaaagacgaaggtggtttgaagttgacatttcagaagcaagggcttgctcagaaaagaccatttgatggtgaagacggtgctctggggcagcagcagtacctcactcggcttcgagagcttcaaagtgcatcagagaccagcctcgtcaatttcccaaaatccataccagtatcaggtacttccattcaaccaacccttggtgccaatggtgtgatattagacaaccagcctatagtcaaaaaaaggcgaggaaggaggaagaatgtagaaggtgttgacatcttcttttttaacagaaataaaccacctaatcatgtttctttaggcttaacctcctcacagatttccacagggataaatccagcactatcctatactcaacctcaaggaattcctgatacagaaagtccagttccagttattaatcttaaagatggaacgagacttgcaggagatgatgcaccaaagagaaaggatttggaaaaatggcttaaggagcacccgggttatgtggaagatttgggagcttttattcctagaatgcagcttcatgagggaagacccaaacaaaaaagacaccgttgcagaaaccccaataaactagatgtgaatagtctcactggagaagaacgtgttcaactgattaacagaagaaatgctagaaaggttggaggtgcatttgctccccctttgaaagatttatgtagattcctaaaagaaaattcagaatatggagtagctcctgaatggggagatgttgttaagcaatctggatttcttccagaaagcatgtatgaacgtattctcactggtcccgttgtgagagaggaagtaagcaggcgggggagacggcctaaaagtggaattgcaaaggccacagcagcagcagctgctgcatctgccaccagtgtttcaggcaatcctttgttagccaatggactacttccaggtgtggatctcacaactcttcaggccttacaacaaaacctacaaaacttgcagtcactgcaagtaactgctgggttgatgggaatgcctaccggccttccttctggaggagaagctaaaaacatggctgctatgttccccatgctgctgtcaggaatggctggattaccaaatctgttgggcatgggaggactcctgacaaagcctacggaatctgggacagaagacaaaaagggaagtgactctaaggagtcagaaggaaaaacagaaaggacagagagccaaagttcagagaatggtggagaaaactctgtgtcaagttctccttccacatcctctactgctgcattaaatacagctgcagctgccaacccattagctcttaacccactattactatctaatatactttatccagggatgcttctcactccaggccttaatcttcatattccaactttgtcccagtccaatacttttgatgtacaaaacaaaaacagtgacttaggctcgtctaagtctgtagaagtaaaagaagaagattccagaattaaagatcaggaagacaaaggaggaactgaaccaagtcctctcaatgaaaacagcacagatgagggttcagagaaagctgatgcttcatctggatctgatagtacatcgtcgtcatctgaggattcagattctagtaatgaagactgattcccagactctgcacttaaaatatgaactgattttggattttttctttaataattaattgtaaataccccagtgttgagtgcatcaataacttactgaccgaacatttcagttatttgtttagaagtgcaaactgctttcagagactttttgcatgtaatatttcttaagattcataagtttctgaactcgtatgtactatcaaatacataaaggtgtaaaattacaacaaaaggcattataattttgttgggggttaattttatgaaaattatgctcaataagagttgtatatttaatatatttgcagtgaacacagaatactttatgcatattactgatttaatttgaatatagttttacagcctccttgacacctataatttacagatcaaaactcagcaataatttgggcagctaatgaatgtcatgaaagctgtagaatctacatcaccatccattgctttaattacatgaaaatgctctagtgttgtgatgcactgctgatgtttccaattcaggtacaagtatgttttaaagaagaaataagtttcccaatcagccaatttaactggctacctgttacctcagctgagttagtttaggaagtttacattcgtttctaattctatacttgttttcaggggttttttaaacacatcctatatatcatgtcaatctggcaagaaatatgacttgctttttgctgagcttaattcagatatcagtaaaattaagtcataaaataatcatgtgtcatgtgactttggcaccctatagacatacttagttttaacttttcaaagtttggcctcctattagaaataatcatgtctcagatgagtaatgtctgtttccagggttcagaaaaggcaaactcatgaaatgccactgaaaagaactttcaacacagcatacttcatgtaaaagaaattgtttgtttgctttctttgtgtagatttctatttgtgttttatgtcatggaaatattccagaattaacagataatagtggtaaagtaatatgcagatagtctaaattcattttgagtttctaggtgtaagcagactaaatgttgcccagaatcagtgttgggttatcagtttatattaaatatactgagttgcccgttttgaaaatgcactttgaataatctcaaaaagatgtacaagttatacctgtaaaccacaaaagtgaagcctgaggcttctgttcaatttcatagactcctttaccatgtaaaatttgtctgatatttgatttgtgatacaatttctcctgctaaagctgctattattctgacaaggtagaggtccaggttcacctttatatatatttaaaacaattagtactgaattggacataaaaatattgacattctaaggagagatatatgttagcatttttctggtactcaaataagttagtagtaaagtctgcaagggcataaatttagggggaaaaagtgtcccagttctctcctacagaaaaaatactttcagtatgttttgataaaactgttgctttgtcatgagttagtcaattgtatcaggttttccaagacctttaccagtaaattatgtttctgtatgtaaaataaccccttattagagagacagtgttatatgtatttacaaaattatataagttccattgggattgtattgattttgtattttcccaaaatagtactttgaattgatagtcctttatgcaatgtcttagcaatagtctctataatgcccatccaggagaagtgggtagtaattcttcatcatgaaaatgatatattacatatttagtatcttccctttgcagtattgcacttttgtttaactagaatacacctatgagatagccaaagtttcaaacacagttatcttagtttaccggtggagtatttcaacaccaaccacatttcccttcctccctctaattctacccacatgatctttattccttcctttcgccaattaaaaaaaaaaaaaaggaaaaaaaatctgtagatcttgtcactaaaatctaatttatatcaaatttatgagagaaagtattttcctaattatggtcaaataaatttggttaacatcctagtgattctctttctatataataaggcaattacagttttcaaagcattaagtctaacataactttaaacattctcttaggtttcaagacacttctatttaatattcattggggaaaagttgtccagctatcagctaagaaaacacatgcaaatatggttgtgtaaagttaagggttataaggaaaaaaaaatcagtagaattacataatactaaagttgcagttgaaagaatatccaagtatgtgttggtagttactaaaagaattatagctgttattgccttgtatttatagcccttgtttcaggttttatgattcaagtcttagtccaatctttcttttggacatttgcaatatttaccagttgtgttttgtgtagtctgaatttgctttctgtagttgagcaaacgtcttaaaaagtcatttgtaatttattaaattactttctatgatgttctatagagc

SEQ ID NO: 117747 - DNA, 11509 bp, Homo sapiens
  Payload ID: 3006
  Gene Symbol: CHD9
  Gene Name: chromodomain helicase DNA binding protein 9
  Uniprot ID: Q3L8U1
  ENST ID: ENST00000447540
  CDS Start-End: 210-8903
gagtcccaggattccggggactggagggcagcgccggcagccaaggattttgacacttcatgacatgtcattatttagagcaataatgaatattgacctgttttggattagttgatgaccttcggaaatgatccaataatatctactatagagaagctgaatatactccatttggagtgaacagcccggattgttacagaattttcaagatgacagatccaatgatggacttttttgatgatgccaatctttttggtgagaccttagaaggtttgtcagatgatgcatttgtacaaccaggacctgtttcactagttgatgaattgaatttgggtgcagaatttgaaccgttgcacatagattcactgaaccatgttcaaggtactccaacacatcagaagatgactgattttgaacagttaaatcaatttgattcaataaaatttcaccatgttaatcaatcttttggtagcccagctgaacatgtgttatctccacactctcagtttaattgttctccaatccatccccaaaaccaacccaatggtttgtttccagatgtatcagatggcagtccaatgtggggccatcagacagctactaccatttcaaatcaaaatggatctccttttcaccaacaaggacattcacactctatgcatcaaaataaaagctttgtggcacaccatgactttgccttatttcaggccaatgaacaacaaacacagtgtacttcactacgctcacaacaaaacagaaataatctcaacccagggcagaattctcttagccagtctaaaaattttatgaatgtttctggtccacatagagtcaatgttaaccacccaccacagatgactaatgcatctaattcacaacagtctatttcaatgcagcaattttctcaaacgtcaaatccttcagcacacttccacaagtgtagcagtcatcaagaaggaaattttaatggaccttccccaaatatgacttcttgttctgtcagtaattcacagcaattttcttcacattattccttttccagtaatcatatatcaccaaacagtctacttcagtcctctgcagttcttgcatctaatcatacaaatcagactttatctgattttactggaagtaattccttttcacctcatagaggaatcaagcaagaatctactcagcatatcctaaaccccaatacatcattgaattcaaataatttccaaatattgcattcatcacatcctcagggtaattatagcaattcaaaattatctcctgtgcacatgaacttcccagatcctgttgactcaggaactcaaatgggccatttcaatgatcatgtagaaactaatggcttttcatctttagaagagaatttacttcatcaagtggaatctcaaactgagccattcacaggacttgaccccgaggacctccttcaggagggtcttcttcctcactttgatgagtcaacattcggacaagataattcaagtcacattttagatcatgaccttgatcggcagtttacttcgcatctggtaacacggccttctgatatggctcagactcagttgcaaagtcaggctcggagttggcattcatcattttctaatcatcagcatttacatgacagaaatcacctatgtttacagcgacagcctccatcttccaagaagagcgatggttctgggacatatactaagttgcagaatacccaggtgagggtcatgtctgagaagaagcagagaaaaaaggtggaatcagaaagcaagcaagaaaaggctaatcgtataatatcagaggccatagcaaaagcaaaggagcgtggggaacgcaatattccacgagtaatgagccctgaaaactttcctactgcttcagttgaaggaaaagaggaaaagaaaggtagaaggatgaaatccaagccaaaggacaaagacagcaaaaaaacaaaaacatgttctaagttaaaagagaagacaaaaattggcaaactcattattacattgggtaagaaacaaaaaagaaagaatgagtcttcagatgaaatatctgatgcagaacagatgccacagcatacattaaaagatcaagactctcaaaaaagaagatcaaatcgacaaattaaaagaaaaaaatacgcagaagatatagaagggaagcaatctgaagaagaggttaaaggttctatgaaaataaaaaagaattcagctcctttacctggtgaacagcctttacaattgtttgtggagaatccgagtgaagaagatgctgcaattgtagacaaaattctatcttctagaaccgtaaaaaaggaaatatcacctggagtgatgattgatacagaagaattttttgtaaaatacaagaattactcctatcttcactgtgagtgggccacagaagagcagcttttgaaagataaaaggatccagcagaaaatcaaacgattcaaattgagacaagcacaaagagcacatttttttgcagacatggaagaagaaccatttaacccagactacgttgaagtagacagagtattagaagtctctttttgtgaagataaggatactggtgagcctgttatttactacttagtaaaatggtgctcattgccatatgaagatagtacttgggaactaaaagaagatgtagatcttgcaaaaatagaagagtttgaacaactgcaagcttcaaggcctgacacaagacgtttggaccgtcctccttctaatatttggaagaaaatagatcaatccagggactataaaaatggcaatcaactcagggaatatcaactggaaggactcaactggctcttgttcaattggtacaatagacgaaactgcatcttagcagatgaaatgggtcttggcaaaactattcaatcaattacattcctctatgaaatccttctgactggtataagaggacctttcctgattattgctccactttctactattgcaaactgggagagagaatttcgtacgtggactgatattaacgttgtggtttatcatgggagcctgattagcagacaaatgatacagcaatacgagatgtacttcagggattcacaggggcgtatcattcgaggagcttacagattccaagccatcatcaccacttttgaaatgattcttggaggctgtggagagcttaatgcaattgaatggcgatgtgtgattattgatgaagcacataggttaaaaaataaaaattgtaaactcttagagggcctgaaactcatgaatctggaacacaaggtgcttttgactggcacccctctccaaaatacagttgaagaactatttagtcttcttcactttcttgaacccttaaggtttccttctgaatcaacatttatgcaagaatttggggatctgaaaacagaggaacaggtacagaaacttcaggctatcctgaaaccaatgatgttgagacgattaaaagaagatgtggaaaagaagttggcacctaaagaagaaaccatcattgaagtagaacttactaatattcaaaagaaatactaccgggctatcttggaaaagaacttttcttttttatccaaaggagcaggacaaactaatgtacctaacttggtcaataccatgatggagctcaggaaatgttgtaatcatccatatcttataaaaggtgctgaggagaaaatacttggagaatttagagatacttacaatccagctgcttctgattttcatcttcaagcaatgatccagtctgctggtaaattggtccttattgataaattgcttcccaaaatgaaagccggaggtcataaagtgctcatcttctctcaaatggttcgttgccttgacattctggaggactatctcatacataaaagatacttatatgagcgaattgatggcagagtcagaggaaatcttcggcaagctgctatagatagatttagtaaacctgattcagatagatttgtttttctcctgtgtacccgagctggtgggttgggcatcaacttaactgcagctgatacatgtataatttttgattctgattggaatcctcagaatgatcttcaggcccaagctcgttgccacagaattggtcagaacaaagcagttaaagtctacagactggtaactcgtaactcatatgagagagagatgtttgaccgagccagtttgaaactgggcctagataaagctgtgttacagagcatgagtggaagagaaagtaatgttggtggtattcagcagctttccaaaaaggaaatagaagatctgcttcgaagaggtgcttatggtgctattatggaggaagaagatgaaggctctaaattctgcgaagaggatatcgatcagattttactacgtcgtacaaaaactattacaattgaatcagaaggacgtgggtcaacatttgccaaggcgagttttgtggcatctggaaaccggacagatatttctttagatgatcccaacttctggcaaaaatgggctaaaaaggcagaaatagatatagaggccatcagtggcagaaacagcttggttattgacactccaagaattaggaagcaaacaagaccttttagtgccacaaaagatgaattggctgaattatctgaagctgaaagtgaaggagatgaaaagcccaaactccggagaccctgtgaccgttccaatggctatggaagaactgaatgctttagagttgagaaaaacctgctagtttatgggtggggccgatggagagagattctatctcatggccgtttcaaaaggcagctaaatgaacacgatgtagagataatttgccgagctctcttagcatattgccttgttcactaccgaggagatgagaagattaaaggtttcatatgggatctcattactccaactgaagatggacagacacgagagctacagaatcatctaggcctatcagctcctgtacccaggggtcgaaaagggaagaaagtaaaaactcaaacaagctcatttgatatacaaaaagcagaatggcttcgaaaatataatcccgagcagctccttcaagatgaaggctacaaaaaacatataaaacaccactgtaataaggttttgcttcgtgtgagaatgctgtattatctaaagcaagaagttattggaaatgagtgtcagaaagtatttgatggagttgatgcaagtgacattgatgtttgggtaccagaaccagaccactcagaagttcctgctgagtggtgggattttgatgctgataagtcactccttattggagtttttaaacatggatatgaaaaatataacactattcgagcagacccagcattatgcttcttggaaagagtgggaaaacctgatgagaaagcagttgctgctgaacagagagcgaatgattatatggatggggatgtggaagatccagaatacaaacctgccccagccatctttaaagatgatatagaggatgatgtttcctcaccaggagatcttgttatagcagatggagatggtcaactgatggagggtgataaagtatattggcctactcaatcagctttaaccacacgtttgaggcgtctcatcactgcataccagcgtactaataaaaacagacaaattcagcagatacaaccgactttctcggtgcctaccagtgtaatgcagcctatttatgaggaagccactcttaatcctaaaatggcagccaagatagaaagacagcaaagatggacaagaagagaagaagctgacttttatagggttgtatctacatttggagtggtttttgaccctgacagaggccaatttgattggacaaaatttagagctatggctaggctacataagaaaactgatgatagtttggaaaaatatttgtacgcattcatgtccatgtgtcggagggtttgtcgtcttccttccaaagaagaattggtggatccaaatatttttatccagcccatcacagaagaacgtgcttctaggactttgtatcgcattgaacttctaaggaaagtacgggaacaggcccttcgacatccacagttgtttgaacgcttgaagctttgccatccaaatccagatttaccagtctggtgggaatgtggccctcatgatagggatttgcttattggtgctgccaaacacggggtgagccgaacagactatcacattcttcgtgatcctgaactctcatttatggcagctcagaggaactacagtcaaagtaagatggctcattcaaggacttctaccccacttctacagcaatatcaagtagcactttctgcttctcctcttacctctctacctaggctcctagatgctaaaggtattattctagaggagatgaaagttaaaagtgaaaaccttaaagaggagcctcagtcttctgaagaagaatctatgtcttctgtggaaaccaggacactaataaaatctgagcctgtaagtccaaagaatggtgttttaccacaggctactggagaccagaaatctggtggaaaatgtgaaacagacagacgcatggttgcagccagaacagaacccctaactccaaacccagcttctaagaaaccaagagtccacaaaaggggatcagaatctagttctgattctgactcagattctgagagatcatcttgttcttccagatcatcttcttcctcatcatcctcttcttgctcccactctcgatcaggctctagttcttcttcatcttcatcttgttcttcagcatcttcttcatcctcttcctccacctcttcctcctcctcctcctcttcatcttcatcagaagaaagtgacagtgatgaagaagaagcccaaaaacgagaaagtactactcacatgaaagcctatgatgaagaaagcgtcgcgtcactgagcactacccaggatgagactcaggatagttttcagatgaacaatgggacaccagagtctgcttatatcttacaaggtggatatatgctggcagcctcgtattggccaaaggatcgtgtgatgatcaataggttggacagtatttgtcaaacagttctgaaaggaaagtggccttcagctagaagaagttatgatgctaacacagtggcttctttctataccacaaaactgctggacagccctggagcagctacagaatacagcgatcccagtgtacccactcccccaggtgccggtgttaaagaagaacatgatcagtcaacacagatgtcaaaggtgaagaagcatgtacgagaaaaggagtttacagtgaaaatcaaagacgaaggtggtttgaagttgacatttcagaagcaagggcttgctcagaaaagaccatttgatggtgaagacggtgctctggggcagcagcagtacctcactcggcttcgagagcttcaaagtgcatcagagaccagcctcgtcaatttcccaaaatccataccagtatcaggtacttccattcaaccaacccttggtgccaatggtgtgatattagacaaccagcctatagtcaaaaaaaggcgaggaaggaggaagaatgtagaaggtgttgacatcttcttttttaacagaaataaaccacctaatcatgtttctttaggcttaacctcctcacagatttccacagggataaatccagcactatcctatactcaacctcaaggaattcctgatacagaaagtccagttccagttattaatcttaaagatggaacgagacttgcaggagatgatgcaccaaagagaaaggatttggaaaaatggcttaaggagcacccgggttatgtggaagatttgggagcttttattcctagaatgcagcttcatgagggaagacccaaacaaaaaagacaccgttgcagaaaccccaataaactagatgtgaatagtctcactggagaagaacgtgttcaactgattaacagaagaaatgctagaaaggttggaggtgcatttgctccccctttgaaagatttatgtagattcctaaaagaaaattcagaatatggagtagctcctgaatggggagatgttgttaagcaatctggatttcttccagaaagcatgtatgaacgtattctcactggtcccgttgtgagagaggaagtaagcaggcgggggagacggcctaaaagtggaattgcaaaggccacagcagcagcagctgctgcatctgccaccagtgtttcaggcaatcctttgttagccaatggactacttccaggtgtggatctcacaactcttcaggccttacaacaaaacctacaaaacttgcagtcactgcaagtaactgctgggttgatgggaatgcctaccggccttccttctggaggagaagctaaaaacatggctgctatgttccccatgctgctgtcaggaatggctggattaccaaatctgttgggcatgggaggactcctgacaaagcctacggaatctgggacagaagacaaaaagggaagtgactctaaggagtcagaaggaaaaacagaaaggacagagagccaaagttcagagaatggtggagaaaactctgtgtcaagttctccttccacatcctctactgctgcattaaatacagctgcagctgccaacccattagctcttaacccactattactatctaatatactttatccagggatgcttctcactccaggccttaatcttcatattccaactttgtcccagtccaatacttttgatgtacaaaacaaaaacagtgacttaggctcgtctaagtctgtagaagtaaaagaagaagattccagaattaaagatcaggaagacaaaggaggaactgaaccaagtcctctcaatgaaaacagcacagatgagggttcagagaaagctgatgcttcatctggatctgatagtacatcgtcgtcatctgaggattcagattctagtaatgaagactgattcccagactctgcacttaaaatatgaactgattttggattttttctttaataattaattgtaaataccccagtgttgagtgcatcaataacttactgaccgaacatttcagttatttgtttagaagtgcaaactgctttcagagactttttgcatgtaatatttcttaagattcataagtttctgaactcgtatgtactatcaaatacataaaggtgtaaaattacaacaaaaggcattataattttgttgggggttaattttatgaaaattatgctcaataagagttgtatatttaatatatttgcagtgaacacagaatactttatgcatattactgatttaatttgaatatagttttacagcctccttgacacctataatttacagatcaaaactcagcaataatttgggcagctaatgaatgtcatgaaagctgtagaatctacatcaccatccattgctttaattacatgaaaatgctctagtgttgtgatgcactgctgatgtttccaattcaggtacaagtatgttttaaagaagaaataagtttcccaatcagccaatttaactggctacctgttacctcagctgagttagtttaggaagtttacattcgtttctaattctatacttgttttcaggggttttttaaacacatcctatatatcatgtcaatctggcaagaaatatgacttgctttttgctgagcttaattcagatatcagtaaaattaagtcataaaataatcatgtgtcatgtgactttggcaccctatagacatacttagttttaacttttcaaagtttggcctcctattagaaataatcatgtctcagatgagtaatgtctgtttccagggttcagaaaaggcaaactcatgaaatgccactgaaaagaactttcaacacagcatacttcatgtaaaagaaattgtttgtttgctttctttgtgtagatttctatttgtgttttatgtcatggaaatattccagaattaacagataatagtggtaaagtaatatgcagatagtctaaattcattttgagtttctaggtgtaagcagactaaatgttgcccagaatcagtgttgggttatcagtttatattaaatatactgagttgcccgttttgaaaatgcactttgaataatctcaaaaagatgtacaagttatacctgtaaaccacaaaagtgaagcctgaggcttctgttcaatttcatagactcctttaccatgtaaaatttgtctgatatttgatttgtgatacaatttctcctgctaaagctgctattattctgacaaggtagaggtccaggttcacctttatatatatttaaaacaattagtactgaattggacataaaaatattgacattctaaggagagatatatgttagcatttttctggtactcaaataagttagtagtaaagtctgcaagggcataaatttagggggaaaaagtgtcccagttctctcctacagaaaaaatactttcagtatgttttgataaaactgttgctttgtcatgagttagtcaattgtatcaggttttccaagacctttaccagtaaattatgtttctgtatgtaaaataaccccttattagagagacagtgttatatgtatttacaaaattatataagttccattgggattgtattgattttgtattttcccaaaatagtactttgaattgatagtcctttatgcaatgtcttagcaatagtctctataatgcccatccaggagaagtgggtagtaattcttcatcatgaaaatgatatattacatatttagtatcttccctttgcagtattgcacttttgtttaactagaatacacctatgagatagccaaagtttcaaacacagttatcttagtttaccggtggagtatttcaacaccaaccacatttcccttcctccctctaattctacccacatgatctttattccttcctttcgccaattaaaaaaaaaaaaaaggaaaaaaaatctgtagatcttgtcactaaaatctaatttatatcaaatttatgagagaaagtattttcctaattatggtcaaataaatttggttaacatcctagtgattctctttctatataataaggcaattacagttttcaaagcattaagtctaacataactttaaacattctcttaggtttcaagacacttctatttaatattcattggggaaaagttgtccagctatcagctaagaaaacacatgcaaatatggttgtgtaaagttaagggttataaggaaaaaaaaatcagtagaattacataatactaaagttgcagttgaaagaatatccaagtatgtgttggtagttactaaaagaattatagctgttattgccttgtatttatagcccttgtttcaggttttatgattcaagtcttagtccaatctttcttttggacatttgcaatatttaccagttgtgttttgtgtagtctgaatttgctttctgtagttgagcaaacgtcttaaaaagtcatttgtaatttattaaattactttctatgatgttctatagagcaaatggaagtttaattattttttattaaacatattctttgactacccatg

SEQ ID NO: 117748 - DNA, 11504 bp, Homo sapiens
  Payload ID: 3006
  Gene Symbol: CHD9
  Gene Name: chromodomain helicase DNA binding protein 9
  Uniprot ID: Q3L8U1
  ENST ID: ENST00000564845
  CDS Start-End: 303-8948
gctggtggggtcgcgctgggggagtgaactgggccaatcaggcgggtgcgtggcggcgcgggggaggcggtgccccttcactcctccctccactccctccctgccccgcgctgacaggggggcctggccgcgcagccggattttgacacttcatgacatgtcattatttagagcaataatgaatattgacctgttttggattagttgatgaccttcggaaatgatccaataatatctactatagagaagctgaatatactccatttggagtgaacagcccggattgttacagaattttcaagatgacagatccaatgatggacttttttgatgatgccaatctttttggtgagaccttagaaggtttgtcagatgatgcatttgtacaaccaggacctgtttcactagttgatgaattgaatttgggtgcagaatttgaaccgttgcacatagattcactgaaccatgttcaaggtactccaacacatcagaagatgactgattttgaacagttaaatcaatttgattcaataaaatttcaccatgttaatcaatcttttggtagcccagctgaacatgtgttatctccacactctcagtttaattgttctccaatccatccccaaaaccaacccaatggtttgtttccagatgtatcagatggcagtccaatgtggggccatcagacagctactaccatttcaaatcaaaatggatctccttttcaccaacaaggacattcacactctatgcatcaaaataaaagctttgtggcacaccatgactttgccttatttcaggccaatgaacaacaaacacagtgtacttcactacgctcacaacaaaacagaaataatctcaacccagggcagaattctcttagccagtctaaaaattttatgaatgtttctggtccacatagagtcaatgttaaccacccaccacagatgactaatgcatctaattcacaacagtctatttcaatgcagcaattttctcaaacgtcaaatccttcagcacacttccacaagtgtagcagtcatcaagaaggaaattttaatggaccttccccaaatatgacttcttgttctgtcagtaattcacagcaattttcttcacattattccttttccagtaatcatatatcaccaaacagtctacttcagtcctctgcagttcttgcatctaatcatacaaatcagactttatctgattttactggaagtaattccttttcacctcatagaggaatcaagcaagaatctactcagcatatcctaaaccccaatacatcattgaattcaaataatttccaaatattgcattcatcacatcctcagggtaattatagcaattcaaaattatctcctgtgcacatgaacttcccagatcctgttgactcaggaactcaaatgggccatttcaatgatcatgtagaaactaatggcttttcatctttagaagagaatttacttcatcaagtggaatctcaaactgagccattcacaggacttgaccccgaggacctccttcaggagggtcttcttcctcactttgatgagtcaacattcggacaagataattcaagtcacattttagatcatgaccttgatcggcagtttacttcgcatctggtaacacggccttctgatatggctcagactcagttgcaaagtcaggctcggagttggcattcatcattttctaatcatcagcatttacatgacagaaatcacctatgtttacagcgacagcctccatcttccaagaagagcgatggttctgggacatatactaagttgcagaatacccaggtgagggtcatgtctgagaagaagcagagaaaaaaggtggaatcagaaagcaagcaagaaaaggctaatcgtataatatcagaggccatagcaaaagcaaaggagcgtggggaacgcaatattccacgagtaatgagccctgaaaactttcctactgcttcagttgaaggaaaagaggaaaagaaaggtagaaggatgaaatccaagccaaaggacaaagacagcaaaaaaacaaaaacatgttctaagttaaaagagaagacaaaaattggcaaactcattattacattgggtaagaaacaaaaaagaaagaatgagtcttcagatgaaatatctgatgcagaacagatgccacagcatacattaaaagatcaagactctcaaaaaagaagatcaaatcgacaaattaaaagaaaaaaatacgcagaagatatagaagggaagcaatctgaagaagaggttaaaggttctatgaaaataaaaaagaattcagctcctttacctggtgaacagcctttacaattgtttgtggagaatccgagtgaagaagatgctgcaattgtagacaaaattctatcttctagaaccgtaaaaaaggaaatatcacctggagtgatgattgatacagaagaattttttgtaaaatacaagaattactcctatcttcactgtgagtgggccacagaagagcagcttttgaaagataaaaggatccagcagaaaatcaaacgattcaaattgagacaagcacaaagagcacatttttttgcagacatggaagaagaaccatttaacccagactacgttgaagtagacagagtattagaagtctctttttgtgaagataaggatactggtgagcctgttatttactacttagtaaaatggtgctcattgccatatgaagatagtacttgggaactaaaagaagatgtagatcttgcaaaaatagaagagtttgaacaactgcaagcttcaaggcctgacacaagacgtttggaccgtcctccttctaatatttggaagaaaatagatcaatccagggactataaaaatggcaatcaactcagggaatatcaactggaaggactcaactggctcttgttcaattggtacaatagacgaaactgcatcttagcagatgaaatgggtcttggcaaaactattcaatcaattacattcctctatgaaatccttctgactggtataagaggacctttcctgattattgctccactttctactattgcaaactgggagagagaatttcgtacgtggactgatattaacgttgtggtttatcatgggagcctgattagcagacaaatgatacagcaatacgagatgtacttcagggattcacaggggcgtatcattcgaggagcttacagattccaagccatcatcaccacttttgaaatgattcttggaggctgtggagagcttaatgcaattgaatggcgatgtgtgattattgatgaagcacataggttaaaaaataaaaattgtaaactcttagagggcctgaaactcatgaatctggaacacaaggtgcttttgactggcacccctctccaaaatacagttgaagaactatttagtcttcttcactttcttgaacccttaaggtttccttctgaatcaacatttatgcaagaatttggggatctgaaaacagaggaacaggtacagaaacttcaggctatcctgaaaccaatgatgttgagacgattaaaagaagatgtggaaaagaagttggcacctaaagaagaaaccatcattgaagtagaacttactaatattcaaaagaaatactaccgggctatcttggaaaagaacttttcttttttatccaaaggagcaggacaaactaatgtacctaacttggtcaataccatgatggagctcaggaaatgttgtaatcatccatatcttataaaaggtgctgaggagaaaatacttggagaatttagagatacttacaatccagctgcttctgattttcatcttcaagcaatgatccagtctgctggtaaattggtccttattgataaattgcttcccaaaatgaaagccggaggtcataaagtgctcatcttctctcaaatggttcgttgccttgacattctggaggactatctcatacataaaagatacttatatgagcgaattgatggcagagtcagaggaaatcttcggcaagctgctatagatagatttagtaaacctgattcagatagatttgtttttctcctgtgtacccgagctggtgggttgggcatcaacttaactgcagctgatacatgtataatttttgattctgattggaatcctcagaatgatcttcaggcccaagctcgttgccacagaattggtcagaacaaagcagttaaagtctacagactggtaactcgtaactcatatgagagagagatgtttgaccgagccagtttgaaactgggcctagataaagctgtgttacagagcatgagtggaagagaaagtaatgttggtggtattcagcagctttccaaaaaggaaatagaagatctgcttcgaagaggtgcttatggtgctattatggaggaagaagatgaaggctctaaattctgcgaagaggatatcgatcagattttactacgtcgtacaaaaactattacaattgaatcagaaggacgtgggtcaacatttgccaaggcgagttttgtggcatctggaaaccggacagatatttctttagatgatcccaacttctggcaaaaatgggctaaaaaggcagaaatagatatagaggccatcagtggcagaaacagcttggttattgacactccaagaattaggaagcaaacaagaccttttagtgccacaaaagatgaattggctgaattatctgaagctgaaagtgaaggagatgaaaagcccaaactccggagaccctgtgaccgttccaatggctatggaagaactgaatgctttagagttgagaaaaacctgctagtttatgggtggggccgatggagagagattctatctcatggccgtttcaaaaggcagctaaatgaacacgatgtagagataatttgccgagctctcttagcatattgccttgttcactaccgaggagatgagaagattaaaggtttcatatgggatctcattactccaactgaagatggacagacacgagagctacagaatcatctaggcctatcagctcctgtacccaggggtcgaaaagggaagaaagtaaaaactcaaacaagctcatttgatatacaaaaagcagaatggcttcgaaaatataatcccgagcagctccttcaagatgaaggctacaaaaaacatataaaacaccactgtaataaggttttgcttcgtgtgagaatgctgtattatctaaagcaagaagttattggaaatgagtgtcagaaagtatttgatggagttgatgcaagtgacattgatgtttgggtaccagaaccagaccactcagaagttcctgctgagtggtgggattttgatgctgataagtcactccttattggagtttttaaacatggatatgaaaaatataacactattcgagcagacccagcattatgcttcttggaaagagtgggaaaacctgatgagaaagcagttgctgctgaacagagagcgaatgattatatggatggggatgtggaagatccagaatacaaacctgccccagccatctttaaagatgatatagaggatgatgtttcctcaccaggagatcttgttatagcagatggagatggtcaactgatggagggtgataaagtatattggcctactcaatcagctttaaccacacgtttgaggcgtctcatcactgcataccagcgtactaataaaaacagacaaattcagcagatacaaccgactttctcggtgcctaccagtgtaatgcagcctatttatgaggaagccactcttaatcctaaaatggcagccaagatagaaagacagcaaagatggacaagaagagaagaagctgacttttatagggttgtatctacatttggagtggtttttgaccctgacagaggccaatttgattggacaaaatttagagctatggctaggctacataagaaaactgatgatagtttggaaaaatatttgtacgcattcatgtccatgtgtcggagggtttgtcgtcttccttccaaagaagaattggtggatccaaatatttttatccagcccatcacagaagaacgtgcttctaggactttgtatcgcattgaacttctaaggaaagtacgggaacaggcccttcgacatccacagttgtttgaacgcttgaagctttgccatccaaatccagatttaccagtctggtgggaatgtggccctcatgatagggatttgcttattggtgctgccaaacacggggtgagccgaacagactatcacattcttcgtgatcctgaactctcatttatggcagctcagaggaactacagtcaaagtaagatggctcattcaaggacttctaccccacttctacagcaatatcaagtagcactttctgcttctcctcttacctctctacctaggctcctagatgctaaaggtattattctagaggagatgaaagttaaaagtgaaaaccttaaagaggagcctcagtcttctgaagaagaatctatgtcttctgtggaaaccaggacactaataaaatctgagcctgtaagtccaaagaatggtgttttaccacaggctactggagaccagaaatctggtggaaaatgtgaaacagacagacgcatggttgcagccagaacagaacccctaactccaaacccagcttctaagaaaccaagagtccacaaaaggggatcagaatctagttctgattctgactcagattctgagagatcatcttgttcttccagatcatcttcttcctcatcatcctcttcttgctcccactctcgatcaggctctagttcttcttcatcttcatcttgttcttcagcatcttcttcatcctcttcctccacctcttcctcctcctcctcctcttcatcttcatcagaagaaagtgacagtgatgaagaagaagcccaaaaacgagaaagtactactcacatgaaagcctatgatgaagaaagcgtcgcgtcactgagcactacccaggatgagactcaggatagttttcagatgaacaatgggacaccagagtctgcttatatcttacaaggtggatatatgctggcagcctcgtattggccaaaggatcgtgtgatgatcaataggttggacagtatttgtcaaacagttctgaaaggaaagtggccttcagctagaagaagttatgatgctaacacagtggcttctttctataccacaaaactgctggacagccctggagcagctacagaatacagcgatcccagtgtacccactcccccaggtgccggtgttaaagaagaacatgatcagtcaacacagatgtcaaaggaaggtggtttgaagttgacatttcagaagcaagggcttgctcagaaaagaccatttgatggtgaagacggtgctctggggcagcagcagtacctcactcggcttcgagagcttcaaagtgcatcagagaccagcctcgtcaatttcccaaaatccataccagtatcaggtacttccattcaaccaacccttggtgccaatggtgtgatattagacaaccagcctatagtcaaaaaaaggcgaggaaggaggaagaatgtagaaggtgttgacatcttcttttttaacagaaataaaccacctaatcatgtttctttaggcttaacctcctcacagatttccacagggataaatccagcactatcctatactcaacctcaaggaattcctgatacagaaagtccagttccagttattaatcttaaagatggaacgagacttgcaggagatgatgcaccaaagagaaaggatttggaaaaatggcttaaggagcacccgggttatgtggaagatttgggagcttttattcctagaatgcagcttcatgagggaagacccaaacaaaaaagacaccgttgcagaaaccccaataaactagatgtgaatagtctcactggagaagaacgtgttcaactgattaacagaagaaatgctagaaaggttggaggtgcatttgctccccctttgaaagatttatgtagattcctaaaagaaaattcagaatatggagtagctcctgaatggggagatgttgttaagcaatctggatttcttccagaaagcatgtatgaacgtattctcactggtcccgttgtgagagaggaagtaagcaggcgggggagacggcctaaaagtggaattgcaaaggccacagcagcagcagctgctgcatctgccaccagtgtttcaggcaatcctttgttagccaatggactacttccaggtgtggatctcacaactcttcaggccttacaacaaaacctacaaaacttgcagtcactgcaagtaactgctgggttgatgggaatgcctaccggccttccttctggaggagaagctaaaaacatggctgctatgttccccatgctgctgtcaggaatggctggattaccaaatctgttgggcatgggaggactcctgacaaagcctacggaatctgggacagaagacaaaaagggaagtgactctaaggagtcagaaggaaaaacagaaaggacagagagccaaagttcagagaatggtggagaaaactctgtgtcaagttctccttccacatcctctactgctgcattaaatacagctgcagctgccaacccattagctcttaacccactattactatctaatatactttatccagggatgcttctcactccaggccttaatcttcatattccaactttgtcccagtccaatacttttgatgtacaaaacaaaaacagtgacttaggctcgtctaagtctgtagaagtaaaagaagaagattccagaattaaagatcaggaagacaaaggaggaactgaaccaagtcctctcaatgaaaacagcacagatgagggttcagagaaagctgatgcttcatctggatctgatagtacatcgtcgtcatctgaggattcagattctagtaatgaagactgattcccagactctgcacttaaaatatgaactgattttggattttttctttaataattaattgtaaataccccagtgttgagtgcatcaataacttactgaccgaacatttcagttatttgtttagaagtgcaaactgctttcagagactttttgcatgtaatatttcttaagattcataagtttctgaactcgtatgtactatcaaatacataaaggtgtaaaattacaacaaaaggcattataattttgttgggggttaattttatgaaaattatgctcaataagagttgtatatttaatatatttgcagtgaacacagaatactttatgcatattactgatttaatttgaatatagttttacagcctccttgacacctataatttacagatcaaaactcagcaataatttgggcagctaatgaatgtcatgaaagctgtagaatctacatcaccatccattgctttaattacatgaaaatgctctagtgttgtgatgcactgctgatgtttccaattcaggtacaagtatgttttaaagaagaaataagtttcccaatcagccaatttaactggctacctgttacctcagctgagttagtttaggaagtttacattcgtttctaattctatacttgttttcaggggttttttaaacacatcctatatatcatgtcaatctggcaagaaatatgacttgctttttgctgagcttaattcagatatcagtaaaattaagtcataaaataatcatgtgtcatgtgactttggcaccctatagacatacttagttttaacttttcaaagtttggcctcctattagaaataatcatgtctcagatgagtaatgtctgtttccagggttcagaaaaggcaaactcatgaaatgccactgaaaagaactttcaacacagcatacttcatgtaaaagaaattgtttgtttgctttctttgtgtagatttctatttgtgttttatgtcatggaaatattccagaattaacagataatagtggtaaagtaatatgcagatagtctaaattcattttgagtttctaggtgtaagcagactaaatgttgcccagaatcagtgttgggttatcagtttatattaaatatactgagttgcccgttttgaaaatgcactttgaataatctcaaaaagatgtacaagttatacctgtaaaccacaaaagtgaagcctgaggcttctgttcaatttcatagactcctttaccatgtaaaatttgtctgatatttgatttgtgatacaatttctcctgctaaagctgctattattctgacaaggtagaggtccaggttcacctttatatatatttaaaacaattagtactgaattggacataaaaatattgacattctaaggagagatatatgttagcatttttctggtactcaaataagttagtagtaaagtctgcaagggcataaatttagggggaaaaagtgtcccagttctctcctacagaaaaaatactttcagtatgttttgataaaactgttgctttgtcatgagttagtcaattgtatcaggttttccaagacctttaccagtaaattatgtttctgtatgtaaaataaccccttattagagagacagtgttatatgtatttacaaaattatataagttccattgggattgtattgattttgtattttcccaaaatagtactttgaattgatagtcctttatgcaatgtcttagcaatagtctctataatgcccatccaggagaagtgggtagtaattcttcatcatgaaaatgatatattacatatttagtatcttccctttgcagtattgcacttttgtttaactagaatacacctatgagatagccaaagtttcaaacacagttatcttagtttaccggtggagtatttcaacaccaaccacatttcccttcctccctctaattctacccacatgatctttattccttcctttcgccaattaaaaaaaaaaaaaaggaaaaaaaatctgtagatcttgtcactaaaatctaatttatatcaaatttatgagagaaagtattttcctaattatggtcaaataaatttggttaacatcctagtgattctctttctatataataaggcaattacagttttcaaagcattaagtctaacataactttaaacattctcttaggtttcaagacacttctatttaatattcattggggaaaagttgtccagctatcagctaagaaaacacatgcaaatatggttgtgtaaagttaagggttataaggaaaaaaaaatcagtagaattacataatactaaagttgcagttgaaagaatatccaagtatgtgttggtagttactaaaagaattatagctgttattgccttgtatttatagcccttgtttcaggttttatgattcaagtcttagtccaatctttcttttggacatttgcaatatttaccagttgtgttttgtgtagtctgaatttgctttctgtagttgagcaaacgtcttaaaaagtcatttgtaatttattaaattactttctatgatgttctatagagc

SEQ ID NO: 117749 - DNA, 703 bp, Homo sapiens
  Payload ID: 3006
  Gene Symbol: CHD9
  Gene Name: chromodomain helicase DNA binding protein 9
  ENST ID: ENST00000565442
  CDS Start-End: 329-703
gtactgcatcgccatcttgagcttgttgctgtttcctcgagtcttggttatttgttatagcctgtaggccttaaggtggcattttagtgagcaattctaaaccctccttcctttcccagtgctgcagtgctgctatgaaacctttgatgaggcaggtatagaaaaaatatccagtgaagcacactggaatcagcatgaaaatgtgtttggaaattcctgatggttttttcctttggtatagtcagaggcatgtttacggcctccatcttccaagaagagcgatggttctgggacatatactaagttgcagaatacccaggtgagggtcatgtctgagaagaagcagagaaaaaaggtggaatcagaaagcaagcaagaaaaggctaatcgtataatatcagaggccatagcaaaagcaaaggagcgtggggaacgcaatattccacgagtaatgagccctgaaaactttcctactgcttcagttgaaggaaaagaggaaaagaaaggtagaaggatgaaatccaagccaaaggacaaagacagcaaaaaaacaaaaacatgttctaagttaaaagagaagacaaaaattggcaaactcattattacattgggtaagaaacaaaaaagaaagaatgagtcttcagatgaaatatctgatgcagaacagatgccacagcatacattaaaagatcaagactctcaa

SEQ ID NO: 117750 - DNA, 2169 bp, Homo sapiens
  Payload ID: 3006
  Gene Symbol: CHD9
  Gene Name: chromodomain helicase DNA binding protein 9
  ENST ID: ENST00000565832
  CDS Start-End: 274-2169
agccagaggaagtgaggctcagacagagcagctgctgttccagcaacagcagcaactgccgcacccttgaaaggaggcccctgccgtgtggacccgtaaaataaaatgggattttgacacttcatgacatgtcattatttagagcaataatgaatattgacctgttttggattagttgatgaccttcggaaatgatccaataatatctactatagagaagctgaatatactccatttggagtgaacagcccggattgttacagaattttcaagatgacagatccaatgatggacttttttgatgatgccaatctttttggtgagaccttagaaggtttgtcagatgatgcatttgtacaaccaggacctgtttcactagttgatgaattgaatttgggtgcagaatttgaaccgttgcacatagattcactgaaccatgttcaaggtactccaacacatcagaagatgactgattttgaacagttaaatcaatttgattcaataaaatttcaccatgttaatcaatcttttggtagcccagctgaacatgtgttatctccacactctcagtttaattgttctccaatccatccccaaaaccaacccaatggtttgtttccagatgtatcagatggcagtccaatgtggggccatcagacagctactaccatttcaaatcaaaatggatctccttttcaccaacaaggacattcacactctatgcatcaaaataaaagctttgtggcacaccatgactttgccttatttcaggccaatgaacaacaaacacagtgtacttcactacgctcacaacaaaacagaaataatctcaacccagggcagaattctcttagccagtctaaaaattttatgaatgtttctggtccacatagagtcaatgttaaccacccaccacagatgactaatgcatctaattcacaacagtctatttcaatgcagcaattttctcaaacgtcaaatccttcagcacacttccacaagtgtagcagtcatcaagaaggaaattttaatggaccttccccaaatatgacttcttgttctgtcagtaattcacagcaattttcttcacattattccttttccagtaatcatatatcaccaaacagtctacttcagtcctctgcagttcttgcatctaatcatacaaatcagactttatctgattttactggaagtaattccttttcacctcatagaggaatcaagcaagaatctactcagcatatcctaaaccccaatacatcattgaattcaaataatttccaaatattgcattcatcacatcctcagggtaattatagcaattcaaaattatctcctgtgcacatgaacttcccagatcctgttgactcaggaactcaaatgggccatttcaatgatcatgtagaaactaatggcttttcatctttagaagagaatttacttcatcaagtggaatctcaaactgagccattcacaggacttgaccccgaggacctccttcaggagggtcttcttcctcactttgatgagtcaacattcggacaagataattcaagtcacattttagatcatgaccttgatcggcagtttacttcgcatctggtaacacggccttctgatatggctcagactcagttgcaaagtcaggctcggagttggcattcatcattttctaatcatcagcatttacatgacagaaatcacctatgtttacagcgacagcctccatcttccaagaagagcgatggttctgggacatatactaagttgcagaatacccaggtgagggtcatgtctgagaagaagcagagaaaaaaggtggaatcagaaagcaagcaagaaaaggctaatcgtataatatcagaggccatagcaaaagcaaaggagcgtggggaacgcaatattccacgagtaatgagccctgaaaactttcctactgcttcagttgaaggaaaagaggaaaagaaaggtagaaggatgaaatccaagccaaaggacaaagacagcaaaaaaacaaaaacatgttctaagttaaaagagaagacaaaaattggcaaactcattattacattgggtaagaaacaaaaaagaaagaatgagtcttcagatgaaatatctgatgcagaacagatgccacagcatacattaaaagatcaagactctcaa

SEQ ID NO: 117751 - DNA, 3625 bp, Homo sapiens
  Payload ID: 3006
  Gene Symbol: CHD9
  Gene Name: chromodomain helicase DNA binding protein 9
  ENST ID: ENST00000565803
  CDS Start-End: 330-3625
attcatgctgatgcattttgatgctttgtgcattcatttctttctgtgctttgttggaatctggctatctgcttacagctattgaggaaactcagctttttaggagtgtttacagcctttttcatacctaaataggatgaacagtagatataaacttgccaaggcagaaatgtgttgataaatcaaaatgtgtatttgtggagggttgtgcatctcttggttgcagcttgctaaataggccatttaggaatcttctttcaatgcttttttcttgagcactgcctggggtggtgaaaaagcagagggcaagcctttgtctgacgccaaaaatgtcttcagtgaagaggccaagaggaaggcctccatcttccaagaagagcgatggttctgggacatatactaagttgcagaatacccaggtgagggtcatgtctgagaagaagcagagaaaaaaggtggaatcagaaagcaagcaagaaaaggctaatcgtataatatcagaggccatagcaaaagcaaaggagcgtggggaacgcaatattccacgagtaatgagccctgaaaactttcctactgcttcagttgaaggaaaagaggaaaagaaaggtagaaggatgaaatccaagccaaaggacaaagacagcaaaaaaacaaaaacatgttctaagttaaaagagaagacaaaaattggcaaactcattattacattgggtaagaaacaaaaaagaaagaatgagtcttcagatgaaatatctgatgcagaacagatgccacagcatacattaaaagatcaagactctcaaaaaagaagatcaaatcgacaaattaaaagaaaaaaatacgcagaagatatagaagggaagcaatctgaagaagaggttaaaggttctatgaaaataaaaaagaattcagctcctttacctggtgaacagcctttacaattgtttgtggagaatccgagtgaagaagatgctgcaattgtagacaaaattctatcttctagaaccgtaaaaaaggaaatatcacctggagtgatgattgatacagaagaattttttgtaaaatacaagaattactcctatcttcactgtgagtgggccacagaagagcagcttttgaaagataaaaggatccagcagaaaatcaaacgattcaaattgagacaagcacaaagagcacatttttttgcagacatggaagaagaaccatttaacccagactacgttgaagtagacagagtattagaagtctctttttgtgaagataaggatactggtgagcctgttatttactacttagtaaaatggtgctcattgccatatgaagatagtacttgggaactaaaagaagatgtagatcttgcaaaaatagaagagtttgaacaactgcaagcttcaaggcctgacacaagacgtttggaccgtcctccttctaatatttggaagaaaatagatcaatccagggactataaaaatggcaatcaactcagggaatatcaactggaaggactcaactggctcttgttcaattggtacaatagacgaaactgcatcttagcagatgaaatgggtcttggcaaaactattcaatcaattacattcctctatgaaatccttctgactggtataagaggacctttcctgattattgctccactttctactattgcaaactgggagagagaatttcgtacgtggactgatattaacgttgtggtttatcatgggagcctgattagcagacaaatgatacagcaatacgagatgtacttcagggattcacaggggcgtatcattcgaggagcttacagattccaagccatcatcaccacttttgaaatgattcttggaggctgtggagagcttaatgcaattgaatggcgatgtgtgattattgatgaagcacataggttaaaaaataaaaattgtaaactcttagagggcctgaaactcatgaatctggaacacaaggtgcttttgactggcacccctctccaaaatacagttgaagaactatttagtcttcttcactttcttgaacccttaaggtttccttctgaatcaacatttatgcaagaatttggggatctgaaaacagaggaacaggtacagaaacttcaggctatcctgaaaccaatgatgttgagacgattaaaagaagatgtggaaaagaagttggcacctaaagaagaaaccatcattgaagtagaacttactaatattcaaaagaaatactaccgggctatcttggaaaagaacttttcttttttatccaaaggagcaggacaaactaatgtacctaacttggtcaataccatgatggagctcaggaaatgttgtaatcatccatatcttataaaaggtgctgaggagaaaatacttggagaatttagagatacttacaatccagctgcttctgattttcatcttcaagcaatgatccagtctgctggtaaattggtccttattgataaattgcttcccaaaatgaaagccggaggtcataaagtgctcatcttctctcaaatggttcgttgccttgacattctggaggactatctcatacataaaagatacttatatgagcgaattgatggcagagtcagaggaaatcttcggcaagctgctatagatagatttagtaaacctgattcagatagatttgtttttctcctgtgtacccgagctggtgggttgggcatcaacttaactgcagctgatacatgtataatttttgattctgattggaatcctcagaatgatcttcaggcccaagctcgttgccacagaattggtcagaacaaagcagttaaagtctacagactggtaactcgtaactcatatgagagagagatgtttgaccgagccagtttgaaactgggcctagataaagctgtgttacagagcatgagtggaagagaaagtaatgttggtggtattcagcagctttccaaaaaggaaatagaagatctgcttcgaagaggtgcttatggtgctattatggaggaagaagatgaaggctctaaattctgcgaagaggatatcgatcagattttactacgtcgtacaaaaactattacaattgaatcagaaggacgtgggtcaacatttgccaaggcgagttttgtggcatctggaaaccggacagatatttctttagatgatcccaacttctggcaaaaatgggctaaaaaggcagaaatagatatagaggccatcagtggcagaaacagcttggttattgacactccaagaattaggaagcaaacaagaccttttagtgccacaaaagatgaattggctgaattatctgaagctgaaagtgaaggagatgaaaagcccaaactccggagaccctgtgaccgttccaatggctatggaagaactgaatgctttagagttgagaaaaacctgctagtttatgggtggggccgatggagagagattctatctcatggccgtttcaaaaggcagctaaatgaacacgatgtagagataatttgccgagctctcttagcatattgccttgttcactaccgaggagatgagaagattaaaggtttcatatgggatctcattactccaactgaagatggacagacacgagagctacagaatcatctagg

SEQ ID NO: 117752 - DNA, 13110 bp, Homo sapiens
  Payload ID: 3006
  Gene Symbol: CHD9
  Gene Name: chromodomain helicase DNA binding protein 9
  Uniprot ID: Q3L8U1
  ENST ID: ENST00000566029
  CDS Start-End: 210-8855
gagtcccaggattccggggactggagggcagcgccggcagccaaggattttgacacttcatgacatgtcattatttagagcaataatgaatattgacctgttttggattagttgatgaccttcggaaatgatccaataatatctactatagagaagctgaatatactccatttggagtgaacagcccggattgttacagaattttcaagatgacagatccaatgatggacttttttgatgatgccaatctttttggtgagaccttagaaggtttgtcagatgatgcatttgtacaaccaggacctgtttcactagttgatgaattgaatttgggtgcagaatttgaaccgttgcacatagattcactgaaccatgttcaaggtactccaacacatcagaagatgactgattttgaacagttaaatcaatttgattcaataaaatttcaccatgttaatcaatcttttggtagcccagctgaacatgtgttatctccacactctcagtttaattgttctccaatccatccccaaaaccaacccaatggtttgtttccagatgtatcagatggcagtccaatgtggggccatcagacagctactaccatttcaaatcaaaatggatctccttttcaccaacaaggacattcacactctatgcatcaaaataaaagctttgtggcacaccatgactttgccttatttcaggccaatgaacaacaaacacagtgtacttcactacgctcacaacaaaacagaaataatctcaacccagggcagaattctcttagccagtctaaaaattttatgaatgtttctggtccacatagagtcaatgttaaccacccaccacagatgactaatgcatctaattcacaacagtctatttcaatgcagcaattttctcaaacgtcaaatccttcagcacacttccacaagtgtagcagtcatcaagaaggaaattttaatggaccttccccaaatatgacttcttgttctgtcagtaattcacagcaattttcttcacattattccttttccagtaatcatatatcaccaaacagtctacttcagtcctctgcagttcttgcatctaatcatacaaatcagactttatctgattttactggaagtaattccttttcacctcatagaggaatcaagcaagaatctactcagcatatcctaaaccccaatacatcattgaattcaaataatttccaaatattgcattcatcacatcctcagggtaattatagcaattcaaaattatctcctgtgcacatgaacttcccagatcctgttgactcaggaactcaaatgggccatttcaatgatcatgtagaaactaatggcttttcatctttagaagagaatttacttcatcaagtggaatctcaaactgagccattcacaggacttgaccccgaggacctccttcaggagggtcttcttcctcactttgatgagtcaacattcggacaagataattcaagtcacattttagatcatgaccttgatcggcagtttacttcgcatctggtaacacggccttctgatatggctcagactcagttgcaaagtcaggctcggagttggcattcatcattttctaatcatcagcatttacatgacagaaatcacctatgtttacagcgacagcctccatcttccaagaagagcgatggttctgggacatatactaagttgcagaatacccaggtgagggtcatgtctgagaagaagcagagaaaaaaggtggaatcagaaagcaagcaagaaaaggctaatcgtataatatcagaggccatagcaaaagcaaaggagcgtggggaacgcaatattccacgagtaatgagccctgaaaactttcctactgcttcagttgaaggaaaagaggaaaagaaaggtagaaggatgaaatccaagccaaaggacaaagacagcaaaaaaacaaaaacatgttctaagttaaaagagaagacaaaaattggcaaactcattattacattgggtaagaaacaaaaaagaaagaatgagtcttcagatgaaatatctgatgcagaacagatgccacagcatacattaaaagatcaagactctcaaaaaagaagatcaaatcgacaaattaaaagaaaaaaatacgcagaagatatagaagggaagcaatctgaagaagaggttaaaggttctatgaaaataaaaaagaattcagctcctttacctggtgaacagcctttacaattgtttgtggagaatccgagtgaagaagatgctgcaattgtagacaaaattctatcttctagaaccgtaaaaaaggaaatatcacctggagtgatgattgatacagaagaattttttgtaaaatacaagaattactcctatcttcactgtgagtgggccacagaagagcagcttttgaaagataaaaggatccagcagaaaatcaaacgattcaaattgagacaagcacaaagagcacatttttttgcagacatggaagaagaaccatttaacccagactacgttgaagtagacagagtattagaagtctctttttgtgaagataaggatactggtgagcctgttatttactacttagtaaaatggtgctcattgccatatgaagatagtacttgggaactaaaagaagatgtagatcttgcaaaaatagaagagtttgaacaactgcaagcttcaaggcctgacacaagacgtttggaccgtcctccttctaatatttggaagaaaatagatcaatccagggactataaaaatggcaatcaactcagggaatatcaactggaaggactcaactggctcttgttcaattggtacaatagacgaaactgcatcttagcagatgaaatgggtcttggcaaaactattcaatcaattacattcctctatgaaatccttctgactggtataagaggacctttcctgattattgctccactttctactattgcaaactgggagagagaatttcgtacgtggactgatattaacgttgtggtttatcatgggagcctgattagcagacaaatgatacagcaatacgagatgtacttcagggattcacaggggcgtatcattcgaggagcttacagattccaagccatcatcaccacttttgaaatgattcttggaggctgtggagagcttaatgcaattgaatggcgatgtgtgattattgatgaagcacataggttaaaaaataaaaattgtaaactcttagagggcctgaaactcatgaatctggaacacaaggtgcttttgactggcacccctctccaaaatacagttgaagaactatttagtcttcttcactttcttgaacccttaaggtttccttctgaatcaacatttatgcaagaatttggggatctgaaaacagaggaacaggtacagaaacttcaggctatcctgaaaccaatgatgttgagacgattaaaagaagatgtggaaaagaagttggcacctaaagaagaaaccatcattgaagtagaacttactaatattcaaaagaaatactaccgggctatcttggaaaagaacttttcttttttatccaaaggagcaggacaaactaatgtacctaacttggtcaataccatgatggagctcaggaaatgttgtaatcatccatatcttataaaaggtgctgaggagaaaatacttggagaatttagagatacttacaatccagctgcttctgattttcatcttcaagcaatgatccagtctgctggtaaattggtccttattgataaattgcttcccaaaatgaaagccggaggtcataaagtgctcatcttctctcaaatggttcgttgccttgacattctggaggactatctcatacataaaagatacttatatgagcgaattgatggcagagtcagaggaaatcttcggcaagctgctatagatagatttagtaaacctgattcagatagatttgtttttctcctgtgtacccgagctggtgggttgggcatcaacttaactgcagctgatacatgtataatttttgattctgattggaatcctcagaatgatcttcaggcccaagctcgttgccacagaattggtcagaacaaagcagttaaagtctacagactggtaactcgtaactcatatgagagagagatgtttgaccgagccagtttgaaactgggcctagataaagctgtgttacagagcatgagtggaagagaaagtaatgttggtggtattcagcagctttccaaaaaggaaatagaagatctgcttcgaagaggtgcttatggtgctattatggaggaagaagatgaaggctctaaattctgcgaagaggatatcgatcagattttactacgtcgtacaaaaactattacaattgaatcagaaggacgtgggtcaacatttgccaaggcgagttttgtggcatctggaaaccggacagatatttctttagatgatcccaacttctggcaaaaatgggctaaaaaggcagaaatagatatagaggccatcagtggcagaaacagcttggttattgacactccaagaattaggaagcaaacaagaccttttagtgccacaaaagatgaattggctgaattatctgaagctgaaagtgaaggagatgaaaagcccaaactccggagaccctgtgaccgttccaatggctatggaagaactgaatgctttagagttgagaaaaacctgctagtttatgggtggggccgatggagagagattctatctcatggccgtttcaaaaggcagctaaatgaacacgatgtagagataatttgccgagctctcttagcatattgccttgttcactaccgaggagatgagaagattaaaggtttcatatgggatctcattactccaactgaagatggacagacacgagagctacagaatcatctaggcctatcagctcctgtacccaggggtcgaaaagggaagaaagtaaaaactcaaacaagctcatttgatatacaaaaagcagaatggcttcgaaaatataatcccgagcagctccttcaagatgaaggctacaaaaaacatataaaacaccactgtaataaggttttgcttcgtgtgagaatgctgtattatctaaagcaagaagttattggaaatgagtgtcagaaagtatttgatggagttgatgcaagtgacattgatgtttgggtaccagaaccagaccactcagaagttcctgctgagtggtgggattttgatgctgataagtcactccttattggagtttttaaacatggatatgaaaaatataacactattcgagcagacccagcattatgcttcttggaaagagtgggaaaacctgatgagaaagcagttgctgctgaacagagagcgaatgattatatggatggggatgtggaagatccagaatacaaacctgccccagccatctttaaagatgatatagaggatgatgtttcctcaccaggagatcttgttatagcagatggagatggtcaactgatggagggtgataaagtatattggcctactcaatcagctttaaccacacgtttgaggcgtctcatcactgcataccagcgtactaataaaaacagacaaattcagcagatacaaccgactttctcggtgcctaccagtgtaatgcagcctatttatgaggaagccactcttaatcctaaaatggcagccaagatagaaagacagcaaagatggacaagaagagaagaagctgacttttatagggttgtatctacatttggagtggtttttgaccctgacagaggccaatttgattggacaaaatttagagctatggctaggctacataagaaaactgatgatagtttggaaaaatatttgtacgcattcatgtccatgtgtcggagggtttgtcgtcttccttccaaagaagaattggtggatccaaatatttttatccagcccatcacagaagaacgtgcttctaggactttgtatcgcattgaacttctaaggaaagtacgggaacaggcccttcgacatccacagttgtttgaacgcttgaagctttgccatccaaatccagatttaccagtctggtgggaatgtggccctcatgatagggatttgcttattggtgctgccaaacacggggtgagccgaacagactatcacattcttcgtgatcctgaactctcatttatggcagctcagaggaactacagtcaaagtaagatggctcattcaaggacttctaccccacttctacagcaatatcaagtagcactttctgcttctcctcttacctctctacctaggctcctagatgctaaaggtattattctagaggagatgaaagttaaaagtgaaaaccttaaagaggagcctcagtcttctgaagaagaatctatgtcttctgtggaaaccaggacactaataaaatctgagcctgtaagtccaaagaatggtgttttaccacaggctactggagaccagaaatctggtggaaaatgtgaaacagacagacgcatggttgcagccagaacagaacccctaactccaaacccagcttctaagaaaccaagagtccacaaaaggggatcagaatctagttctgattctgactcagattctgagagatcatcttgttcttccagatcatcttcttcctcatcatcctcttcttgctcccactctcgatcaggctctagttcttcttcatcttcatcttgttcttcagcatcttcttcatcctcttcctccacctcttcctcctcctcctcctcttcatcttcatcagaagaaagtgacagtgatgaagaagaagcccaaaaacgagaaagtactactcacatgaaagcctatgatgaagaaagcgtcgcgtcactgagcactacccaggatgagactcaggatagttttcagatgaacaatgggacaccagagtctgcttatatcttacaaggtggatatatgctggcagcctcgtattggccaaaggatcgtgtgatgatcaataggttggacagtatttgtcaaacagttctgaaaggaaagtggccttcagctagaagaagttatgatgctaacacagtggcttctttctataccacaaaactgctggacagccctggagcagctacagaatacagcgatcccagtgtacccactcccccaggtgccggtgttaaagaagaacatgatcagtcaacacagatgtcaaaggaaggtggtttgaagttgacatttcagaagcaagggcttgctcagaaaagaccatttgatggtgaagacggtgctctggggcagcagcagtacctcactcggcttcgagagcttcaaagtgcatcagagaccagcctcgtcaatttcccaaaatccataccagtatcaggtacttccattcaaccaacccttggtgccaatggtgtgatattagacaaccagcctatagtcaaaaaaaggcgaggaaggaggaagaatgtagaaggtgttgacatcttcttttttaacagaaataaaccacctaatcatgtttctttaggcttaacctcctcacagatttccacagggataaatccagcactatcctatactcaacctcaaggaattcctgatacagaaagtccagttccagttattaatcttaaagatggaacgagacttgcaggagatgatgcaccaaagagaaaggatttggaaaaatggcttaaggagcacccgggttatgtggaagatttgggagcttttattcctagaatgcagcttcatgagggaagacccaaacaaaaaagacaccgttgcagaaaccccaataaactagatgtgaatagtctcactggagaagaacgtgttcaactgattaacagaagaaatgctagaaaggttggaggtgcatttgctccccctttgaaagatttatgtagattcctaaaagaaaattcagaatatggagtagctcctgaatggggagatgttgttaagcaatctggatttcttccagaaagcatgtatgaacgtattctcactggtcccgttgtgagagaggaagtaagcaggcgggggagacggcctaaaagtggaattgcaaaggccacagcagcagcagctgctgcatctgccaccagtgtttcaggcaatcctttgttagccaatggactacttccaggtgtggatctcacaactcttcaggccttacaacaaaacctacaaaacttgcagtcactgcaagtaactgctgggttgatgggaatgcctaccggccttccttctggaggagaagctaaaaacatggctgctatgttccccatgctgctgtcaggaatggctggattaccaaatctgttgggcatgggaggactcctgacaaagcctacggaatctgggacagaagacaaaaagggaagtgactctaaggagtcagaaggaaaaacagaaaggacagagagccaaagttcagagaatggtggagaaaactctgtgtcaagttctccttccacatcctctactgctgcattaaatacagctgcagctgccaacccattagctcttaacccactattactatctaatatactttatccagggatgcttctcactccaggccttaatcttcatattccaactttgtcccagtccaatacttttgatgtacaaaacaaaaacagtgacttaggctcgtctaagtctgtagaagtaaaagaagaagattccagaattaaagatcaggaagacaaaggaggaactgaaccaagtcctctcaatgaaaacagcacagatgagggttcagagaaagctgatgcttcatctggatctgatagtacatcgtcgtcatctgaggattcagattctagtaatgaagactgattcccagactctgcacttaaaatatgaactgattttggattttttctttaataattaattgtaaataccccagtgttgagtgcatcaataacttactgaccgaacatttcagttatttgtttagaagtgcaaactgctttcagagactttttgcatgtaatatttcttaagattcataagtttctgaactcgtatgtactatcaaatacataaaggtgtaaaattacaacaaaaggcattataattttgttgggggttaattttatgaaaattatgctcaataagagttgtatatttaatatatttgcagtgaacacagaatactttatgcatattactgatttaatttgaatatagttttacagcctccttgacacctataatttacagatcaaaactcagcaataatttgggcagctaatgaatgtcatgaaagctgtagaatctacatcaccatccattgctttaattacatgaaaatgctctagtgttgtgatgcactgctgatgtttccaattcaggtacaagtatgttttaaagaagaaataagtttcccaatcagccaatttaactggctacctgttacctcagctgagttagtttaggaagtttacattcgtttctaattctatacttgttttcaggggttttttaaacacatcctatatatcatgtcaatctggcaagaaatatgacttgctttttgctgagcttaattcagatatcagtaaaattaagtcataaaataatcatgtgtcatgtgactttggcaccctatagacatacttagttttaacttttcaaagtttggcctcctattagaaataatcatgtctcagatgagtaatgtctgtttccagggttcagaaaaggcaaactcatgaaatgccactgaaaagaactttcaacacagcatacttcatgtaaaagaaattgtttgtttgctttctttgtgtagatttctatttgtgttttatgtcatggaaatattccagaattaacagataatagtggtaaagtaatatgcagatagtctaaattcattttgagtttctaggtgtaagcagactaaatgttgcccagaatcagtgttgggttatcagtttatattaaatatactgagttgcccgttttgaaaatgcactttgaataatctcaaaaagatgtacaagttatacctgtaaaccacaaaagtgaagcctgaggcttctgttcaatttcatagactcctttaccatgtaaaatttgtctgatatttgatttgtgatacaatttctcctgctaaagctgctattattctgacaaggtagaggtccaggttcacctttatatatatttaaaacaattagtactgaattggacataaaaatattgacattctaaggagagatatatgttagcatttttctggtactcaaataagttagtagtaaagtctgcaagggcataaatttagggggaaaaagtgtcccagttctctcctacagaaaaaatactttcagtatgttttgataaaactgttgctttgtcatgagttagtcaattgtatcaggttttccaagacctttaccagtaaattatgtttctgtatgtaaaataaccccttattagagagacagtgttatatgtatttacaaaattatataagttccattgggattgtattgattttgtattttcccaaaatagtactttgaattgatagtcctttatgcaatgtcttagcaatagtctctataatgcccatccaggagaagtgggtagtaattcttcatcatgaaaatgatatattacatatttagtatcttccctttgcagtattgcacttttgtttaactagaatacacctatgagatagccaaagtttcaaacacagttatcttagtttaccggtggagtatttcaacaccaaccacatttcccttcctccctctaattctacccacatgatctttattccttcctttcgccaattaaaaaaaaaaaaaaggaaaaaaaatctgtagatcttgtcactaaaatctaatttatatcaaatttatgagagaaagtattttcctaattatggtcaaataaatttggttaacatcctagtgattctctttctatataataaggcaattacagttttcaaagcattaagtctaacataactttaaacattctcttaggtttcaagacacttctatttaatattcattggggaaaagttgtccagctatcagctaagaaaacacatgcaaatatggttgtgtaaagttaagggttataaggaaaaaaaaatcagtagaattacataatactaaagttgcagttgaaagaatatccaagtatgtgttggtagttactaaaagaattatagctgttattgccttgtatttatagcccttgtttcaggttttatgattcaagtcttagtccaatctttcttttggacatttgcaatatttaccagttgtgttttgtgtagtctgaatttgctttctgtagttgagcaaacgtcttaaaaagtcatttgtaatttattaaattactttctatgatgttctatagagcaaatggaagtttaattattttttattaaacatattctttgactacccatgatgtcagcctctgtacatgagaatactttttaaaattgaattttatatagaatttatcttattccagttatgagagacaccatagttgtaaatctttaaaaggaaaatataccgtggaagaatttttaaaacaaaaattggctataattttatccacagtatcttaaatgctgtcaatttttcattttgatttaattttattaatattgttcattgtggatattggtgactgcaaaaaaagcaaaagctgcttcttgggcattcaaattgttaaaccccaattttgcagcccaatctcaacttcatgctgaacattaagtattattttcttaagtttttggacttttaaaaaactcagaaatactcagagatattcctcacctctttaagaagtccattttggaaatcaataattatttttttcccttagtcttaagagtgtttcctaactcattgccatgggtagtgttcttcgtaaacattgaagaaaatagtttttcctctaattacacaactaaaacagtggagtctcatactcatttaacttgaacacattcaactacactttcatgtttagaaaacctttttttcatttttgtacaacataacatataaacacaaaccaactgcttcatctagtactcacccagaggaacagtagtctgttccagtgttggaggaagaattgcctatgttggacatttttgagaagagatatgaggtataaaatgatgtattctgtaatttgtgagctctgtgagagaaaagagtgattttttttttttttataaagacaaggtcttgctctgcctcccctagggtggagtgcagtggtgcgatcacagcccactgcatccttgacctgttgggctcaagcaatcctccctcctcagcctcctgagtagctgagactacagcatgcatcaccacaacgagctaatttttgtattttttgtagagatggggttttgccgtgttgcccaggctgatctcaaactcctgggctcaagcagtctacccatctcggcctcccaaagtgctgggattacaggtgtgagccaccacacccagccagaaatgatttttgactacacctaatattcactttatacaataaacttagaacttaatctctatataagctatttattttaaaattcagaaaagcaaaaaaatatttaaatcattcataaactaaaactacccagagataaacactgtcagtaatatattcaatcttttgtatatctatgttatttacatgtagtgggttgagtagtgtcattcagaaactgatgtcaacctaaaacctcagaatgtggccttattttggaaatcgggtcttggcaaatgtaattagttgtagtcatgccggattagggtgggccctaaatccaatgactagtgtccttagaagaagagcagaagatactcagaaacactgggaaggctgttttgtgataaaggagaccggagggatgttcctacaactagggaacaccaaggattgccagcaaccaccagaagctaggagagaagtaacaagcattctccttcatagcttccggaaagaaccaaccttgccaacaccttgatttggggtttctaacctgaactgtaagagaataaatttccattgttttaagtca

SEQ ID NO: 117753 - DNA, 488 bp, Homo sapiens
  Payload ID: 3006
  Gene Symbol: CHD9
  Gene Name: chromodomain helicase DNA binding protein 9
  ENST ID: ENST00000563410
  CDS Start-End: 330-488
gcggccgctgctcaactggtggggagatgcgggggcgggtcgtgtcagacgggtggtcgcctgaggccgcccccgcccggccagccgcgagtgtcagtctcagtcgaggcggggggcggcgggggcgcctcagtcatggcgaagcgcgagagtcagcgagcggcggattttgacacttcatgacatgtcattatttagagcaataatgaatattgacctgttttggattagttgatgaccttcggaaatgatccaataatatctactatagagaagctgaatatactccatttggagtgaacagcccggattgttacagaattttcaagatgacagatccaatgatggacttttttgatgatgccaatctttttggtgagaccttagaaggtttgtcagatgatgcatttgtacaaccaggacctgtttcactagttgatgaattgaatttgggtgcagaatttgaaccgttgcacatagattcactg

SEQ ID NO: 117754 - DNA, 359 bp, Homo sapiens
  Payload ID: 3006
  Gene Symbol: CHD9
  Gene Name: chromodomain helicase DNA binding protein 9
  ENST ID: ENST00000562785
  CDS Start-End: 85-359
aaatgatccaataatatctactatagagaagctgaatatactccatttggagtgaacagcccggattgttacagaattttcaagatgacagatccaatgatggacttttttgatgatgccaatctttttggtgagaccttagaagaagagaatttacttcatcaagtggaatctcaaactgagccattcacaggacttgaccccgaggacctccttcaggagggtcttcttcctcactttgatgagtcaacattcggacaagataattcaagtcacattttagatcatgaccttgatcggcagtttacttcgcatctggtaacacggccttctgatatggctcagactcagttgcaaag

SEQ ID NO: 117755 - DNA, 589 bp, Homo sapiens
  Payload ID: 3006
  Gene Symbol: CHD9
  Gene Name: chromodomain helicase DNA binding protein 9
  ENST ID: ENST00000564641
  CDS Start-End: 1-340
tccagcactatcctatactcaacctcaaggaattcctgatacagaaagtccagttccagttattaatcttaaagatggaacgagacttgcaggagatgatgcaccaaagagaaaggatttggaaaaatggcttaaggagcacccgggttatgtggaagatttgggagcttttattcctagaatgcagcttcatgagggaagacccaaacaaaaaagacaccgttgcagaaaccccaataaactagatgtgaatagtctcactggagaagaacgtgttcaactgattaacagaagaaatgctagaaagatcagaaaattgaggctgaaagagatttactgatttgctcgagttcacatagctggttggaggtgcatttgctccccctttgaaagatttatgtagattcctaaaagaaaattcagaatatggagtagctcctgaatggggagatgttgttaagcaatctggatttcttccagaaagcatgtatgaacgtattctcactggtcccgttgtgagagaggaagtaagcaggcgggggagacggcctaaaagtggaattgcaaaggccacagcagcagcagctgc

SEQ ID NO: 117756 - DNA, 539 bp, Homo sapiens
  Payload ID: 3006
  Gene Symbol: CHD9
  Gene Name: chromodomain helicase DNA binding protein 9
  ENST ID: ENST00000564600
  CDS Start-End: 1-368
cacctaatcatgtttctttaggcttaacctcctcacagatttccacagggataaatccagcactatcctatactcaacctcaaggaattcctgatacagaaagtccagttccagttattaatcttaaagatggaacgagacttgcaggagatgatgcaccaaagagaaaggatttggaaaaatggcttaaggagcacccgggttatgtggaagatttgggagcttttattcctagaatgcagcttcatgagggaagacccaaacaaaaaagacaccgttgcagaaaccccaataaactagatgtgaatagtctcactggagaagaacgtgttcaactgattaacagaagaaatgctagaaaggcttaaggattgatgagttattaaggaaaagaatctacctgctaaatccccataaacccccaagagggcctccattttcaatagaagcttaatgaaggagataataaaaaagagaagacaacagaattacagagactaagttggaggtgcatttgctccccctttgaaagatttatg

SEQ ID NO: 117757 - DNA, 10603 bp, Homo sapiens
  Payload ID: 3006
  Gene Symbol: CHD9
  Gene Name: chromodomain helicase DNA binding protein 9
  ENST ID: ENST00000615216
  CDS Start-End: 5106-7997
gagtcccaggattccggggactggagggcagcgccggcagccaaggattttgacacttcatgacatgtcattatttagagcaataatgaatattgacctgttttggattagttgatgaccttcggaaatgatccaataatatctactatagagaagctgaatatactccatttggagtgaacagcccggattgttacagaattttcaagatgacagatccaatgatggacttttttgatgatgccaatctttttggtgagaccttagaaggtttgtcagatgatgcatttgtacaaccaggacctgtttcactagttgatgaattgaatttgggtgcagaatttgaaccgttgcacatagattcactgaaccatgttcaaggtactccaacacatcagaagatgactgattttgaacagttaaatcaatttgattcaataaaatttcaccatgttaatcaatcttttggtagcccagctgaacatgtgttatctccacactctcagtttaattgttctccaatccatccccaaaaccaacccaatggtttgtttccagatgtatcagatggcagtccaatgtggggccatcagacagctactaccatttcaaatcaaaatggatctccttttcaccaacaaggacattcacactctatgcatcaaaataaaagctttgtggcacaccatgactttgccttatttcaggccaatgaacaacaaacacagtgtacttcactacgctcacaacaaaacagaaataatctcaacccagggcagaattctcttagccagtctaaaaattttatgaatgtttctggtccacatagagtcaatgttaaccacccaccacagatgactaatgcatctaattcacaacagtctatttcaatgcagcaattttctcaaacgtcaaatccttcagcacacttccacaagtgtagcagtcatcaagaaggaaattttaatggaccttccccaaatatgacttcttgttctgtcagtaattcacagcaattttcttcacattattccttttccagtaatcatatatcaccaaacagtctacttcagtcctctgcagttcttgcatctaatcatacaaatcagactttatctgattttactggaagtaattccttttcacctcatagaggaatcaagcaagaatctactcagcatatcctaaaccccaatacatcattgaattcaaataatttccaaatattgcattcatcacatcctcagggtaattatagcaattcaaaattatctcctgtgcacatgaacttcccagatcctgttgactcaggaactcaaatgggccatttcaatgatcatgtagaaactaatggcttttcatctttagaagagaatttacttcatcaagtggaatctcaaactgagccattcacaggacttgaccccgaggacctccttcaggagggtcttcttcctcactttgatgagtcaacattcggacaagataattcaagtcacattttagatcatgaccttgatcggcagtttacttcgcatctggtaacacggccttctgatatggctcagactcagttgcaaagtcaggctcggagttggcattcatcattttctaatcatcagcatttacatgacagaaatcacctatgtttacagcgacagcctccatcttccaagaagagcgatggttctgggacatatactaagttgcagaatacccaggtgagggtcatgtctgagaagaagcagagaaaaaaggtggaatcagaaagcaagcaagaaaaggctaatcgtataatatcagaggccatagcaaaagcaaaggagcgtggggaacgcaatattccacgagtaatgagccctgaaaactttcctactgcttcagttgaaggaaaagaggaaaagaaaggtagaaggatgaaatccaagccaaaggacaaagacagcaaaaaaacaaaaacatgttctaagttaaaagagaagacaaaaattggcaaactcattattacattgggtaagaaacaaaaaagaaagaatgagtcttcagatgaaatatctgatgcagaacagatgccacagcatacattaaaagatcaagactctcaaaaaagaagatcaaatcgacaaattaaaagaaaaaaatacgcagaagatatagaagggaagcaatctgaagaagaggttaaaggttctatgaaaataaaaaagaattcagctcctttacctggtgaacagcctttacaattgtttgtggagaatccgagtgaagaagatgctgcaattgtagacaaaattctatcttctagaaccgtaaaaaaggaaatatcacctggagtgatgattgatacagaagaattttttgtaaaatacaagaattactcctatcttcactgtgagtgggccacagaagagcagcttttgaaagataaaaggatccagcagaaaatcaaacgattcaaattgagacaagcacaaagagcacatttttttgcagacatggaagaagaaccatttaacccagactacgttgaagtagacagagtattagaagtctctttttgtgaagataaggatactggtgagcctgttatttactacttagtaaaatggtgctcattgccatatgaagatagtacttgggaactaaaagaagatgtagatcttgcaaaaatagaagagtttgaacaactgcaagcttcaaggcctgacacaagacgtttggaccgtcctccttctaatatttggaagaaaatagatcaatccagggactataaaaatggcaatcaactcagggaatatcaactggaaggactcaactggctcttgttcaattggtacaatagacgaaactgcatcttagcagatgaaatgggtcttggcaaaactattcaatcaattacattcctctatgaaatccttctgactggtataagaggacctttcctgattattgctccactttctactattgcaaactgggagagagaatttcgtacgtggactgatattaacgttgtggtttatcatgggagcctgattagcagacaaatgatacagcaatacgagatgtacttcagggattcacaggggcgtatcattcgaggagcttacagattccaagccatcatcaccacttttgaaatgattcttggaggctgtggagagcttaatgcaattgaatggcgatgtgtgattattgatgaagcacataggttaaaaaataaaaattgtaaactcttagagggcctgaaactcatgaatctggaacacaaggtgcttttgactggcacccctctccaaaatacagttgaagaactatttagtcttcttcactttcttgaacccttaaggtttccttctgaatcaacatttatgcaagaatttggggatctgaaaacagaggaacaggtacagaaacttcaggctatcctgaaaccaatgatgttgagacgattaaaagaagatgtggaaaagaagttggcacctaaagaagaaaccatcattgaagtagaacttactaatattcaaaagaaatactaccgggctatcttggaaaagaacttttcttttttatccaaaggagcaggacaaactaatgtacctaacttggtcaataccatgatggagctcaggaaatgttgtaatcatccatatcttataaaaggtgctgaggagaaaatacttggagaatttagagatacttacaatccagctgcttctgattttcatcttcaagcaatgatccagtctgctggtaaattggtccttattgataaattgcttcccaaaatgaaagccggaggtcataaagtgctcatcttctctcaaatggttcgttgccttgacattctggaggactatctcatacataaaagatacttatatgagcgaattgatggcagagtcagaggaaatcttcggcaagctgctatagatagatttagtaaacctgattcagatagatttgtttttctcctgtgtacccgagctggtgggttgggcatcaacttaactgcagctgatacatgtataatttttgattctgattggaatcctcagaatgatcttcaggcccaagctcgttgccacagaattggtcagaacaaagcagttaaagtctacagactggtaactcgtaactcatatgagagagagatgtttgaccgagccagtttgaaactgggcctagataaagctgtgttacagagcatgagtggaagagaaagtaatgttggtggtattcagcagctttccaaaaaggaaatagaagatctgcttcgaagaggtgcttatggtgctattatggaggaagaagatgaaggctctaaattctgcgaagaggatatcgatcagattttactacgtcgtacaaaaactattacaattgaatcagaaggacgtgggtcaacatttgccaaggcgagttttgtggcatctggaaaccggacagatatttctttagatgatcccaacttctggcaaaaatgggctaaaaaggcagaaatagatatagaggccatcagtggcagaaacagcttggttattgacactccaagaattaggaagcaaacaagaccttttagtgccacaaaagatgaattggctgaattatctgaagctgaaagtgaaggagatgaaaagcccaaactccggagaccctgtgaccgttccaatggctatggaagaactgaatgctttagagttgagaaaaacctgctagtttatgggtggggccgatggagagagattctatctcatggccgtttcaaaaggcagctaaatgaacacgatgtagagataatttgccgagctctcttagcatattgccttgttcactaccgaggagatgagaagattaaaggtttcatatgggatctcattactccaactgaagatggacagacacgagagctacagaatcatctaggcctatcagctcctgtacccaggggtcgaaaagggaagaaagtaaaaactcaaacaagctcatttgatatacaaaaagcagaatggcttcgaaaatataatcccgagcagctccttcaagatgaaggctacaaaaaacatataaaacaccactgtaataaggttttgcttcgtgtgagaatgctgtattatctaaagcaagaagttattggaaatgagtgtcagaaagtatttgatggagttgatgcaagtgacattgatgtttgggtaccagaaccagaccactcagaagttcctgctgagtggtgggattttgatgctgataagtcactccttattggagtttttaaacatggatatgaaaaatataacactattcgagcagacccagcattatgcttcttggaaagagtgggaaaacctgatgagaaagcagttgctgctgaacagagagcgaatgattatatggatggggatgtggaagatccagaatacaaacctgccccagccatctttaaagatgatatagaggatgatgtttcctcaccaggagatcttgttatagcagatggagatggtcaactgatggagggtgataaagtatattggcctactcaatcagctttaaccacacgtttgaggcgtctcatcactgcataccagcgtactaataaaaacagacaaattcagcagatacaaccgactttctcggtgcctaccagtgtaatgcagcctatttatgaggaagccactcttaatcctaaaatggcagccaagatagaaagacagcaaagatggacaagaagagaagaagctgacttttatagggttgtatctacatttggagtggtttttgaccctgacagaggccaatttgattggacaaaatttagagctatggctaggctacataagaaaactgatgatagtttggaaaaatatttgtacgcattcatgtccatgtgtcggagggtttgtcgtcttccttccaaagaagaaagtactactcacatgaaagcctatgatgaagaaagcgtcgcgtcactgagcactacccaggatgagactcaggatagttttcagatgaacaatgggacaccagagtctgcttatatcttacaaggtggatatatgctggcagcctcgtattggccaaaggatcgtgtgatgatcaataggttggacagtatttgtcaaacagttctgaaaggaaagtggccttcagctagaagaagttatgatgctaacacagtggcttctttctataccacaaaactgctggacagccctggagcagctacagaatacagcgatcccagtgtacccactcccccaggtgccggtgttaaagaagaacatgatcagtcaacacagatgtcaaaggtgaagaagcatgtacgagaaaaggagtttacagtgaaaatcaaagacgaaggtggtttgaagttgacatttcagaagcaagggcttgctcagaaaagaccatttgatggtgaagacggtgctctggggcagcagcagtacctcactcggcttcgagagcttcaaagtgcatcagagaccagcctcgtcaatttcccaaaatccataccagtatcaggtacttccattcaaccaacccttggtgccaatggtgtgatattagacaaccagcctatagtcaaaaaaaggcgaggaaggaggaagaatgtagaaggtgttgacatcttcttttttaacagaaataaaccacctaatcatgtttctttaggcttaacctcctcacagatttccacagggataaatccagcactatcctatactcaacctcaaggaattcctgatacagaaagtccagttccagttattaatcttaaagatggaacgagacttgcaggagatgatgcaccaaagagaaaggatttggaaaaatggcttaaggagcacccgggttatgtggaagatttgggagcttttattcctagaatgcagcttcatgagggaagacccaaacaaaaaagacaccgttgcagaaaccccaataaactagatgtgaatagtctcactggagaagaacgtgttcaactgattaacagaagaaatgctagaaaggttggaggtgcatttgctccccctttgaaagatttatgtagattcctaaaagaaaattcagaatatggagtagctcctgaatggggagatgttgttaagcaatctggatttcttccagaaagcatgtatgaacgtattctcactggtcccgttgtgagagaggaagtaagcaggcgggggagacggcctaaaagtggaattgcaaaggccacagcagcagcagctgctgcatctgccaccagtgtttcaggcaatcctttgttagccaatggactacttccaggtgtggatctcacaactcttcaggccttacaacaaaacctacaaaacttgcagtcactgcaagtaactgctgggttgatgggaatgcctaccggccttccttctggaggagaagctaaaaacatggctgctatgttccccatgctgctgtcaggaatggctggattaccaaatctgttgggcatgggaggactcctgacaaagcctacggaatctgggacagaagacaaaaagggaagtgactctaaggagtcagaaggaaaaacagaaaggacagagagccaaagttcagagaatggtggagaaaactctgtgtcaagttctccttccacatcctctactgctgcattaaatacagctgcagctgccaacccattagctcttaacccactattactatctaatatactttatccagggatgcttctcactccaggccttaatcttcatattccaactttgtcccagtccaatacttttgatgtacaaaacaaaaacagtgacttaggctcgtctaagtctgtagaagtaaaagaagaagattccagaattaaagatcaggaagacaaaggaggaactgaaccaagtcctctcaatgaaaacagcacagatgagggttcagagaaagctgatgcttcatctggatctgatagtacatcgtcgtcatctgaggattcagattctagtaatgaagactgattcccagactctgcacttaaaatatgaactgattttggattttttctttaataattaattgtaaataccccagtgttgagtgcatcaataacttactgaccgaacatttcagttatttgtttagaagtgcaaactgctttcagagactttttgcatgtaatatttcttaagattcataagtttctgaactcgtatgtactatcaaatacataaaggtgtaaaattacaacaaaaggcattataattttgttgggggttaattttatgaaaattatgctcaataagagttgtatatttaatatatttgcagtgaacacagaatactttatgcatattactgatttaatttgaatatagttttacagcctccttgacacctataatttacagatcaaaactcagcaataatttgggcagctaatgaatgtcatgaaagctgtagaatctacatcaccatccattgctttaattacatgaaaatgctctagtgttgtgatgcactgctgatgtttccaattcaggtacaagtatgttttaaagaagaaataagtttcccaatcagccaatttaactggctacctgttacctcagctgagttagtttaggaagtttacattcgtttctaattctatacttgttttcaggggttttttaaacacatcctatatatcatgtcaatctggcaagaaatatgacttgctttttgctgagcttaattcagatatcagtaaaattaagtcataaaataatcatgtgtcatgtgactttggcaccctatagacatacttagttttaacttttcaaagtttggcctcctattagaaataatcatgtctcagatgagtaatgtctgtttccagggttcagaaaaggcaaactcatgaaatgccactgaaaagaactttcaacacagcatacttcatgtaaaagaaattgtttgtttgctttctttgtgtagatttctatttgtgttttatgtcatggaaatattccagaattaacagataatagtggtaaagtaatatgcagatagtctaaattcattttgagtttctaggtgtaagcagactaaatgttgcccagaatcagtgttgggttatcagtttatattaaatatactgagttgcccgttttgaaaatgcactttgaataatctcaaaaagatgtacaagttatacctgtaaaccacaaaagtgaagcctgaggcttctgttcaatttcatagactcctttaccatgtaaaatttgtctgatatttgatttgtgatacaatttctcctgctaaagctgctattattctgacaaggtagaggtccaggttcacctttatatatatttaaaacaattagtactgaattggacataaaaatattgacattctaaggagagatatatgttagcatttttctggtactcaaataagttagtagtaaagtctgcaagggcataaatttagggggaaaaagtgtcccagttctctcctacagaaaaaatactttcagtatgttttgataaaactgttgctttgtcatgagttagtcaattgtatcaggttttccaagacctttaccagtaaattatgtttctgtatgtaaaataaccccttattagagagacagtgttatatgtatttacaaaattatataagttccattgggattgtattgattttgtattttcccaaaatagtactttgaattgatagtcctttatgcaatgtcttagcaatagtctctataatgcccatccaggagaagtgggtagtaattcttcatcatgaaaatgatatattacatatttagtatcttccctttgcagtattgcacttttgtttaactagaatacacctatgagatagccaaagtttcaaacacagttatcttagtttaccggtggagtatttcaacaccaaccacatttcccttcctccctctaattctacccacatgatctttattccttcctttcgccaattaaaaaaaaaaaaaaggaaaaaaaatctgtagatcttgtcactaaaatctaatttatatcaaatttatgagagaaagtattttcctaattatggtcaaataaatttggttaacatcctagtgattctctttctatataataaggcaattacagttttcaaagcattaagtctaacataactttaaacattctcttaggtttcaagacacttctatttaatattcattggggaaaagttgtccagctatcagctaagaaaacacatgcaaatatggttgtgtaaagttaagggttataaggaaaaaaaaatcagtagaattacataatactaaagttgcagttgaaagaatatccaagtatgtgttggtagttactaaaagaattatagctgttattgccttgtatttatagcccttgtttcaggttttatgattcaagtcttagtccaatctttcttttggacatttgcaatatttaccagttgtgttttgtgtagtctgaatttgctttctgtagttgagcaaacgtcttaaaaagtcatttgtaatttattaaattactttctatgatgttctatagagcaaatggaagtttaattattttttattaaacatattctttgactacccatg

SEQ ID NO: 117758 - DNA, 3557 bp, Homo sapiens
  Payload ID: 3006
  Gene Symbol: CHD9
  Gene Name: chromodomain helicase DNA binding protein 9
  ENST ID: ENST00000622617
  CDS Start-End: 666-3557
caaaataaaagctttgtggcacaccatgactttgccttatttcaggccaatgaacaacaaacacagtgtacttcactacgctcacaacaaaacagaaataatctcaacccagggcagaattctcttagccagtctaaaaattttatgaatgtttctggtccacatagagtcaatgttaaccacccaccacagatgaaaagcccaaactccggagaccctgtgaccgttccaatggctatggaagaactgaatgctttagagttgagaaaaacctgctagtttatgggtggggccgatggagagagattctatctcatggccgtttcaaaaggcagctaaatgaacacgatgtagagataatttgccgagctctcttagcatattgccttgttcactaccgaggagatgagaagattaaaggtttcatatgggatctcattactccaactgaagatggacagacacgagagctacagaatcatctaggcctatcagctcctgtacccaggggtcgaaaagggaagaaagtaaaaactcaaacaagctcatttgatatacaaaaagcagaatggcttcgaaaatataatcccgagcagctccttcaagatgaaggctacaaaaaacatataaaacaccactgtaataaggttttgcttcgtgtgagaatgctgtattatctaaagcaagaagttattggaaatgagtgtcagaaagtatttgatggagttgatgcaagtgacattgatgtttgggtaccagaaccagaccactcagaagttcctgctgagtggtgggattttgatgctgataagtcactccttattggagtttttaaacatggatatgaaaaatataacactattcgagcagacccagcattatgcttcttggaaagagtgggaaaacctgatgagaaagcagttgctgctgaacagagagcgaatgattatatggatggggatgtggaagatccagaatacaaacctgccccagccatctttaaagatgatatagaggatgatgtttcctcaccaggagatcttgttatagcagatggagatggtcaactgatggagggtgataaagtatattggcctactcaatcagctttaaccacacgtttgaggcgtctcatcactgcataccagcgtactaataaaaacagacaaattcagcagatacaaccgactttctcggtgcctaccagtgtaatgcagcctatttatgaggaagccactcttaatcctaaaatggcagccaagatagaaagacagcaaagatggacaagaagagaagaagctgacttttatagggttgtatctacatttggagtggtttttgaccctgacagaggccaatttgattggacaaaatttagagctatggctaggctacataagaaaactgatgatagtttggaaaaatatttgtacgcattcatgtccatgtgtcggagggtttgtcgtcttccttccaaagaagaaagtactactcacatgaaagcctatgatgaagaaagcgtcgcgtcactgagcactacccaggatgagactcaggatagttttcagatgaacaatgggacaccagagtctgcttatatcttacaaggtggatatatgctggcagcctcgtattggccaaaggatcgtgtgatgatcaataggttggacagtatttgtcaaacagttctgaaaggaaagtggccttcagctagaagaagttatgatgctaacacagtggcttctttctataccacaaaactgctggacagccctggagcagctacagaatacagcgatcccagtgtacccactcccccaggtgccggtgttaaagaagaacatgatcagtcaacacagatgtcaaaggtgaagaagcatgtacgagaaaaggagtttacagtgaaaatcaaagacgaaggtggtttgaagttgacatttcagaagcaagggcttgctcagaaaagaccatttgatggtgaagacggtgctctggggcagcagcagtacctcactcggcttcgagagcttcaaagtgcatcagagaccagcctcgtcaatttcccaaaatccataccagtatcaggtacttccattcaaccaacccttggtgccaatggtgtgatattagacaaccagcctatagtcaaaaaaaggcgaggaaggaggaagaatgtagaaggtgttgacatcttcttttttaacagaaataaaccacctaatcatgtttctttaggcttaacctcctcacagatttccacagggataaatccagcactatcctatactcaacctcaaggaattcctgatacagaaagtccagttccagttattaatcttaaagatggaacgagacttgcaggagatgatgcaccaaagagaaaggatttggaaaaatggcttaaggagcacccgggttatgtggaagatttgggagcttttattcctagaatgcagcttcatgagggaagacccaaacaaaaaagacaccgttgcagaaaccccaataaactagatgtgaatagtctcactggagaagaacgtgttcaactgattaacagaagaaatgctagaaaggttggaggtgcatttgctccccctttgaaagatttatgtagattcctaaaagaaaattcagaatatggagtagctcctgaatggggagatgttgttaagcaatctggatttcttccagaaagcatgtatgaacgtattctcactggtcccgttgtgagagaggaagtaagcaggcgggggagacggcctaaaagtggaattgcaaaggccacagcagcagcagctgctgcatctgccaccagtgtttcaggcaatcctttgttagccaatggactacttccaggtgtggatctcacaactcttcaggccttacaacaaaacctacaaaacttgcagtcactgcaagtaactgctgggttgatgggaatgcctaccggccttccttctggaggagaagctaaaaacatggctgctatgttccccatgctgctgtcaggaatggctggattaccaaatctgttgggcatgggaggactcctgacaaagcctacggaatctgggacagaagacaaaaagggaagtgactctaaggagtcagaaggaaaaacagaaaggacagagagccaaagttcagagaatggtggagaaaactctgtgtcaagttctccttccacatcctctactgctgcattaaatacagctgcagctgccaacccattagctcttaacccactattactatctaatatactttatccagggatgcttctcactccaggccttaatcttcatattccaactttgtcccagtccaatacttttgatgtacaaaacaaaaacagtgacttaggctcgtctaagtctgtagaagtaaaagaagaagattccagaattaaagatcaggaagacaaaggaggaactgaaccaagtcctctcaatgaaaacagcacagatgagggttcagagaaagctgatgcttcatctggatctgatagtacatcgtcgtcatctgaggattcagattctagtaatgaagactga

SEQ ID NO: 117759 - DNA, 3419 bp, Homo sapiens
  Payload ID: 3007
  Gene Symbol: CDYL
  Gene Name: chromodomain protein, Y-like
  Uniprot ID: Q9Y232
  ENST ID: ENST00000328908
  CDS Start-End: 132-1928
ggagagaggacctatttctacctaaggacattcccggaaggcaatgggtttcaaacaatatcctgaagagactcatctcggggaactaagcaggtggtcatcagagaacacagagcccccggaagaattttatgacatttcaggcaagccacaggtcagcctggggaaaaagcaggaagaaaaactggcaatacgagggcccaacccaaaagttattcctgaagagaaacaacgtgtcagcaccagatgggccttcagaccccagcatctccgtgagcagtgagcaaagcggggcacagcagcctcccgctttacaggttgaaaggattgttgacaaaaggaaaaataaaaaagggaagacagagtatttggttcggtggaaaggctatgacagcgaggacgacacttgggagccggaacagcacctcgtgaactgtgaggaatacatccacgacttcaacagacgccacacggagaagcagaaggagagcacattgaccagaacaaacaggacctctcccaacaatgctaggaaacaaatctccagatccaccaacagcaacttttctaagacctctcctaaggcactcgtgattgggaaagaccacgaatccaaaaacagccagctgtttgctgccagccagaagttcaggaagaacacagctccatctctctccagccggaagaacatggacctagcgaagtcaggtatcaagatcctcgtgcctaaaagccccgttaagagcaggaccgcagtggacggctttcagagcgagagccctgagaaactggaccccgtcgagcagggtcaggaggacacagtggcacccgaagtggcagcggaaaagccggtcggagctttattgggccccggtgccgagagggccaggatggggagcaggcccaggatacacccactagtgcctcaggtgcccggccctgtgactgcagccatggccacaggcttagctgttaacgggaaaggtacatctccgttcatggatgcattaacagccaatgggacaaccaacatacagacatctgttacaggagtgactgccagcaaaaggaaatttattgacgacagaagagaccagccttttgacaagcgattgcgtttcagcgtgaggcaaacagaaagtgcctacagatacagagatattgtggtcaggaagcaggatggcttcacccacatcttgttatccacaaagtcctcagagaataactcactaaatccagaggtaatgagagaagtccagagtgctctgagcacggccgctgccgatgacagcaagctggtactgctcagcgccgttggcagcgtcttctgttgtggacttgactttatttattttatacgacgtctgacagatgacaggaaaagagaaagcactaaaatggcagaagctatcagaaacttcgtgaatactttcattcaatttaagaagcccattattgtagcagtcaatggcccagccattggtctaggagcatctatattgcctctttgcgatgtggtttgggctaatgaaaaggcttggtttcaaacaccctataccaccttcggacagagtccagatggctgttctaccgttatgtttcccaagataatgggaggagcatctgcaaacgagatgctgctcagtggacggaagctgacagcgcaggaggcgtgtggcaagggcctggtctcccaggtgttttggcccgggacgttcactcaggaagtgatggttcgcattaaggagcttgcctcgtgcaatccagttgtgcttgaggaatccaaagccctcgtgcgctgcaacatgaagatggagctggagcaggccaacgagagggagtgtgaggtgctgaagaaaatctggggctcggcccaggggatggactccatgttaaagtacttgcagaggaagatcgatgagttctgagtgtcgggctgcccactggtgacaccgggatcgggctgagcaggagaacatcaccggctccagttcccctgatccattctcacagcctgaaacaagctcacccgtagcttacgcttggaagcaggactgggaacatccacgctatttattatcgaggagttttaaagtactgtaactttaaaataaataactacaaagcttctttgtccaaacgtcattattttatacttatatacacgcaggtgtaaaagtataaaggtgagcactagactgctcttagaagctctaatttttgttttctttggctagtactgtataaaaaacagaattgtgttttattggttttggatgacagaaaagtctggaataatgtttgttttcctcatttcttccttctagaacacagaatctaaaggggtattagccagcctcgcctccctgccccacgtagagacacagagtgatgtgaggcgttggctttttctccaagaaggtacagatacctcagattcgggaaactcaaaatcaaaagacttagcttctaggataaatacttctgatgaaaaatccgctgaggagcataccccaaaccagacatatgcttaggattcatgctgagatatcaattggtttccccttctttttaaaatacgtccagttcttacccagttaacatgaagaaaccactgtctctagaagaaagcttgttttgcagtattagtgaatcactgaatagcttaagtatgactatctaagttataagttagtctttagtgggttttaaatagtttttctgacccttctgaaaaataactacataagtgcttcttgttgctgggtgagaaatactactttatagacagttttggttttctgtttgcagatatgattgatgtatttcaccaaaataaaatatttttatgtttataaagtgtaatttttaggttcacttagaatatattttatttaataagttaaaattcttttggcacactattaaatgcaaaaactcctttcaaaacaaaaaagaactaccttatattcaacatttaatgttcttggcctctgcttttatgtctatacaatatactgagttcagtatggtgtccaagagtgccctgtgtggatagacatgtgcactccttccaggagtgggtactgattccagactccagatgcctattattagttaggcttctgagcttgcaatcatattgaatgtatgaagagcgaaatcaaattcttatttttgtacagttttgaagtttatacttagaactgaccacctccccggccacgcggagagctgtacagtgtgtaaatctgcctttatcttggattgattggtacagtatttttgcatctgtgggacctaccttttcgttcagtagtttgaactatatataaactgtacaatctgtaaagtttttatagaataaatattcagctgtgaaaactggttaaataaaactaatatttcttaacacattt

SEQ ID NO: 117760 - DNA, 3241 bp, Homo sapiens
  Payload ID: 3007
  Gene Symbol: CDYL
  Gene Name: chromodomain protein, Y-like
  Uniprot ID: Q9Y232
  ENST ID: ENST00000343762
  CDS Start-End: 508-1746
ggttaaggagggaggggaaacaaaagcagtgtgctccaccaggctcctgcctcggctctaaggaaacagaggaaagcaaacgggaatactctggtttagtatactgcccgcttctggagtggacattgatttaaggttgaaaggattgttgacaaaaggaaaaataaaaaagggaagacagagtatttggttcggtggaaaggctatgacagcgaggacgacacttgggagccggaacagcacctcgtgaactgtgaggaatacatccacgacttcaacagacgccacacggagaagcagaaggagagcacattgaccagaacaaacaggacctctcccaacaatgctaggaaacaaatctccagatccaccaacagcaacttttctaagacctctcctaaggcactcgtgattgggaaagaccacgaatccaaaaacagccagctgtttgctgccagccagaagttcaggaagaacacagctccatctctctccagccggaagaacatggacctagcgaagtcaggtatcaagatcctcgtgcctaaaagccccgttaagagcaggaccgcagtggacggctttcagagcgagagccctgagaaactggaccccgtcgagcagggtcaggaggacacagtggcacccgaagtggcagcggaaaagccggtcggagctttattgggccccggtgccgagagggccaggatggggagcaggcccaggatacacccactagtgcctcaggtgcccggccctgtgactgcagccatggccacaggcttagctgttaacgggaaaggtacatctccgttcatggatgcattaacagccaatgggacaaccaacatacagacatctgttacaggagtgactgccagcaaaaggaaatttattgacgacagaagagaccagccttttgacaagcgattgcgtttcagcgtgaggcaaacagaaagtgcctacagatacagagatattgtggtcaggaagcaggatggcttcacccacatcttgttatccacaaagtcctcagagaataactcactaaatccagaggtaatgagagaagtccagagtgctctgagcacggccgctgccgatgacagcaagctggtactgctcagcgccgttggcagcgtcttctgttgtggacttgactttatttattttatacgacgtctgacagatgacaggaaaagagaaagcactaaaatggcagaagctatcagaaacttcgtgaatactttcattcaatttaagaagcccattattgtagcagtcaatggcccagccattggtctaggagcatctatattgcctctttgcgatgtggtttgggctaatgaaaaggcttggtttcaaacaccctataccaccttcggacagagtccagatggctgttctaccgttatgtttcccaagataatgggaggagcatctgcaaacgagatgctgctcagtggacggaagctgacagcgcaggaggcgtgtggcaagggcctggtctcccaggtgttttggcccgggacgttcactcaggaagtgatggttcgcattaaggagcttgcctcgtgcaatccagttgtgcttgaggaatccaaagccctcgtgcgctgcaacatgaagatggagctggagcaggccaacgagagggagtgtgaggtgctgaagaaaatctggggctcggcccaggggatggactccatgttaaagtacttgcagaggaagatcgatgagttctgagtgtcgggctgcccactggtgacaccgggatcgggctgagcaggagaacatcaccggctccagttcccctgatccattctcacagcctgaaacaagctcacccgtagcttacgcttggaagcaggactgggaacatccacgctatttattatcgaggagttttaaagtactgtaactttaaaataaataactacaaagcttctttgtccaaacgtcattattttatacttatatacacgcaggtgtaaaagtataaaggtgagcactagactgctcttagaagctctaatttttgttttctttggctagtactgtataaaaaacagaattgtgttttattggttttggatgacagaaaagtctggaataatgtttgttttcctcatttcttccttctagaacacagaatctaaaggggtattagccagcctcgcctccctgccccacgtagagacacagagtgatgtgaggcgttggctttttctccaagaaggtacagatacctcagattcgggaaactcaaaatcaaaagacttagcttctaggataaatacttctgatgaaaaatccgctgaggagcataccccaaaccagacatatgcttaggattcatgctgagatatcaattggtttccccttctttttaaaatacgtccagttcttacccagttaacatgaagaaaccactgtctctagaagaaagcttgttttgcagtattagtgaatcactgaatagcttaagtatgactatctaagttataagttagtctttagtgggttttaaatagtttttctgacccttctgaaaaataactacataagtgcttcttgttgctgggtgagaaatactactttatagacagttttggttttctgtttgcagatatgattgatgtatttcaccaaaataaaatatttttatgtttataaagtgtaatttttaggttcacttagaatatattttatttaataagttaaaattcttttggcacactattaaatgcaaaaactcctttcaaaacaaaaaagaactaccttatattcaacatttaatgttcttggcctctgcttttatgtctatacaatatactgagttcagtatggtgtccaagagtgccctgtgtggatagacatgtgcactccttccaggagtgggtactgattccagactccagatgcctattattagttaggcttctgagcttgcaatcatattgaatgtatgaagagcgaaatcaaattcttatttttgtacagttttgaagtttatacttagaactgaccacctccccggccacgcggagagctgtacagtgtgtaaatctgcctttatcttggattgattggtacagtatttttgcatctgtgggacctaccttttcgttcagtagtttgaactatatataaactgtacaatctgtaaagtttttatagaataaatattcagctgtgaaaactggttaaataaaactaatatttcttaacacatttgaaa

SEQ ID NO: 117761 - DNA, 2184 bp, Homo sapiens
  Payload ID: 3007
  Gene Symbol: CDYL
  Gene Name: chromodomain protein, Y-like
  Uniprot ID: Q9Y232
  ENST ID: ENST00000397588
  CDS Start-End: 350-1984
cggagaggggagccgcgatccggccgcgccgcccgcacgccgccgcgcccgccccagcccgcccggccccgcggcggggcgcgatgagcccgagcgcgagccggcccgccggggagtgagcgcggggcgcccagggcgcgttgcgtagctgctcctgcgcacaaccccgccgcgccgccggcccgcactggccgcggagtgcaagaggctcgtccgtgcccagcgcccggccggccgcgggagcaggaagcgcaggccacgcaggacccaactgaaacaaagtgtcggccgcccggcgccggcgcccgccccgaccctgcccctcccgcccgcaactccgccgcccaccatggcttccgaggagctgtacgaggttgaaaggattgttgacaaaaggaaaaataaaaaagggaagacagagtatttggttcggtggaaaggctatgacagcgaggacgacacttgggagccggaacagcacctcgtgaactgtgaggaatacatccacgacttcaacagacgccacacggagaagcagaaggagagcacattgaccagaacaaacaggacctctcccaacaatgctaggaaacaaatctccagatccaccaacagcaacttttctaagacctctcctaaggcactcgtgattgggaaagaccacgaatccaaaaacagccagctgtttgctgccagccagaagttcaggaagaacacagctccatctctctccagccggaagaacatggacctagcgaagtcaggtatcaagatcctcgtgcctaaaagccccgttaagagcaggaccgcagtggacggctttcagagcgagagccctgagaaactggaccccgtcgagcagggtcaggaggacacagtggcacccgaagtggcagcggaaaagccggtcggagctttattgggccccggtgccgagagggccaggatggggagcaggcccaggatacacccactagtgcctcaggtgcccggccctgtgactgcagccatggccacaggcttagctgttaacgggaaaggtacatctccgttcatggatgcattaacagccaatgggacaaccaacatacagacatctgttacaggagtgactgccagcaaaaggaaatttattgacgacagaagagaccagccttttgacaagcgattgcgtttcagcgtgaggcaaacagaaagtgcctacagatacagagatattgtggtcaggaagcaggatggcttcacccacatcttgttatccacaaagtcctcagagaataactcactaaatccagaggtaatgagagaagtccagagtgctctgagcacggccgctgccgatgacagcaagctggtactgctcagcgccgttggcagcgtcttctgttgtggacttgactttatttattttatacgacgtctgacagatgacaggaaaagagaaagcactaaaatggcagaagctatcagaaacttcgtgaatactttcattcaatttaagaagcccattattgtagcagtcaatggcccagccattggtctaggagcatctatattgcctctttgcgatgtggtttgggctaatgaaaaggcttggtttcaaacaccctataccaccttcggacagagtccagatggctgttctaccgttatgtttcccaagataatgggaggagcatctgcaaacgagatgctgctcagtggacggaagctgacagcgcaggaggcgtgtggcaagggcctggtctcccaggtgttttggcccgggacgttcactcaggaagtgatggttcgcattaaggagcttgcctcgtgcaatccagttgtgcttgaggaatccaaagccctcgtgcgctgcaacatgaagatggagctggagcaggccaacgagagggagtgtgaggtgctgaagaaaatctggggctcggcccaggggatggactccatgttaaagtacttgcagaggaagatcgatgagttctgagtgtcgggctgcccactggtgacaccgggatcgggctgagcaggagaacatcaccggctccagttcccctgatccattctcacagcctgaaacaagctcacccgtagcttacgcttggaagcaggactgggaacatccacgctatttattatcgaggagttttaaagtactgtaactttaaaataaataactacaaagct

SEQ ID NO: 117762 - DNA, 2139 bp, Homo sapiens
  Payload ID: 3007
  Gene Symbol: CDYL
  Gene Name: chromodomain protein, Y-like
  Uniprot ID: Q9Y232
  ENST ID: ENST00000449732
  CDS Start-End: 584-1822
actgtctggcactccctagtgagatgaacctggtacctcagatggaaatgctgaaatcacctgtcttctgcgtcgctcacgctgggagctgtagaccggagctgttcctattcggccatcttggctcctccccaaggcttaggtttctaagtcagccacaaatgctacccaaaactacataaagaagaaaaaagttgcatagaaccaaaaagttgaaaggattgttgacaaaaggaaaaataaaaaagggaagacagagtatttggttcggtggaaaggctatgacagcgaggacgacacttgggagccggaacagcacctcgtgaactgtgaggaatacatccacgacttcaacagacgccacacggagaagcagaaggagagcacattgaccagaacaaacaggacctctcccaacaatgctaggaaacaaatctccagatccaccaacagcaacttttctaagacctctcctaaggcactcgtgattgggaaagaccacgaatccaaaaacagccagctgtttgctgccagccagaagttcaggaagaacacagctccatctctctccagccggaagaacatggacctagcgaagtcaggtatcaagatcctcgtgcctaaaagccccgttaagagcaggaccgcagtggacggctttcagagcgagagccctgagaaactggaccccgtcgagcagggtcaggaggacacagtggcacccgaagtggcagcggaaaagccggtcggagctttattgggccccggtgccgagagggccaggatggggagcaggcccaggatacacccactagtgcctcaggtgcccggccctgtgactgcagccatggccacaggcttagctgttaacgggaaaggtacatctccgttcatggatgcattaacagccaatgggacaaccaacatacagacatctgttacaggagtgactgccagcaaaaggaaatttattgacgacagaagagaccagccttttgacaagcgattgcgtttcagcgtgaggcaaacagaaagtgcctacagatacagagatattgtggtcaggaagcaggatggcttcacccacatcttgttatccacaaagtcctcagagaataactcactaaatccagaggtaatgagagaagtccagagtgctctgagcacggccgctgccgatgacagcaagctggtactgctcagcgccgttggcagcgtcttctgttgtggacttgactttatttattttatacgacgtctgacagatgacaggaaaagagaaagcactaaaatggcagaagctatcagaaacttcgtgaatactttcattcaatttaagaagcccattattgtagcagtcaatggcccagccattggtctaggagcatctatattgcctctttgcgatgtggtttgggctaatgaaaaggcttggtttcaaacaccctataccaccttcggacagagtccagatggctgttctaccgttatgtttcccaagataatgggaggagcatctgcaaacgagatgctgctcagtggacggaagctgacagcgcaggaggcgtgtggcaagggcctggtctcccaggtgttttggcccgggacgttcactcaggaagtgatggttcgcattaaggagcttgcctcgtgcaatccagttgtgcttgaggaatccaaagccctcgtgcgctgcaacatgaagatggagctggagcaggccaacgagagggagtgtgaggtgctgaagaaaatctggggctcggcccaggggatggactccatgttaaagtacttgcagaggaagatcgatgagttctgagtgtcgggctgcccactggtgacaccgggatcgggctgagcaggagaacatcaccggctccagttcccctgatccattctcacagcctgaaacaagctcacccgtagcttacgcttggaagcaggactgggaacatccacgctatttattatcgaggagttttaaagtactgtaactttaaaataaataactacaaagcttctttgtccaaacgtcattattttatacttatatacacgcaggtgtaaaagtataaaggtgagcactagactgctcttagaagctctaatttttgttttctttggctagtactgtat

SEQ ID NO: 117763 - DNA, 690 bp, Homo sapiens
  Payload ID: 3007
  Gene Symbol: CDYL
  Gene Name: chromodomain protein, Y-like
  ENST ID: ENST00000440139
  CDS Start-End: 178-690
agacatgcctggtttggctggtgattgggaaaagaggaggatctcagatttcaggttttagttatcattctcccgagatgggaagaggctgtgattcttgatctgaagagtcttatcgtcggtagaacttgccatcgatgatcaattgtttggatttgaggaggagagaattgaattatgttggcctacaacaacgggagcaggtcaggtacatctccgttcatggatgcattaacagccaatgggacaaccaacatacagacatctgttacaggagtgactgccagcaaaaggaaatttattgacgacagaagagaccagccttttgacaagcgattgcgtttcagcgtgaggcaaacagaaagtgcctacagatacagagatattgtggtcaggaagcaggatggcttcacccacatcttgttatccacaaagtcctcagagaataactcactaaatccagaggtaatgagagaagtccagagtgctctgagcacggccgctgccgatgacagcaagctggtactgctcagcgccgttggcagcgtcttctgttgtggacttgactttatttattttatacgacgtctgacagatgacaggaaaagagaaagcactaaaatggcagaagctatcagaaacttcgtgaatactttcattcaatttaagaagcccattattgtagcagtc

SEQ ID NO: 117764 - DNA, 2086 bp, Homo sapiens
  Payload ID: 3008
  Gene Symbol: CDYL2
  Gene Name: chromodomain protein, Y-like 2
  ENST ID: ENST00000562812
  CDS Start-End: 91-1614
cacacgcgcacaccggaccccgcgcgcacacgcacggagggcgcgagcgagcagacgcgcacaccggcgagccaagttccgcagcctggcatggcttctggggacctttacgaggttgaaaggattgtagacaagaggaagaacaagaaaggaaaatgggagtatcttatccgatggaaaggctacgggagcaccgaggacacgtgggagccggagcaccacctcttgcactgtgaggagtttattgatgaattcaatgggttgcacatgtccaaggacaagaggatcaagtcagggaagcagtccagtacctccaagctgctgcgtgacagtcgaggcccgtcggttgagaaactgtcccacagaccttcagatcctggaaagagcaaggggacctcccataaacggaagcgaattaaccctcccctggccaagccaaaaaaagggtattcaggcaagccctcttcaggaggtgacagggccaccaagacggtgtcttacaggactacccccagtggtttgcaaataatgcccctgaaaaagtctcagaacgggatggaaaatggggacgccggctctgagaaggatgagaggcactttggaaatgggtcccatcagcctggcttggatttgaatgatcatgttggagagcaagatatgggtgaatgtgacgtgaatcacgctacactggcggagaacgggctcggtggctctgctctgaccaacgggggattgaacctgcacagtccagtgaagaggaagctggaagcggagaaggactacgtctttgacaaaaggctcagatacagtgtccgccagaatgaaagcaactgtcggtttcgagacatcgttgtgcggaaggaagaagggttcacgcacatcctgctgtccagtcagacctcggataacaatgccctgacacctgagatcatgaaagaagtccggcgagcgctctgcaacgcagccacagacgacagcaaactgctgctcctcagcgcagtggggagcgtgttctgcagcggcctggattattcctacctaattggccggttgtccagcgaccggcgaaaggagagcactcggattgcagaagccatcagggactttgtgaaggcctttatccagtttaagaagcctatcgtggtggccatcaatgggccggccctgggcctgggtgcctccatcctgcccctctgtgacatcgtgtgggccagtgagaaggcctggttccagacgccctacgccaccatccgcctcacgcctgctggctgctcctcctacaccttcccccagatcctgggcgtcgcgctggccaatgagatgctgttctgtgggcggaagctcaccgcccaggaggcctgcagcagggggctggtgtcgcaggtcttctggcccaccacgttcagccaggaggtcatgctgcgggtcaaggagatggcatcctgcagtgccgtggtgttagaggagtccaaatgcctcgtgcggagcttcctgaaatcagtgctggaagacgtgaacgagaaggaatgcctcatgctcaagcagctctggagctcctccaaaggccttgactcccttttcagctacctgcaggacaaaatttatgaagtctgaggggccccagctcacgggcccccaacttccagctctgccctgtgtttcggaaaccagagcacagtgtctgccccggccaaggagtttgtcaaggtgtctctttatacgtagggttgtgtccatttcctcgtgtcctttggttgctcctccttggtttgattttgtgtaatggatggaaaacgcagcatacttggcctcccccacctccctgcccttcctggccagagagctgtccaaggctgtatcttcccagggctccgccaagcaccgctgtcctttccccacttgctgaaatgcaccatgacggtccaggaaggggaagaccactttcacattcttctgactcaggctgtgtctacacagtgcctctgacttggagacttggccatcatggctctctctggttgtatttagatcgggtgtcagaggacgaccaatcttagggaatttccagaccaatgagcaaaatgat

SEQ ID NO: 117765 - DNA, 2086 bp, Homo sapiens; identical to SEQ ID NO: 117764
  Payload ID: 3008
  Gene Symbol: CDYL2
  Gene Name: chromodomain protein, Y-like 2
  ENST ID: ENST00000563890
  CDS Start-End: 91-1614

SEQ ID NO: 117766 - DNA, 2086 bp, Homo sapiens; identical to SEQ ID NO: 117764
  Payload ID: 3008
  Gene Symbol: CDYL2
  Gene Name: chromodomain protein, Y-like 2
  ENST ID: ENST00000566173
  CDS Start-End: 91-1614

SEQ ID NO: 117767 - DNA, 8159 bp, Homo sapiens
  Payload ID: 3008
  Gene Symbol: CDYL2
  Gene Name: chromodomain protein, Y-like 2
  Uniprot ID: Q8N8U2
  ENST ID: ENST00000570137
  CDS Start-End: 157-1677
ctgtcattctgcaaaaacacagtttactcaacacaccacacacactcgcacacacacgcgcgcacacacacgcgcacaccggaccccgcgcgcacacgcacggagggcgcgagcgagcagacgcgcacaccggcgagccaagttccgcagcctggcatggcttctggggacctttacgaggttgaaaggattgtagacaagaggaagaacaagaaaggaaaatgggagtatcttatccgatggaaaggctacgggagcaccgaggacacgtgggagccggagcaccacctcttgcactgtgaggagtttattgatgaattcaatgggttgcacatgtccaaggacaagaggatcaagtcagggaagcagtccagtacctccaagctgctgcgtgacagtcgaggcccgtcggttgagaaactgtcccacagaccttcagatcctggaaagagcaaggggacctcccataaacggaagcgaattaaccctcccctggccaagccaaaaaaagggtattcaggcaagccctcttcaggaggtgacagggccaccaagacggtgtcttacaggactacccccagtggtttgcaaataatgcccctgaaaaagtctcagaacgggatggaaaatggggacgccggctctgagaaggatgagaggcactttggaaatgggtcccatcagcctggcttggatttgaatgatcatgttggagagcaagatatgggtgaatgtgacgtgaatcacgctacactggcggagaacgggctcggctctgctctgaccaacgggggattgaacctgcacagtccagtgaagaggaagctggaagcggagaaggactacgtctttgacaaaaggctcagatacagtgtccgccagaatgaaagcaactgtcggtttcgagacatcgttgtgcggaaggaagaagggttcacgcacatcctgctgtccagtcagacctcggataacaatgccctgacacctgagatcatgaaagaagtccggcgagcgctctgcaacgcagccacagacgacagcaaactgctgctcctcagcgcagtggggagcgtgttctgcagcggcctggattattcctacctaattggccggttgtccagcgaccggcgaaaggagagcactcggattgcagaagccatcagggactttgtgaaggcctttatccagtttaagaagcctatcgtggtggccatcaatgggccggccctgggcctgggtgcctccatcctgcccctctgtgacatcgtgtgggccagtgagaaggcctggttccagacgccctacgccaccatccgcctcacgcctgctggctgctcctcctacaccttcccccagatcctgggcgtcgcgctggccaatgagatgctgttctgtgggcggaagctcaccgcccaggaggcctgcagcagggggctggtgtcgcaggtcttctggcccaccacgttcagccaggaggtcatgctgcgggtcaaggagatggcatcctgcagtgccgtggtgttagaggagtccaaatgcctcgtgcggagcttcctgaaatcagtgctggaagacgtgaacgagaaggaatgcctcatgctcaagcagctctggagctcctccaaaggccttgactcccttttcagctacctgcaggacaaaatttatgaagtctgaggggccccagctcacgggcccccaacttccagctctgccctgtgtttcggaaaccagagcacagtgtctgccccggccaaggagtttgtcaaggtgtctctttatacgtagggttgtgtccatttcctcgtgtcctttggttgctcctccttggtttgattttgtgtaatggatggaaaacgcagcatacttggcctcccccacctccctgcccttcctggccagagagctgtccaaggctgtatcttcccagggctccgccaagcaccgctgtcctttccccacttgctgaaatgcaccatgacggtccaggaaggggaagaccactttcacattcttctgactcaggctgtgtctacacagtgcctctgacttggagacttggccatcatggctctctctggttgtatttagatcgggtgtcagaggacgaccaatcttagggaatttccagaccaatgagcaaaatgattgtgcacacctggcctcagtctcctttccgacgcaaatctgtgtgactattagggcttggtcttaaaacccaattgagtgatttgcaaacccagatattgtacatttagaaatgttttgttaaatatatatttttaaaacaatgtaagtggaaattctgataatttatgtgtattatatgtaaagctagttttgcaaaaacaaactactagggaaatgttttttctttccttggacttgttttatttatttatttttgtttatatattgtgatgtctgttgttcacacagatactattttcatactaccctggaccaaatcccacacaaggttcatgccgtttggtgcattctagcaatgaaccatgtagaaataaagtttagagagatgaaaacagaaggatttctgtggacaaaaggaatagcgctgcacctctgtgtaaaacggttctcagctgtaataatagaatactagttccttaggtttgtccttaggagacatcttgggagagttttttcttccctctgctgtctttaaggagttaaagggccctcttagcctgaatgatcctgaaacagacccagtcccaaattgcgtgatgttgggcaggagtggggataggccctacctgagaatagcatactgtctagaataagacttctttctttggggcaaatgactgaacttggatcctgcagtctgttgcttccatgtgatcagtgatttctggtattggccagggggatggggaagagttcccactctgctgagctgtctggaggtctgaatcttttccctccagaagctgaaatgactcatctgttttctagtttttttatgtacatagggagcaatgaccaggaatgagatctccttgcccctgtgcccctgggctgcaaggggactccagcagctgtgttagaccatcagattcaagtccctggattaactacagagaaggagggattgggggttgtggttttgagtggtgaggagaaagttcaggaaaacctgaagttgagagcagacaaatggaagggatgtgttctgcgtgaggtttaaaccatgggtcaagcacccagaaaaagctagattctcagattctcaggatggagggatttttttccgtttctatcacagcccctgcgtattcctggaggcccttggccctccccttcttcccctttcctgttgggcaccagcctttcttggcccttctttgaagagagtggaataaggcagcaagaagtgggcacagcttatggaggtgaggcaggcttagaagagagagttctggtgacagttctctaactctctgtggtcctttatcttttcctggcaatcaggtgcactgggcagggcaggtggaatgtattcgtggccctgagctttgagtttcaaagaacacgttgatagtctacaccagatctagagacatggtcctttaagcagtgaccctcaagttaatctggactgctggtccttctgatgaccttggttccctccctggaaagcgtgtctcctttaagagttcatgagggtcaggaaggaggggaaacctctccttcagccagaggaggatggaattaaagtcctgtgcaccctcccctttgtccatgtaggatcctgtaaggacttcggacctgtcctacagggagttactatagggagacacctgcttttgcccaaatgcctgttgtcacagctctatctggatcttatctcctcctttgagaaagcaaatgtgagctttccaaaacccttagatgaccctggttcttacatattgtggcagacagtgtcttcactactgctaaattttcattagaaagagccccctcttttctgttgaacttctgattgggcgcagttatattcagcatcggttgaagtggggtcaggattctccttggacatggaaggggatgtttagaaattcctttagatcagtgtccaccttcattccctgcttgaaagaactagaaatgcttcagctttggatgtactatcaaatccaaacttctaaacatttcaaggatctctgaagattaaggtaggaatgtgaaaccatttctaaggtggaaatcttgctgttaagtcacaggtcctgggtgtaacgggggtggtgaaagtctgtattttggttgtttccatacagtcagttccaccaattgggtgaaagcaggtgaaatctttttgctgcagggtggactgaatttttcactttctgggtagttgttttgatcatgtgtaggcgaattccaggtaacttacagcaaatagatttgggatggaaaataccagacctctggttgtgtcagggtttatcctaatagctttcctgagacagagctcagactttcatttttgatcttccaccccagggccccctctctgtctatgggatcctttctcccctctctctaccattttcccgtaccttcccccataagtcactcccaagagcctgggcaggtctttgaggaattgcggctcattttggcagccccgtcctgcaattacctttgggtttgaaagaatagctgtgggtgggcaattgaggacacctctttagtcagggacctttctagcaatccactccctcccatcctgttagccatgcagtggaactctccttccctctctgccccaaccccggtgatggctcactctcagcatcttatgggaccatctgagttaacaaccctgttccaagaagactttgtgcagaacttttgttagggtggtcataccttctcaccaccatttggaagacacagcctaatgctgatgtacttaatgtgccccttccggcatagaaataatgtctgggtaacagccatcaaaatcactaagaatgacattggatagctatgagaaagtagtagagaattgatttaaaatatcattcttgtttggtatagattaaactaggaaatgttctctctgaagcatgaaaatgtttttcccatgtgaagtttagtacaaggatggaaaaataataatcacagtagactttgaacaatgcaactgtatctctgaatatccacatttaaaaatagccttcactgaatgctgaattgcatttcccattaatttttggttttaaaaattttgtaaactttttttttatttggaatttagtcacatccattaaattttccaatctagtttctgtggaaattttttaacagagagaaacaaatagaaacatcttcaaatcttcctaagtgaatatttaaaatgcagaattgcttatcttctgtttttctgtattcagacacttatatctgttgtatatattagtttagacactctcactaatatacacagtatttaagactctaaatgagatttcttaagtattttattttattctctgtaaatggttttgtataatctttaaacatctacactttgcctttgtagatatttaagggaaaccatttggggttgtcttgcatgtatatttttgttgtagataagtgttgcttagttatttctgcaaattttggttgaaatgcttacagactttaatacagtatatattttcaaaatataaacttttatatttctgtgataagttaggatatgcgttttaggcaatatttttcattaatatcacttgttcttttgaaaaatagcatactggtttggtgccaattttttcattagaatataatgctcttatattgttggagagcaggttaatcttttttcgaagtaattgcgtttgaagtataatttcaaaatgtattgaatttgtgaataagccttaccattaggatcagtaaatttttcaactttgcaactacataagtagtttaagatctccccgtaaattctcactgtgtggcagttgatggagtttgtgaacagagccttaagcttgttgcaaaaaaatttaaaaagggtaatacgggttgtttcctccatgcaacgtaagccatgctgatggactgaatgcagtctgtaattcatggctaatccgaagagtttgattgagttgatggcggcagggaccagatagacaccttggtgattgtctttggccataagaatagaccaaggataggttttccagagacaccttcatactgtaaacatggtttagacacggtcatagggaaggctgctggtccatcatttgttctgaacaaatggcatttcctgctcctgaccctggcagttggccccagattccttgtcgatgacttggaaacgtccattctgggtaaggtcagcactccctgagagatgttaacaaagtttacctatgagtcttactgtgtagacaatctgaagtcaattttagttacacaatcagcattcccatgtgtcctcagtgtcttatcaatgaactatgtgtatcaagccatactaaactggagtttagcaggacaaaggcaaactaaatgtagaacataacatatcagctgaatatgtctatccaggactgtttttctagaacataaatcatggagctccttgacagtgtatccactgtttttggggtttaataaaaccaactagaatttagacttaaaaagaaattattattccttttggttgtccacataaagtagtccagggctatcatatggctaaaatcaagttatttggttcatctctggtatgtatttataaagtcaacttatcagccattaagatggagatttgctttaaatttttgcagtgtgtgtggcagtcagaaaaacccatatctagttttcaacttcacctctggtgtttttatggcttaaccttatatcattgatccaacatctagcctgatgctggagctcttatttctagcctgatgctggagctcttatatctagcctgatgctggagctcttgaagctgactcttggaagtttggagggtgtagagtttcccatctagtatttaatttgtccctgtgccattagtcccagcttgaagtcatttgccagtgtcgatgttgacaggattgtgacaatattgcctttcataaaaccgagaaccaaagaattccattattctaacaaagcctgagtttcatagattgtgggcacatctagacagatatgtgcatgcttgatggtgcagagaaactgctgacttccaccaacctcatgctccccctggctggccatacagagggattcgttgtcatattgaaaaggctctgaaagatgagtttctaattgaagctcactatctcaggttggtgtttctactgtgtagtcccaagcctgtatccatatcataaaagtggaggcctggtactcctccaggttatctggccagtgtagactcctccatctgaatatgaacctccagggtaagaatttttcagacatgtctatactgaacagtaggatcctgcactttccaaatgtctgcctccttttgttcttcattgacccattctaattcctgttaggtgtgagaagaattgtcttcagttctctctccattctcattcatgatggaatcattgatccattgaccagttgagaaatgattgatgctgaagaagtggtattctattggtaaggcttattaccaaacttccgataatgaagcaggctaccaaaaacttatccagcccaccctaggagtgtttggatttgatcatggatgtagcatacaccaaaatccaccgagacctttgcaaaattaggctacttgttttattttgccagattatcatgggagagtctttaactagttctgaatatttgtaagtctgagtacttcatagaattataaagaaggtacagctgaccccttctcaccatgttgtaaatatttactgagactgggtgcagtactgagggataataatcttctgatttatcaaatcctgactgtctagagcaaattgtacactctctttgtgaatggtcctgtaacgtgtatgaacacatttctgggtgccttagaagttgtatttttcatgtgtgctaatatgcagtatttatacattgtgagaagctgctttgaataaaaaggttgaaacttc

SEQ ID NO: 117768 - DNA, 2321 bp, Homo sapiens
  Payload ID: 3009
  Gene Symbol: CDY1
  Gene Name: chromodomain protein, Y-linked, 1
  Uniprot ID: Q9Y6F8
  ENST ID: ENST00000306609
  CDS Start-End: 282-1946
ctgtggatttagctactctcacctgaggctactgagcaagttgtcatgcaccatgagacaaagcccaagctgtcccaccaggcagtaagtatggagaggttcaggcacatggcatagctgctatttcgcacaattttcactacaccagtggtgacaaaatagaagaggttcatccatacacagaacctggtgaagagctggaggcagaaagaagtgtctatgtggagacgcaactgaaacaaaggtggcacagcaactgttccaatcccgtgtctttcctcatggcttcccaggagtttgaggttgaagctattgttgacaaaagacaggataaaaatgggaatacacagtatttggttcggtggaaaggttatgacaaacaggatgacacttgggaaccagagcagcacctcatgaactgtgaaaaatgtgtacatgattttaatagacgacagactgaaaaacagaaaaaactgacatggactacaaccagtagaattttttcaaacaatgccagaagaagaacttccagatctacaaaagcaaactattctaagaactctcctaaaacgccagtgactgataaacaccacaggtccaaaaaccgcaagttatttgctgccagcaagaacgttaggagaaaggcagcttcaattctctccgacacaaagaatatggagataataaattcaactattgagacccttgcacctgacagcccctttgaccacaaaactgtgagtggctttcagaaacttgagaaactggaccctattgcagcagatcagcaggacacggtggtcttcaaggtgacagaagggaaactcctccgggaccctttgtcacgtcctggtgcagaacagactggaatacagaacaagactcagatacacccactaatgtcgcagatgtctggctcagttactgcttctatggccacaggttcagctacccgaaagggtatagtggtattaatagacccattagcagccaatgggacaacagacatgcatacctcagttccaagagtgaaaggtgggcaaagaaatattactgatgacagcagagaccagccttttatcaagaagatgcacttcaccataaggctaacagaaagtgccagcacatacagagacattgtagtgaagaaagaggatggattcacccagatagtgctatcaactagatcgacagaaaaaaatgcactgaatacagaagtaattaaagaaatagttaatgctctgaatagcgctgctgcagatgacagcaagctcgtgctgttcagtgcagctggaagtgtcttttgctgcggtcttgattttgggtactttgtgaagcacttaaggaataacagaaacacagcaagccttgaaatggtggacaccatcaagaactttgtgaatacttttattcaatttaaaaagcctattgttgtatcagtcaatggccctgcgattggactaggtgcatccatcctgcctctttgtgatctcgtgtgggctaatgaaaaggcttggttccaaaccccttatacgacctttggacagagtccagatggctgttcttctattacattccccaaaatgatgggtaaagcatctgccaatgaaatgttaattgctgggcgaaagctgacagcaagggaggcatgcgccaaaggcctggtctctcaggtatttttgactggaactttcacccaagaggttatgattcaaattaaggagcttgcctcatacaatccaattgtactggaagaatgtaaggccctcgttcgctgtaatattaagttggagttggaacaggccaatgagagagagtgtgaggtgctgaggaagatctggagctcagcccaagggatagaatccatgttaaaaatacctctgttgggatataaagcagccttccctcccagaaagacacagaatgatcagagatggtgcccttgactttatagtggcacaaacgcttcagagacacacaattataagagacttatcttttagcataaatacttatggctcaaaatccactgacgatcattctcctaaactgaacacatgactagaattggtggtgagatatcgcttgattttcttttcctttataaatgtctagttcttacccagttaacaaaagaaaactttatcgctctaaagtaaaacttgttacaccacattagtgaattatggaatgattttggtggaaatatccaggttctaatgtgtggaatgtgcagatttaggttactttagtgtatgttctagttaataagttaaaattctggacacattattaaaggcagaaacttctttcaaagcaaa

SEQ ID NO: 117769 - DNA, 2177 bp, Homo sapiens
  Payload ID: 3009
  Gene Symbol: CDY1
  Gene Name: chromodomain protein, Y-linked, 1
  Uniprot ID: Q9Y6F8
  ENST ID: ENST00000361963
  CDS Start-End: 282-1904
ctgtggatttagctactctcacctgaggctactgagcaagttgtcatgcaccatgagacaaagcccaagctgtcccaccaggcagtaagtatggagaggttcaggcacatggcatagctgctatttcgcacaattttcactacaccagtggtgacaaaatagaagaggttcatccatacacagaacctggtgaagagctggaggcagaaagaagtgtctatgtggagacgcaactgaaacaaaggtggcacagcaactgttccaatcccgtgtctttcctcatggcttcccaggagtttgaggttgaagctattgttgacaaaagacaggataaaaatgggaatacacagtatttggttcggtggaaaggttatgacaaacaggatgacacttgggaaccagagcagcacctcatgaactgtgaaaaatgtgtacatgattttaatagacgacagactgaaaaacagaaaaaactgacatggactacaaccagtagaattttttcaaacaatgccagaagaagaacttccagatctacaaaagcaaactattctaagaactctcctaaaacgccagtgactgataaacaccacaggtccaaaaaccgcaagttatttgctgccagcaagaacgttaggagaaaggcagcttcaattctctccgacacaaagaatatggagataataaattcaactattgagacccttgcacctgacagcccctttgaccacaaaactgtgagtggctttcagaaacttgagaaactggaccctattgcagcagatcagcaggacacggtggtcttcaaggtgacagaagggaaactcctccgggaccctttgtcacgtcctggtgcagaacagactggaatacagaacaagactcagatacacccactaatgtcgcagatgtctggctcagttactgcttctatggccacaggttcagctacccgaaagggtatagtggtattaatagacccattagcagccaatgggacaacagacatgcatacctcagttccaagagtgaaaggtgggcaaagaaatattactgatgacagcagagaccagccttttatcaagaagatgcacttcaccataaggctaacagaaagtgccagcacatacagagacattgtagtgaagaaagaggatggattcacccagatagtgctatcaactagatcgacagaaaaaaatgcactgaatacagaagtaattaaagaaatagttaatgctctgaatagcgctgctgcagatgacagcaagctcgtgctgttcagtgcagctggaagtgtcttttgctgcggtcttgattttgggtactttgtgaagcacttaaggaataacagaaacacagcaagccttgaaatggtggacaccatcaagaactttgtgaatacttttattcaatttaaaaagcctattgttgtatcagtcaatggccctgcgattggactaggtgcatccatcctgcctctttgtgatctcgtgtgggctaatgaaaaggcttggttccaaaccccttatacgacctttggacagagtccagatggctgttcttctattacattccccaaaatgatgggtaaagcatctgccaatgaaatgttaattgctgggcgaaagctgacagcaagggaggcatgcgccaaaggcctggtctctcaggtatttttgactggaactttcacccaagaggttatgattcaaattaaggagcttgcctcatacaatccaattgtactggaagaatgtaaggccctcgttcgctgtaatattaagttggagttggaacaggccaatgagagagagtgtgaggtgctgaggaagatctggagctcagcccaagggatagaatccatgttaaagtatgttgaaaataaaattgatgagttttaattgtcagtctgtctgctcaggacacaagaactaaggggcaacaaatgcatcatgagttgcaagatgccctaatccatcttcatagcccaaaacaatttcacccatagctaaggcttggaaacagaactggaaatgtccaagctatgtatttaaattatcacatcatttttaagcactgtagctttacaaggagtaacaaaacagcctctttgcccaaatgtgattattttatgcacacctaagcccaaatataaaaacagactcttcttgcaa

SEQ ID NO: 117770 - DNA, 2321 bp, Homo sapiens; identical to SEQ ID NO: 117768
  Payload ID: 3010
  Gene Symbol: CDY1B
  Gene Name: chromodomain protein, Y-linked, 1B
  Uniprot ID: Q9Y6F8
  ENST ID: ENST00000306882
  CDS Start-End: 282-1946

SEQ ID NO: 117771 - DNA, 2227 bp, Homo sapiens
  Payload ID: 3010
  Gene Symbol: CDY1B
  Gene Name: chromodomain protein, Y-linked, 1B
  Uniprot ID: Q9Y6F8
  ENST ID: ENST00000382407
  CDS Start-End: 332-1954
agagtaacaggcaggaagaaagctttctgtactacaccagagggttggggctgtggatttagctactctcacctgaggctactgagcaagttgtcatgcaccatgagacaaagcccaagctgtcccaccaggcagtaagtatggagaggttcaggcacatggcatagctgctatttcgcacaattttcactacaccagtggtgacaaaatagaagaggttcatccatacacagaacctggtgaagagctggaggcagaaagaagtgtctatgtggagacgcaactgaaacaaaggtggcacagcaactgttccaatcccgtgtctttcctcatggcttcccaggagtttgaggttgaagctattgttgacaaaagacaggataaaaatgggaatacacagtatttggttcggtggaaaggttatgacaaacaggatgacacttgggaaccagagcagcacctcatgaactgtgaaaaatgtgtacatgattttaatagacgacagactgaaaaacagaaaaaactgacatggactacaaccagtagaattttttcaaacaatgccagaagaagaacttccagatctacaaaagcaaactattctaagaactctcctaaaacgccagtgactgataaacaccacaggtccaaaaaccgcaagttatttgctgccagcaagaacgttaggagaaaggcagcttcaattctctccgacacaaagaatatggagataataaattcaactattgagacccttgcacctgacagcccctttgaccacaaaactgtgagtggctttcagaaacttgagaaactggaccctattgcagcagatcagcaggacacggtggtcttcaaggtgacagaagggaaactcctccgggaccctttgtcacgtcctggtgcagaacagactggaatacagaacaagactcagatacacccactaatgtcgcagatgtctggctcagttactgcttctatggccacaggttcagctacccgaaagggtatagtggtattaatagacccattagcagccaatgggacaacagacatgcatacctcagttccaagagtgaaaggtgggcaaagaaatattactgatgacagcagagaccagccttttatcaagaagatgcacttcaccataaggctaacagaaagtgccagcacatacagagacattgtagtgaagaaagaggatggattcacccagatagtgctatcaactagatcgacagaaaaaaatgcactgaatacagaagtaattaaagaaatagttaatgctctgaatagcgctgctgcagatgacagcaagctcgtgctgttcagtgcagctggaagtgtcttttgctgcggtcttgattttgggtactttgtgaagcacttaaggaataacagaaacacagcaagccttgaaatggtggacaccatcaagaactttgtgaatacttttattcaatttaaaaagcctattgttgtatcagtcaatggccctgcgattggactaggtgcatccatcctgcctctttgtgatctcgtgtgggctaatgaaaaggcttggttccaaaccccttatacgacctttggacagagtccagatggctgttcttctattacattccccaaaatgatgggtaaagcatctgccaatgaaatgttaattgctgggcgaaagctgacagcaagggaggcatgcgccaaaggcctggtctctcaggtatttttgactggaactttcacccaagaggttatgattcaaattaaggagcttgcctcatacaatccaattgtactggaagaatgtaaggccctcgttcgctgtaatattaagttggagttggaacaggccaatgagagagagtgtgaggtgctgaggaagatctggagctcagcccaagggatagaatccatgttaaagtatgttgaaaataaaattgatgagttttaattgtcagtctgtctgctcaggacacaagaactaaggggcaacaaatgcatcatgagttgcaagatgccctaatccatcttcatagcccaaaacaatttcacccatagctaaggcttggaaacagaactggaaatgtccaagctatgtatttaaattatcacatcatttttaagcactgtagctttacaaggagtaacaaaacagcctctttgcccaaatgtgattattttatgcacacctaagcccaaatataaaaacagactcttcttgcaa

SEQ ID NO: 117772 - DNA, 1954 bp, Homo sapiens
  Payload ID: 3011
  Gene Symbol: CDY2A
  Gene Name: chromodomain protein, Y-linked, 2A
  Uniprot ID: Q9Y6F7
  ENST ID: ENST00000250838
  CDS Start-End: 329-1954
gtaacaggcaggaagaaagctttctgtactacaccagagggttggggctgtggatttagctactctcacctgaggctactgagcaagctgtcatgcaccatgagacaaagcccaagctgtcccaccaggcagtaagtgtggagaggttcaggcacatggcatagctgctatttcgcacaattttcactacaccagtggtgaccaaatagaagaggttcatccatacacagaacctggtgaagagctggaggcagaaagaagtgtctatgtggagacgcaactgaaacaaaggtggcacagcaactgttccaatcccgtgtctttcctcatggcttcccaggagtttgaggttgaagctattgttgacaaaagacaggataaaaatgggaatacacagtatttggttcggtggaaaggttatgacaaacaggatgacacttgggaaccagagcagcacctcatgaactgtgaaaaatgtgtacatgattttaatagacgacagactgaaaaacagaaaaaactgacatggactacaaccagtagaattttttcaaacaatgccagaagaagaacttccagatctacaaaagcaaactattctaagaactctcctaaaactccagtgactgataaacaccacaggtccaaaaactgcaagttatttgctgccagcaagaacgttaggagaaaggcagcttcaactctctccgacacaaagaatatggagataataaattcaactattgagacccttgcacctgacagcccctttgaccacaagaaaactgtgagtggctttcagaaacttgagaaactggaccctattgcagcagatcagcaggacacggtggtcttcaaggtgacagaagggaaactcctccgggaccctttgtcacatcctggtgcagaacagactggaatacagaacaagactcagatgcacccactaatgtcgcagatgtctggctcagttactgcttctatggccacaggttcagctacccgaaagggtatagtggtattaatagacccattagcagccaatgggacaacagacatgcatacctcagttccaagagtgaaaggtgggcaaagaaatattactgatgacagcagaggccagccttttatcaagaagatgcacttcaccataaggctaacagaaagtgccatcacatacagagacattgtagtgaagaaagaggatggattcacccagatagtgctatcaactagatcgacagaaaaaaatgcactgaatacagaagtaattaaagaaatggttaatgctctgaatagcgctgctgcagatgacagcaagctcgtgctgttcagtgcagctggaagtgtcttttgctgcggtcttgattttgggtactttgtgaggcacttaaggaatgacagaaacacagcaagccttgaaatggtggacaccatcaagaactttgtgaatacttttattcaatttaaaaagcctattgttgtatcagtcaatggccctgccattggactaggtgcatccatcctgcctctttgtgatctcgtgtgggctaatgaaaaggcttggttccaaaccccttatacgacctttggacagagtccagatggctgttcttctattacattccccaaaatgatgggtaaagcatctgccaatgaaatgttaattgctgggcgaaagctgacagcacgggaggcatgcgccaaaggcctggtctctcaggtatttttgactggaactttcacccaagaggttatgattcaaattaaggagcttgcctcatacaatgcaattgtactggaagaatgtaaggccctcgttcgctgtaatattaagttggagttggaacaggccaatgagagagagtgtgaggtgctgaggaagatctggagctcagcccaagggatagaatccatgttaaagtatgttgaaaataaaattgatgagttttaa

SEQ ID NO: 117773 - DNA, 2369 bp, Homo sapiens
  Payload ID: 3011
  Gene Symbol: CDY2A
  Gene Name: chromodomain protein, Y-linked, 2A
  ENST ID: ENST00000426790
  CDS Start-End: 327-1994
aacaggcaggaagaaagctttctgtactacaccagagggttggggctgtggatttagctactctcacctgaggctactgagcaagctgtcatgcaccatgagacaaagcccaagctgtcccaccaggcagtaagtgtggagaggttcaggcacatggcatagctgctatttcgcacaattttcactacaccagtggtgaccaaatagaagaggttcatccatacacagaacctggtgaagagctggaggcagaaagaagtgtctatgtggagacgcaactgaaacaaaggtggcacagcaactgttccaatcccgtgtctttcctcatggcttcccaggagtttgaggttgaagctattgttgacaaaagacaggataaaaatgggaatacacagtatttggttcggtggaaaggttatgacaaacaggatgacacttgggaaccagagcagcacctcatgaactgtgaaaaatgtgtacatgattttaatagacgacagactgaaaaacagaaaaaactgacatggactacaaccagtagaattttttcaaacaatgccagaagaagaacttccagatctacaaaagcaaactattctaagaactctcctaaaactccagtgactgataaacaccacaggtccaaaaactgcaagttatttgctgccagcaagaacgttaggagaaaggcagcttcaactctctccgacacaaagaatatggagataataaattcaactattgagacccttgcacctgacagcccctttgaccacaagaaaactgtgagtggctttcagaaacttgagaaactggaccctattgcagcagatcagcaggacacggtggtcttcaaggtgacagaagggaaactcctccgggaccctttgtcacatcctggtgcagaacagactggaatacagaacaagactcagatgcacccactaatgtcgcagatgtctggctcagttactgcttctatggccacaggttcagctacccgaaagggtatagtggtattaatagacccattagcagccaatgggacaacagacatgcatacctcagttccaagagtgaaaggtgggcaaagaaatattactgatgacagcagaggccagccttttatcaagaagatgcacttcaccataaggctaacagaaagtgccatcacatacagagacattgtagtgaagaaagaggatggattcacccagatagtgctatcaactagatcgacagaaaaaaatgcactgaatacagaagtaattaaagaaatggttaatgctctgaatagcgctgctgcagatgacagcaagctcgtgctgttcagtgcagctggaagtgtcttttgctgcggtcttgattttgggtactttgtgaggcacttaaggaatgacagaaacacagcaagccttgaaatggtggacaccatcaagaactttgtgaatacttttattcaatttaaaaagcctattgttgtatcagtcaatggccctgccattggactaggtgcatccatcctgcctctttgtgatctcgtgtgggctaatgaaaaggcttggttccaaaccccttatacgacctttggacagagtccagatggctgttcttctattacattccccaaaatgatgggtaaagcatctgccaatgaaatgttaattgctgggcgaaagctgacagcacgggaggcatgcgccaaaggcctggtctctcaggtatttttgactggaactttcacccaagaggttatgattcaaattaaggagcttgcctcatacaatgcaattgtactggaagaatgtaaggccctcgttcgctgtaatattaagttggagttggaacaggccaatgagagagagtgtgaggtgctgaggaagatctggagctcagcccaagggatagaatccatgttaaaaatacctctattgggatataaagcagccttccctcccagaaagacacagaacgatcagagatggtgcccttgactttatagtggcacaaacacttcagagacacacaattataagagacttatcttttagcataaatacttatggcacaaaatccactgacgatcattctcctaaactgaacacatgactagaattggtggtgagatatcgcttgattttcttttcctttataaatgtctagttcttacccagttaacaaaagaaaactttatcgctctaaagtaaaacttgttacaccacattagtgaattatggaatcattttggtggaaatatccaggttctaatgtgtggaatgtgcagatttaggttactttagtgtatgttctagttaataagttaaaattctggacacattattaaaggcagaaacttctttcaaaacaaa

SEQ ID NO: 117774 - DNA, 1954 bp, Homo sapiens
  Payload ID: 3012
  Gene Symbol: CDY2B
  Gene Name: chromodomain protein, Y-linked, 2B
  Uniprot ID: Q9Y6F7
  ENST ID: ENST00000382867
  CDS Start-End: 329-1954
gtaacaggcaggaagaaagctttctgtactacaccagagggttggggctgtggatttagctactctcacctgaggctactgagcaagctgtcatgcaccacgagacaaagcccaagctgtcccaccaggcagtaagtgtggagaggttcaggcacatggcatagctgctatttcgcacaattttcactacaccagtggtgaccaaatagaagaggttcatccatacacagaacctggtgaagagctggaggcagaaagaagtgtctatgtggagacgcaactgaaacaaaggtggcacagcaactgttccaatcccgtgtctttcctcatggcttcccaggagtttgaggttgaagctattgttgacaaaagacaggataaaaatgggaatacacagtatttggttcggtggaaaggttatgacaaacaggatgacacttgggaaccagagcagcacctcatgaactgtgaaaaatgtgtacatgattttaatagacgacagactgaaaaacagaaaaaactgacatggactacaaccagtagaattttttcaaacaatgccagaagaagaacttccagatctacaaaagcaaactattctaagaactctcctaaaactccagtgactgataaacaccacaggtccaaaaactgcaagttatttgctgccagcaagaacgttaggagaaaggcagcttcaactctctccgacacaaagaatatggagataataaattcaactattgagacccttgcacctgacagcccctttgaccacaagaaaactgtgagtggctttcagaaacttgagaaactggaccctattgcagcagatcagcaggacacggtggtcttcaaggtgacagaagggaaactcctccgggaccctttgtcacatcctggtgcagaacagactggaatacagaacaagactcagatgcacccactaatgtcgcagatgtctggctcagttactgcttctatggccacaggttcagctacccgaaagggtatagtggtattaatagacccattagcagccaatgggacaacagacatgcatacctcagttccaagagtgaaaggtgggcaaagaaatattactgatgacagcagaggccagccttttatcaagaagatgcacttcaccataaggctaacagaaagtgccatcacatacagagacattgtagtgaagaaagaggatggattcacccagatagtgctatcaactagatcgacagaaaaaaatgcactgaatacagaagtaattaaagaaatggttaatgctctgaatagcgctgctgcagatgacagcaagctcgtgctgttcagtgcagctggaagtgtcttttgctgcggtcttgattttgggtactttgtgaggcacttaaggaatgacagaaacacagcaagccttgaaatggtggacaccatcaagaactttgtgaatacttttattcaatttaaaaagcctattgttgtatcagtcaatggccctgccattggactaggtgcatccatcctgcctctttgtgatctcgtgtgggctaatgaaaaggcttggttccaaaccccttatacgacctttggacagagtccagatggctgttcttctattacattccccaaaatgatgggtaaagcatctgccaatgaaatgttaattgctgggcgaaagctgacagcacgggaggcatgcgccaaaggcctggtctctcaggtatttttgactggaactttcacccaagaggttatgattcaaattaaggagcttgcctcatacaatgcaattgtactggaagaatgtaaggccctcgttcgctgtaatattaagttggagttggaacaggccaatgagagagagtgtgaggtgctgaggaagatctggagctcagcccaagggatagaatccatgttaaagtatgttgaaaataaaattgatgagttttaa

SEQ ID NO: 117775 - DNA, 2369 bp, Homo sapiens
  Payload ID: 3012
  Gene Symbol: CDY2B
  Gene Name: chromodomain protein, Y-linked, 2B
  ENST ID: ENST00000544303
  CDS Start-End: 327-1994
aacaggcaggaagaaagctttctgtactacaccagagggttggggctgtggatttagctactctcacctgaggctactgagcaagctgtcatgcaccacgagacaaagcccaagctgtcccaccaggcagtaagtgtggagaggttcaggcacatggcatagctgctatttcgcacaattttcactacaccagtggtgaccaaatagaagaggttcatccatacacagaacctggtgaagagctggaggcagaaagaagtgtctatgtggagacgcaactgaaacaaaggtggcacagcaactgttccaatcccgtgtctttcctcatggcttcccaggagtttgaggttgaagctattgttgacaaaagacaggataaaaatgggaatacacagtatttggttcggtggaaaggttatgacaaacaggatgacacttgggaaccagagcagcacctcatgaactgtgaaaaatgtgtacatgattttaatagacgacagactgaaaaacagaaaaaactgacatggactacaaccagtagaattttttcaaacaatgccagaagaagaacttccagatctacaaaagcaaactattctaagaactctcctaaaactccagtgactgataaacaccacaggtccaaaaactgcaagttatttgctgccagcaagaacgttaggagaaaggcagcttcaactctctccgacacaaagaatatggagataataaattcaactattgagacccttgcacctgacagcccctttgaccacaagaaaactgtgagtggctttcagaaacttgagaaactggaccctattgcagcagatcagcaggacacggtggtcttcaaggtgacagaagggaaactcctccgggaccctttgtcacatcctggtgcagaacagactggaatacagaacaagactcagatgcacccactaatgtcgcagatgtctggctcagttactgcttctatggccacaggttcagctacccgaaagggtatagtggtattaatagacccattagcagccaatgggacaacagacatgcatacctcagttccaagagtgaaaggtgggcaaagaaatattactgatgacagcagaggccagccttttatcaagaagatgcacttcaccataaggctaacagaaagtgccatcacatacagagacattgtagtgaagaaagaggatggattcacccagatagtgctatcaactagatcgacagaaaaaaatgcactgaatacagaagtaattaaagaaatggttaatgctctgaatagcgctgctgcagatgacagcaagctcgtgctgttcagtgcagctggaagtgtcttttgctgcggtcttgattttgggtactttgtgaggcacttaaggaatgacagaaacacagcaagccttgaaatggtggacaccatcaagaactttgtgaatacttttattcaatttaaaaagcctattgttgtatcagtcaatggccctgccattggactaggtgcatccatcctgcctctttgtgatctcgtgtgggctaatgaaaaggcttggttccaaaccccttatacgacctttggacagagtccagatggctgttcttctattacattccccaaaatgatgggtaaagcatctgccaatgaaatgttaattgctgggcgaaagctgacagcacgggaggcatgcgccaaaggcctggtctctcaggtatttttgactggaactttcacccaagaggttatgattcaaattaaggagcttgcctcatacaatgcaattgtactggaagaatgtaaggccctcgttcgctgtaatattaagttggagttggaacaggccaatgagagagagtgtgaggtgctgaggaagatctggagctcagcccaagggatagaatccatgttaaaaatacctctattgggatataaagcagccttccctcccagaaagacacagaacgatcagagatggtgcccttgactttatagtggcacaaacacttcagagacacacaattataagagacttatcttttagcataaatacttatggcacaaaatccactgacgatcattctcctaaactgaacacatgactagaattggtggtgagatatcgcttgattttcttttcctttataaatgtctagttcttacccagttaacaaaagaaaactttatcgctctaaagtaaaacttgttacaccacattagtgaattatggaatcattttggtggaaatatccaggttctaatgtgtggaatgtgcagatttaggttactttagtgtatgttctagttaataagttaaaattctggacacattattaaaggcagaaacttctttcaaaacaaa

SEQ ID NO: 117776 - DNA, 2063 bp, Homo sapiens
  Payload ID: 3013
  Gene Symbol: CHGA
  Gene Name: chromogranin A
  Uniprot ID: P10645
  ENST ID: ENST00000216492
  CDS Start-End: 281-1654
aagggggcggcaccgctgacgtcatttccggggtcggggtatataagcggggcgcgagggcgctgctgctgccaccgctcctgccactgcagtgctcgagccccgtgcaggggagcttgcgggaggatcgaccgacagacggacgcacgccgaggcactgcgcccccagccccgcgccggtgccaccgcagcccgaccccggccgccagtccagccgcccctcgcccggtgcctaggtgcccggccccacaccgccagctgctcggcgcccgggtccgccatgcgctccgccgctgtcctggctcttctgctctgcgccgggcaagtcactgcgctccctgtgaacagccctatgaataaaggggataccgaggtgatgaaatgcatcgttgaggtcatctccgacacactttccaagcccagccccatgcctgtcagccaggaatgttttgagacactccgaggagatgaacggatcctttccattctgagacatcagaatttactgaaggagctccaagacctcgctctccaaggcgccaaggagagggcacatcagcagaagaaacacagcggttttgaagatgaactctcagaggttcttgagaaccagagcagccaggccgagctgaaagaggcggtggaagagccatcatccaaggatgttatggagaaaagagaggattccaaggaggcagagaaaagtggtgaagccacagacggagccaggccccaggccctcccggagcccatgcaggagtccaaggctgaggggaacaatcaggcccctggggaggaagaggaggaggaggaggaggccaccaacacccaccctccagccagcctccccagccagaaatacccaggcccacaggccgagggggacagtgagggcctctctcagggtctggtggacagagagaagggcctgagtgcagagccagggtggcaggcaaagagagaagaggaggaggaggaggaggaggaggctgaggctggagaggaggctgtccccgaggaagaaggccccactgtagtgctgaacccccacccgagccttggctacaaggagatccggaaaggcgagagtcggtcggaggctctggctgtggatggagctgggaagcctggggctgaggaggctcaggaccccgaagggaagggagaacaggagcactcccagcagaaagaggaggaggaggagatggcagtggtcccgcaaggcctcttccggggtgggaagagcggagagctggagcaggaggaggagcggctctccaaggagtgggaggactccaaacgctggagcaagatggaccagctggccaaggagctgacggctgagaagcggctggaggggcaggaggaggaggaggacaaccgggacagttccatgaagctctccttccgggcccgggcctacggcttcaggggccctgggccgcagctgcgacgaggctggaggccatcctcccgggaggacagccttgaggcgggcctgcccctccaggtccgaggctaccccgaggagaagaaagaggaggagggcagcgcaaaccgcagaccagaggaccaggagctggagagcctgtcggccattgaagcagagctggagaaagtggcccaccagctgcaggcactacggcggggctgagacaccggctggcagggctggccccagggcaccctgtggccctggctctgctgtccccttggcaggtcctggccagatggcccggatgctgcttccggtagggaggcagcctccagcctgcccaagcccaggccaccctatcgccccctacgcgccttgtctcctactcctgactcctacctgccctggaacatcctttgcagggcagccccacaactttaaacattgacgattccttctctgaacacaggcagctttctagaagtttcccttcctccatcctatccactgggcacaactgcaataacttctgaccttttggtgaaagctgagaactcctgactgtaacatattctgtatgaactttatctaaagaaaaataaatctgttctgggctctttcctctgaa

SEQ ID NO: 117777 - DNA, 1474 bp, Homo sapiens
  Payload ID: 3013
  Gene Symbol: CHGA
  Gene Name: chromogranin A
  ENST ID: ENST00000334654
  CDS Start-End: 185-1105
cgagccccgtgcaggggagcttgcgggaggatcgaccgacagacggacgcacgccgaggcactgcgcccccagccccgcgccggtgccaccgcagcccgaccccggccgccagtccagccgcccctcgcccggtgcctaggtgcccggccccacaccgccagctgctcggcgcccgggtccgccatgcgctccgccgctgtcctggctcttctgctctgcgccgggcaagtcactgcgctccctgtgaacagccctatgaataaaggggataccgaggtgatgaaatgcatcgttgaggtcatctccgacacactttccaagcccagccccatgcctgtcagccaggaatgttttgagacactccgaggagatgaacggatcctttccattctgagacatcagaatttactgaaggagctccaagacctcgctctccaaggcgccaaggagagggcacatcagcagaagaaacacagcggttttgaagatgaactctcagaggttcttgagaaccagagcagccaggccgagctgaaaggtcggtcggaggctctggctgtggatggagctgggaagcctggggctgaggaggctcaggaccccgaagggaagggagaacaggagcactcccagcagaaagaggaggaggaggagatggcagtggtcccgcaaggcctcttccggggtgggaagagcggagagctggagcaggaggaggagcggctctccaaggagtgggaggactccaaacgctggagcaagatggaccagctggccaaggagctgacggctgagaagcggctggaggggcaggaggaggaggaggacaaccgggacagttccatgaagctctccttccgggcccgggcctacggcttcaggggccctgggccgcagctgcgacgaggctggaggccatcctcccgggaggacagccttgaggcgggcctgcccctccaggtccgaggctaccccgaggagaagaaagaggaggagggcagcgcaaaccgcagaccagaggaccaggagctggagagcctgtcggccattgaagcagagctggagaaagtggcccaccagctgcaggcactacggcggggctgagacaccggctggcagggctggccccagggcaccctgtggccctggctctgctgtccccttggcaggtcctggccagatggcccggatgctgcttccggtagggaggcagcctccagcctgcccaagcccaggccaccctatcgccccctacgcgccttgtctcctactcctgactcctacctgccctggaacatcctttgcagggcagccccacaactttaaacattgacgattccttctctgaacacaggcagctttctagaagtttcccttcctccatcctatccactgggcacaactgcaataacttctgaccttttggtgaaagctgagaactcctgactgtaacatattctgtatgaactttat

SEQ ID NO: 117778 - DNA, 896 bp, Homo sapiens
  Payload ID: 3013
  Gene Symbol: CHGA
  Gene Name: chromogranin A
  ENST ID: ENST00000556076
  CDS Start-End: 204-320
ctcctgccactgcagtgctcgagccccgtgcaggggagcttgcgggaggatcgaccgacagacggacgcacgccgaggcactgcgcccccagccccgcgccggtgccaccgcagcccgaccccggccgccagtccagccgcccctcgcccggtgcctaggtgcccggccccacaccgccagctgctcggcgcccgggtccgccatgcgctccgccgctgtcctggctcttctgctctgcgccgggcaagtcactgcgctccctgtgaacagccctatgaataaaggggataccgagatgaacggatcctttccattctgagacatcagaatttactgaaggagctccaagacctcgctctccaaggcgccaaggagagggcacatcagcagaagaaacacagcggttttgaagatgaactctcagaggttcttgagaaccagagcagccaggccgagctgaaagaggcggtggaagagccatcatccaaggatgttatggagaaaagagaggattccaaggaggcagagaaaagtggtgaagccacagacggagccaggccccaggccctcccggagcccatgcaggagtccaaggctgaggggaacaatcaggcccctggggaggaagaggaggaggaggaggaggccaccaacacccaccctccagccagcctccccagccagaaatacccaggcccacaggccgagggggacagtgagggcctctctcagggtctggtggacagagagaagggcctgagtgcagagccagggtggcaggcaaagagagaagaggaggaggaggaggaggaggaggctgaggctggagaggaggctgtccccgaggaagaaggccccactgtagtgctgaacccccacccgagccttggctaca

SEQ ID NO: 117779 - DNA, 2063 bp, Homo sapiens; identical to SEQ ID NO: 117776
  Payload ID: 3013
  Gene Symbol: CHGA
  Gene Name: chromogranin A
  Uniprot ID: P10645
  ENST ID: ENST00000613166
  CDS Start-End: 281-1654

SEQ ID NO: 117780 - DNA, 896 bp, Homo sapiens; identical to SEQ ID NO: 117778
  Payload ID: 3013
  Gene Symbol: CHGA
  Gene Name: chromogranin A
  ENST ID: ENST00000627311
  CDS Start-End: 204-320

SEQ ID NO: 117781 - DNA, 1474 bp, Homo sapiens; identical to SEQ ID NO: 117777
  Payload ID: 3013
  Gene Symbol: CHGA
  Gene Name: chromogranin A
  ENST ID: ENST00000630996
  CDS Start-End: 185-1105

SEQ ID NO: 117782 - DNA, 2550 bp, Homo sapiens
  Payload ID: 3014
  Gene Symbol: CHGB
  Gene Name: chromogranin B
  Uniprot ID: P05060
  ENST ID: ENST00000378961
  CDS Start-End: 205-2238
ccgctcctggctgcccgctcctcccggccctgcggcccccgcctgccctttaaaagagcggggcctgcgccggccgcgccacaccgcggggaccaggaggcacgctggttttccggggccgctccatcgcgccttcctcctgcgcctcgcttctccggtccagccgccatcttcctttccgcacaggggccgccgagcggggccatgcagccaacgctgcttctcagcctcctgggagccgtggggctggcggctgtcaattccatgccagtggataacaggaaccacaatgaaggaatggtgactcgctgcatcattgaggtcctctcaaatgccttgtcgaagtccagcgctccacccatcacccctgagtgccgccaagtcctgaagacgagtagaaaagacgtcaaagacaaagagacaactgaaaatgaaaacacaaagtttgaagtaagattgttaagagacccagctgatgcctcggaagcccacgagtcctccagcaggggagaggcaggagccccaggggaggaggacatccaaggcccaacaaaggcagacacagagaaatgggcagagggaggcgggcacagccgagagcgagcggatgagccccagtggagcctctatccctccgacagccaagtctctgaagaagtgaagacacgccattctgagaagagccagagagaggatgaggaggaggaggagggagagaactatcaaaaaggggagcgaggggaagatagcagtgaagagaaacaccttgaagagccaggagagacacaaaacgcttttctcaatgaaagaaagcaggcttcagctataaaaaaagaggagttagtggccagatcggaaacacatgctgccgggcattctcaggagaagacacatagccgagagaagagtagccaggagagtggagaggagacagggagccaggagaatcacccccaggagtctaaaggccaaccccgaagccaggaagaatctgaggaaggtgaggaagatgccacctctgaggtggacaaacgacgcacgaggcccagacaccaccacgggaggagcaggcccgacaggtcctctcaaggagggagtcttccctctgaggaaaagggacacccccaggaggaatctgaggagtcaaacgtcagcatggccagtttaggggaaaagagggaccaccattcaacccactacagggcttcagaggaagaacctgaatatggagaagaaataaagggttatccaggcgtccaggcccctgaggacctggagtgggagcgctataggggcagaggaagtgaagaatacagggctccaagacctcagagtgaggagagttgggatgaggaggacaagagaaactaccccagcttagagcttgataagatggcacatggatatggtgaagaaagtgaggaagagaggggccttgagccgggaaagggacgccatcacagaggcaggggaggggagccacgtgcctatttcatgtctgacaccagagaagagaaaaggttcttgggtgaaggacaccaccgtgtccaagaaaaccagatggacaaggcaaggaggcatccacaaggtgcgtggaaagagctggacagaaattatctcaactacggtgaggaaggagccccagggaagtggcagcagcagggagacctgcaggacactaaagaaaacagggaggaagctaggtttcaagataaacaatatagctcccatcacacagctgaaaagaggaagagattaggggaactgttcaacccatactacgaccctctccagtggaagagcagccattttgaaagaagagacaacatgaatgacaattttctcgagggtgaggaggaaaatgagctgaccttgaacgagaagaatttcttcccagaatacaactatgactggtgggagaaaaagcccttctctgaggatgtgaactgggggtatgagaagagaaacctcgccagggtccccaagctggacctgaaaaggcaatatgacagggtggcccaactggaccagctccttcactacaggaagaagtcagctgagtttccagacttctatgattctgaggagccggtgagcacccaccaggaggcagaaaatgaaaaggacagggctgaccagacagtcctgacagaggacgagaaaaaagaactcgaaaacttggctgcaatggatttggaactacagaagatagctgagaaattcagccaaaggggctgactgtcattggagcggtgggcactgttaagaagcagccatcacatgatctgtttttcaccacttcactgaaagacaccatttatctacccaagggcagaaagtagaacttactattcattaaatgtttgacacaattggaattgtctttaatttctgtcagaatgctattgaaaatgtgaattgcatgacttgtagcatattcttttctgcaaaatagacatattaacatgcttatgacaatgactgtgctactgtctttggaaaaatgtttgtctcagttggaaataataaaagattcacctgagaccaaaa

SEQ ID NO: 117783 - DNA, 1129 bp, Homo sapiens
  Payload ID: 3014
  Gene Symbol: CHGB
  Gene Name: chromogranin B
  ENST ID: ENST00000455042
  CDS Start-End: 261-1129
cacgctggttttccggggccgctccatcgcgccttcctcctgcgcctcgcttctccggtccagccgccatcttcctttccgcacaggggccgccgagcggggccatgcagccaacgctgcttctcagcctcctgggagccgtggggctggcggtcatttatttgcagaagatattacagatttccagcggaaagagaaagtgctgaaatgggtgtgttctcaagtagccatttggaggatgaaagaacactgtcaattccatgccagtggataacaggaaccacaatgaaggaatggtgactcgctgcatcattgaggtcctctcaaatgccttgtcgaagtccagcgctccacccatcacccctgagtgccgccaagtcctgaagacgagtagaaaagacgtcaaagacaaagagacaactgaaaatgaaaacacaaagtttgaagtaagattgttaagagacccagctgatgcctcggaagcccacgagtcctccagcaggggagaggcaggagccccaggggaggaggacatccaaggcccaacaaaggcagacacagagaaatgggcagagggaggcgggcacagccgagagcgagcggatgagccccagtggagcctctatccctccgacagccaagtctctgaagaagtgaagacacgccattctgagaagagccagagagaggatgaggaggaggaggagggagagaactatcaaaaaggggagcgaggggaagatagcagtgaagagaaacaccttgaagagccaggagagacacaaaacgcttttctcaatgaaagaaagcaggcttcagctataaaaaaagaggagttagtggccagatcggaaacacatgctgccgggcattctcaggagaagacacatagccgagagaagagtagccaggagagtggagaggagacagggagccaggagaatcacccccaggagtctaaaggccaaccccgaagccaggaagaatctgaggaaggtgaggaagatgccacctctgaggtggacaaacgacgcacgaggcccagacaccaccacgggaggagcaggcccgacaggtcctctcaaggagggagtcttccctctgaggaaaagggacacccccaggagga

SEQ ID NO: 117784 - DNA, 579 bp, Homo sapiens
  Payload ID: 3015
  Gene Symbol: C1orf100
  Gene Name: chromosome 1 open reading frame 100
  Uniprot ID: Q5SVJ3
  ENST ID: ENST00000308105
  CDS Start-End: 114-557
actctgcagttgatccagcagcaggaggcagctgtacccatcactgtcctcagagtacttttaagaacaaggaggtctctgcccacggcagcccaagcagattcccatccatcatgactgccatccgactacgagaatttattgagcgtcgcccagtgatcccgccaagtatattcatcgctcaccaaggaagagacgttcaaggctattaccctgggcagctggcaagactccattttgatcatagtgcaaagagagctcccagaccgctcatagacttgacaattccacccaagacaaaatatcactatcagcctcaattagaccaacaaacactcattcgatatatttgtcttcgaagacattcaaagcctgccgagccatggtataaagaaaccacttaccgacgagactattctctgccattttatgagattgattggaaccagaaattagccacagtttcgctgaatcctcgaccgcttaattcactgccagagctctactgttgtgaagagagaagcagctttgaaagaaatgcttttaaactaaaataaccacggcattcgaacaaaataa

SEQ ID NO: 117785 - DNA, 483 bp, Homo sapiens
  Payload ID: 3015
  Gene Symbol: C1orf100
  Gene Name: chromosome 1 open reading frame 100
  Uniprot ID: Q5SVJ3
  ENST ID: ENST00000366537
  CDS Start-End: 114-461
actctgcagttgatccagcagcaggaggcagctgtacccatcactgtcctcagagtacttttaagaacaaggaggtctctgcccacggcagcccaagcagattcccatccatcatgactgccatccgactacgagaatttattgagcgtcgcccagtgatcccgccaagtatattcatcgctcaccaaggaagagacgttcaaggctattaccctgggcagctggcaagactccattttgatcatagtgcaaagagagctcccagacattcaaagcctgccgagccatggtataaagaaaccacttaccgacgagactattctctgccattttatgagattgattggaaccagaaattagccacagtttcgctgaatcctcgaccgcttaattcactgccagagctctactgttgtgaagagagaagcagctttgaaagaaatgcttttaaactaaaataaccacggcattcgaacaaaataa

SEQ ID NO: 117786 - DNA, 3038 bp, Homo sapiens
  Payload ID: 3016
  Gene Symbol: C1orf101
  Gene Name: chromosome 1 open reading frame 101
  Uniprot ID: Q5SY80
  ENST ID: ENST00000366531
  CDS Start-End: 361-2763
aatgcgcgaggcctggacgggagtggccgaggcggttgggcggaggcggagcaggcgccatgtcagcccgggaagtggccgtgctgctgctgtggctgagctgctatggctccgccctttggagattaagttagagtatgaaggaacattatttactgagtggagtgtgccagaaacttgttttgtgctaaataaaagctcacccacgacagaattgcgttgttcctcacctggtgttcacgctataaaaccaattgttactggcccagatgaagaagaacgctatttatttgtggaaagttctcatacttgctttctgtggtactatagagttagaattccatagtactcagcacacagatggccacattgggacagaagcctgtcatacatacagttctgaagagaaaagtttattcttcaaatgagaaaatgagaagggggacctggcgtattgtagtaccaatgacaaaagatgatgcactaaaggagattagaggaaaccaagttacttttcaggattgctttattgcagattttcttattctgttgacttttcctttgttgaccatacctgaaattcctggttatttaccaatctcctcaccacgtggtagtcaattaatggcttcctgggatgcttgtgtagttgcatctgctgttttggtgacagatatggagacctttcacacaactgattcattcaaatcttggaccagaatcagagtgcctccagacattctgagtgatgatgaaagacggagtgtggctcatgtgatcttatcgcgggatggaatcgtttttcttataaatggtgttctttacataaagagttttcgtggatttataagactgggaggaattgtaaatcttcctgatggtggaattactggcatttcatcaagaaaatggtgttgggtcaattatttattaaaggctaaaggaagaagaagcacctttgcagtctggacagaaaatgaaatttacctcggatccattcttcttaagtttgccagattagtaactaccacagaactgaaaaacatcctaagtctatcggtgactgctactctgaccatagacagggttgagtatacaggacaccctctggagattgctgtgtttttaaattattgcactgtatgtaacgtcaccaaaaagattttcttagtgatatataatgaagatacaaaacagtgggtttcccaagactttacattagatgcccctattgacagtgttaccatgccacattttacattttcagcactgccaggattactgctatggaacaagcatagtatctactattgttaccataatttcacctttactgggattttacagacacctgcaggacatggaaatctatcaatgctatcaaatgacagcattattcatgaagttttcatagattattatggagatattttggtaaaaatggaaaataatgtaatattttattccaagattaatactagagatgcagtaaagctgcatttatggacaaattacacaacaagagcattcattttcttaagtacatctggtcaaacatatttcctgtatgctttggatgatggcacaatacaaatacaggactatcccttacatctggaagcacaaagtatagctttcacaacaaaagacaaatgcccatacatggcatttcataacaatgttgctcatgttttttactttttggacaagggagaggctctgacagtttggactcagatcgtctatccagaaaacactggtctgtatgttattgtggaatcttatggcccaaaaatattacaagagagtcatgagatttcctttgaagctgcctttggatactgcaccaaaactctgacactaacattttatcagaatgtagattatgagagaatatctgattactttgagacacaagacaagcacacgggtcttgtgctggttcagtttcgacctagtgaatattcaaaagcatgtccaatagcccaaaaggtgttccaaatagctgttggctgtgatgataaaaaattcattgcaattaaaggatttagtaaaaaaggatgtcatcaccatgatttttcatacgtgattgaaaagtcatatctgaggcatcagccatcgaaaaacttgagagtaaggtatatttggggagaatatggctgccctctgaggcttgacttcacagaaaagtttcaacctgtggttcaactatttgatgataatggctatgttaaagacgttgaagcaaatttcatagtgtgggaaatacacggcagggatgactatagctttaataatactatggcacagagtggttgtttacatgaagcacagacatggaagtcaatgattgaacttaacaagcacctcccactagaagaagtctggggacctgagaactataaacactgtttttcttatgctattggaaaaccaggagacttaaatcaaccatacgagattatcaacagttctaatggtaaccatatattttggcccatgggccattctggaatgtatgtatttcgtgtgaagatcctggatccaaactatagtttctgtaacctaacagctatgtttgcaatagagacatttggactgattcccagtccaagtgtctacctggtagcttctttcctcttcgtcctgatgctgctcttcttcactattcttgttttgagctactttcggtacatgaggatttatagacgatatatttatgaaccacttcacaaacctcaaagaaaacgtaagaagaattaggaaaactgaaagtttgtttattacagatatatgcatatagagaaacagtgtattacatagtgatattgagagtgtgtgtttgaccaagaaatactaaatataagctcgtagtaggcatcaccaaattcaagatctgaaaaatattcttgaactatctccaaaatagaaatgttttcatatatattgttattaaattaatcctttgtttgccttcattttaaagatactctatgtactctcacatggcatgaaaaaataaactaaatttgactatt

SEQ ID NO: 117787 - DNA, 3019 bp, Homo sapiens
  Payload ID: 3016
  Gene Symbol: C1orf101
  Gene Name: chromosome 1 open reading frame 101
  Uniprot ID: Q5SY80
  ENST ID: ENST00000366533
  CDS Start-End: 43-2541
cgggagtggccgaggcggttgggcggaggcggagcaggcgccatgtcagcccgggaagtggccgtgctgctgctgtggctgagctgctatggctccgccctttggaggtattccactaacagcccaaactatcgcatttttagtaccagaagtactattaagttagagtatgaaggaacattatttactgagtggagtgtgccagaaacttgttttgtgctaaataaaagctcacccacgacagaattgcgttgttcctcacctggtgttcacgctataaaaccaattgttactggcccagatgaagaagaacgctatttatttgtggaaagttctcatacttgctttctgtggtactatagagttagacatttctttaacaactttacccagcttatcactgtgtgggcatatgatccagaaagtgcagatcctgatgagttgctggggaatgcagaagaaccttcaataaattccatagtactcagcacacagatggccacattgggacagaagcctgtcatacatacagttctgaagagaaaagtttattcttcaaatgagaaaatgagaagggggacctggcgtattgtagtaccaatgacaaaagatgatgcactaaaggagattagaggaaaccaagttacttttcaggattgctttattgcagattttcttattctgttgacttttcctttgttgaccatacctgaaattcctggttatttaccaatctcctcaccacgtggtagtcaattaatggcttcctgggatgcttgtgtagttgcatctgctgttttggtgacagatatggagacctttcacacaactgattcattcaaatcttggaccagaatcagagtgcctccagacattctgagtgatgatgaaagacggagtgtggctcatgtgatcttatcgcgggatggaatcgtttttcttataaatggtgttctttacataaagagttttcgtggatttataagactgggaggaattgtaaatcttcctgatggtggaattactggcatttcatcaagaaaatggtgttgggtcaattatttattaaaggctaaaggaagaagaagcacctttgcagtctggacagaaaatgaaatttacctcggatccattcttcttaagtttgccagattagtaactaccacagaactgaaaaacatcctaagtctatcggtgactgctactctgaccatagacagggttgagtatacaggacaccctctggagattgctgtgtttttaaattattgcactgtatgtaacgtcaccaaaaagattttcttagtgatatataatgaagatacaaaacagtgggtttcccaagactttacattagatgcccctattgacagtgttaccatgccacattttacattttcagcactgccaggattactgctatggaacaagcatagtatctactattgttaccataatttcacctttactgggattttacagacacctgcaggacatggaaatctatcaatgctatcaaatgacagcattattcatgaagttttcatagattattatggagatattttggtaaaaatggaaaataatgtaatattttattccaagattaatactagagatgcagtaaagctgcatttatggacaaattacacaacaagagcattcattttcttaagtacatctggtcaaacatatttcctgtatgctttggatgatggcacaatacaaatacaggactatcccttacatctggaagcacaaagtatagctttcacaacaaaagacaaatgcccatacatggcatttcataacaatgttgctcatgttttttactttttggacaagggagaggctctgacagtttggactcagatcgtctatccagaaaacactggtctgtatgttattgtggaatcttatggcccaaaaatattacaagagagtcatgagatttcctttgaagctgcctttggatactgcaccaaaactctgacactaacattttatcagaatgtagattatgagagaatatctgattactttgagacacaagacaagcacacgggtcttgtgctggttcagtttcgacctagtgaatattcaaaagcatgtccaatagcccaaaaggtgttccaaatagctgttggctgtgatgataaaaaattcattgcaattaaaggatttagtaaaaaaggatgtcatcaccatgatttttcatacgtgattgaaaagtcatatctgaggcatcagccatcgaaaaacttgagagtaaggtatatttggggagaatatggctgccctctgaggcttgacttcacagaaaagtttcaacctgtggttcaactatttgatgataatggctatgttaaagacgttgaagcaaatttcatagtgtgggaaatacacggcagggatgactatagctttaataatactatggcacagagtggttgtttacatgaagcacagacatggaagtcaatgattgaacttaacaagcacctcccactagaagaagtctggggacctgagtttctgtaacctaacagctatgtttgcaatagagacatttggactgattcccagtccaagtgtctacctggtagcttctttcctcttcgtcctgatgctgctcttcttcactattcttgttttgagctactttcggtacatgaggatttatagacgatatatttatgaaccacttcacaaacctcaaagaaaacgtaagaagaattaggaaaactgaaagtttgtttattacagatatatgcatatagagaaacagtgtattacatagtgatattgagagtgtgtgtttgaccaagaaatactaaatataagctcgtagtaggcatcaccaaattcaagatctgaaaaatattcttgaactatctccaaaatagaaatgttttcatatatattgttattaaattaatcctttgtttgccttcattttaaagatactctatgtactctcacatggcatgaaaaaataaactaaatttgactattacaa

SEQ ID NO: 117788 - DNA, 3333 bp, Homo sapiens
  Payload ID: 3016
  Gene Symbol: C1orf101
  Gene Name: chromosome 1 open reading frame 101
  Uniprot ID: Q5SY80
  ENST ID: ENST00000366534
  CDS Start-End: 55-2910
gcgaggcctggacgggagtggccgaggcggttgggcggaggcggagcaggcgccatgtcagcccgggaagtggccgtgctgctgctgtggctgagctgctatggctccgccctttggaggtattccactaacagcccaaactatcgcatttttagtaccagaagtactattaagttagagtatgaaggaacattatttactgagtggagtgtgccagaaacttgttttgtgctaaataaaagctcacccacgacagaattgcgttgttcctcacctggtgttcacgctataaaaccaattgttactggcccagatgaagaagaacgctatttatttgtggaaagttctcatacttgctttctgtggtactatagagttagacatttctttaacaactttacccagcttatcactgtgtgggcatatgatccagaaagtgcagatcctgatgagttgctggggaatgcagaagaaccttcaataaattccatagtactcagcacacagatggccacattgggacagaagcctgtcatacatacagttctgaagagaaaagtttattcttcaaatgagaaaatgagaagggggacctggcgtattgtagtaccaatgacaaaagatgatgcactaaaggagattagaggaaaccaagttacttttcaggattgctttattgcagattttcttattctgttgacttttcctttgttgaccatacctgaaattcctggttatttaccaatctcctcaccacgtggtagtcaattaatggcttcctgggatgcttgtgtagttgcatctgctgttttggtgacagatatggagacctttcacacaactgattcattcaaatcttggaccagaatcagagtgcctccagacattctgagtgatgatgaaagacggagtgtggctcatgtgatcttatcgcgggatggaatcgtttttcttataaatggtgttctttacataaagagttttcgtggatttataagactgggaggaattgtaaatcttcctgatggtggaattactggcatttcatcaagaaaatggtgttgggtcaattatttattaaaggctaaaggaagaagaagcacctttgcagtctggacagaaaatgaaatttacctcggatccattcttcttaagtttgccagattagtaactaccacagaactgaaaaacatcctaagtctatcggtgactgctactctgaccatagacagggttgagtatacaggacaccctctggagattgctgtgtttttaaattattgcactgtatgtaacgtcaccaaaaagattttcttagtgatatataatgaagatacaaaacagtgggtttcccaagactttacattagatgcccctattgacagtgttaccatgccacattttacattttcagcactgccaggattactgctatggaacaagcatagtatctactattgttaccataatttcacctttactgggattttacagacacctgcaggacatggaaatctatcaatgctatcaaatgacagcattattcatgaagttttcatagattattatggagatattttggtaaaaatggaaaataatgtaatattttattccaagattaatactagagatgcagtaaagctgcatttatggacaaattacacaacaagagcattcattttcttaagtacatctggtcaaacatatttcctgtatgctttggatgatggcacaatacaaatacaggactatcccttacatctggaagcacaaagtatagctttcacaacaaaagacaaatgcccatacatggcatttcataacaatgttgctcatgttttttactttttggacaagggagaggctctgacagtttggactcagatcgtctatccagaaaacactggtctgtatgttattgtggaatcttatggcccaaaaatattacaagagagtcatgagatttcctttgaagctgcctttggatactgcaccaaaactctgacactaacattttatcagaatgtagattatgagagaatatctgattactttgagacacaagacaagcacacgggtcttgtgctggttcagtttcgacctagtgaatattcaaaagcatgtccaatagcccaaaaggtgttccaaatagctgttggctgtgatgataaaaaattcattgcaattaaaggatttagtaaaaaaggatgtcatcaccatgatttttcatacgtgattgaaaagtcatatctgaggcatcagccatcgaaaaacttgagagtaaggtatatttggggagaatatggctgccctctgaggcttgacttcacagaaaagtttcaacctgtggttcaactatttgatgataatggctatgttaaagacgttgaagcaaatttcatagtgtgggaaatacacggcagggatgactatagctttaataatactatggcacagagtggttgtttacatgaagcacagacatggaagtcaatgattgaacttaacaagcacctcccactagaagaagtctggggacctgagaactataaacactgtttttcttatgctattggaaaaccaggagacttaaatcaaccatacgagattatcaacagttctaatggtaaccatatattttggcccatgggccattctggaatgtatgtatttcgtgtgaagatcctggatccaaactatagtttctgtaacctaacagctatgtttgcaatagagacatttggactgattcccagtccaagtgtctacctggtagcttctttcctcttcgtcctgatgctgctcttcttcactattcttgttttgagctactttcggtacatgaggatttatagacgatatatttatgaaccacttcacaaacctcaaagaaaacgtaagaagaattaggaaaactgaaagtttgtttattacagatatatgcatatagagaaacagtgtattacatagtgatattgagagtgtgtgtttgaccaagaaatactaaatataagctcgtagtaggcatcaccaaattcaagatctgaaaaatattcttgaactatctccaaaatagaaatgttttcatatatattgttattaaattaatcctttgtttgccttcattttaaagatactctatgtactctcacatggcatgaaaaaataaactaaatttgactattacaatcctttgtaagaatgaaagtgaatttttgaaaatatatctatgtgtcaagtatcattttgcatgaaacttttcacatgaaaccttatatgactgtagttaatttatatataaaggatttaataaaggtgtgtggatttaaataa

SEQ ID NO: 117789 - DNA, 2895 bp, Homo sapiens
  Payload ID: 3016
  Gene Symbol: C1orf101
  Gene Name: chromosome 1 open reading frame 101
  ENST ID: ENST00000428042
  CDS Start-End: 1-2616
cggaggcggagcaggcgccatgtcagcccgggaagtggccgtgctgctgctgtggctgagctgctatggctccgccctttggagattaagttagagtatgaaggaacattatttactgagtggagtgtgccagaaacttgttttgtgctaaataaaagctcacccacgacagaattgcgttgttcctcacctggtgttcacgctataaaaccaattgttactggcccagatgaagaagaacgctatttatttgtggaaagttctcatacttgctttctgtggtactatagagttaggacctggcgtattgtagtaccaatgacaaaagatgatgcactaaaggagattagaggaaaccaagttacttttcaggattgctttattgcagattttcttattctgttgacttttcctttgttgaccatacctgaaattcctggttatttaccaatctcctcaccacgtggtagtcaattaatggcttcctgggatgcttgtgtagttgcatctgctgttttggtgacagatatggagacctttcacacaactgattcattcaaatcttggaccagaatcagagtgcctccagacattctgagtgatgatgaaagacggagtgtggctcatgtgatcttatcgcgggatggaatcgtttttcttataaatggtgttctttacataaagagttttcgtggatttataagactgggaggaattgtaaatcttcctgatggtggaattactggcatttcatcaagaaaatggtgttgggtcaattatttattaaaggctaaaggaagaagaagcacctttgcagtctggacagaaaatgaaatttacctcggatccattcttcttaagtttgccagattagtaactaccacagaactgaaaaacatcctaagtctatcggtgactgctactctgaccatagacagggttgagtatacaggacaccctctggagattgctgtgtttttaaattattgcactgtatgtaacgtcaccaaaaagattttcttagtgatatataatgaagatacaaaacagtgggtttcccaagactttacattagatgcccctattgacagtgttaccatgccacattttacattttcagcactgccaggattactgctatggaacaagcatagtatctactattgttaccataatttcacctttactgggattttacagacacctgcaggacatggaaatctatcaatgctatcaaatgacagcattattcatgaagttttcatagattattatggagatattttggtaaaaatggaaaataatgtaatattttattccaagattaatactagagatgcagtaaagctgcatttatggacaaattacacaacaagagcattcattttcttaagtacatctggtcaaacatatttcctgtatgctttggatgatggcacaatacaaatacaggactatcccttacatctggaagcacaaagtatagctttcacaacaaaagacaaatgcccatacatggcatttcataacaatgttgctcatgttttttactttttggacaagggagaggctctgacagtttggactcagatcgtctatccagaaaacactggtctgtatgttattgtggaatcttatggcccaaaaatattacaagagagtcatgagatttcctttgaagctgcctttggatactgcaccaaaactctgacactaacattttatcagaatgtagattatgagagaatatctgattactttgagacacaagacaagcacacgggtcttgtgctggttcagtttcgacctagtgaatattcaaaagcatgtccaatagcccaaaaggtgttccaaatagctgttggctgtgatgataaaaaattcattgcaattaaaggatttagtaaaaaaggatgtcatcaccatgatttttcatacgtgattgaaaagtcatatctgaggcatcagccatcgaaaaacttgagagtaaggtatatttggggagaatatggctgccctctgaggcttgacttcacagaaaagtttcaacctgtggttcaactatttgatgataatggctatgttaaagacgttgaagcaaatttcatagtgtgggaaatacacggcagggatgactatagctttaataatactatggcacagagtggttgtttacatgaagcacagacatggaagtcaatgattgaacttaacaagcacctcccactagaagaagtctggggacctgagaactataaacactgtttttcttatgctattggaaaaccaggagacttaaatcaaccatacgagattatcaacagttctaatggtaaccatatattttggcccatgggccattctggaatgtatgtatttcgtgtgaagatcctggatccaaactatagtttctgtaacctaacagctatgtttgcaatagagacatttggactgattcccagtccaagtgtctacctggtagcttctttcctcttcgtcctgatgctgctcttcttcactattcttgttttgagctactttcggtacatgaggatttatagacgatatatttatgaaccacttcacaaacctcaaagaaaacgtaagaagaattaggaaaactgaaagtttgtttattacagatatatgcatatagagaaacagtgtattacatagtgatattgagagtgtgtgtttgaccaagaaatactaaatataagctcgtagtaggcatcaccaaattcaagatctgaaaaatattcttgaactatctccaaaatagaaatgttttcatatatattgttattaaattaatcctttgtttgccttcattttaaagatactctatgtactctcacatggcatgaaaaaataaactaaatttgactattacaa

SEQ ID NO: 117790 - DNA, 888 bp, Homo sapiens
  Payload ID: 3017
  Gene Symbol: C1orf105
  Gene Name: chromosome 1 open reading frame 105
  ENST ID: ENST00000367725
  CDS Start-End: 130-651
ggacaattccctctccattcctgttattgctgctgagctggtcgtaaggaaaccgagtgagaagggaatgcaacagaagaaaaagaccaaagacctgggtttcagggctgggaaagaaagcaagacagaatggaggaaatgaggcctgcaggacatggcgtctcaaatgtttgcgtcgcctttaaagtagcctgtcacagctgccttccacgactcttcaatgccctcatcccttctccagatagaaatggagcagctcttcttggaggccaggcttcagctgatagcaagtctgaggccaggaggaaccagtgtgactccatgctgctcagaaaccaacagctgtgctccacatgtcaagaaatgaaaatggtacaaccaagaacaatgaaaatcccagatgatccaaaagcatcctttgagaattgtatgagttatagaatgagtcttcatcaacccaaattccagactacacctgagcctttccatgatgacatcccaacagaaagcattcactacagactgcccattctgggccccaggacagctgtcttccacggattactgacagaggcctacaaaactctaaaagagagacaacgttcttccttgcccagaaaggaaccaataggcaagacaacgaggcagtgagcggtaggagctcatcacctcccagactcccagagagaaaataacctcgccaagccaatctttgacactggcaccttctcctcacaattttctctcttctcccaaaagatgatttaattttgccttcctaagattgctggtattctagctcttacctctatgttctttctcacgtctcctaaagacaaaattgtttaatttacatgattataaagatctgtttatgaaaatggaaca

SEQ ID NO: 117791 - DNA, 985 bp, Homo sapiens
  Payload ID: 3017
  Gene Symbol: C1orf105
  Gene Name: chromosome 1 open reading frame 105
  Uniprot ID: O95561
  ENST ID: ENST00000367727
  CDS Start-End: 199-750
atgtaaatcacacagatgttggtagagaaaaaggcatactggtattgaaactgtaaactggcctgtttacttcgtctcctaacaaaaaacactttggattcaggttctccacagcagtcttccactggccacagtgaggggagctaggtttccccagtctccagctagaaaaactcagaacatctaaagatctgaaagatggaaaaaagagaactaaaggcttctgttccaaaatttgacaagattccttggcttagtgaggccagccttgtaaacaagccattagtgctcagccttcccagaagatatcctcatacctctgcgacttttctgacttcatccaagaagaatatgaatttgccaattttgtttcaagttccagatgttttatctaaggccaggaggaaccagtgtgactccatgctgctcagaaaccaacagctgtgctccacatgtcaagaaatgaaaatggtacaaccaagaacaatgaaaatcccagatgatccaaaagcatcctttgagaattgtatgagttatagaatgagtcttcatcaacccaaattccagactacacctgagcctttccatgatgacatcccaacagaaagcattcactacagactgcccattctgggccccaggacagctgtcttccacggattactgacagaggcctacaaaactctaaaagagagacaacgttcttccttgcccagaaaggaaccaataggcaagacaacgaggcagtgagcggtaggagctcatcacctcccagactcccagagagaaaataacctcgccaagccaatctttgacactggcaccttctcctcacaattttctctcttctcccaaaagatgatttaattttgccttcctaagattgctggtattctagctcttacctctatgttctttctcacgtctcctaaagacaaaattgtttaatttacatgattataaagatctgtttatgaaaatggaa

SEQ ID NO: 117792 - DNA, 394 bp, Homo sapiens
  Payload ID: 3017
  Gene Symbol: C1orf105
  Gene Name: chromosome 1 open reading frame 105
  ENST ID: ENST00000488100
  CDS Start-End: 1-378
gtgctcagccttcccagaagatatcctcatacctctgcgacttttctgacttcatccaagaagaatatgaatttgccaattttgtttcaagttccagatgttttatctaaggccaggaggaaccagtgtgactccatgctgctcagaaaccaacagctgtgctccacatgtcaagaaatgaaaatggtacaaccaagaacaatgaaaatcccagatgatccaaaagcatcctttgagaattgtatgagttatagaatgagtcttcatcaacccaaattccagactacacctgagcctttccatgatgacatcccaacaggatctgtccacaacatatggctgaagactttccatggagatggggtacaaacaaaataaaagttcccctattggc

SEQ ID NO: 117793 - DNA, 462 bp, Homo sapiens
  Payload ID: 3017
  Gene Symbol: C1orf105
  Gene Name: chromosome 1 open reading frame 105
  ENST ID: ENST00000460397
  CDS Start-End: 153-266
gaaactgtaaactggcctgtttacttcgtctcctaacaaaaaacactttggattcaggttctccacagcagtcttccactggccacagtgaggggagctaggtttccccagtctccagctagaaaaactcagaacatctaaagatctgaaagatggaaaaaagagaactaaagatatattccaagcacacagaacagtatttgtcatacagcctgaatccttgtgccagcagcccacaaagaggcatgccacagtatcaaaattaagccaattaataaccctgcaatggcttttaactgttcaaatgaagagttgcacatctctcattttaaatcaaaagtagaaatgattaagcttagtgaagaaggcatatcaaaagccgagacaggctgaaagccaggcctcttgtgacaaacagccaagttgtgaatgcaaataaaaagttattgaaggaaattaaaa

SEQ ID NO: 117794 - DNA, 4298 bp, Homo sapiens
  Payload ID: 3018
  Gene Symbol: C1orf106
  Gene Name: chromosome 1 open reading frame 106
  Uniprot ID: Q3KP66
  ENST ID: ENST00000367342
  CDS Start-End: 201-2192
ggggcaaaggggacagcctcgcccctcgagcggctgctcccgcagctcgctcacccctgcgggtacgtcgtcactcccgcgtgcggccccgtcccgactcttggatcggactcttcagtcccttcttgcgtcttcccctctttcctctgggccttggtatgccccaggggacagatgtcttgggatctttaacatttgggatgctgcaaatgccgaagttaaatgaaatacctccggggagggcaggccgcagggaggctcggggggagggaagatggcctggacaaacaggtcctgaagctgcgaggctggagtggagggcgcaggggcaggcgggcggcgccagagctccatgggacagctggggaagctccaggctacctacacaacctggcccaggctggtcacggtgtcccccctccctgctctgtgccctctccttccagaaatccaccatggagagtaaggatgaggtcagcgacaccgacagtggcatcatcctgcagtctggccccgacagcccggtctccccaatgaaggagctgacccatgcagtgcacaagcagcagagggccctggaagcgaggctggaggcctgcctggaggagctgaggagactctgccttcgggaagcggagctgacgggcaccttgccagcggagtatcccctcaaaccaggggaaaaggcccccaaggttcgccgcaggatcggagcggcttacaaactggatgactgggccttgcacagagaggaccccctaagcagcctggagcgccagctggccctgcagctgcagatcacagaggcagcccgtcggctgtgcctggaggagaacctcagcaggcaggctcggcggcagcggaagcactccatgctgcaggaggagaagaagctgcaggagctccagcgctgcctggtcgagcggcggcgcaatagcgagccacctccggctgctgctctccccctgggccgagagctcagtgcctctgatgacagctccctgtcagatgggctcctcctggaggaagaggaatcccaagtgccaaaacctcctccagagtctccagccccaccttctcggcctctcccaccccaaacccttgagggtctgcagccaacaggacctgaggctgggagcccagaacgggctccagtccagaacagcccctggaaggaaaccagcctggaccacccctatgagaagcccaggaagtcttctgagccctggagcgagtccagcagcccagccaccacaccacaggatgggcccagtgcctccagcctgtggcttctggagcctgcctcctaccacgtggttcccatccgtggtgttcctggccagtggcagggccgcaccagtgccccagccacccctgagatacaggggaggaggggccagtcgcagtctctgagggtggattccttccgggcgggtcctgagggccgaggtcgcagcgcctttccccgccgccgccccactcactacacggtgacagtgccagattcctgctttcccgcgaccaagcccccgctgccccacgccgcctgccactcctgctcagaagacagtggctctgacgtctccagcatctcccaccccacttcgccgggcagcagcagccccgacatctcctttctgcagcctctctcccctcccaagacccatcgtcaccgcggggcctgggtcccagccggcagcagagagctggtcgcccaccaccccaagctactgctgccgcctggctatttcccggcggggcggtacgtggtggtggctgagagccccctgccgcctggcgagtgggagctgcgccgcgcagccccgggccctgcttacgaggaggagggcactcccctgcgctaccagcgtctggtgccctcccgcagccgcatcgtgcggacgccctccctgaaggacagcccggcaggccgggggctcagcaaggccgccgtgtccgaggagctcaagtggtggcacgagcgtgcacgcctccggagcacccgcccccactcactggaccgccaaggagctttccgggtcaggagcctgccccttgggagagagggcttcggacgagccctgggaccccgggcacaggtgcccacagtttgtgtgctgcggagatcgcctgatggggcccctgtgcaagtctttgtacctgaaaaaggagagatcatcagccaggtgtaactctgcgccccacgctggaaaaaactgtttcatagaggggctgggctgagacccccccacccctgagtgcctctttcagctcccccatccccatcgcaggccgatgacctggagctgagaccttttattattttttttttacacgacttttttcagaagccctgacctaaggatttatatatgtggattgtcctcaatacccctgtgatatgattatgttttatcccccagagtttggcctactggacttaaggccttgcctgtctgactgacagcctctatctccttatataagacaagtggcaggggacgagtgaagcagagtgagccaccttgggagttctccaacgctctgtgctctggttctaagaaattccctggggaactgcccctggccctcctgtcccactattgctggaggctggacatggtacatactcatgcacatgactctcccccatttcccaggtctctgggtaccccagcctgggctgggggagaatctcttcccccttttctaatgtgctctgtgatgcacacaccaagtggtaggtcaaaggtcagtatatcccggtggtgtattgtcttgctagaccctgctattttcctgaccccctaaatcctctttagggacccagtcactataccctgtctatgccctgtgggctcccagacccctgagctttgagtcagtggcatcacagtttgtagcctcagggggtctggctgggggctggtccatgcttgtggttagtggacagcagccaccctttgacagctacctctgggcatctcaagggcttgcagccccactgctccttctaacattttgtttgtttttgagatggagtctcgctctgtcgcccaggctggaatgctgtagcaagatttcggctcactgcaacccccgtctcccgggttcaagcgaatctcctgcctcagccttccgagtagctgggattacaggcaagcaccaccatgcctgctaattttttatttttagtagagatggggtttcatcatgttggccaggctggtctcgaactcctgacctcaagtgatccacctgccttggcctttcaaagtgctgggattacaggcatgagccaccgcacctggcccttctaacgttttttcatcatagtcccaaaaaccaatactttacaagtggttttggaaaggcaccacttttgtggcatgttctggttgggagagggagtcacagttcctactccccccaccagctatgcttctgctctgagaaggtggttatttatacaaacatggacatactcactcccaagggctgatgagatgctgaattttctttgggggcattcattaattgtcccagctgcagcgactggagcaagtctggaagctgcctgtgctaagaccacccagctgtccctgggttctcatcctagggccttctttgcttccaggtcaggggacctgcttcaatgagaaagcaactgaattgaggctaggagaggtagggagagctgagttctgacttcacctgtgcagaactctctgcccccatgttacctggactggaacagactgtgaatatagcagaaggttccaagaactctggtgtctgacctagaagaggcacagttctctctactggaaagaaaacgatgtagccgattgcacaagggtgccaagggaagacccaggatggcccatcaaaggaacctgggggaggatgcaggaggctgaagggatgcacctggcatttctctcactgtgctcttaccgcatcagcaacccccaacttttgggcctactctgccccccatgcgtgaataccctgcttggatgctgtgcttttccggtttgtctctaagcccctttctccagggcatgttggtttccctggcctctcagtgtcctaactggagcccagagtgccttgttctgagccaggagacggctgagcactggccctccacacctaagcgtcctttacattaacttattggtcttgtataacacctggtgccattgccaagtggctgtgtcctcagctacagagctggaattgtgtggggtttagtgctaaatacttcaataaagtctgttttttgtgattggctg

SEQ ID NO: 117795 - DNA, 2197 bp, Homo sapiens
  Payload ID: 3018
  Gene Symbol: C1orf106
  Gene Name: chromosome 1 open reading frame 106
  Uniprot ID: Q3KP66
  ENST ID: ENST00000413687
  CDS Start-End: 362-2098
attagttcagggaaggacttgctcacctgctcctcccctctgactcaagtcataacaagtaacctggttcccctggcccggcagcctgggagggacggcaaggtaggcaggtgagccgagacggacggacggccagcagctccgtcagctggagagagagcacaggcctgtggcttgggagaccctgaggcgacatgtgagggccctgagccccctgactggaagcaggggctgtttttcaactcctggactaaagcccagaagcagctggggaagctccaggctacctacacaacctggcccaggctggtcacggtgtcccccctccctgctctgtgccctctccttccagaaatccaccatggagagtaaggatgaggtcagcgacaccgacagtggcatcatcctgcagtctggccccgacagcccggtctccccaatgaaggagctgacccatgcagtgcacaagcagcagagggccctggaagcgaggctggaggcctgcctggaggagctgaggagactctgccttcgggaagcggagctgacgggcaccttgccagcggagtatcccctcaaaccaggggaaaaggcccccaaggttcgccgcaggatcggagcggcttacaaactggatgactgggccttgcacagagaggaccccctaagcagcctggagcgccagctggccctgcagctgcagatcacagaggcagcccgtcggctgtgcctggaggagaacctcagcaggcaggctcggcggcagcggaagcactccatgctgcaggaggagaagaagctgcaggagctccagcgctgcctggtcgagcggcggcgcaatagcgagccacctccggctgctgctctccccctgggccgagagctcagtgcctctgatgacagctccctgtcagatgggctcctcctggaggaagaggaatcccaagtgccaaaacctcctccagagtctccagccccaccttctcggcctctcccaccccaaacccttgagggtctgcagccaacaggacctgaggctgggagcccagaacgggctccagtccagaacagcccctggaaggaaaccagcctggaccacccctatgagaagcccaggaagtcttctgagccctggagcgagtccagcagcccagccaccacaccacaggatgggcccagtgcctccagcctgtggcttctggagcctgcctcctaccacgtggttcccatccgtggtgttcctggccagtggcagggccgcaccagtgccccagccacccctgagatacaggggaggaggggccagtcgcagtctctgagggtggattccttccgggcgggtcctgagggccgaggtcgcagcgcctttccccgccgccgccccactcactacacggtgacagtgccagattcctgctttcccgcgaccaagcccccgctgccccacgccgcctgccactcctgctcagaagacagtggctctgacgtctccagcatctcccaccccacttcgccgggcagcagcagccccgacatctcctttctgcagcctctctcccctcccaagacccatcgtcaccgcggggcctgggtcccagccggcagcagagagctggtcgcccaccaccccaagctactgctgccgcctggctatttcccggcggggcggtacgtggtggtggctgagagccccctgccgcctggcgagtgggagctgcgccgcgcagccccgggccctgcttacgaggaggagggcactcccctgcgctaccagcgtctggtgccctcccgcagccgcatcgtgcggacgccctccctgaaggacagcccggcaggccgggggctcagcaaggccgccgtgtccgaggagctcaagtggtggcacgagcgtgcacgcctccggagcacccgcccccactcactggaccgccaaggagctttccgggtcaggagcctgccccttgggagagagggcttcggacgagccctgggaccccgggcacaggtgcccacagtttgtgtgctgcggagatcgcctgatggggcccctgtgcaagtctttgtacctgaaaaaggagagatcatcagccaggtgtaactctgcgccccacgctggaaaaaactgtttcatagaggggctgggctgagacccccccacccctgagtgcctctttcagctcccccatccccatcgcag

SEQ ID NO: 117796 - DNA, 708 bp, Homo sapiens
  Payload ID: 3018
  Gene Symbol: C1orf106
  Gene Name: chromosome 1 open reading frame 106
  ENST ID: ENST00000451872
  CDS Start-End: 339-708
ccggggagaggggccatccccgcgcgacccgcagcgccgcacagcgagggggagggcgcctgcggggaggacagggtcgggggagcgcccttccgcaggctcctttcattcttccacttaggggtctccaggaatgaaaactggccccagccaggccagagcgcgcgaatgaaaggcggcactgggaccaagagagaagcttcgtcccgcctgggctgcggaaactggcggcgccaggggtgtcccaccgcgcgggcgtccgaaagcggggcaaaggggacagcctcgcccctcgagcggctgctcccgcagctcgctcacccctgcggaaatccaccatggagagtaaggatgaggtcagcgacaccgacagtggcatcatcctgcagtctggccccgacagcccggtctccccaatgaaggagctgacccatgcagtgcacaagcagcagagggccctggaagcgaggctggaggcctgcctggaggagctgaggagactctgccttcgggaagcggagctgacgggcaccttgccagcggagtatcccctcaaaccaggggaaaaggcccccaaggttcgccgcaggatcggagcggcttacaaactggatgactgggccttgcacagagaggaccccctaagcagcctggagcgccagctggccctgcagctgcagatcacagaggcagcccgtcggctgtgcc

SEQ ID NO: 117797 - DNA, 570 bp, Homo sapiens
  Payload ID: 3018
  Gene Symbol: C1orf106
  Gene Name: chromosome 1 open reading frame 106
  ENST ID: ENST00000532631
  CDS Start-End: 450-570
ggagtgggagtgggccggggccagggccggggagaggggccatccccgcgcgacccgcagcgccgcacagcgagggggagggcgcctgcggggaggacagggtcgggggagcgcccttccgcaggctcctttcattcttccacttaggggtctccaggaatgaaaactggccccagccaggccagagcgcgcgaatgaaaggcggcactgggaccaagagagaagcttcgtcccgcctgggctgcggaaactggcggcgccaggggtgtcccaccgcgcgggcgtccgaaagcggggcaaaggggacagcctcgcccctcgagcggctgctcccgcagctcgctcacccctgcggctggggaagctccaggctacctacacaacctggcccaggctggtcacggtgtcccccctccctgctctgtgccctctccttccagaaatccaccatggagagtaaggatgaggtcagcgacaccgacagtggcatcatcctgcagtctggccccgacagcccggtctccccaatgaaggagctgacccatgcagtgcacaagcagcagagggccc

SEQ ID NO: 117798 - DNA, 2355 bp, Homo sapiens
  Payload ID: 3019
  Gene Symbol: C1orf109
  Gene Name: chromosome 1 open reading frame 109
  Uniprot ID: Q9NX04
  ENST ID: ENST00000358011
  CDS Start-End: 191-802
gagactgtgggcgcgtggtgcagtccctggagggttctcacgctttggctgtctggacttttaagtttttccgctttttcaggaaggcgaccggcagcctcgggcaggggagacaggactgtatgtcagagaagagacggcgcttggacgccaggaatcctctgaagcaggagactgccctatccagaagatgactcaagaccggcctctgcttgccgtgcaggaggcgctgaagaagtgcttccccgtggtggaggagcagcagggcctgtggcagagtgccctgcgggactgccagcccctcctgtcctccctcagcaacctggcggaacagctgcaggccgcacagaacctgcggtttgaggatgtgccggcgcttcgggccttcccagatttaaaagagcggctgaggcgtaagcagctggtggctggtgacatcgtcctggacaagctaggggaaaggctagccatcctcctcaaggtgcgagacatggtcagcagccatgtggagcgagtgtttcagatctatgagcaacacgcagacacagttggcattgatgctgtcctgcagccttcagcagtgagcccctctgtggctgacatgttggaatggttgcaggatattgagagacattatcgaaagtcgtacctgaagagaaagtatcttctttcgtctatccagtggggagacttggcaaacatacaagctttgcccaaggcctgggaccgaatttcaaaagacgaacaccaagatcttgtacaagatatcctattgaatgtttccttcttcctggaagagtaaggaagctatgcgtatctggagaccacgggtaccacagttgaagactgacattctgaaccctgatgtttctaaagaaacgtcagtatttcagtctgacatatttgaaacatcagtgccttgaaccttaggactgggtcttggggaggattagcgcctagatgtctgattttggagctgcagcatgccaggccgtggctgagagtatgtgagccatgccttgcccttttctgaggctcagggaagtggatggagctagagagacaacaggaaagacggtgctgaagaacatagtgtctttcctctattgtggacctaaagaggtggggaagcaaggacaagaggcaaagagccacactgcccttggcatcatccaaagcattgtctggttgacaccaggtcctggttttgtgtcttttgtcaatacctgaatccttgacaaaagaaaaagtggttttgatgatttaaagaaataagggtgattttgacagaaaatatattttaaaaattttgaccaattgcaatagttatcctcaagccaatttccagaacctgccaccagggggaggtggtgcagcatgaatcattctgaatgctttgtctttgaagtgttcccctattgctgttaccatctcagaggaagtaactgggcatggtgagactcctaaaatgacaggagtttttttggccaaagctggcatctgacttgccacattcctctgagtctggagtagccgcaggggtgggagaatgccagcccagagtcagtccatcggggttacatttccaaggtctgctgccttcatctatgtaatggccgtgttactttcagatctttcagcttcccagagtgttgtgggaatcttggtcattgaatgtaaagggacttagtaaagggtatagatatttttcaaaaatgaaaataactttttttcttataagtgataagcttttataaagatcataggaaaactagaaaaaatgtaaaatgtagaaaattgtaaaacaaacttcattagagatattttgatagataccttttcagtgtctatttacaaattttttcttttaatatagatagggtctcactatattgcccagctcactcctgagctcaagggatcctcccaccatagcctcccaaaatattggaaatacaggcatgagccactgctcctgaccaattcacaaatttttttaaagaacaaacgtgctatcatcgatacatactgttaggttgtctttttttaaaaaacctaatgtaatttgttcatctttttatatctgtaaatatagctcaacacagttatattctttttgtgaatgtattatatctacaatttaccttttttcttagattttacatgcattttcccaaatctttgtgtttgcctatctgtaaaggtaatacattctgattacaaaaaatgaaaatgttacatagaaatgtaccgttatccatctaccagataactattattaataatgtgtatttatttttccaggaattaaaaaacatctatcatataagtattgcaaataaaacttaaaaagca

SEQ ID NO: 117799 - DNA, 608 bp, Homo sapiens
  Payload ID: 3019
  Gene Symbol: C1orf109
  Gene Name: chromosome 1 open reading frame 109
  ENST ID: ENST00000477060
  CDS Start-End: 183-608
ggggcctactaggtcaggtcggctgtaggattctgctccagggttggcggctgcttctttctggcctggctgccactgagtagccgaggggccgccgtgaccctctgactgattgactggctggctgcctacgtcggcgctcctcagggccccaagctcctcaggccgaacttcggcagaagatgactcaagaccggcctctgcttgccgtgcaggaggcgctgaagaagtgcttccccgtggtggaggagcagcagggcctgtggcagagtgccctgcgggactgccagcccctcctgtcctccctcagcaacctggcggaacagctgcaggccgcacagaacctgcggtttgaggatgtgccggcgcttcgggccttcccagatttaaaagagcggctgaggcgtaagcagctggtggctggtgacatcgtcctggacaagctaggggaaaggctagccatcctcctcaaggtgcgagacatggtcagcagccatgtggagcgagtgtttcagatctatgagcaacacgcagacacagttggcattgatgctgtcctgcagccttcagcagtgagcccctctgtggctgacatgttggaatggttg

SEQ ID NO: 117800 - DNA, 852 bp, Homo sapiens
  Payload ID: 3019
  Gene Symbol: C1orf109
  Gene Name: chromosome 1 open reading frame 109
  ENST ID: ENST00000486637
  CDS Start-End: 512-852
cgcgtggtgcagtccctggagggttctcacgctttggctgtctggacttttaagtttttccgctttttcaggaaggcgaccggcagcctcgggcaggggagacaggactgtatgtcagagaagagacggcgcttggacgccaggaatcctctgaagcaggagactgccctatccaggttacccttcccgaggggaaaccagggtctccttcagaaagctgaggcaggccgggcgcggtggctcacgcctgtaatcccagcactttggaagaccgaggcgggcggatcacctgaggtcaggaaccccgtctactaaaaatacaaaaattagccaggcgtgttggcgggcacctgtattcccagctactcgggaggctgaggcaggagaattgcttgaacccgggatgcggaggttgcagtgagccgagatagcgccactgcactccagcctgggcgacagtgagactccgtctcgaaaaaaaaacaaaaaaaaaaccctgcttctggagaagatgactcaagaccggcctctgcttgccgtgcaggaggcgctgaagaagtgcttccccgtggtggaggagcagcagggcctgtggcagagtgccctgcgggactgccagcccctcctgtcctccctcagcaacctggcggaacagctgcaggccgcacagaacctgcggtttgaggatgtgccggcgcttcgggccttcccagatttaaaagagcggctgaggcgtaagcagctggtggctggtgacatcgtcctggacaagctaggggaaaggctagccatcctcctcaaggtgcgagacatggtcagcagccatgtggagcgagtgtttcagatctatga

SEQ ID NO: 117801 - DNA, 763 bp, Homo sapiens
  Payload ID: 3019
  Gene Symbol: C1orf109
  Gene Name: chromosome 1 open reading frame 109
  ENST ID: ENST00000461359
  CDS Start-End: 309-763
gagactgtgggcgcgtggtgcagtccctggagggttctcacgctttggctgtctggacttttaagtttttccgctttttcaggaaggcgaccggcagcctcgggcaggggagacaggactgtatgtcagagaagagacggcgcttggacgccaggaatcctctgaagcaggagactgccctatccaggttacccttcccgaggggaaaccagggtctccttcagaaagctgaggcaggccgggcgcggtggctcacgcctgtaatcccagcactttggaagaccgaggcgggcggatcacctgagaagatgactcaagaccggcctctgcttgccgtgcaggaggcgctgaagaagtgcttccccgtggtggaggagcagcagggcctgtggcagagtgccctgcgggactgccagcccctcctgtcctccctcagcaacctggcggaacagctgcaggccgcacagaacctgcggtttgaggatgtgccggcgcttcgggccttcccagatttaaaagagcggctgaggcgtaagcagctggtggctggtgacatcgtcctggacaagctaggggaaaggctagccatcctcctcaaggtgcgagacatggtcagcagccatgtggagcgagtgtttcagatctatgagcaacacgcagacacagttggcattgatgctgtcctgcagccttcagcagtgagcccctctgtggctgacatgttggaatggttgcaggatattgagagacattatcgaaagtc

SEQ ID NO: 117802 - DNA, 612 bp, Homo sapiens
  Payload ID: 3019
  Gene Symbol: C1orf109
  Gene Name: chromosome 1 open reading frame 109
  ENST ID: ENST00000491981
  CDS Start-End: 39-612
ccaagctctggagggctgggggcctactaggtcagaagatgactcaagaccggcctctgcttgccgtgcaggaggcgctgaagaagtgcttccccgtggtggaggagcagcagggcctgtggcagagtgccctgcgggactgccagcccctcctgtcctccctcagcaacctggcggaacagctgcaggccgcacagaacctgcggtttgaggatgtgccggcgcttcgggccttcccagatttaaaagagcggctgaggcgtaagcagctggtggctggtgacatcgtcctggacaagctaggggaaaggctagccatcctcctcaaggtgcgagacatggtcagcagccatgtggagcgagtgtttcagatctatgagcaacacgcagacacagttggcattgatgctgtcctgcagccttcagcagtgagcccctctgtggctgacatgttggaatggttgcaggatattgagagacattatcgaaagtcgtacctgaagagaaagtatcttctttcgtctatccagtggggagacttggcaaacatacaagctttgcccaaggcctgggaccgaatttcaaaagacgaacaccaagatcttgtacaag

SEQ ID NO: 117803 - DNA, 717 bp, Homo sapiens
  Payload ID: 3019
  Gene Symbol: C1orf109
  Gene Name: chromosome 1 open reading frame 109
  ENST ID: ENST00000488137
  CDS Start-End: 443-717
gtggcggctctgcaataccccaagctctggagggctgggggcctactaggtcaggtcggctgtaggattctgctccagggttggcggctgcttctttctggcctggctgccactgagtagccgaggggccgccgtgaccctctgactgattgactggctggctgcctacgtcggcgctcctcagggccccaagctcctcaggccgaacttcgggaaggcgaccggcagcctcgggcaggggagacaggactgtatgtcagagaagagacggcgcttggacgccaggaatcctctgaagcaggagactgccctatccaggttacccttcccgaggggaaaccagggtctccttcagaaagctgaggcaggccgggcgcggtggctcacgcctgtaatcccagcactttggaagaccgaggcgggcggatcacctgagcagaagatgactcaagaccggcctctgcttgccgtgcaggaggcgctgaagaagtgcttccccgtggtggaggagcagcagggcctgtggcagagtgccctgcgggactgccagcccctcctgtcctccctcagcaacctggcggaacagctgcaggccgcacagaacctgcggtttgaggatgtgccggcgcttcgggccttcccagatttaaaagagcggctgaggcgtaagcagctggtggctggtgacatcgtcctggacaagctaggggaaaggct

SEQ ID NO: 117804 - DNA, 919 bp, Homo sapiens
  Payload ID: 3019
  Gene Symbol: C1orf109
  Gene Name: chromosome 1 open reading frame 109
  Uniprot ID: Q9NX04
  ENST ID: ENST00000464085
  CDS Start-End: 296-907
ggtgcagtccctggagggttctcacgctttggctgtctggacttttaagtttttccgctttttcaggaaggcgaccggcagcctcgggcaggggagacaggactgtatgtcagagaagagacggcgcttggacgccaggaatcctctgaagcaggagactgccctatccaggttacccttcccgaggggaaaccagggtctccttcagaaagctgaggcaggccgggcgcggtggctcacgcctgtaatcccagcactttggaagaccgaggcgggcggatcacctgagcagaagatgactcaagaccggcctctgcttgccgtgcaggaggcgctgaagaagtgcttccccgtggtggaggagcagcagggcctgtggcagagtgccctgcgggactgccagcccctcctgtcctccctcagcaacctggcggaacagctgcaggccgcacagaacctgcggtttgaggatgtgccggcgcttcgggccttcccagatttaaaagagcggctgaggcgtaagcagctggtggctggtgacatcgtcctggacaagctaggggaaaggctagccatcctcctcaaggtgcgagacatggtcagcagccatgtggagcgagtgtttcagatctatgagcaacacgcagacacagttggcattgatgctgtcctgcagccttcagcagtgagcccctctgtggctgacatgttggaatggttgcaggatattgagagacattatcgaaagtcgtacctgaagagaaagtatcttctttcgtctatccagtggggagacttggcaaacatacaagctttgcccaaggcctgggaccgaatttcaaaagacgaacaccaagatcttgtacaagatatcctattgaatgtttccttcttcctggaagagtaaggaagctatgcg

SEQ ID NO: 117805 - DNA, 2570 bp, Homo sapiens
  Payload ID: 3019
  Gene Symbol: C1orf109
  Gene Name: chromosome 1 open reading frame 109
  Uniprot ID: Q9NX04
  ENST ID: ENST00000494120
  CDS Start-End: 419-760
ctggagggctgggggcctactaggtcaggtcggctgtaggattctgctccagggttggcggctgcttctttctggcctggctgccactgagtagccgaggggccgccgtgaccctctgactgattgactggctggctgcctacgtcggcgctcctcagggccccaagctcctcaggccgaacttcggggttggattgctcaagagttgtgctgagacccagaaggctagaggctagtttcgaagctgtagctcaggctgagtctcaaggcgggcggcgactggacggccagaccggcgagctcttgacgggaaggcgaccggcagcctcgggcaggggagacaggactgtatgtcagagaagagacggcgcttggacgccaggaatcctctgaagcaggagactgccctatccagaagatgactcaagaccggcctctgcttgccgtgcaggaggcgctgaagaagtgcttccccgtggtggaggagcagcagggcctgtggcagagtgccctgcgggactgccagcccctcctgtcctccctcagcaacctggcggaacagctgcaggccgcacagaacctgcggtttgaggatgtgccggcgcttcgggccttcccagatttaaaagagcggctgaggcagccatcctcctcaaggtgcgagacatggtcagcagccatgtggagcgagtgtttcagatctatgagcaacacgcagacacagttggcattgatgctgtcctgcagccttcagcagtgagcccctctgtggctgacatgttggaatggttgcaggatattgagagacattatcgaaagtcactgcattttcttttgagcagtccttaacttccagaaaggtacctgaagagaaagtatcttctttcgtctatccagtggggagacttggcaaacatacaagctttgcccaaggcctgggaccgaatttcaaaagacgaacaccaagatcttgtacaagatatcctattgaatgtttccttcttcctggaagagtaaggaagctatgcgtatctggagaccacgggtaccacagttgaagactgacattctgaaccctgatgtttctaaagaaacgtcagtatttcagtctgacatatttgaaacatcagtgccttgaaccttaggactgggtcttggggaggattagcgcctagatgtctgattttggagctgcagcatgccaggccgtggctgagagtatgtgagccatgccttgcccttttctgaggctcagggaagtggatggagctagagagacaacaggaaagacggtgctgaagaacatagtgtctttcctctattgtggacctaaagaggtggggaagcaaggacaagaggcaaagagccacactgcccttggcatcatccaaagcattgtctggttgacaccaggtcctggttttgtgtcttttgtcaatacctgaatccttgacaaaagaaaaagtggttttgatgatttaaagaaataagggtgattttgacagaaaatatattttaaaaattttgaccaattgcaatagttatcctcaagccaatttccagaacctgccaccagggggaggtggtgcagcatgaatcattctgaatgctttgtctttgaagtgttcccctattgctgttaccatctcagaggaagtaactgggcatggtgagactcctaaaatgacaggagtttttttggccaaagctggcatctgacttgccacattcctctgagtctggagtagccgcaggggtgggagaatgccagcccagagtcagtccatcggggttacatttccaaggtctgctgccttcatctatgtaatggccgtgttactttcagatctttcagcttcccagagtgttgtgggaatcttggtcattgaatgtaaagggacttagtaaagggtatagatatttttcaaaaatgaaaataactttttttcttataagtgataagcttttataaagatcataggaaaactagaaaaaatgtaaaatgtagaaaattgtaaaacaaacttcattagagatattttgatagataccttttcagtgtctatttacaaattttttcttttaatatagatagggtctcactatattgcccagctcactcctgagctcaagggatcctcccaccatagcctcccaaaatattggaaatacaggcatgagccactgctcctgaccaattcacaaatttttttaaagaacaaacgtgctatcatcgatacatactgttaggttgtctttttttaaaaaacctaatgtaatttgttcatctttttatatctgtaaatatagctcaacacagttatattctttttgtgaatgtattatatctacaatttaccttttttcttagattttacatgcattttcccaaatctttgtgtttgcctatctgtaaaggtaatacattctgattacaaaaaatgaaaatgttacatagaaatgtaccgttatccatctaccagataactattattaataatgtgtatttatttttccaggaattaaaaaacatctatcatataagtattgcaaataaaacttaaaaagca

SEQ ID NO: 117806 - DNA, 559 bp, Homo sapiens
  Payload ID: 3019
  Gene Symbol: C1orf109
  Gene Name: chromosome 1 open reading frame 109
  ENST ID: ENST00000619962
  CDS Start-End: 447-559
aggccttgtggcggctctgcaataccccaagctctggagggctgggggcctactaggtcaggtcggctgtaggattctgctccagggttggcggctgcttctttctggcctggctgccactgagtagccgaggggccgccgtgaccctctgactgattgactggctggctgcctacgtcggcgctcctcagggccccaagctcctcaggccgaacttcgggcaagcgaccggcagcctcgggcaggggagacaggactgtatgtcagagaagagacggcgcttggacgccaggaatcctctgaagcaggagactgccctatccaggttacccttcccgaggggaaaccagggtctccttcagaaagctgaggcaggccgggcgcggtggctcacgcctgtaatcccagcactttggaagaccgaggcgggcggatcacctgagaagatgactcaagaccggcctctgcttgccgtgcaggaggcgctgaagaagtgcttccccgtggtggaggagcagcagggcctgtggcagagtgccctgcgggactgccagcccct

SEQ ID NO: 117807 - DNA, 1711 bp, Homo sapiens
  Payload ID: 3020
  Gene Symbol: C1orf111
  Gene Name: chromosome 1 open reading frame 111
  Uniprot ID: Q5T0L3
  ENST ID: ENST00000367935
  CDS Start-End: 81-866
agaatgtttatcctctggacaaaccagccagcctctccagagcaggcgtgtgatctctgtacccccgcagtggtcagaatatggagaacttctcactcctcagcatctctggacctccaatctcttcctccgccctgagtgcttttcccgacattatgttctctcgtgccaccagcctgccagacattgcaaagacagcagtacccactgaggcatccagcccagctcaggccctgccaccccagtaccaaagcatcattgtcaggcaagggatacagaacacagcgctctcaccagactgcagcttgggggatacccagcacggagagaagctgaggcggaactgcactatctaccggccctggttctccccctacagctacttcgtgtgtgcagacaaagagagccagctggaggcctatgacttcccagaggtgcagcaggatgagggcaagtgggacaactgcctttctgaggacatggctgagaacatctgttcgtcctcttcctccccagagaacacttgccctcgagaagccaccaagaaatccaggcatggcctggactccatcacatcccaggacatcctaatggcttccaggtggcacccagcacagcagaatggctacaagtgcgtggcctgctgccgcatgtaccccaccctggacttcctcaagagccacatcaagaggggcttcagggagggcttcagctgcaaggtgtactaccgcaagctcaaagccctctggagcaaggagcagaaggcccggctgggagacaggctctcctccggcagctgccaggccttcaatagtcctgctgaacaccttaggcaaattggcggtgaagcctacttatgtctctagagagatgccaataaagttagtcacagccttctgtccagtctgaggtcaccccgcacagcctgctgtccttcccagaacccggctctcatcacctttggctaatggttgcctagcaacaccaggcacacaccctcccctttctctcttttaaaaataaagacaatacttgaagtttgggaaaatcatctaagatagaggttctcaaaggtgcccagctggcagtaccagcaacccctgggaactctcaggccctcctcagacctactgaatcagaaactatgggtctggggctggcggtctatgtcctaaccagccctccaggtgactctgatgcagctcagctgtgagaagcactgctctaggattctggcctctgcttggtccctatgtggtcagtccttgccccaccctgggaagaaggggctggatgccctttcctatttgcatggggaagaatctctgcagttttaaaggcttctttgacggtagatcttctgaggggggaatgtggaggaaaatatgcctctgagtataaggcaggtaagaggcagatggggctgagctcacccgggactgagctctcaggcactaccatcattcacttagaacagccatccagtgctggggcagaatagaatcagttttgacccaggagacgtcttttcttggctgctttgagccaggtgaaaataggcaggtaaacatgggaacctattgcttcctgttaccaagtaatgtgtccagtgggcagccctgactctgcctccatttctgagtgaacctcctggtccatctgacccagaaagatggataagcatcagggatgcagcagagacatctatctt

SEQ ID NO: 117808 - DNA, 447 bp, Homo sapiens
  Payload ID: 3020
  Gene Symbol: C1orf111
  Gene Name: chromosome 1 open reading frame 111
  ENST ID: ENST00000493255
  CDS Start-End: 19-141
ccccgcagtggtcagaatatggagaacttctcactcctcagcatctctggacctccaatctcttcctccgccctgagtgcttttcccgacattatgttctctcgtgccaccagcctgccaggtaaactttggtgccactagggccacaaagatgtggttttttttgaagcttttaattgagtaccctaccagatcatgttacaggaccatgatttagtgagaaagtcaaattacgcatggggagaaaataatttttcaaaatgctgcatttgtgactgcagcttgggggatacccagcacggagagaagctgaggcggaactgcactatctaccggccctggttctccccctacagctacttcgtgtgtgcagacaaagagagccagctggaggcctatgacttcccagaggtgcagcaggatgagggcaagtgggacaactgcctt

SEQ ID NO: 117809 - DNA, 800 bp, Homo sapiens
  Payload ID: 3020
  Gene Symbol: C1orf111
  Gene Name: chromosome 1 open reading frame 111
  ENST ID: ENST00000620601
  CDS Start-End: 43-774
agagcaggcgtgtgatctctgtacccccgcagtggtcagaatatggagaacttctcactcctcagcatctctggacctccaatctcttcctccgccctgagtgcttttcccgacattatgttctctcgtgccaccagcctgccagacattgcaaagacagcagtacccactgaggcatccagcccagctcaggccctgccaccccagtaccaaagcatcattgtcaggcaagggatacagaacacagcgctctcaccagactgcagcttgggggatacccagcacggagagaagctgaggcggaactgcactatctaccggccctggttctccccctacagctacttcgtgtgtgcagacaaagagagccagctggaggcctatgacttcccagaggtgcagcaggatgagggcaagtgggacaactgcctttctgaggacatggctgagaacatctgttcgtcctcttcctccccagagaacacttgccctcgagaagccaccaagaaatccaggcatggcctggactccatcacatcccaggacatcctaatggcttccaggtggcacccagcacagcagaatggctacaagtgcgtggcctgctgccgcatgtaccccaccctggacttcctcaagagccacatcaagaggggcttcagggagggcttcagctgcaaggtgtactaccgcaagctcaaagccctctggagcaaggcagaaggcccggctgggagacaggctctcctccggcagctgccaggccttcaatagtcctgctgaacaccttaggcaaattg

SEQ ID NO: 117810 - DNA, 4355 bp, Homo sapiens
  Payload ID: 3021
  Gene Symbol: C1orf112
  Gene Name: chromosome 1 open reading frame 112
  Uniprot ID: Q9NSG2
  ENST ID: ENST00000286031
  CDS Start-End: 701-3262
ggctttggccctggaaagcctcgcggacgtgttctgacccaaggttttagcagtggatgtggcgttttcttccattccttctttcagtttttctgtactcgttgcttgcaattaagtgtaaatacttttgctagtggataatgggggaggcaaggactgagacctgcggtatgacgatagctctggctcttaatagtttgaggtaaagcgagatactctgagcttttgtctcccgtaaaaagggtggtgaatatgaataagggctttcttagcgttataagaattaaagggcatagttctgtggtgtgaaatctttaaaagatgttcagtaaataaaaatgattttcctccttcccctctcagacctctttttcttctttctttctttttttttgacaagttctcactcctctcacccaggctggagtctttctgaaagagttcttccgcttgttgttggctttcaactgttggatttgaggcgcttagcgccttcttcgtccgggtgcagcacattcttgattggtctcatgcctttgtggttgtaaatgtgcctggaatcctagcctttcatggtttgttctgagtaatgaataccctattactatgatactagtatcttccttaattatcctactcattgtctcaacattctgacagttggattgagcatattcaaattttgaaaattattgtagaaatgtttttacctcatatgaaccacctgacattggaacagactttcttttcacaagtgttaccaaagactgtgaaattattcgatgacatgatgtatgaattaaccagtcaagccagaggactgtcaagccaaaatttggaaatccagaccactctaaggaatattttacaaacaatggtgcagctcttaggagctctcacaggatgtgttcagcatatctgtgccacacaggaatccatcattttggaaaatattcagagtctcccctcctcagtccttcatataattaaaagcacatttgtgcattgtaagaatagtgaatctgtgtattctgggtgtttacacctagtttcagaccttctccaggctcttttcaaggaggcctattctcttcaaaagcagttaatggaactgctggacatggtttgcatggaccctttagtagatgacaatgatgatattttgaatatggtaatagttattcattctttattggatatctgctctgttatttccagtatggaccatgcatttcatgccaatacttggaagtttataattaagcagagccttaagcaccagtccataataaaaagccagttgaaacacaaagatataattactagcttgtgtgaagacattcttttctccttccattcttgtttacagttagctgagcagatgacacagtcagatgcacaggataatgctgactacagattatttcagaaaacactcaaattgtgtcgtttttttgccaactcccttttgcactacgctaaggaatttcttcctttcctctctgattcttgctgtactttgcaccaactgtatcttcagatacacagcaagtttcctccaagcctttatgctaccaggatttctaaagcacaccaagaggaaatagcaggtgctttcctagtgacactggatccacttatcagtcagctgctcacatttcagcctttcatgcaggtggttttggacagtaaattagacctgccatgtgaactgcagtttccacaatgtcttcttctggttgttgtcatggataagctgccatctcagcctaaggaagtgcaaaccctgtggtgcacagacagccaggtctcagaaacgacaaccaggatatctctactcaaagccgttttctacagttttgagcagtgttctggtgaactctctctacctgttcatttacagggattaaagagtaaggggaaagctgaggtggctgtcaccttgtatcagcatgtttgtgttcatctgtgtacatttattacttcctttcatccctcactgtttgctgaactggatgctgctctgctgaatgctgtacttagtgctaatatgatcacctctttgttagctatggatgcatggtgcttccttgctcgatatgggactgctgaactgtgtgcacaccatgtcaccatagtggctcatctgataaagtcatgccctggagaatgttatcaactcatcaacctatcaatactgttgaagcgtctctttttcttcatggcaccaccccatcagctggagtttatccagaaattttccccaaaagaagcagaaaatctgcctctgtggcaacatatttccttccaggcgttacctcctgagcttagggaacaaactgtccatgaggtcaccacagtaggcactgcagaatgcaggaaatggctgagcaggagtcgtactttgggagaactagaatctctgaacacagtactgtctgctttgcttgcagtatgtaattctgctggtgaagctttggatacaggaaaacaaactgcaattatcgaagttgtgagtcagctttgggcttttttaaacattaaacaggtagcagatcaaccttatgttcaacagacattcagccttttacttccactgttgggatttttcattcaaactctagatcctaaactgatacttcaggcagtaactttgcagacctcgctacttaaattagagcttcctgactatgttcgtttggcaatgttggattttgtatcttctttaggaaaactttttatacctgaagctatccaggacagaattctgcccaacctgtcctgtatgtttgccttactgctagctgacaggagttggctgctagaacaacataccttggaggcgtttactcagttcgctgagggaacaaatcatgaagagatagttccacagtgtctcagttctgaagaaactaagaacaaagttgtatcctttctggagaagactgggtttgtagatgaaactgaagctgccaaagtggaacgtgtgaaacaggaaaaaggtattttctgggaaccctttgctaatgtgactgtagaagaagcaaagaggtcatctttacagccttatgcaaaaagagctcgtcaggagttcccctgggaagaagagtacaggtcagcgctgcatacaatagcaggggctttggaagcaactgagtcactactccaaaagggtcctgctccagcctggctttcaatggaaatggaggcgctccaagaaaggatggataagctaaaacgttacatacatactctagggtgaaacttatcactaggcagaactgggtttgatgctttgtcaactgaaaatacttatgtctgtacattttctaacagatataaaacaaattttgtaaagttgaatctagtgaaaataatctttatttgacatttagagaacaggattgtggggaatattcttattaagaactttggtacaatgtactacatgtggaacagtcaggaactgcctaggtccacaaagaaccatttactcagatagtctaactgtaaacaaataaataagctgcctaaggaaacctcagcaatttaaaatcatttatataatttatagctaaaattttttaaagttgtatttcataatagagcttactcttatgttaaagaatggcacaaaattaagctaaccagcttgaattacattttctttacttccagaattgtcctggaaaaagcagtaaattcgacctctcctcagctacttgctcttcatagaaactggcctcagtcaaatgcacaaaggctcttcctcctggaaaccagtactgtgagcctcaccacccagggcttttagccagcactcacagtcagtctcctacttcagttggcacagactggataatgagctcctgggatgggaaaagcaggccactttggggttttcttgtcccaaagcctgcttttgaggtattgattttttttaaaaaaagggaatcctttttcctaaagtttaactcacatctattgtcaccagttattatcttcccagttcagctccccttcttcttcccagccttcagcctctccctgcaacaaaataaagcacaccaagaacccactgaaacaaatcatatgcaaaaatcatacgcaaatttgaaaaagcaggaatttaaaatttatcttttgatgccagaaacactacctcgtactaagtaaaataacttagagctctaacagaaagttgaaaagtaggattacaaaaccatggcactggaaaatagcttttcaaaaaccataaaatccagtaaaaatcagtgtggatgacaccaaatccttattttaatcccttttttttctttttcaaataaaaaggttacaatagctcattaaacaaa

SEQ ID NO: 117811 - DNA, 4002 bp, Homo sapiens
  Payload ID: 3021
  Gene Symbol: C1orf112
  Gene Name: chromosome 1 open reading frame 112
  Uniprot ID: Q9NSG2
  ENST ID: ENST00000359326
  CDS Start-End: 348-2909
ttccggtctgggctttggcgggtctggtttgaagctctcctgtttgacgaaagtatgtctcaggaaggctggagtctttctgaaagagttcttccgcttgttgttggctttcaactgttggatttgaggcgcttagcgccttcttcgtccgggtgcagcacattcttgattggtctcatgcctttgtggttgtaaatgtgcctggaatcctagcctttcatggtttgttctgagtaatgaataccctattactatgatactagtatcttccttaattatcctactcattgtctcaacattctgacagttggattgagcatattcaaattttgaaaattattgtagaaatgtttttacctcatatgaaccacctgacattggaacagactttcttttcacaagtgttaccaaagactgtgaaattattcgatgacatgatgtatgaattaaccagtcaagccagaggactgtcaagccaaaatttggaaatccagaccactctaaggaatattttacaaacaatggtgcagctcttaggagctctcacaggatgtgttcagcatatctgtgccacacaggaatccatcattttggaaaatattcagagtctcccctcctcagtccttcatataattaaaagcacatttgtgcattgtaagaatagtgaatctgtgtattctgggtgtttacacctagtttcagaccttctccaggctcttttcaaggaggcctattctcttcaaaagcagttaatggaactgctggacatggtttgcatggaccctttagtagatgacaatgatgatattttgaatatggtaatagttattcattctttattggatatctgctctgttatttccagtatggaccatgcatttcatgccaatacttggaagtttataattaagcagagccttaagcaccagtccataataaaaagccagttgaaacacaaagatataattactagcttgtgtgaagacattcttttctccttccattcttgtttacagttagctgagcagatgacacagtcagatgcacaggataatgctgactacagattatttcagaaaacactcaaattgtgtcgtttttttgccaactcccttttgcactacgctaaggaatttcttcctttcctctctgattcttgctgtactttgcaccaactgtatcttcagatacacagcaagtttcctccaagcctttatgctaccaggatttctaaagcacaccaagaggaaatagcaggtgctttcctagtgacactggatccacttatcagtcagctgctcacatttcagcctttcatgcaggtggttttggacagtaaattagacctgccatgtgaactgcagtttccacaatgtcttcttctggttgttgtcatggataagctgccatctcagcctaaggaagtgcaaaccctgtggtgcacagacagccaggtctcagaaacgacaaccaggatatctctactcaaagccgttttctacagttttgagcagtgttctggtgaactctctctacctgttcatttacagggattaaagagtaaggggaaagctgaggtggctgtcaccttgtatcagcatgtttgtgttcatctgtgtacatttattacttcctttcatccctcactgtttgctgaactggatgctgctctgctgaatgctgtacttagtgctaatatgatcacctctttgttagctatggatgcatggtgcttccttgctcgatatgggactgctgaactgtgtgcacaccatgtcaccatagtggctcatctgataaagtcatgccctggagaatgttatcaactcatcaacctatcaatactgttgaagcgtctctttttcttcatggcaccaccccatcagctggagtttatccagaaattttccccaaaagaagcagaaaatctgcctctgtggcaacatatttccttccaggcgttacctcctgagcttagggaacaaactgtccatgaggtcaccacagtaggcactgcagaatgcaggaaatggctgagcaggagtcgtactttgggagaactagaatctctgaacacagtactgtctgctttgcttgcagtatgtaattctgctggtgaagctttggatacaggaaaacaaactgcaattatcgaagttgtgagtcagctttgggcttttttaaacattaaacaggtagcagatcaaccttatgttcaacagacattcagccttttacttccactgttgggatttttcattcaaactctagatcctaaactgatacttcaggcagtaactttgcagacctcgctacttaaattagagcttcctgactatgttcgtttggcaatgttggattttgtatcttctttaggaaaactttttatacctgaagctatccaggacagaattctgcccaacctgtcctgtatgtttgccttactgctagctgacaggagttggctgctagaacaacataccttggaggcgtttactcagttcgctgagggaacaaatcatgaagagatagttccacagtgtctcagttctgaagaaactaagaacaaagttgtatcctttctggagaagactgggtttgtagatgaaactgaagctgccaaagtggaacgtgtgaaacaggaaaaaggtattttctgggaaccctttgctaatgtgactgtagaagaagcaaagaggtcatctttacagccttatgcaaaaagagctcgtcaggagttcccctgggaagaagagtacaggtcagcgctgcatacaatagcaggggctttggaagcaactgagtcactactccaaaagggtcctgctccagcctggctttcaatggaaatggaggcgctccaagaaaggatggataagctaaaacgttacatacatactctagggtgaaacttatcactaggcagaactgggtttgatgctttgtcaactgaaaatacttatgtctgtacattttctaacagatataaaacaaattttgtaaagttgaatctagtgaaaataatctttatttgacatttagagaacaggattgtggggaatattcttattaagaactttggtacaatgtactacatgtggaacagtcaggaactgcctaggtccacaaagaaccatttactcagatagtctaactgtaaacaaataaataagctgcctaaggaaacctcagcaatttaaaatcatttatataatttatagctaaaattttttaaagttgtatttcataatagagcttactcttatgttaaagaatggcacaaaattaagctaaccagcttgaattacattttctttacttccagaattgtcctggaaaaagcagtaaattcgacctctcctcagctacttgctcttcatagaaactggcctcagtcaaatgcacaaaggctcttcctcctggaaaccagtactgtgagcctcaccacccagggcttttagccagcactcacagtcagtctcctacttcagttggcacagactggataatgagctcctgggatgggaaaagcaggccactttggggttttcttgtcccaaagcctgcttttgaggtattgattttttttaaaaaaagggaatcctttttcctaaagtttaactcacatctattgtcaccagttattatcttcccagttcagctccccttcttcttcccagccttcagcctctccctgcaacaaaataaagcacaccaagaacccactgaaacaaatcatatgcaaaaatcatacgcaaatttgaaaaagcaggaatttaaaatttatcttttgatgccagaaacactacctcgtactaagtaaaataacttagagctctaacagaaagttgaaaagtaggattacaaaaccatggcactggaaaatagcttttcaaaaaccataaaatccagtaaaaatcagtgtggatgacaccaaatccttattttaatcccttttttttctttttcaaataaaaaggttacaatagctcattaaacaaa

SEQ ID NO: 117812 - DNA, 2661 bp, Homo sapiens
  Payload ID: 3021
  Gene Symbol: C1orf112
  Gene Name: chromosome 1 open reading frame 112
  Uniprot ID: Q9NSG2
  ENST ID: ENST00000413811
  CDS Start-End: 1019-2611
acattcttgattggtctcatgcctttgtggttgtaaatgtgcctggaatcctagcctttcatggtttgttctgagtaatgaataccctattactatgatactagtatcttccttaattatcctactcattgtctcaacattctgacagttggattgagcatattcaaattttgaaaattattgtagaaatgtttttacctcatatgaaccacctgacattggaacagactttcttttcacaagtgttaccaaagactgtgaaattattcgatgacatgatgtatgaattaaccagtcaagccagaggactgtcaagccaaaatttggaaatccagaccactctaaggaatattttacaaacaatggtgcagctcttaggagctctcacaggatgtgttcagcatatctgtgccacacaggaatccatcattttggaaaatattcagagtctcccctcctcagtccttcatataattaaaagcacatttgtgcattgtaagaatagtgaatctgtgtattctgggtgtttacacctagtttcagaccttctccaggctcttttcaaggaggcctattctcttcaaaagcagttaatggaactgctggacatggtttgcatggaccctttagtagatgacaatgatgatattttgaatatggtaatagttattcattctttattggatatctgctctgttatttccagtatggaccatgcatttcatgccaatacttggaagtttataattaagataatgctgactacagattatttcagaaaacactcaaattgtgtcgtttttttgccaactcccttttgcactacgctaaggaatttcttcctttcctctctgattcttgctgtactttgcaccaactgtatcttcagatacacagcaagtttcctccaagcctttatgctaccaggatttctaaagcacaccaagaggaaatagcaggtgctttcctagtgacactggatccacttatcagtcagctgctcacatttcagcctttcatgcaggtggttttggacagtaaattagacctgccatgtgaactgcagtttccacaatgtcttcttctggttgttgtcatggataagctgccatctcagcctaaggaagtgcaaaccctgtggtgcacagacagccaggtctcagaaacgacaaccaggatatctctactcaaagccgttttctacagttttgagcagtgttctggtgaactctctctacctgttcatttacagggattaaagagtaaggggaaagctgaggtggctgtcaccttgtatcagcatgtttgtgttcatctgtgtacatttattacttcctttcatccctcactgtttgctgaactggatgctgctctgctgaatgctgtacttagtgctaatatgatcacctctttgttagctatggatgcatggtgcttccttgctcgatatgggactgctgaactgtgtgcacaccatgtcaccatagtggctcatctgataaagtcatgccctggagaatgttatcaactcatcaacctatcaatactgttgaagcgtctctttttcttcatggcaccaccccatcagctggagtttatccagaaattttccccaaaagaagcagaaaatctgcctctgtggcaacatatttccttccaggcgttacctcctgagcttagggaacaaactgtccatgaggtcaccacagtaggcactgcagaatgcaggaaatggctgagcaggagtcgtactttgggagaactagaatctctgaacacagtactgtctgctttgcttgcagtatgtaattctgctggtgaagctttggatacaggaaaacaaactgcaattatcgaagttgtgagtcagctttgggcttttttaaacattaaacaggtagcagatcaaccttatgttcaacagacattcagccttttacttccactgttgggatttttcattcaaactctagatcctaaactgatacttcaggcagtaactttgcagacctcgctacttaaattagagcttcctgactatgttcgtttggcaatgttggattttgtatcttctttaggaaaactttttatacctgaagctatccaggacagaattctgcccaacctgtcctgtatgtttgccttactgctagctgacaggagttggctgctagaacaacataccttggaggcgtttactcagttcgctgagggaacaaatcatgaagagatagttccacagtgtctcagttctgaagaaactaagaacaaagttgtatcctttctggagaagactgggtttgtagatgaaactgaagctgccaaagtggaacgtgtgaaacaggaaaaaggtattttctgggaaccctttgctaatgtgactgtagaagaagcaaagaggtcatctttacagccttatgcaaaaagagctcgtcaggagttcccctgggaagaagagtacaggtcagcgctgcatacaatagcaggggctttggaagcaactgagtcactactccaaaagggtcctgctccagcctggctttcaatggaaatggaggcgctccaagaaaggatggataagctaaaacgttacatacatactctagggtgaaacttatcactaggcagaactgggtttgatgctttgtcaactgaaaatac

SEQ ID NO: 117813 - DNA, 3413 bp, Homo sapiens
  Payload ID: 3022
  Gene Symbol: C1orf115
  Gene Name: chromosome 1 open reading frame 115
  Uniprot ID: Q9H7X2
  ENST ID: ENST00000294889
  CDS Start-End: 559-987
actttttcactgagtcagaccgttgaacaccgtggacacactgtcttgcgtttccgaatatttcctagaatacggacgtttcctaagactcacgataaagattttctgatcgtctctccaaaaccttgccaccaatttgcactcccacgaatcctgttaccgtgactatctcgccatgccctccctagcactgagcgtgatctctagtatcattttccatcgttgctaatttgaacatgagcagatggagtcctattatttggggtcattaatttcgtagcaagtgcagttgaaggtgttttgcatgttcattgtgcagtgcgcgccgtagtctgcacagtttggccggcaggtgggatgaagggcggggctggcggagcgcgcccgccgcctggtaggccagttcggagcggagccaacgctatcccgggccccacggccagggggcgctgcggcccccccaatcccccgccccgtccgggctggggcggaggagcgggcggggaccaaaggttggtgtctttgcgctcggaccttcgccagaggggccgggacatcatgacggtgggagccaggctccgaagcaaggcggagagcagcctcctgcgccgcgggccccgagggcgagggcgaaccgagggggacgaggaggcggccgccatcctggagcacctggagtacgcggacgaggcggaggcggcggccgagagcgggacgagcgcggcggacgagcggggcccggggacccggggcgcgcggagggtgcacttcgccctcctgcccgagcgctacgagccactggaggagccggcgccgagcgagcagcccaggaagaggtaccggaggaagctgaagaagtacggcaagaatgtcgggaaggtcatcatcaaaggatgccgctacgtggtcatcggcctgcaaggcttcgctgcagcctactccgccccgtttgcggtagccaccagcgtggtatccttcgtgcgctaatgggagctgctgtggcaggtgcccccagagtgaacgggagcccctgctgtgggaactttgtgaatcctggagcatctcagacttgaacacacagcatatttggaagagaaaacatgcctttctttgttgaatcacattagtatgatgagtgagtcatccctgcccatctgctgagcttctcacatctctcagtcacacgtggacccagtggtcaatcctgcagagaattcggcggaggttaggtttgggagtggagctagcgtgctaaagccagagccttcacgtgaaggtggcaggcactggggcggaagccaacactcaacagatgcaagcagtgtgggtgtgcagcagaacagtgatcttgggggaggaagaggatgttactagagtcagatgatttgctgtattctcctgaaaggtcgtaggctgacaggcgctcacattccttggctgcctcggttctgagggcagctaaggagctgtttattcctcaagtcatgctccccgatctccttcctctaccactctgtcaccaggagtttaattacaggcttgaggagaagaaaggaagaaaagatatcttgatgctttgaaaactgtgttggcagtgtggcatgactgtttaaagtagataaaaccttgtcattttaccccatccctgcatgactgtgaagctggcgaggaaggaggaagaagggcaagttcagatgcaggctgggtggctgggacaggttggctaagggactactctggagggctcttctgcctggcattgcccacttcggcccagccacgtgtttgcagcgaccagagtccctgcaaaggtgtggctggctgtggtcagggtgctactagcaccatcagcgcactcccgccattggctcagctcctctctgccagtccaactaagagtgctttgtcctgggtgggacataggggctgagagagatggggggagacataacacccaggaatgaaaatacagatttagagaaggaaccagtaagtaggagacagatgtgaaggaaatggaaatgaggcaagaggacattggaagagagaagtttgctgtccaggagccaggtctggagcatcagtgtgagggagttcaggtaggctgggcctgtgcctctaggtagggacaagggaggctgggtagccagggctggtgcttaaaacccctgaggccatgagctcattggctgcctttgtagcatcctgtcttcttctgtgctgcctggtttgatctcatctcacctggattcaaagggtaaggtgggcatgggtcttgggcctgacacccaccaaggatgacctgtggactgccatcggatgctgaacagggagatgaaaggaggtcctcttaccatacccctctgccaaccccccagtaggccactgttctgactttgtttccagaatatccagaaatccaaaggggctgttgctgaacagtctgcaggaccagtgacagcacctacctgttgtcccaaggcatacaaaggaggcctcaacgctcatgcttctctaatcaagccctaccaagacagacagaaagacagacagaaaaaaggaaggggtagaggagaaggttgaagctgtggagctagactctgcttcacttcctgaagcttcaacttcatgtcgaagattcactgggacccaattcctgcattgttaatatttgtgaggaaaagtgaaacaagtgatctggttttagcccagatgatgaaagtggatatggcacattttcacacacgtgagataattacagcttgccccacaacactgggtgttggagaaagggagagatagtcataagtggaagaaaaagccaagcatagtgagtgggaaagagagtgagagcctgtgcaggctgctgacgagccccaggcagcccacaagtttctcgtggggagatggaggcagagcccagggtaggggacagagctgctggggcctttccttgcctgggaatctgtcccaggaagagcttccccactcccatcccccaaattggaaaaaccgtacattcaagcctgtttggccctgaaattcttaagaatctggttaagaattaactcactaatgtcaaaagtcaaaacctcctaggggttgtcctgggagtcaggttcacgggtacagaagatgaatctcagatgtcactcaacctgagccgtcattctctgtggcagggctgccctgggtttctcttactcaatccctggagtgtaagcatttggattgtgtcacagattacctttttaccttttctttctttttttttctttttttcaatatcagtgcccacaccttactgagtattgagttttagagctttcgcttgatgtgcttgaccaagagacttcttttgtatccttttcttgtcctatgatgtaaataaaagcctcgatttatgtaatgtt

SEQ ID NO: 117814 - DNA, 5493 bp, Homo sapiens
  Payload ID: 3023
  Gene Symbol: C1orf116
  Gene Name: chromosome 1 open reading frame 116
  Uniprot ID: Q9BW04
  ENST ID: ENST00000359470
  CDS Start-End: 251-2056
gtgggggccaggcagcacagatgaagcatttacctatctaggtaagtcaggaggagctcaaaaggagaagaaaacagtaggaggcaggggaagcagcctctgtctccatctctgccctttgaaacaaaagggtatttcttttctctcttcagcccccaacccagtggaggcccggcttgggacattgttcacttcccctcgcttcccctctagaagccccctttgccatccctgcaccttgtttcgggtgatgcccgagagggagctgtggccagcggggactggctcagaacccgtgacccgtgtcggcagctgtgacagcatgatgagcagcacctccacccgctctggatctagtgatagcagctacgacttcctgtccactgaagagaaggagtgtctgctcttcctggaggagaccattggctcactggacacggaggctgacagcggactgtccactgacgagtctgagccagccacaactcccagaggtttccgagcactgcccataacccaacccactccccggggaggtccagaggagaccatcactcagcaaggacgaacgccaaggacagtaactgagtccagctcatcccaccctcctgagccccagggcctaggcctcaggtctggctcctacagcctccctaggaatatccacattgccagaagccagaacttcaggaaaagcaccacccaggctagcagtcacaaccctggagaaccggggaggcttgcgccagagcctgagaaagaacaggtcagccagagcagccaacccaggcaggcacctgccagcccccaggaggctgcccttgacttggacgtggtgctcatccctccgccagaagctttccgggacacccagccagagcagtgtagggaagccagcctgcccgaggggccaggacagcagggccacacaccccagctccacacaccatccagctcccaggaaagagagcagactccttcagaagccatgtcccaaaaagccaaggaaacagtctcaaccaggtacacacaaccccagcctcctcctgcagggttgcctcagaatgcaagagctgaagatgctcccctctcatcaggggaggacccaaacagccgactagctcccctcacaacccctaagccccggaagctgccacctaatattgttctgaagagcagccgaagcagtttccacagtgacccccagcactggctgtcccgccacactgaggctgcccctggagattctggcctgatctcctgttcactgcaagagcagagaaaagcacgtaaagaagctctagagaagctggggctaccccaggatcaagatgagcctggactccacttaagtaagcccaccagctccatcagacccaaggagacacgggcccagcatctgtccccagctccaggtctggctcagcctgcagctccagcccaggcctcagcagctattcctgctgctgggaaggctctggctcaagctccggctccagctccaggtccagctcagggacctttgccaatgaagtctccagctccaggcaatgttgcagctagcaaatctatgccaatttctatccctaaggccccaagggcaaacagtgccctgactccaccgaagccagagtcagggctgactctccaggagagcaacacccctggcctgagacagatgaacttcaagtccaacactctggagcgctcaggcgtgggactgagcagctacctttcaactgagaaagatgccagccccaaaaccagcacttctctgggaaagggctccttcttggacaagatctcgcccagtgtcttacgtaattctcggccccgcccggcctccctgggcacggggaaagattttgcaggtatccaggtaggcaagctggctgacctggagcaggagcagagctccaagcgcctgtcctaccaaggacagagccgtgacaagcttcctcgccccccctgtgtcagtgtcaagatctccccaaagggtgtccccaatgaacacagaagggaggccctgaagaagctgggactgttgaaggagtagactctgcgaccagtacagaccctgtcctggctgaacaagaagagacacatgctccacttgggagcctttgccaccacgcaactcagggctcaagatgaatgggagggagagatttgagtccaagcatacatttatattcagtgttgtgccattgagttcccatgtggatcattctgaaggtgatctccacaagagggtgtgtgtgtgtgtgtttggtgtgtgtgtggagggggggccgctggatacatcactgaagctattgatataacacaatgagtcactgttcagaattttgctcttgttagatgttttcttacattgggtagagtccagcctagtgagagctgagtgaaggggctggccatgcctgagacaaaaagtcaaatgagacaatggacgtgtcaatgacttgaaaaaaagtcacatccagcaaatgcagggtcacatgaaatatgggcctcctggaatccctacagtggatggagactggctcataccttgccagatccctctctcagttccagccttctggacaaggcctgggctaagaggagctgattcgttatctcttcacccactgccctctcagtatcaccagtcccaaagacaggatacgtccctgtaacccaatctctcggttgattgatagcagaacagctcttgttggtctgagaaggcaggataagtgaccacatatttatgccactacctccaccagggagagtccttctccacaggcttgataaattcaatcaccaactgtgctgtcgtccctgactctgctactcccgttcttcctgctttcctgctccgtatctcagtctgcactgaccccagggctgggctgacatcaagatgggagcccagcccacgggctttataaacacccaagaaccgtttcagatcttctctgtgctgatgcaggtagttttaaatttttctcagttccagtgatagaaaacccacacaatacatcctctgccagtcttaatagaatatcagaggtaagaggggcctcagagaagctctgacgcagtgctgctggggaagggaagtgactaaccccgggtcagcctgccatttagggaaagagctgaggttcttacccttgttgcatgctgccacctctccttagccagtgctcttgtacatccacacagcaccctaaggagccatagtcaccatcaaagactcaaccctaaggcccttcaagatctcaaagtgccttctgaagcatcagagattaaatattgttcaaactaatagttattgctgtggcttttaattttatctttggaagatagctatatggtaactcatcattaaccagaacacctctcccctcaaattccgtgaccaagttgtgcagcttgagcaaatgccgaaagagggtattatgggtgggtggtgtgggcttgcaaatacaagcttggaggtgagacatggccagacatgactcctgcttccccttaggaagtaaatcttacttatggttgtgaactgcttggagtccaggatgcccagatgtgaggggcagatgaagggaatgttgctggaaaggtgccttttaaggctgctgagaatttctggactgtgtcctgatggacgcagcaccatcaaagcccagaatttctgaaaacggtgacaaggttaacataaggacaacaaatactccaccctgtcatggtatgtgaggtgtgggtgtggcggtttctgtgtacgtttgctcatacacgcacatccaaaagcctgtgcctcattcctggccatgggtgaggacttggtctgtcacggctgatgaggactcccacaaccggccaagttatgtcttattatacacccccagaaagagagaaagctgccttctggaggactgattccacatgctatattcagctgagttgatttctgtgtctatttcaacccataacctgaagaatgatcaccttattccttattcattaattttcttgattaatagggaaacttgggaatagctataaagtaaaacttgggtggaacctggggccctggcatcacacaagtgtgattaggatggtcaaggtcatcaggagtacagcctattatattcccacatcctgagaaaggtcatttctcccacacacgacaaagtcacagacatcctgcacctgccactaggcatcctcatcctactgacatgcccatttctccagttttcttaatctgagactcccttcccttgttttttaaagataccgtgcttctccacatcctcatccttcaaggagcatattttgctcttaggatggtctttgggattcaagaatagaataataaatccaaacttggtcattcccattttgaagagatgcaagagggcccagtgaggacatccgcctccctgaaagtggtgctagacagagctgaggtcattgtatctgtgtatccacataggatttctcttaattcagcttgaattgatggggagggaggtaagagtagggtcagagttactcatcccttttcaaagaattgtgggtggaagtttgtaaaggccattcatttgattttcaaaatcaaagcgacagctctacttccacttggccttagatctctgctataccctgccatagccttgatgccactgggcacaagccacctgccaaatacaggagtggcctctcccagcctggcatgataggggggtctgtgccctcagatgtgttgacagctgctcttctgaattgccacacctgtgctacacttggaattctgtgctctgactctgcagggtaggaccacgtgccatctcacacagaggtcaaccgatgagcccactcactcgtacatgccttcttccacagtgggaagcatgatctggcaggggccgccctgtaggctggggatgggctgctgtgtgaatgttgacgttcgtttcatggagaaaggggaggtgaaagattgaagagcaggttcctgtcaatgttctgagttcgagctggaggtgtagattgaatagtctacatggtctgtgagtgtgtgagatgaacccttccatcctttgacacctggttgtatgtgtaggctaagaaggaaggaccctcctgtcagtgtgcaaagctgtaatctcatggactagaggagagggggccaaggggatggacaggagaagtcatgcagaatctaagcaggaatgcagatagaacacatctaggctcttttccccaggagagtgatgatggagcatatagatctggctcaaattcagcctccatcacttaccagtcaggaaccctggcgatatcactttaactttctgaacctcagagtcttcacctataagacggggaaaataataccaccctttcaagattgttgagataaataagtgatataaaacatgtaaagcttagttctggccacagtgtagctactcaataaatgataatactacc

SEQ ID NO: 117815 - DNA, 3142 bp, Homo sapiens
  Payload ID: 3023
  Gene Symbol: C1orf116
  Gene Name: chromosome 1 open reading frame 116
  Uniprot ID: Q9BW04
  ENST ID: ENST00000461135
  CDS Start-End: 812-1879
agtggcagggtgggggccaggcagcacagatgaagcatttacctatctaggtaagtcaggaggagctcaaaaggagaagaaaacagtaggaggcaggggaagcagcctctgtctccatctctgccctttgaaacaaaagggtatttcttttctctcttcagcccccaacccagtggagagtgatagcagctacgacttcctgtccactgaagagaaggagtgtctgctcttcctggaggagaccattggctcactggacacggaggctgacagcggactgtccactgacgagtctgagccagccacaactcccagaggtttccgagcactgcccataacccaacccactccccggggaggtccagaggagaccatcactcagcaaggacgaacgccaaggacagtaactgagtccagctcatcccaccctcctgagccccagggcctaggcctcaggtctggctcctacagcctccctaggaatatccacattgccagaagccagaacttcaggaaaagcaccacccaggctagcagtcacaaccctggagaaccggggaggcttgcgccagagcctgagaaagaacaggtcagccagagcagccaacccaggcaggcacctgccagcccccaggaggctgcccttgacttggacgtggtgctcatccctccgccagaagctttccgggacacccagccagagcagtgtagggaagccagcctgcccgaggggccaggacagcagggccacacaccccagctccacacaccatccagctcccaggaaagagagcagactccttcagaagccatgtcccaaaaagccaaggaaacagtctcaaccaggtacacacaaccccagcctcctcctgcagggttgcctcagaatgcaagagctgaagatgctcccctctcatcaggggaggacccaaacagccgactagctcccctcacaacccctaagccccggaagctgccacctaatattgttctgaagagcagccgaagcagtttccacagtgacccccagcactggctgtcccgccacactgaggctgcccctggagattctggcctgatctcctgttcactgcaagagcagagaaaagcacgtaaagaagctctagagaagctggggctaccccaggatcaagatgagcctggactccacttaagtaagcccaccagctccatcagacccaaggagacacgggcccagcatctgtccccagctccaggtctggctcagcctgcagctccagcccaggcctcagcagctattcctgctgctgggaaggctctggctcaagctccggctccagctccaggtccagctcagggacctttgccaatgaagtctccagctccaggcaatgttgcagctagcaaatctatgccaatttctatccctaaggccccaagggcaaacagtgccctgactccaccgaagccagagtcagggctgactctccaggagagcaacacccctggcctgagacagatgaacttcaagtccaacactctggagcgctcaggcgtgggactgagcagctacctttcaactgagaaagatgccagccccaaaaccagcacttctctgggaaagggctccttcttggacaagatctcgcccagtgtcttacgtaattctcggccccgcccggcctccctgggcacggggaaagattttgcaggtatccaggtaggcaagctggctgacctggagcaggagcagagctccaagcgcctgtcctaccaaggacagagccgtgacaagcttcctcgccccccctgtgtcagtgtcaagatctccccaaagggtgtccccaatgaacacagaagggaggccctgaagaagctgggactgttgaaggagtagactctgcgaccagtacagaccctgtcctggctgaacaagaagagacacatgctccacttgggagcctttgccaccacgcaactcagggctcaagatgaatgggagggagagatttgagtccaagcatacatttatattcagtgttgtgccattgagttcccatgtggatcattctgaaggtgatctccacaagagggtgtgtgtgtgtgtgtttggtgtgtgtgtggagggggggccgctggatacatcactgaagctattgatataacacaatgagtcactgttcagaattttgctcttgttagatgttttcttacattgggtagagtccagcctagtgagagctgagtgaaggggctggccatgcctgagacaaaaagtcaaatgagacaatggacgtgtcaatgacttgaaaaaaagtcacatccagcaaatgcagggtcacatgaaatatgggcctcctggaatccctacagtggatggagactggctcataccttgccagatccctctctcagttccagccttctggacaaggcctgggctaagaggagctgattcgttatctcttcacccactgccctctcagtatcaccagtcccaaagacaggatacgtccctgtaacccaatctctcggttgattgatagcagaacagctcttgttggtctgagaaggcaggataagtgaccacatatttatgccactacctccaccagggagagtccttctccacaggcttgataaattcaatcaccaactgtgctgtcgtccctgactctgctactcccgttcttcctgctttcctgctccgtatctcagtctgcactgaccccagggctgggctgacatcaagatgggagcccagcccacgggctttataaacacccaagaaccgtttcagatcttctctgtgctgatgcaggtagttttaaatttttctcagttccagtgatagaaaacccacacaatacatcctctgccagtcttaatagaatatcagaggtaagaggggcctcagagaagctctgacgcagtgctgctggggaagggaagtgactaaccccgggtcagcctgccatttagggaaagagctgaggttcttacccttgttgcatgctgccacctctccttagccagtgctcttgtacatccacacagcaccctaaggagccatagtcaccatcaaagactcaaccctaaggcccttcaagatctcaaagtgccttctgaagcatcagagattaaatattgttcaaactaa

SEQ ID NO: 117816 - DNA, 973 bp, Homo sapiens
  Payload ID: 3024
  Gene Symbol: C1orf122
  Gene Name: chromosome 1 open reading frame 122
  Uniprot ID: Q6ZSJ8
  ENST ID: ENST00000373042
  CDS Start-End: 260-592
gccctcatccccctgcaccgacgcgccggagacatccgcccaggcccgcttccgggaggaagtgacgctcccagccagcttccggtccaggagactcggccccgcctctgcgccgggcagcttaaagggaccacgacccccaggaggattgaaggagaccggtggggacggggcggggcgcagccttgcgaagccctaacgcagcgctggggaggggggcggccgaaaggggggcggtggtcgggccgcgcaagcggagatggaatggggcccgggctcagactggtcacggggggaggctgccggcgtggaccgcgggaaggcggggctggggctcggcgggaggccacccccacagccgccccgggaggagcgcgcccagcagctgctggacgcggtggagcagcggcagcggcagctcctggacaccatcgcagcctgcgaggagatgttacggcagctgggccgccggcgcccggagccggctggtggcgggaacgtctcagccaaacctggagcgcccccccagccggctgtctccgccagaggcggctttccaaaggatgctggcgatggagctgcggagccctgaccatccccgagcagaataccctgacttctctccctccccagggccggtggctggactctgaacaactcccttcagtaaaggggccagtcttcactggcagtggctggtacttggctctcagcctggagtggcagctctgctagcagctgggttcactcccacttcatcctggctgaaagcagtgctgtgctttgaaatgcagccaatgaatacccagtctgattacccagatttgggcagaccagcagtgctcgccagagtggtctggcctgctatgggggatccaggtggtgttacatgtccatttcatgttttgggggcttttagccccacaaaacaccttcagtagagccttgattaaaaggaaacctgcagactctc

SEQ ID NO: 117817 - DNA, 2229 bp, Homo sapiens
  Payload ID: 3024
  Gene Symbol: C1orf122
  Gene Name: chromosome 1 open reading frame 122
  Uniprot ID: Q6ZSJ8
  ENST ID: ENST00000373043
  CDS Start-End: 1707-1850
gtaaggcaaggggaaagggatcatgagaaaggttggaagggataagagggtaagtcttatctggatcctagtgaaagccaagtggcctggagtctggggacacaagagaaaacttgactcacaggcgtaaaagggtttaggtccttgttgagctcctccgagcgttccatcaccagggtcactggtcctggcagtaggtctttcaggagcccctcaggtactctcacacggcagtatctgggaaacacagaagaataaatccattcaaaattgaagggccactggtggtcctttcctagactctaggcagacgtagaaaaggaatccttcgagtttacaatgggagccgcctgtctccctgcttcacctccctaagagcttgagcagaaagcagggctccagaggcgcacccctggcttgacgcccatgtgcctctggtctcagggactacaacagctgcaccgctgtgatatcatgatagtgggatcaagctccacgttttattttcttcaaggcattcgctattaaattaagctactgtgtttgtttgcttttttcccgggggcctccccaattagcacaaatacgccaagggaacagggtccctgcctttctcgtgtgttgctgcttcccagcagcatgtagttcagggcccggggcacgttaagtcctcggtacatatttccagttccggattccttggtgagcctggacaagcccctcccgctctctgcgcctcagtctcccaagcctgtcaccggaaacccctcccgcggtgccgcccctagcggggccgggtcggggcggccttacctgtagacgtcggccacgcggccgaggcatacggccagaggcttggcctcgctgcgacccttgaggcggtacacagcgcgcagagccgccgagcagctcgccgcgcaggccaggccgtacagcgtatcggtggggacggccaccacggcgccggcgcgcagctcggccacggcggcccgcagcgcctcggtccagccggcgcgctccgggctcgcggcctgcacggccccgctccccgggagccgcaacagccgggcgccgggggccgccggagcgggactcggcgggcggaagaggcgaccgctccgggagccagcaggcccctcgctcaaccccacgctggcagccaccgcggccctcatccccctgcaccgacgcgccggagacatccgcccaggcccgcttccgggaggaagtgacgctcccagccagcttccggtccaggagactcggccccgcctctgcgccgggcagcttaaagggaccacgacccccaggaggattgaaggagaccggtggggacggggcggggcgcagccttgcgaagccctaacgcagcgctggggaggggggcggccgaaaggggggcggtggtcgggccgcgcaagcggagatggaatggggcccgggctcagactggtcacgggggtgagagggggcccgtcggggcgggaggaaggggcttggccccgcgcaagcgccggccctgaccgtctgtctctcgctctctcccgggcagggaggctgccggcgtggaccgcgggaaggcggggctggggctcggcgggaggccacccccacagccgccccgggaggagcgcgcccagcagctgctggacgcggtggagcagcggcagcggcagctcctggacaccatcgcagcctgcgaggagatgttacggcagctgggccgccggcgcccggagccggctggtggcgggaacgtctcagccaaacctggagcgcccccccagccggctgtctccgccagaggcggctttccaaaggatgctggcgatggagctgcggagccctgaccatccccgagcagaataccctgacttctctccctccccagggccggtggctggactctgaacaactcccttcagtaaaggggccagtcttcactggcagtggctggtacttggctctcagcctggagtggcagctctgctagcagctgggttcactcccacttcatcctggctgaaagcagtgctgtgctttgaaatgcagccaatgaatacccagtctgattacccagatttgggcagaccagcagtgctcgccagagtggtctggcctgctatgggggatccaggtggtgttacatgtccatttcatgttttgggggcttttagccccacaaaacaccttcagtagagccttgattaaaaggaaacctgcagactc

SEQ ID NO: 117818 - DNA, 1234 bp, Homo sapiens
  Payload ID: 3024
  Gene Symbol: C1orf122
  Gene Name: chromosome 1 open reading frame 122
  Uniprot ID: Q6ZSJ8
  ENST ID: ENST00000468084
  CDS Start-End: 715-858
tcccgcggtgccgcccctagcggggccgggtcggggcggccttacctgtagacgtcggccacgcggccgaggcatacggccagaggcttggcctcgctgcgacccttgaggcggtacacagcgcgcagagccgccgagcagctcgccgcgcaggccaggccgtacagcgtatcggtggggacggccaccacggcgccggcgcgcagctcggccacggcggcccgcagcgcctcggtccagccggcgcgctccgggctcgcggcctgcacggccccgctccccgggagccgcaacagccgggcgccgggggccgccggagcgggactcggcgggcggaagaggcgaccgctccgggagccagcaggcccctcgctcaaccccacgctggcagccaccgcggccctcatccccctgcaccgacgcgccggagacatccgcccaggcccgcttccgggaggaagtgacgctcccagccagcttccggtccaggagactcggccccgcctctgcgccgggcagcttaaagggaccacgacccccaggaggattgaaggagaccgggaggctgccggcgtggaccgcgggaaggcggggctggggctcggcgggaggccacccccacagccgccccgggaggagcgcgcccagcagctgctggacgcggtggagcagcggcagcggcagctcctggacaccatcgcagcctgcgaggagatgttacggcagctgggccgccggcgcccggagccggctggtggcgggaacgtctcagccaaacctggagcgcccccccagccggctgtctccgccagaggcggctttccaaaggatgctggcgatggagctgcggagccctgaccatccccgagcagaataccctgacttctctccctccccagggccggtggctggactctgaacaactcccttcagtaaaggggccagtcttcactggcagtggctggtacttggctctcagcctggagtggcagctctgctagcagctgggttcactcccacttcatcctggctgaaagcagtgctgtgctttgaaatgcagccaatgaatacccagtctgattacccagatttgggcagaccagcagtgctcgccagagtggtctggcctgctatgggggatccaggtggtgttacatgtccatttcatgttttgggggcttttagccccacaaaacaccttcagtagagccttgattaaaaggaaacctgcaga

SEQ ID NO: 117819 - DNA, 1085 bp, Homo sapiens
  Payload ID: 3025
  Gene Symbol: C1orf123
  Gene Name: chromosome 1 open reading frame 123
  Uniprot ID: Q9NWV4
  ENST ID: ENST00000294360
  CDS Start-End: 43-525
aacggcaagggccgcagccagcaccgggcggagagggctaccatggggaaaatcgcgctgcaactcaaagccacgctggagaacatcaccaacctccggcccgtgggcgaggacttccggtggtacctgaagatgaaatgtggcaactgtggtgagatttcggacaagtggcagtacatccggctgatggacagtgtggcactgaaggggggccgtggcagtgcttccatggtccagaagtgcaagctgtgtgcaagagaaaattccatcgagattttaagcagcaccatcaagccttacaatgctgaagacaatgagaacttcaagacaatagtggagtttgagtgccggggccttgaaccagttgatttccagccgcaggctgggtttgctgctgaaggtgtggagtcagggacagccttcagtgacattaatctgcaggagaaggactggactgactatgatgaaaaggcccaggagtctgtgggaatctatgaggtcacccaccagtttgtgaagtgctgatccctcttccttcccagttgcccttaagaactgagaaaggacaaagtactctaagcagcagagcccacagaggctcgttcctttgacccttgtctcctggtggctatacgaaaccttcacaatctgcatgctggactttattacagcttcccaagccccatcaataaagcccctgttcacgctgcactggtgcatgaaggtgaagtaaggaggcagctactccctccacaaataagaattcgtgcagcagcagttcactccttaggaaaatgaagagtatttttaaggagatggtatctccccagtcaagggcaagtttacagagatgaaaccgcgatcccaccatcactcaatgagccagaagccaatggtgacgtactgttacctgaacttactgaacttgctgttggaaagatctttgtgaggattaggaattaggttaaaagaaattaagaaccatcttcaagcaaaaattaaactttatttctgcttaaacaataaatacacctgagttagttttccaaacctttcctcctgattaaatgcccttaaaacttaaa

SEQ ID NO: 117820 - DNA, 2761 bp, Homo sapiens
  Payload ID: 3026
  Gene Symbol: C1orf127
  Gene Name: chromosome 1 open reading frame 127
  ENST ID: ENST00000377004
  CDS Start-End: 1-2472
atgtgggggtccccagcacttgcctgggccgtctggcttgcctgtgttcagcccacggtgttcccatggagcctctccttcaggtcagacacggacaagccaagctctgcagcagaagttttaacagaagcatcttcttgttggacagacacagttgagtgcttctcagactacatgaccctgtggatcccaaggagccacgtggaggggctgaggcggtggctggccaggaccttgcacttgccaggcacctggaggtcccctgaccacctggattcttctcttgctaaatgtggctacttcctgcatctggcttcagacggtgacttcctttttcgagttcaatactcggcctgctttgtgcagaaagagaaagcaaattacaggctggaaatcagaatatttcagaaaggggtgatggggttggagcggagtgatcgctacataatgaagtgtccgatgctaaggtcaaggctgggccaggaaagcgtccactgtgggcccatgttcatccaggtctcccggcccctgcccctgtggagggacaatagacagactccatggctgctgtcccttcgaggggagctggtggcttctcttgaagacgccagcctgatgggactgtatgtggacatgaatgccaccactgtcaccgtccaaagcccgagacaaggccttcttcagaggtgggaggtgctgaacacctctgctgagctcctgccactatggctggtgagcggtcaccatgcctattctttagaagctgcttgcccaccggtgtcattccagccagagtcggaggtcttagttcacatccccaagcagagactgggtctagtcaaaagaggttcctacattgaggaaaccctgagcctcagattcctccgagtccaccagtccaacatctttatggtgactgagaacaaggactttgtggtggtcagcattccggcggccggggtgctccaggtccagcgatgccaagaagtcggaggaaccccgggaacacaagctttctatagggtagacctgagcctggaatttgccgagatggctgccccggtcctctggacagtggagagcttcttccagtgtgtgggttcaggaacagagtcgcctgcctcaactgctgcactgaggaccactccctccccaccatccccaggaccagagacccctccagcgggagtgccacctgctgcttcctcccaggtgtgggctgcaggaccagctgcccaggaatggctttctcgggacctcctgcaccggccttccgacgcactggccaaaaaggggcttggaccattcctgcaaacagccaaaccggcgagaagaggccagacatctgcctccattctccccagagtggtgcaagctcagcgaggtccccagcctcccccaggggaagcagggatccctggacaccccacacctccagccacgctcccctcggagcctgtagagggtgtccaggctagtccctggcggccacgtccagtcttgccaacgcacccggctctgaccctgcccgtgtcctcagatgcctcctctccttcaccgccagccccgaggcctgaacgacctgaatcacttctggtctcaggaccatctgtcaccctgactgaaggtctaggaactgtgaggcctgaacaggaccccgccaagtctccaggaagtcccctcctgctgagaggcttgtcaagcggggatgtggctgcacctgagcccatcatgggggagcccggccaagccagtgaggagttccagccattggcgaggccctggcgggccacactggctgcagaggagctggtttctcaccgttctcccggagagccccaggaaacgtgctctggaacggaggtggagaggccacgccagacagggcctggtctccccagggagggggccagggggcacatggacctttcatcctcagaaccaagccaggacatagaggggccgggactctccatcctgccagcgagggatgccacattctccaccccaagtgtgaggcagccagaccccagtgcctggctgagttcaggacctgaactcaccgggatgcccagggtgaggctggcagcgcccctggcagttcttcctatggaacctctgccaccagaacctgttcgcccagcagctcttctgacacccgaagcctcatctgtgggagggccagaccaggcccgatacctggagtcagcccctggctggcctgtgggccaggaggagtggggggttgcacacacgtccagccctccatccacgcaaaccctgagcctgtgggctcccacaggagtgttgctacccagcctggtggagcttgaataccccttccaggctggccggggggcctcactccagcaggagctgacagagcccaccttggccctcagtgctgaaagccacaggcctcctgagcttcaagacagtgtggaggggctttctgagaggccctcacgctgagcctccatggagactccaggcagccggtaccccgctggcttggacagccccagtgaccctcagtgacccagctgtccccaggctccctggcttagatgcccagctgtggctgggtacagtgttctgggccggaagagcactcactcagtgcttccctggaaaggtggacccccagacgcccacctccaggcagacccatcactggaagtgggatttgaaatgcagccaagaagaggagaccgtcggcaacgcccgcccggaacaagaaataaataaataaataatcagg

SEQ ID NO: 117821 - DNA, 2265 bp, Homo sapiens
  Payload ID: 3026
  Gene Symbol: C1orf127
  Gene Name: chromosome 1 open reading frame 127
  ENST ID: ENST00000418570
  CDS Start-End: 1-1976
acataatgaagtgtccgatgctaaggtcaaggctgggccaggaaagcgtccactgtgggcccatgttcatccaggtctcccggcccctgcccctgtggagggacaatagacagactccatggctgctgtcccttcgaggggagctggtggcttctcttgaagacgccagcctgatgggactgtatgtggacatgaatgccaccactgtcaccgtccaaagcccgagacaaggccttcttcagaggtgggaggtcagtggtgggcagcaggctctgccaggagtgtcattccagccagagtcggaggtcttagttcacatccccaagcagagactgggtctagtcaaaagaggttcctacattgaggaaaccctgagcctcagattcctccgagtccaccagtccaacatctttatggtgactgagaacaaggactttgtggtggtcagcattccggcggccggggtgctccaggtccagcgatgccaagaagtcggaggaaccccgggaacacaagctttctatagggtagacctgagcctggaatttgccgagatggctgccccggtcctctggacagtggagagcttcttccagtgtgtgggttcaggaacagagtcgcctgcctcaactgctgcactgaggaccactccctccccaccatccccaggaccagagacccctccagcgggagtgccacctgctgcttcctcccaggtgtgggctgcaggaccagctgcccaggaatggctttctcgggacctcctgcaccggccttccgacgcactggccaaaaaggggcttggaccattcctgcaaacagccaaaccggcgagaagaggccagacatctgcctccattctccccagagtggtgcaagctcagcgaggtccccagcctcccccaggggaagcagggatccctggacaccccacacctccagccacgctcccctcggagcctgtagagggtgtccaggctagtccctggcggccacgtccagtcttgccaacgcacccggctctgaccctgcccgtgtcctcagatgcctcctctccttcaccgccagccccgaggcctgaacgacctgaatcacttctggtctcaggaccatctgtcaccctgactgaaggtctaggaactgtgaggcctgaacaggaccccgccaagtctccaggaagtcccctcctgctgagaggcttgtcaagcggggatgtggctgcacctgagcccatcatgggggagcccggccaagccagtgaggagttccagccattggcgaggccctggcgggccacactggctgcagaggagctggtttctcaccgttctcccggagagccccaggaaacgtgctctggaacggaggtggagaggccacgccagacagggcctggtctccccagggagggggccagggggcacatggacctttcatcctcagaaccaagccaggacatagaggggccgggactctccatcctgccagcgagggatgccacattctccaccccaagtgtgaggcagccagaccccagtgcctggctgagttcaggacctgaactcaccgggatgcccagggtgaggctggcagcgcccctggcagttcttcctatggaacctctgccaccagaacctgttcgcccagcagctcttctgacacccgaagcctcatctgtgggagggccagaccaggcccgatacctggagtcagcccctggctggcctgtgggccaggaggagtggggggttgcacacacgtccagccctccatccacgcaaaccctgagcctgtgggctcccacaggagtgttgctacccagcctggtggagcttgaataccccttccaggctggccggggggcctcactccagcaggagctgacagagcccaccttggccctcagtgctgaaagccacaggcctcctgagcttcaagacagtgtggaggggctttctgagaggccctcacgctgagcctccatggagactccaggcagccggtaccccgctggcttggacagccccagtgaccctcagtgacccagctgtccccaggctccctggcttagatgcccagctgtggctgggtacagtgttctgggccggaagagcactcactcagtgcttccctggaaaggtggacccccagacgcccacctccaggcagacccatcactggaagtgggatttgaaatgcagccaagaagaggagaccgtcggcaacgcccgcccggaacaagaaataaataaataaataatcagg

SEQ ID NO: 117822 - DNA, 2359 bp, Homo sapiens
  Payload ID: 3026
  Gene Symbol: C1orf127
  Gene Name: chromosome 1 open reading frame 127
  ENST ID: ENST00000520253
  CDS Start-End: 1-2327
ggagcctctccttcaggtcagacacggacaagccaagctctgcagcagaagttttaacagaagcatcttcttgttggacagacacagttgagtgcttctcagactacatgaccctgtggatcccaaggagccacgtggaggggctgaggcggtggctggccaggaccttgcacttgccaggcacctggaggtcccctgaccacctggattcttctcttgctaaatgtggctacttcctgcatctggcttcagacggtgacttcctttttcgagttcaatactcggcctgctttgtgcagaaagagaaagcaaattacaggctggaaatcagaatatttcagaaaggggtgatggggttggagcggagtgatcgctacataatgaagtgtccgatgctaaggtcaaggctgggccaggaaagcgtccactgtgggcccatgttcatccaggtctcccggcccctgcccctgtggagggacaatagacagactccatggctgctgtcccttcgaggggagctggtggcttctcttgaagacgccagcctgatgggactgtatgtggacatgaatgccaccactgtcaccgtccaaagcccgagacaaggccttcttcagaggtgggaggtgctgaacacctctgctgagctcctgccactatggctggtgagcggtcaccatgcctattctttagaagctgcttgcccaccggtgtcattccagccagagtcggaggtcttagttcacatccccaagcagagactgggtctagtcaaaagaggttcctacattgaggaaaccctgagcctcagattcctccgagtccaccagtccaacatctttatggtgactgagaacaaggactttgtggtggtcagcattccggcggccggggtgctccaggtccagcgatgccaagaagtcggaggaaccccgggaacacaagctttctatagggtagacctgagcctggaatttgccgagatggctgccccggtcctctggacagtggagagcttcttccagtgtgtgggttcaggaacagagtcgcctgcctcaactgctgcactgaggaccactccctccccaccatccccaggaccagagacccctccagcgggagtgccacctgctgcttcctcccagaaggggcttggaccattcctgcaaacagccaaaccggcgagaagaggccagacatctgcctccattctccccagagtggtgcaagctcagcgaggtccccagcctcccccaggggaagcagggatccctggacaccccacacctccagccacgctcccctcggagcctgtagagggtgtccaggctagtccctggcggccacgtccagtcttgccaacgcacccggctctgaccctgcccgtgtcctcagatgcctcctctccttcaccgccagccccgaggcctgaacgacctgaatcacttctggtctcaggaccatctgtcaccctgactgaaggtctaggaactgtgaggcctgaacaggaccccgccaagtctccaggaagtcccctcctgctgagaggcttgtcaagcggggatgtggctgcacctgagcccatcatgggggagcccggccaagccagtgaggagttccagccattggcgaggccctggcgggccacactggctgcagaggagctggtttctcaccgttctcccggagagccccaggaaacgtgctctggaacggaggtggagaggccacgccagacagggcctggtctccccagggagggggccagggggcacatggacctttcatcctcagaaccaagccaggacatagaggggccgggactctccatcctgccagcgagggatgccacattctccaccccaagtgtgaggcagccagaccccagtgcctggctgagttcaggacctgaactcaccgggatgcccagggtgaggctggcagcgcccctggcagttcttcctatggaacctctgccaccagaacctgttcgcccagcagctcttctgacacccgaagcctcatctgtgggagggccagaccaggcccgatacctggagtcagcccctggctggcctgtgggccaggaggagtggggggttgcacacacgtccagccctccatccacgcaaaccctgagcctgtgggctcccacaggagtgttgctacccagcctggtggagcttgaataccccttccaggctggccggggggcctcactccagcaggagctgacagagcccaccttggccctcagtgctgaaagccacaggcctcctgagcttcaagacagtgtggaggggctttctgagaggccctcacgctgagcctccatggagactccaggcagccggtaccc

SEQ ID NO: 117823 - DNA, 340 bp, Homo sapiens
  Payload ID: 3026
  Gene Symbol: C1orf127
  Gene Name: chromosome 1 open reading frame 127
  ENST ID: ENST00000468348
  CDS Start-End: 1-208
tccatccacgcaaaccctgagcctgtgggctcccacaggagtgttgctacccagcctggtggagcttgaataccccttccaggctggccggggggcctcactccagcaggagctgacagagcccaccttggccctcagtgctgaaagccacaggcctcctgagcttcaagacagtgtggaggggctttctgagaggccctcacgctgagcctccatggagactccaggacgcccacctccaggcagacccatcactggaagtgggatttgaaatgcagccaagaagaggagaccgtcggcaacgcccgcccggaacaagaaataaataaataaataatca

SEQ ID NO: 117824 - DNA, 2483 bp, Homo sapiens
  Payload ID: 3027
  Gene Symbol: C1orf131
  Gene Name: chromosome 1 open reading frame 131
  ENST ID: ENST00000318906
  CDS Start-End: 30-779
acccggaagcgggggtgcagcgcggcagaatgagggttgattcctcggctgaccccacaatgtcgcaggagcaagggccggggtcctccacgcctcccagttctccgacacttcttgacgctctgctccagaacctttacgactttggaggtacagaaggtgaaacagaacagaagaagatcataaagaaaagggaaaacaagaagagagatgtgatggcttcagcggccttggcagcagagccatctcccctacctggttctctcataagaggccagaggaagagcgcttcgagcttcttcaaggaacttagagaagagcggcattgtgctccttctgggacccccacaggaccagagatccttgctgctgcagttcctccctcttccctaaagaacaatagggaacaagtagaagtggtagaatttcacagcaataaaaaaagaaaattgacgccagatcataacaagaacacaaagcaggctaatcctagtgttttggagagagatgtggatacacaagaatttaacctagaaaaagctcgtttagaagtgcaccggtttggtatcacgggttatggaaaaggaaaggagagaatcctggaacaggaacgtgccattatgctgggcgctaagcctcctaaaaagagttatgtgaattacaaggttttacaggagcaaattaaagaaaaaaaggcagcaaaggaagaagaaaagagactggcccaagaaacagatattttcaagaaaaagaagaggaaaggacaggaggacaggtgagtgattttatcaggtcctggggttgaacaatctggatgaacctactgatgagttctgacaaggacgccttgaatgtatgtggtgttgctagcccattagagcgcttcactgtctctcatttatccttgtcaaagtaggatttagtaaactgcccaagatcaaacaactgcctgagaactgaattaggaagtttctccaatcttccacttttcaccgacactctaagtgactagtggaaaagctgcagtttacatttccaagaaaagacttctaagagtgctgctacagcagcgtagtctgggtctgtatagcctgctctttgacataccacgtaagatagagcaccgtaattatgaataagggatgttgactttgttgctttatacttgtttgttagcttttgttcaaatgcctttttctctgtctttgagttactgtttcagaatggactctttttgtcttagcctgttttcttgggctcctagtgcacttgtacatgctgtaaaatggtcatttgttctggccaccgatctgtatctgttgaatgcctctttgtgccaggcatgtgggtgtcttaggtattggtgtacagctgtaatcacactaaagatatccctgcccttgaggagcttcattgtagggagagaaacaccccaaaacatacaaatggataagtaagatgatatcaggtactggcaagtattgtagagaggctgaaagagagcattgtgaaggaaaaccacagggagaaggtgagctgggaaattagtctgaggaggtgacatcggagctgagaactgaacaaagaagaggggcagcctggaaagagctggtagcagaacattccttgcagaagaaaccagtgcaagggccctgaggcaggaaggcagtagcatgtttcagggaccacaggaaggcgtatggggtggggggtgtgcatggcaggcgaccaggagtttgcaggccagactgcagtggcctggttggtggtactgtgatgcttgttggtaagcttgactatttatagtacctttctcttactttaaatgtaggaaatccaaaaagaagtccgctcccagtattttgtcaaatggacggattggacaggttggaaaattcaaaaatggaacactgattctgagcccagttgatatcaagaaaataaattcttccagagtggccaaatgaagtactttgtcaaataaaacgaggatgggaacaactgagtcaactgcagcggccctggaccctgtgcgactctagatagatcgttcttaacacgcatttcacagactgctttttcattttagaaaaaaagtcaaacagaagtaacatttctagttgccgaagtgtctgcttcatggtgctgaacgtgtcaggcccagtgcagcatgaatgtgaagtgaacccactgaaaagtgatttttaatgttctccagcaaacttcactcctgtttcatgttcactggtatttggtgcatttgcttgtaatacagttttttataactttactgttttgtaaatgctagtagtttacattaaattgccttatatttttaatgatttaatgttatgatatcatgaaagaaccaagaatctagtaatttatcagttttgtggaaaagcagttttaatttttagcctaccatgtgtacaaaatctacttcataagaagttatataaataaaataggtttgtagtata

SEQ ID NO: 117825 - DNA, 1424 bp, Homo sapiens
  Payload ID: 3027
  Gene Symbol: C1orf131
  Gene Name: chromosome 1 open reading frame 131
  Uniprot ID: Q8NDD1
  ENST ID: ENST00000366649
  CDS Start-End: 27-908
cggaagcgggggtgcagcgcggcagaatgagggttgattcctcggctgaccccacaatgtcgcaggagcaagggccggggtcctccacgcctcccagttctccgacacttcttgacgctctgctccagaacctttacgactttggaggtacagaaggtgaaacagaacagaagaagatcataaagaaaagggaaaacaagaagagagatgtgatggcttcagcggccttggcagcagagccatctcccctacctggttctctcataagaggccagaggaagagcgcttcgagcttcttcaaggaacttagagaagagcggcattgtgctccttctgggacccccacaggaccagagatccttgctgctgcagttcctccctcttccctaaagaacaatagggaacaagtagaagtggtagaatttcacagcaataaaaaaagaaaattgacgccagatcataacaagaacacaaagcaggctaatcctagtgttttggagagagatgtggatacacaagaatttaacctagaaaaagctcgtttagaagtgcaccggtttggtatcacgggttatggaaaaggaaaggagagaatcctggaacaggaacgtgccattatgctgggcgctaagcctcctaaaaagagttatgtgaattacaaggttttacaggagcaaattaaagaaaaaaaggcagcaaaggaagaagaaaagagactggcccaagaaacagatattttcaagaaaaagaagaggaaaggacaggaggacaggaaatccaaaaagaagtccgctcccagtattttgtcaaatggacggattggacaggttggaaaattcaaaaatggaacactgattctgagcccagttgatatcaagaaaataaattcttccagagtggccaaatgaagtactttgtcaaataaaacgaggatgggaacaactgagtcaactgcagcggccctggaccctgtgcgactctagatagatcgttcttaacacgcatttcacagactgctttttcattttagaaaaaaagtcaaacagaagtaacatttctagttgccgaagtgtctgcttcatggtgctgaacgtgtcaggcccagtgcagcatgaatgtgaagtgaacccactgaaaagtgatttttaatgttctccagcaaacttcactcctgtttcatgttcactggtatttggtgcatttgcttgtaatacagttttttataactttactgttttgtaaatgctagtagtttacattaaattgccttatatttttaatgatttaatgttatgatatcatgaaagaaccaagaatctagtaatttatcagttttgtggaaaagcagttttaatttttagcctaccatgtgtacaaaatctacttcataagaagttatataaataaaataggtttgtagtata

SEQ ID NO: 117826 - DNA, 1432 bp, Homo sapiens
  Payload ID: 3027
  Gene Symbol: C1orf131
  Gene Name: chromosome 1 open reading frame 131
  Uniprot ID: Q8NDD1
  ENST ID: ENST00000366651
  CDS Start-End: 38-916
gtcgcggaacccggaagcgggggtgcagcgcggcagaatgagggttgattcctcggctgaccccacaatgtcgcaggagcaagggccggggtcctccacgcctcccagttctccgacacttcttgacgctctgctccagaacctttacgactttggaggtacagaaggtgaaacagaacagaagaagatcataaagaaaagggaaaacaagaagagagatgtgatggcttcagcggccttggcagcagagccatctcccctacctggttctctcataagaggccagaggaagagcgcttcgagcttcttcaaggaacttagagaagagcggcattgtgctccttctgggacccccacaggaccagagatccttgctgctgcagttcctccctcttccctaaagaacaatagggaacaagtagaagtggtagaatttcacagcaataaaaaaagaaaattgacgccagatcataacaagaacacaaaggctaatcctagtgttttggagagagatgtggatacacaagaatttaacctagaaaaagctcgtttagaagtgcaccggtttggtatcacgggttatggaaaaggaaaggagagaatcctggaacaggaacgtgccattatgctgggcgctaagcctcctaaaaagagttatgtgaattacaaggttttacaggagcaaattaaagaaaaaaaggcagcaaaggaagaagaaaagagactggcccaagaaacagatattttcaagaaaaagaagaggaaaggacaggaggacaggaaatccaaaaagaagtccgctcccagtattttgtcaaatggacggattggacaggttggaaaattcaaaaatggaacactgattctgagcccagttgatatcaagaaaataaattcttccagagtggccaaatgaagtactttgtcaaataaaacgaggatgggaacaactgagtcaactgcagcggccctggaccctgtgcgactctagatagatcgttcttaacacgcatttcacagactgctttttcattttagaaaaaaagtcaaacagaagtaacatttctagttgccgaagtgtctgcttcatggtgctgaacgtgtcaggcccagtgcagcatgaatgtgaagtgaacccactgaaaagtgatttttaatgttctccagcaaacttcactcctgtttcatgttcactggtatttggtgcatttgcttgtaatacagttttttataactttactgttttgtaaatgctagtagtttacattaaattgccttatatttttaatgatttaatgttatgatatcatgaaagaaccaagaatctagtaatttatcagttttgtggaaaagcagttttaatttttagcctaccatgtgtacaaaatctacttcataagaagttatataaataaaataggtttgtagtata

SEQ ID NO: 117827 - DNA, 795 bp, Homo sapiens
  Payload ID: 3027
  Gene Symbol: C1orf131
  Gene Name: chromosome 1 open reading frame 131
  ENST ID: ENST00000451322
  CDS Start-End: 1-771
gggtcctccacgcctcccagttctccgacacttcttgacgctctgctccagaacctttacgactttggaggtacagaaggtgaaacagaacagaagaagatcataaagaaaagggaaaacaagaagagagatgtgatggcttcagcggccttggcagcagagccatctcccctacctggttctctcataagaggccagaggaagagcgcttcgagcttcttcaaggaacttagagaagagcggcattgtgctccttctgggacccccacaggaccagagatccttgctgctgcagttcctccctcttccctaaagaacaatagggaacaagtagaagtggtagaatttcacagcaataaaaaaagaaaattgacgccagatcataacaagaacacaaaggctcgtttagaagtgcaccggtttggtatcacgggttatggaaaaggaaaggagagaatcctggaacaggaacgtgccattatgctgggcgctaagcctcctaaaaagagttatgtgaattacaaggttttacaggagcaaattaaagaaaaaaaggcagcaaaggaagaagaaaagagactggcccaagaaacagatattttcaagaaaaagaagaggaaaggacaggaggacaggaaatccaaaaagaagtccgctcccagtattttgtcaaatggacggattggacaggttggaaaattcaaaaatggaacactgattctgagcccagttgatatcaagaaaataaattcttccagagtggccaaatgaagtactttgtcaaataaaacgagg

SEQ ID NO: 117828 - DNA, 2053 bp, Homo sapiens
  Payload ID: 3028
  Gene Symbol: C1orf141
  Gene Name: chromosome 1 open reading frame 141
  Uniprot ID: Q5JVX7
  ENST ID: ENST00000371006
  CDS Start-End: 22-1224
ataggaatttagtgattgacaatggcagaaaaaatcctagagaagttggatgtccttgataagcaagcagagataatcttggccagaagaacaaagataaacaggcttcagagtgaaggaagaaaaacaactatggctatacccctgacatttgattttcagttggaatttgaagaagctcttgctacatccgcgtctaaggcaatatcaaagatcaaagaagacaagtcatgcagcattacaaaatcaaaaatgcatgtctctttcaaatgtgagcctgaacctagaaagagtaattttgaaaagtcaaatttaagaccattctttattcaaacaaatgtaaaaaataaagaaagtgagtcaacagctcaaattgaaaaaaaacctaggaaaccattggattctgttggtctcttagaaggtgatagaaataaaagaaaaaaatctccacagatgaacgattttaatataaaagaaaacaaatcggtcagaaattatcaattaagtaagtataggtcagtaagaaagaaaagcttgctcccgttgtgctttgaggatgaattgaaaaatccacatgccaagatagtcaacgttagtccaacaaagacagtaacttctcacatggaacaaaaggacacaaatcccataattttccatgacacagaatatgtacgaatgttacttttgacaaaaaatagattttcttctcatcctttggaaaatgaaaacatttacccacataaaagaacaaatttcattttagaaagaaattgtgaaatcctcaaatctataattggcaatcaatctatttctcttttcaaaccccaaaaaactatgcctacagtacagagaaaagatatacagatccctatgtcttttaaagcgggccacacaactgtagatgataaactaaagaagaaaactaataagcagacactagaaaacagatcttggaatacactctataatttctcacagaatttttctagcctaacaaaacaatttgtgggttaccttgataaagctgttattcatgaaatgagtgcccaaactggaaaatttgaaagaatgttttctgcaggaaaaccaacgagcatacccacatccagtgccttacctgtcaaatgttactcaaagccttttaaatatatatatgaactaaataatgtaacgccactggataatttgttaaacttatcaaatgaaattttaaatgcctcataaaatattatgtatgcagcaatatttgagtaacaagaagcaaatatccaagttccaaaattataaaagaaattcttatccaaatagtaatgttctaattgatcatataagaaagcaaagcatagacattagaattataagtcagcagtggtctgttcaagaacaatcaacatttttagaaaatagtaggacaaaattaggaaataattatcaccaagaggatctagttcatgactttctattatctcaattagattgctcaatcatcagccttcctatactaaactctgattcaggaccaagaaaggcatagtctgactctggaaatgcgctgttggaagccaaataacatcaatactcttgttctataattgaatatcaaataagacaaattaccattaatttaatgactgtggagttaattgtataccagcatttcagcaaatcatcatcaatagtattacattagcaatttatgcaattaaaagggctttgtaaaactttgaatagattttattgtcattagtagctgttggaacttcattattatataatgtttttgcaaactttaacttttttctaaattgttaaataaaagaataactatccttaatctaaataattttggtagcaaatcctataaggtattaaacattttaaggtatattattacattgctattttactgtttctcattaacccaaacagtttaaaggcagaattccacttagaaacaagttgcattttgaaagtttatttgtaatccatttgtttggaattcagaaatgtatttcacataaaaataatcttggaagtaataaattccaaaatt

SEQ ID NO: 117829 - DNA, 2153 bp, Homo sapiens
  Payload ID: 3028
  Gene Symbol: C1orf141
  Gene Name: chromosome 1 open reading frame 141
  Uniprot ID: Q5JVX7
  ENST ID: ENST00000371007
  CDS Start-End: 111-1313
agatgagatttcatcatgttggccagcctggtctcaaactcctgacctcaagtgacccgcctgcctcagcctcccaaagtgctgggattacaggaatttagtgattgacaatggcagaaaaaatcctagagaagttggatgtccttgataagcaagcagagataatcttggccagaagaacaaagataaacaggcttcagagtgaaggaagaaaaacaactatggctatacccctgacatttgattttcagttggaatttgaagaagctcttgctacatccgcgtctaaggcaatatcaaagatcaaagaagacaagtcatgcagcattacaaaatcaaaaatgcatgtctctttcaaatgtgagcctgaacctagaaagagtaattttgaaaagtcaaatttaagaccattctttattcaaacaaatgtaaaaaataaagaaagtgagtcaacagctcaaattgaaaaaaaacctaggaaaccattggattctgttggtctcttagaaggtgatagaaataaaagaaaaaaatctccacagatgaacgattttaatataaaagaaaacaaatcggtcagaaattatcaattaagtaagtataggtcagtaagaaagaaaagcttgctcccgttgtgctttgaggatgaattgaaaaatccacatgccaagatagtcaacgttagtccaacaaagacagtaacttctcacatggaacaaaaggacacaaatcccataattttccatgacacagaatatgtacgaatgttacttttgacaaaaaatagattttcttctcatcctttggaaaatgaaaacatttacccacataaaagaacaaatttcattttagaaagaaattgtgaaatcctcaaatctataattggcaatcaatctatttctcttttcaaaccccaaaaaactatgcctacagtacagagaaaagatatacagatccctatgtcttttaaagcgggccacacaactgtagatgataaactaaagaagaaaactaataagcagacactagaaaacagatcttggaatacactctataatttctcacagaatttttctagcctaacaaaacaatttgtgggttaccttgataaagctgttattcatgaaatgagtgcccaaactggaaaatttgaaagaatgttttctgcaggaaaaccaacgagcatacccacatccagtgccttacctgtcaaatgttactcaaagccttttaaatatatatatgaactaaataatgtaacgccactggataatttgttaaacttatcaaatgaaattttaaatgcctcataaaatattatgtatgcagcaatatttgagtaacaagaagcaaatatccaagttccaaaattataaaagaaattcttatccaaatagtaatgttctaattgatcatataagaaagcaaagcatagacattagaattataagtcagcagtggtctgttcaagaacaatcaacatttttagaaaatagtaggacaaaattaggaaataattatcaccaagaggatctagttcatgactttctattatctcaattagattgctcaatcatcagccttcctatactaaactctgattcaggaccaagaaaggcatagtctgactctggaaatgcgctgttggaagccaaataacatcaatactcttgttctataattgaatatcaaataagacaaattaccattaatttaatgactgtggagttaattgtataccagcatttcagcaaatcatcatcaatagtattacattagcaatttatgcaattaaaagggctttgtaaaactttgaatagattttattgtcattagtagctgttggaacttcattattatataatgtttttgcaaactttaacttttttctaaattgttaaataaaagaataactatccttaatctaaataattttggtagcaaatcctataaggtattaaacattttaaggtatattattacattgctattttactgtttctcattaacccaaacagtttaaaggcagaattccacttagaaacaagttgcattttgaaagtttatttgtaatccatttgtttggaattcagaaatgtatttcacataaaaataatcttggaagtaataaattccaaaattaactaacaaaa

SEQ ID NO: 117830 - DNA, 973 bp, Homo sapiens
  Payload ID: 3028
  Gene Symbol: C1orf141
  Gene Name: chromosome 1 open reading frame 141
  ENST ID: ENST00000448166
  CDS Start-End: 112-973
gagatgagatttcatcatgttggccagcctggtctcaaactcctgacctcaagtgacccgcctgcctcagcctcccaaagtgctgggattacaggaatttagtgattgacaatggcagaaaaaatcctagagaagttggatgtccttgataagcaagcagagataatcttggccagaagaacaaagataaacaggcttcagagtgaaggaagaaaaacaactatggctatacccctgacatttgattttcagttggaatttgaagaagctcttgctacatccgcgtctaaggcaatatcaaagatcaaagaagacaagtcatgcagcattacaaaatcaaaaatgcatgtctctttcaaatgtgagcctgaacctagaaagagtaattttgaaaagtcaaatttaagaccattctttattcaaacaaatgtaaaaaataaagaaagtgagtcaacagagccagtagaagaacatctaaaatcaagatctattagaccctatctttatcttaaggatacaactgagatggaaaatgcagggcctttgaatgttctatattcacagcatagacaagcatgtagaagatcactgggttctacagacttttctcctatgttcaacattcagtctaatgctcataaaaaggaaaaagactctactttatttacagctcaaattgaaaaaaaacctaggaaaccattggattctgttggtctcttagaaggtgatagaaataaaagaaaaaaatctccacagatgaacgattttaatataaaagaaaacaaatcggtcagaaattatcaattaagtaagtataggtcagtaagaaagaaaagcttgctcccgttgtgctttgaggatgaattgaaaaatccacatgccaagatagtcaacgttagtccaacaaagacagtaacttctcacatggaacaaaaggacacaaatcccataattttccatgacacagaatatg

SEQ ID NO: 117831 - DNA, 2079 bp, Homo sapiens
  Payload ID: 3028
  Gene Symbol: C1orf141
  Gene Name: chromosome 1 open reading frame 141
  ENST ID: ENST00000475209
  CDS Start-End: 22-675
ataggaatttagtgattgacaatggcagaaaaaatcctagagaagttggatgtccttgataagcaagcagagataatcttggccagaagaacaaagataaacaggcttcagagtgaaggaagaaaaacaactatggctatacccctgacatttgattttcagttggaatttgaagaagctcttgctacatccgcgtctaaggcaatatcaaagatcaaagaagacaagtcatgcagcattacaaaatcaaaaatgcatgtctctttcaaatgtgagcctgaacctagaaagagtaattttgaaaagtcaaatttaagaccattctttattcaaacaaatgtaaaaaataaagaaagtgagtcaacagagccagtagaagaacatctaaaatcaagatctattagaccctatctttatcttaaggatacaactgagatggaaaatgcagggcctttgaatgttctatattcacagcatagacaagcatgtagaagatcactgggttctacagacttttctcctatgttcaacattcagtctaatgctcataaaaaggaaaaagactctactttatttacagctcaaattgaaaaaaaacctaggaaaccattggattctgttggtctcttagaaggtgatagaaataaaaggaacaaaaggacacaaatcccataattttccatgacacagaatatgtacgaatgttacttttgacaaaaaatagattttcttctcatcctttggaaaatgaaaacatttacccacataaaagaacaaatttcattttagaaagaaattgtgaaatcctcaaatctataattggcaatcaatctatttctcttttcaaaccccaaaaaactatgcctacagtacagagaaaagatatacagatccctatgtcttttaaagcgggccacacaactgtagatgataaactaaagaagaaaactaataagcagacactagaaaacagatcttggaatacactctataatttctcacagaatttttctagcctaacaaaacaatttgtgggttaccttgataaagctgttattcatgaaatgagtgcccaaactggaaaatttgaaagaatgttttctgcaggaaaaccaacgagcatacccacatccagtgccttacctgtcaaatgttactcaaagccttttaaatatatatatgaactaaataatgtaacgccactggataatttgttaaacttatcaaatgaaattttaaatgcctcataaaatattatgtatgcagcaatatttgagtaacaagaagcaaatatccaagttccaaaattataaaagaaattcttatccaaatagtaatgttctaattgatcatataagaaagcaaagcatagacattagaattataagtcagcagtggtctgttcaagaacaatcaacatttttagaaaatagtaggacaaaattaggaaataattatcaccaagaggatctagttcatgactttctattatctcaattagattgctcaatcatcagccttcctatactaaactctgattcaggaccaagaaaggcatagtctgactctggaaatgcgctgttggaagccaaataacatcaatactcttgttctataattgaatatcaaataagacaaattaccattaatttaatgactgtggagttaattgtataccagcatttcagcaaatcatcatcaatagtattacattagcaatttatgcaattaaaagggctttgtaaaactttgaatagattttattgtcattagtagctgttggaacttcattattatataatgtttttgcaaactttaacttttttctaaattgttaaataaaagaataactatccttaatctaaataattttggtagcaaatcctataaggtattaaacattttaaggtatattattacattgctattttactgtttctcattaacccaaacagtttaaaggcagaattccacttagaaacaagttgcattttgaaagtttatttgtaatccatttgtttggaattcagaaatgtatttcacataaaaataatcttggaagtaataaattccaaaatt

SEQ ID NO: 117832 - DNA, 1580 bp, Homo sapiens
  Payload ID: 3028
  Gene Symbol: C1orf141
  Gene Name: chromosome 1 open reading frame 141
  ENST ID: ENST00000544837
  CDS Start-End: 152-508
gcggggcgagtaacccgcggagccagaagagggaggaaaggagatgagatttcatcatgttggccagcctggtctcaaactcctgacctcaagtgacccgcctgcctcagcctcccaaagtgctgggattacaggaatttagtgattgacaatggcagaaaaaatcctagagaagttggatgtccttgataagcaagcagagataatcttggccagaagaacaaagataaacaggcttcagagtgaaggaagaaaaacaactatggctatacccctgacatttgattttcagttggaatttgaagaagctcttgctacatccgcgtctaaggcaatatcaaagatcaaagaagacaagtcatgcagcattacaaaatcaaaaatgcatgtctctttcaaatgtgagcctgaacctagaaagagtaattttgaaaagtcaaatttaagaccattctttattcaaacaaatgtaaaaaataaagaaagtgagtcaacagtgatcttttaaaagtaggctgatcctgattaaagcctcttcagcggattctcattgtacttagtatgaaacttgtacttcttacaaagacctggccgggcacggtggctcatggctgtaatcccagcactttgagatgccaagagccagtagaagaacatctaaaatcaagatctattagaccctatctttatcttaaggatacaactgagatggaaaatgcagggcctttgaatgttctatattcacagcatagacaagcatgtagaagatcactgggttctacagacttttctcctatgttcaacattcagtctaatgctcataaaaaggaaaaagactctactttatttacagctcaaattgaaaaaaaacctaggaaaccattggattctgttggtctcttagaaggtgatagaaataaaaggaacaaaaggacacaaatcccataattttccatgacacagaatatgtacgaatgttacttttgacaaaaaatagattttcttctcatcctttggaaaatgaaaacatttacccacataaaagaacaaatttcattttagaaagaaattgtgaaatcctcaaatctataattggcaatcaatctatttctcttttcaaaccccaaaaaactatgcctacagtacagagaaaagatatacagatccctatgtcttttaaagcgggccacacaactgtagatgataaactaaagaagaaaactaataagcagacactagaaaacagatcttggaatacactctataatttctcacagaatttttctagcctaacaaaacaatttgtgggttaccttgataaagctgttattcatgaaatgagtgcccaaactggaaaatttgaaagaatgttttctgcaggaaaaccaacgagcatacccacatccagtgccttacctgtcaaatgttactcaaagccttttaaatatatatatgaactaaataatgtaacgccactggataatttgttaaacttatcaaatgaaattttaaatgcctcataaaatattatgtatgcagcaatatttgagtaacaagaagcaaatatccaagttccaaaa

SEQ ID NO: 117833 - DNA, 736 bp, Homo sapiens
  Payload ID: 3028
  Gene Symbol: C1orf141
  Gene Name: chromosome 1 open reading frame 141
  ENST ID: ENST00000603691
  CDS Start-End: 152-736
gcggggcgagtaacccgcggagccagaagagggaggaaaggagatgagatttcatcatgttggccagcctggtctcaaactcctgacctcaagtgacccgcctgcctcagcctcccaaagtgctgggattacaggaatttagtgattgacaatggcagaaaaaatcctagagaagttggatgtccttgataagcaagcagagataatcttggccagaagaacaaagataaacaggcttcagagtgaaggaagaaaaacaactatggctatacccctgacatttgattttcagttggaatttgaagaagctcttgctacatccgcgtctaaggcaatatcaaagatcaaagaagacaagtcatgcagcattacaaaatcaaaaatgcatgtctctttcaaatgtgagcctgaacctagaaagagtaattttgaaaagtcaaatttaagaccattctttattcaaacaaatgtaaaaaataaagaaagtgagtcaacagagccagtagaagaacatctaaaatcaagatctattagaccctatctttatcttaaggatacaactgagatggaaaatgcagggcctttgaatgttctatattcacagcatagacaagcatgtagaagatcactgggttctacagacttttctcctatgttcaacattcagtctaatgctcataaaaaggaaaaagactctactttatttacagctcaaattgaaaaaaaacctaggaaa

SEQ ID NO: 117834 - DNA, 4179 bp, Homo sapiens
  Payload ID: 3028
  Gene Symbol: C1orf141
  Gene Name: chromosome 1 open reading frame 141
  Uniprot ID: Q5JVX7
  ENST ID: ENST00000621590
  CDS Start-End: 22-264
ataggaatttagtgattgacaatggcagaaaaaatcctagagaagttggatgtccttgataagcaagcagagataatcttggccagaagaacaaagataaacaggcttcagagtgaaggaagaaaaacaactatggctatacccctgacatttgattttcagttggaatttgaagaagctcttgctacatccgcgtctaaggcaatatcaaagatcaaagaagacaagtcatgcagcattacaaaatcaaaaatctcaaattgaaaaaaaacctaggaaaccattggattctgttggtctcttagaaggtgatagaaataaaaggtaatttattttaaaatgcttaatactttgttctgtttaatgatgtttctagtaggacacattttataattgacaggaataaatttattctgccttattatttagttccacagcacaatccaatgaatggtccaagactgcttagccactagatatcacatccagaccttgagtattgttaaatggagagaaaggcatggaaaaatgaatagagggaatacaatttttttttttagtaaatacacacatttacttacatgacaacatggacatgaaaaagtagcttttctttggataaagttctcatttttctcatgaacccttccatctctgtataatgaaaaaaatcattaatccagtgtgtttcaaactttgtttgaatcaataatgaacaagcactttaggtttaactcagtttaaaaattatatcctgtctctgcctgaccacactattctatcctcttaacaaagctggggccaccctatgttggcatgaagctgccctgtggagcttcttccagaatttcaacataggacgttgcaaatacctctctacctttggtgttctcctcaacctacgtaataatacaactcgtccccactcaaaatccaaagaggcatatatatgactctcttgcttccactcctactcttgctgttttctcccacaaaccaggcaggacgggatgatcttgtcggtttgaaaagtctgtgggagagaggttggtgcagaagttggcagtgacttccagggataaaaggaggcagacaagaactgacaagctgtaatcagccccatgaacactaccctgaactgtgtttattttcagaaaaaaatctccacagatgaacgattttaatataaaagaaaacaaatcggtcagaaattatcaattaagtaagtataggtcagtaagaaagaaaagcttgctcccgttgtgctttgaggatgaattgaaaaatccacatgccaagatagtcaacgttagtccaacaaagacagtaacttctcacatggtaataagcatatcatctattgttaagtaaatatgtgtagtcataagacttatgggaatcacccatatattttagtgaccagaatctttgataaatcctttttacctcttggtttcatattccaaagtgataacagcacttaagttcttaatgcactttgcacaactcccaaaccagggattcctttataccagctgaaaattcagtgtttttctttatgaagaagcctttatcaaatttgcttgattataatagaactgtagaataaaaagaattttttaaaaatggctgtaccaatctagcagaatgcagtggtgtgcacctgtaatccccgctactctggagtctgaggcaggggaactgcttgagcccaggcatttgaatccagcctgagcaatataacaagaccccagttctaaaatgatgggaccatgaccatgtgtcaatttttctaacaatctgttttggctttttcaaccagaaagtgcatttattaaaggctatttagtaactcatgctctctagagaggcaatatggctcgaaagctgtctagtcaggaatcacctaattatatagccccagactgctccactgaggcccatgctattgtcacagataaaagtttacaactctgatgctgagcagggaatactctaagacatttgctactgctgtcattcaaagctagatgtaactcctaccaccctcactagaatagttttcccaatactttttcacagtgcttgctttctctgaactgaagacttcataggtgtatctgaatggcagagcctagggcaaatgcctatgtcctaaccgcaaagaagctgataaacatggttcttgcctctacctaagggtacatagacttgtcaagtggaaaattccctaaggtgttggacagaccaaaagcattacaaacatccattactatggctaaataggtaatattggcatcaccagtggattgcaaaactagatctttgtcatcttttcagtaatcatagcagacttggatattactgcgataaaaatgtctattcttaagtcaatctattactttggctattttattccacaaatatatattgagcactttttaggtgtcaggtattgtgctaagtattagggtacaataataacagttgtagagataatttttaattttttgaattacttactagaatatccagatttgtaattttggcttgtaatcagttatgtctcttctgaactttgactcaatccattttttggtatgctttttaatttctagaacatggaaacctaagaaatgccagaacaaccaccttatttctcaatgacagtaccccagatatttaacaaatatattaattttttcgtattccaatttatttcaaaaaacatttaaggccaaaagttcaagttttatcactaacatctctatagaatattaagataagaaggatgtatgttacatacaagtacagtattttcatgtatttgaataatgctactgttcatattaaatatttgtatgtagtcatttttagaatattttacaattttatttacatgttttaaaatatatggagctttcttgactcaatgaacttatgactaattattcttttctttaatctacaggaacaaaaggacacaaatcccataattttccatgacacagaatatgtacgaatgttacttttgacaaaaaatagattttcttctcatcctttggaaaatgaaaacatttacccacataaaagaacaaatttcattttagaaagaaattgtgaaatcctcaaatctataattggcaatcaatctatttctcttttcaaaccccaaaaaactatgcctacagtacagagaaaagatatacagatccctatgtcttttaaagcgggccacacaactgtagatgataaactaaagaagaaaactaataagcagacactagaaaacagatcttggaatacactctataatttctcacagaatttttctagcctaacaaaacaatttgtgggttaccttgataaagctgttattcatgaaatgagtgcccaaactggaaaatttgaaagaatgttttctgcaggaaaaccaacgagcatacccacatccagtgccttacctgtcaaatgttactcaaagccttttaaatatatatatgaactaaataatgtaacgccactggataatttgttaaacttatcaaatgaaattttaaatgcctcataaaatattatgtatgcagcaatatttgagtaacaagaagcaaatatccaagttccaaaattataaaagaaattcttatccaaatagtaatgttctaattgatcatataagaaagcaaagcatagacattagaattataagtcagcagtggtctgttcaagaacaatcaacatttttagaaaatagtaggacaaaattaggaaataattatcaccaagaggatctagttcatgactttctattatctcaattagattgctcaatcatcagccttcctatactaaactctgattcaggaccaagaaaggcatagtctgactctggaaatgcgctgttggaagccaaataacatcaatactcttgttctataattgaatatcaaataagacaaattaccattaatttaatgactgtggagttaattgtataccagcatttcagcaaatcatcatcaatagtattacattagcaatttatgcaattaaaagggctttgtaaaactttgaatagattttattgtcattagtagctgttggaacttcattattatataatgtttttgcaaactttaacttttttctaaattgttaaataaaagaataactatcctt

SEQ ID NO: 117835 - DNA, 889 bp, Homo sapiens
  Payload ID: 3029
  Gene Symbol: C1orf145
  Gene Name: chromosome 1 open reading frame 145
  Uniprot ID: Q96MR7
  ENST ID: ENST00000295012
  CDS Start-End: 1-342
atgtacaccgcgtcgtcgtcggccgagacattgcgcacggtcaggcggcgctcggtgccctcctcctcgatgccgtacttggcgctcgcccacaaccgcgtctcctccttgaaccacgcggcctcagtggacggctggggcacctcacataggaacgtggccgactccttctcccgcacctccagatcttgcagccgctttttgaagggaaccgcgggctctgccaggagagaagactgctattttgaagcatacatgggaagctggttcctggacccccgcatataccaaaatctgtgcatactcaagttctacggtcagccctgtggaacccaagcataggacaagccggccctccctatacacacaggtttgacatcctgagaacactgctggttcccttcccatttggttccagaaaatctgcgtataagtggactcagtggtgcaaacctatgttgttcaagggtcaactatatatgatgaattattgttacctacagtcactctaccatgctactaaacactagaactgattcattttctctgactgtgtgtctctacccattaaccagcccctcttcatctcccttcccgcttccctccccagcctctggtaaccatcattcagttctctacctccgtgaaatcaacatgagtaagaactggtgaaacccaaacatagtctcgaatttagctttttttttttttttaactgtaagaggctaaacattcttgaggaggacacaaaaaagtctgaagacaactgtccagatgagaatcttgcacttgcacaagtagagaggagagttagtttttataccatcgcatccccaatcccagctttattgatgcataacaaataaaaattgtacatatttaaagtgta

SEQ ID NO: 117836 - DNA, 2893 bp, Homo sapiens
  Payload ID: 3029
  Gene Symbol: C1orf145
  Gene Name: chromosome 1 open reading frame 145
  Uniprot ID: Q96MR7
  ENST ID: ENST00000337335
  CDS Start-End: 5-481
gcagatgtacaccgcgtcgtcgtcggccgagacattgcgcacggtcaggcggcgctcggtgccctcctcctcgatgccgtacttggcgctcgcccacaaccgcgtctcctccttgaaccacgcggcctcagtggacggctggggcacctcacataggaacgtggccgactccttctcccgcacctccagatcttgcagccgctttttgaagggaaccgcgggctctgccaggagagaagactggaacggacacctgcaaccctggattccacgaccggacagacgcgggtgggaaacggcagaccgcaagggcgaaaggacccaggtgcacgggttgcggaggagcctgggcccgcgcgccccgcacccaggagctcaccgcgcactacgaccagcacagagctgtaggtctggcccacgaggttggacgccgtgcaggtgtagaggccgcggtccgactgcttgcagaagaggatcttgagcacgaagttctcctgcgcgtcctcgtacaccacgtggcgccggccctcggtcaccagctggccgtccttcttccacaccgtctcgggcttgggctcgccggtcacgtagcagctgaggcgcgcgtgcttgccttcagtcaccgtgcaggtgcctgctgtcccagctactcaagagactgaagcaggaggatggcttgagcccaggaggtcaaagctgcagtgagctgcttcgccccatccctgatccagtgccaggcctctatgtgtcctcacagcgtacctcaggctcttccgggcaatggccaacatctctcatgtgtcctcaatcagaaggagggtgaggggtctctggagtaacggttatgccattctgcagccttatctcatgactgatcacttccaaaagctcacgttctaatcctgtcaccttgggggtgagcatttcaacgtgtgaatctccgggacacacattcagtccacagcaccagggagaaaggaaaggctggaaggagagcccactcccccaccaggagcttggccctgagctgccccagccatgcagaagtgtgtgtgcattgtgtgtgctcgaatacgtgccccaccccctcccggacagggccgtggagggtgcagagaagatggctgtgcgggccagccccttgcagggcctcctggacctgggagaagcaatgcccccacagcctccaggagtggcctgccctcctgaccctcttcactgctgcctgctccgctgcatctccaaacaccactgccagccttcaggctggattttctgcctccttcacaggacccctgttgttccttatttccctgcaacgtatttgttgaagacagtgggatattcacactacagagcttccggaggcactgtgcccagggtgtccttcacaccacgggaggccacaggatgcagtggctggccatggaccttgcctattcctggctggaatccactgcaaagagaactttcatggagctgctgtctgttcaaaggggtacaggtggaggaggagcagacacaatttcctgaggaaagcaaatgtcactgtgtcccttgagttgccagcttccacagggatgtcccgccatgagccctcctcccaggggctttcacagctgggtgggctggcatcctgggtgcagtttaactgaagggggtgttctcacagccatctcccaaggcctgggggatggtgggcccggaggcctcagacctgcacctgctgcccaggcgatggggtggctgggccccgggtgcccacaaactataggcaaaaaaaactgtaagtcagtcctgcagggtttcctgaacattttatgatccccaagtcgtatctgaacatgtcaagaatctctggtgccttggcttgggtgtaaagatgaagttctttcctcctctgtattccaggaggaaagagggttttcattcccttctgaatgttaggagggaaggcattttccatccttgaccagcttgtagatgacacacattcagcaaacgcacatcccagcagcaccgagagaacacacaggtgtgtcacgcttttgcgttcataaggccttttcatgtcagtatcttattagatattcccaaacaagggtgttttctcatcttatagaagagaggcctgaggctcacagggtgaaaacaatttgcttaagcctgcacagcagctgtgctggcaacgtttctcccggtataaatgagaagcagcctttgtggccacagagatgtgactgctaagtgcatcgtcccaccctgaaggagattcttcctcaacaagaggacattagtgcaaagactgatgaagtctgtagtttcgtgggttttttttttaagcataaggggttaaatattatgtaattaagtaataaggcagttgtgaggatgcaactgccaaaagtttgaaaaaagctgcccagatggaaatctgcttgcatttgtgcaagcagataggtgagggatttttactgtactgccgtgtcccctacctgccccagctttattgagttataattgacaagcaaaaattgtttatatttaaagtgtacaatgtgatgtggcctttttgttttgttttgagacataatcttatcacccaggctggagtgaagtggcgcagtttaaactgcgcaggctcatcatcctccttcctcagcctcctcagtagctagaaccacaggtgtgagccaccatgcctggctcattttttgattttctttttttaagagacaggggtctccctgtttcccaggctggtcttgaactcccgggctcaagtaatcatcccgcctcagcctcccaaagtgatggtgttacaggcatgagctactgtgcctggccagaaatggtaaattataattaaaggcttctgtaagtcatgctgtca

SEQ ID NO: 117837 - DNA, 624 bp, Homo sapiens
  Payload ID: 3029
  Gene Symbol: C1orf145
  Gene Name: chromosome 1 open reading frame 145
  ENST ID: ENST00000472613
  CDS Start-End: 1-286
gtcgtcggccgagacattgcgcacggtcaggcggcgctcggtgccctcctcctcgatgccgtacttggcgctcgcccacaaccgcgtctcctccttgaaccacgcggcctcagtggacggctggggcacctcacataggaacgtggccgactccttctcccgcacctccagatcttgcagccgctttttgaagggaaccgcgggctctgccaggagagaagactggaggaaagagggttttcattcccttctgaatgttaggagggaaggcattttccatccttgaccagcttgtagatgacacacattcagcaaacgcacatcccagcagcaccgagagaacacacagctgggttgcttacaaatacactacttcaaagtaaactttctctagtagcatatcagaagcaaagtaaaatctatttggagcaagtaaatctgactgctaccccactattttgaagcatacatgggaagctggttcctggacccccgcatataccaaaatctgtgcatactcaagttctacggtcagccctgtggaacccaagcataggacaagccggccctccctatacacacaggtttgacatcctgagaacactgctggttcccttcccattt

SEQ ID NO: 117838 - DNA, 871 bp, Homo sapiens
  Payload ID: 3030
  Gene Symbol: C1orf146
  Gene Name: chromosome 1 open reading frame 146
  ENST ID: ENST00000370373
  CDS Start-End: 465-830
gaggacctggtgagcagattgttgcaccattagaagctaggttgatccacagacagatggctgaaagtggaaaagaaaaaataaaatggacaaccaccattattattagctcatctcttaagtagaaagaaggtctcgctacattgcccaggctgttctcaaactcctgggctgaagtgattctctcacctcagcctcccaaagtgctaggattacaggtgtgagccattgtgcctggccaagtttaaattttaacctatcaggaaaaactattaaccacctagattttagtattgtgggtaatatgatttaattgcctgggtggaataggaaatcaggtgatatttgaaatgagttatgaagttgcaactgccctagaaaatcgaagccacaaagttcgatattcagattcagtggaaaatggatcaattatattttctctttctggagttgcatttttattaatggatactaaggaatgtcttctgtcaactgaagaaatatttctagccaaaattgagaaatttattaacattcaccaaaatagttttttggttttgtctgctgccctccatgggcctgaagaatggaaactgatgttcaggattcagcagagattcctgggttgtaacttacgaatacttccagtacacaacacagtaaatgctattaatcttatgtgcactatagcaaagactacctccaaaccatacatagatagcatttgctacagaatgataacagctaaagcttacatcattgagcaaagtcctgtttggaaaacacttcagaagataaaactgaatagtgattcagttaacccaaattagagtaccaacttaatgtttttctcgaagaatgtgaaaataat

SEQ ID NO: 117839 - DNA, 830 bp, Homo sapiens
  Payload ID: 3030
  Gene Symbol: C1orf146
  Gene Name: chromosome 1 open reading frame 146
  Uniprot ID: Q5VVC0
  ENST ID: ENST00000370375
  CDS Start-End: 149-691
gccccaggcaccctgggcgctctgccctaccggcggcgcctctcactgctcacggaacgttctggaagtttgggaaaccctgagcggtctctgaggacctggtgagcagattgttgcaccattagaagctaggttgatccacagacagatggctgaaagtggaaaagaaaaaataaaatggacaaccaccattattattagctcatctcttaagagttatgaagttgcaactgccctagaaaatcgaagccacaaagttcgatattcagattcagtggaaaatggatcaattatattttctctttctggagttgcatttttattaatggatactaaggaatgtcttctgtcaactgaagaaatatttctagccaaaattgagaaatttattaacattcaccaaaatagttttttggttttgtctgctgccctccatgggcctgaagaatggaaactgatgttcaggattcagcagagattcctgggttgtaacttacgaatacttccagtacacaacacagtaaatgctattaatcttatgtgcactatagcaaagactacctccaaaccatacatagatagcatttgctacagaatgataacagctaaagcttacatcattgagcaaagtcctgtttggaaaacacttcagaagataaaactgaatagtgattcagttaacccaaattagagtaccaacttaatgtttttctcgaagaatgtgaaaataattagacctgttaaattataatattcaaatatctatttaaagacatttatattaatttgaaataataacatatacaattaaaagtgattttattttagga

SEQ ID NO: 117840 - DNA, 695 bp, Homo sapiens
  Payload ID: 3031
  Gene Symbol: C1orf158
  Gene Name: chromosome 1 open reading frame 158
  ENST ID: ENST00000376210
  CDS Start-End: 7-477
cttaacatgtttttgactgcagtaaatccacagccactctctactccgagctggcagattgagaccaagtattcaacgaaagtgctcactggaaattggatggaagagaggagaaaggggctaccttacaaacacctgatcacccaccaccaggagcccccacatcgctacctgatcagcacctatgacgaccattacaaccggcatggttacaacccggggctgcctccactccgcacttggaatggacagaagttgctgtggctgccagagaagtctgactttccccttcttgctccccctacaaactatggactctatgagcagctcaagcagagacagctcacacccaaggctggcctgaagcagagcacttatacttcatcctaccccagaccaccgttgtgcgctatgtcctggagggagcatgcggtcccggtccctccccatcgcctgcatcctctcccacacttctgagagctgccaccccaggagcagctcagatagaatcagctggagaccacagcatcactggacttgccagacaacaagtggcgcagataaactcagagtacgagatctggcccgtcaaaggtgctctcagaatcatcatctgcatttggcggtacctgtcccccctcaaaacccacaggttcctttcttttccatccaacaattaaagatctttgacacta

SEQ ID NO: 117841 - DNA, 3549 bp, Homo sapiens
  Payload ID: 3031
  Gene Symbol: C1orf158
  Gene Name: chromosome 1 open reading frame 158
  Uniprot ID: Q8N1D5
  ENST ID: ENST00000614859
  CDS Start-End: 217-801
atccaagatagatcaactctccctaaaggctgacagtgaactcttggggccgttttattctctgaggttagcaaggagtcatctactagccattcaggaggccagctgggaagacaaaataggcaccccaaactcagcaacttcataacaccttcctctccccgcctgaagccttaaactgcatcaagtcaaagaaacctggggcaaatccttaacatgtttttgactgcagtaaatccacagccactctctactccgagctggcagattgagaccaagtattcaacgaaagtgctcactggaaattggatggaagagaggagaaagttcaccagagacactgacaagacaccccaatccatttacagaaaagaatacatccccttcccagaccacagaccagaccagatctccaggtggtatgggaagaggaaagttgaggggctaccttacaaacacctgatcacccaccaccaggagcccccacatcgctacctgatcagcacctatgacgaccattacaaccggcatggttacaacccggggctgcctccactccgcacttggaatggacagaagttgctgtggctgccagagaagtctgactttccccttcttgctccccctacaaactatggactctatgagcagctcaagcagagacagctcacacccaaggctggcctgaagcagagcacttatacttcatcctaccccagaccaccgttgtgcgctatgtcctggagggagcatgcggtcccggtccctccccatcgcctgcatcctctcccacacttctgagagctgccaccccaggagcagctcagatagaatcagctggagaccacagcatcactggacttgccagacaacaagtggcgcagataaactcagagtacgagatctggcccgtcaaaggtgctctcagaatcatcatctgcatttggcggtacctgtcccccctcaaaacccacaggttcctttcttttccatccaacaattaaagatctttgacactattgcagggctatgtacgtgcacaagacagattcagactgtcagagaaaacaggaagggcccttaagttctaccctgttgtttcacaagaggggaaactgaggcccggagaggtaatgtgacttgctgaagagtctactcccatggaggaaatgaatctgatgatgaaacccatcatgaaaactccacagaatgactgaatgtggttcccaggagggcagtgctgcagagctggcaatggggaaggaccccagcttgtctgtcattgccaaggcagaggaaggcgtgctctggccccacggggctcagaagaaggggaaaacacatggcatttcctttgtctctgagctcgcaaatctttgtgtttttttttttgtttttttttttgagacggagtgtcgctctcttgcccaggctggagtgccgtggcacgatctcagctcactgcaacctctgcctccagggttcaagcgattcttttgcctcagcctcctgagtagctgggactacaggtgcgcaccactacgcctggctaatttttgtatttttagtagagacagggtttcacaatgttggccaggctggtctcgaactcctgacctcgtgatccgcctgcctcggcctcccaaagtgctgggattagcaggcgtgagccaccgcacctggctgagctctcaaatctttatgagcctgggcagaggggagaacctctggtgagtgatttgggagagagggtggatctcctagcagaagaactcaggcatggtcctcgcccaggacaggggtccacaagtgtgcatgctcagtgctcgcacagagctgcctctttgaagaaattccagcagacacctttggccctttgcatgcttggctcatgggcacaggtgtgttttgtcagtgattttgtactgcacaccaataatatgactcccagtatgggagcctgagtctctgccattgttttcacaggatacctgctggcctcaggccacctaccttagggtcactttggcacctactaagttccttccttagtcatccaagtgtccatgtaaggacgctgtcttccatcccaactgaaagtcagagcctgacacaggctaagtcctctatgtttgttggatgagtgaatgacaggagttgaacaaatgagttgaatgaatgaatgacaggaggaggagccagggggtgcagaaaggttgcacctaccttagggtcactttggcacctactaagttccttccttagtcatccaagtgtccatgtaaggacgctgtcttccatcccaactgaaagtcagagcctgacacaggctaagtcctctatgtttgttggatgagtggatgacaggagttgaacaaatgagttgaatgaatgaatgacaggaggaggagccagggggtgcagaaaggttgctgcaggagacagctgtgggatggagtggagctggctgtcctcacacctccaacatccagcctttctattgagcatccattgagccatgtctgggccaggccctgacctcacagagcctcagtccagcagtcagggaggagcatgaggtaaatggctgcaggacagagaggtgctgcagctggaggccctgggggacagcgatggattgcgaggagtgagggagacccaggatatgctaagcaggggcgtctaatcttttggcttccctgggctacattggaagaagaattgtcttgggccacacataaaaaaatgaacaggggctgggcgcagtggctcatgcctgtaattccagcactttgggaggcctatatgggcggatcacctgaggtcaggagtttgtgactagcctgtctagcacagtgaaacactgtctctattaaaaatacaaaaatgagctggcatagtggttcatgcctggaatcccagctactccagaggctgaggcagcagaatcgcttgaacccaggaggcggaggtttcagtgagaccagatggtaccactgcactccagccttggtgacagagtgagactccatcccaaaaacaacaacaacaacaacaaacttacactaacggtagctgatgagctaaaaaaaaaatcgcgtaaaaaaaccccataatgttttaagtaagtttacaaatttatgttgggccacattcagcctgcaggcggagggttggacaagcttgtgcgaaagtaaaggatgtcatgagagcaacgggcaggggttgacggatgatgaatgaagacctggcctgcctaggtagggccagggagaatcaggtaggtcaaggccagaaagctgagggagattacccagctgaagggacaggttgggagggaagagagggtggcttgggccatgggggcaacacgtttgaagtctctgacttgggaagaagctgagcaaattccttaaaagtccagaaagaccatgcattggtctcctattgctgctggaacaaaataccacaaactcagtgccctaaagcaacacatgtttatttgacagttcttattataaatgtgaataaatgcacatttattcagaa

SEQ ID NO: 117842 - DNA, 1097 bp, Homo sapiens
  Payload ID: 3032
  Gene Symbol: C1orf159
  Gene Name: chromosome 1 open reading frame 159
  Uniprot ID: Q96HA4
  ENST ID: ENST00000379319
  CDS Start-End: 308-904
ggtagagggatcaagttgtcttcaattttatctcctctgctgactttttagttctgcctctttgtgttgttttttaagtggttcctctggagattaaatgtacttcacagaacctcagcgagcggactccagttatattccgtgctcttgtcggcacgcatttcacttctaggactgggccggggtctgcagggctcagctgagcccatgagctcccagagctaacccctgaacacccaggcgggcaaagggctgatgtcggtagtccccatcctggaggggcaggctctgcgcatctgctcctggcatggcgctgcggcacctcgccctcctggctggccttctcgtgggagtcgccagcaagtccatggagaacacggcccagctgcccgagtgctgtgtggatgtggtgggcgtcaacgccagctgcccaggcgcaagtctgtgtggtccaggctgttacaggcgctggaacgcggacgggagcgccagctgcgtccgctgtgggaacggaaccctcccagcctacaacggctccgagtgtagaagctttgctggcccgggtgcgccattccccatgaacagaagctcagggacccccgggcggccacatcctggggctccgcgcgtggccgcctccctcttcctgggcacgttcttcattagctccggcctcatcctctccgtagctgggttcttctacctcaagcgctccagtaaactccccagggcctgctacagaagaaacaaagctccggccctgcagcctggcgaagccgctgcaatgatccccccgccacagtcctcagtacggaagccgcgctacgtcaggcgggagcggcccctggacagggccacggatcccgctgccttcccgggggaggcccgtatcagcaatgtctgacctggaggccgagaccacgccacgcacttggcggcagggacccggaggccgaccccttggcgggaaccagcacaaagtgttggcatcgcccggcgcccgggacagtcctgggcacagcctcggctctgagtccctccgcctcccagcgacggacgccaaagggtcccgggccgcctgaggctcctccccacca

SEQ ID NO: 117843 - DNA, 2324 bp, Homo sapiens
  Payload ID: 3032
  Gene Symbol: C1orf159
  Gene Name: chromosome 1 open reading frame 159
  ENST ID: ENST00000379320
  CDS Start-End: 632-1666
gcaccgtaggccacggcccacctgggttgccctcgcgtgaccacggcctcacctgctgtcttcatctgcaggactgggccggggtctgcagggctcagctgagcccatgagctcccagagctaacccctgaacacccaggcgggcaaagggctgatgtcggtagtccccatcctggaggggcaggtaaggccctgcctacacctcgccccacccgtgcctccaaaggccccaagccttcactctttcaccccacctccatttggctccaccttccctgtcgtggccctgcacccctgccacggccctgccccatctccatttaactcagtcatctgccgcggccccgccccaccccatctccatttggccccaccctccctgccacagccccgcccacttccatttggccccaccctccaccacagccccgcccacttccatttggccccaccctccaccacagccccacccatctccatttggctctgccctccttgccttggcccgcacccccccaacatctcttgaccccactttcatttggccccacccaccctgcctcagccccactccatctctttggctccgcatgctcctccctgtggcaggctctgcgcatctgctcctggcatggcgctgcggcacctcgccctcctggctggccttctcgtgggagtcgccagcaagtccatggagaacacggcccagctgcccgagtgctgtgtggatgtggtgggcgtcaacgccagctgcccaggcgcaagtctgtgtggtccaggctgttacaggcgctggaacgcggacgggagcgccagctgcgtccgctgtgggaacggaaccctcccagcctacaacggctccgagtgtagaagctttgctggcccgggtgcgccattccccatgaacagaagctcagggacccccgggcggccacatcctggggctccgcgcgtggccgcctccctcttcctgggcacgttcttcattagctccggcctcatcctctccgtagctgggttcttctacctcaagcgctccagtaaactccccagggcctgctacagaagaaacaaagctccggccctgcagcctggcgaagccgctgcaatgatccccccgccacagtcctcaggtaacagcagctgtcgcatccccctgtggggtttcccatctctgggccagtcccagggtgctctgtgggtttgtccccaaacgggtttgcctggctctggatctcggccacccctgcccgggtccccaggagacccacccacaaggcagggccagggccggatttggctggtgccccctgctctggatctcagctggatttggccggcgccccctgcccgcccccctttaatccccgtgacttccatgctctttcctgttcccgagacgtggggtctgcaggaaaggaggacccaccacgacagggcagacccccaatacctgctcctccttgaagtccagctccacccgaggacagacgcagccggcctccgccaggccctcctgagcagccatcgcttcagtggtgctgggtcaggcggacccaagagtcagcccgtacggaagccgcgctacgtcaggcgggagcggcccctggacagggccacggatcccgctgccttcccgggggaggcccgtatcagcaatgtctgacctggaggccgagaccacgccacgcacttggcggcagggacccggaggccgaccccttggcgggaaccagcacaaagtgttggcatcgcccggcgcccgggacagtcctgggcacagcctcggctctgagtccctccgcctcccagcgacggacgccaaagggtcccgggccgcctgaggctcctccccaccacagccatctcgtttatcggaccaggagcaggcatccatgagacctcagagcttcagatcgaggccttggggggtccgggcccccccaggaaacacggtgaggccccagcgcctgcagccaaagctggcacgatctatggggcaggtgccgctctgcctagaaaagccaggggctctgctgccgtgccctccagagcccacagcgggcaggactcctccagcaccaccacacccagtggcccgagacccctctgagaacagtgaggctggtcctcgtgccgttccagccggtgcccggccagtggggaggacacagcctaggaaccagctgcctgagaccagggtgcctctgggctgtcctcccgcgtggcggagaccccaagcacgcagccacccatttccggagctgcaggatagagcttcctcttgatctctgtttttaagcagaaattcattgtgcagaaaa

SEQ ID NO: 117844 - DNA, 2010 bp, Homo sapiens
  Payload ID: 3032
  Gene Symbol: C1orf159
  Gene Name: chromosome 1 open reading frame 159
  Uniprot ID: Q96HA4
  ENST ID: ENST00000379325
  CDS Start-End: 172-741
cggggtgtacgaaagagaaacccggagggcgccggggactgggccggggtctgcagggctcagctgagcccatgagctcccagagctaacccctgaacacccaggcgggcaaagggctgatgtcggtagtccccatcctggaggggcaggctctgcgcatctgctcctggcatggcgctgcggcacctcgccctcctggctggccttctcgtgggagtcgccagcaagtccatggagaacacggcccagctgcccgagtgctgtgtggatgtggtgggcgtcaacgccagctgcccaggcgcaagtctgtgtggtccaggctgttacaggcgctggaacgcggacgggagcgccagctgcgtccgctgtgggaacggaaccctcccagcctacaacggctccgagtgtagaagctttgctggcccgggtgcgccattccccatgaacagaagctcagggacccccgggcggccacatcctggggctccgcgcgtggccgcctccctcttcctgggcacgttcttcattagctccggcctcatcctctccgtagctgggttcttctacctcaagcgctccagtaaactccccagggcctgctacagaagaaacaaagctccggccctgcagcctggcgaagccgctgcaatgatccccccgccacagtcctcagacgtggggtctgcaggaaaggaggacccaccacgacagggcagacccccaatacctgctcctccttgaagtccagctccacccgaggacagacgcagccggcctccgccaggccctcctgagcagccatcgcttcagtggtgctgggtcaggcggacccaagagtcagcccgtacggaagccgcgctacgtcaggcgggagcggcccctggacagggccacggatcccgctgccttcccgggggaggcccgtatcagcaatgtctgacctggaggccgagaccacgccacgcacttggcggcagggacccggaggccgaccccttggcgggaaccagcacaaagtgttggcatcgcccggcgcccgggacagtcctgggcacagcctcggctctgagtccctccgcctcccagcgacggacgccaaagggtcccgggccgcctgaggctcctccccaccacagccatctcgtttatcggaccaggagcaggcatccatgagacctcagagcttcagatcgaggccttggggggtccgggcccccccaggaaacacggtgaggccccagcgcctgcagccaaagctggcacgatctatggggcaggtgccgctctgcctagaaaagccaggggctctgctgccgtgccctccagagcccacagcgggcaggactcctccagcaccaccacacccagtggcccgagacccctctgagaacagtgaggctggtcctcgtgccgttccagccggtgcccggccagtggggaggacacagcctaggaaccagctgcctgagaccagggtgcctctgggctgtcctcccgcgtggcggagaccccaagcacgcagccacccatttccggagctgcaggatagagcttcctcttgatctctgtttttaagcagaaattcattgtgcagaaaagtcctccagagctctgtggccccgctcggatccgctggacccccatgcctggctgatccctgcccacgtggggcaggcccacatctaacccccacaagtcactgcctcactgcacctgccaaggctgccctggcgctgagtcctggggtccctcccggagttcctgggagaaaggcgccgtcgtggccgcctcccgcacgccaggcccgggctccaccgtgggtctcagacgccctgcggcaccggcaccgtctgctttagcatgggacccccctctgaggggtggcctggccttcggggtccccacgctcctttgcgaagtccactgtgggtgccatcatggtctccgggacctgggccagcgggaacgtgggggcactgggtgtgctgatataaagtcggcattactcaa

SEQ ID NO: 117845 - DNA, 2429 bp, Homo sapiens
  Payload ID: 3032
  Gene Symbol: C1orf159
  Gene Name: chromosome 1 open reading frame 159
  Uniprot ID: Q96HA4
  ENST ID: ENST00000379339
  CDS Start-End: 212-1354
gagaaacccggagggcgccgggtattaccagggtgtgcagagaaggcagagctgcgtcttcctcttttatttttccgactgggccggggtctgcagggctcagctgagcccatgagctcccagagctaacccctgaacacccaggcgggcaaagggctgatgtcggtagtccccatcctggaggggcaggctctgcgcatctgctcctggcatggcgctgcggcacctcgccctcctggctggccttctcgtgggagtcgccagcaagtccatggagaacacggtcacgagaaacagcacagctgtgatcaacacacaagctgagggtaccctgagccccccaggcctgtccagtctgcctgtggtcagggaatgggccctcacacacaccgcccagctgcccgagtgctgtgtggatgtggtgggcgtcaacgccagctgcccaggcgcaagtctgtgtggtccaggctgttacaggcgctggaacgcggacgggagcgccagctgcgtccgctgtgggaacggaaccctcccagcctacaacggctccgagtgtagaagctttgctggcccgggtgcgccattccccatgaacagaagctcagggacccccgggcggccacatcctggggctccgcgcgtggccgcctccctcttcctgggcacgttcttcattagctccggcctcatcctctccgtagctgggttcttctacctcaagcgctccagtaaactccccagggcctgctacagaagaaacaaagctccggccctgcagcctggcgaagccgctgcaatgatccccccgccacagtcctcaggtaacagcagctgtcgcatccccctgtggggtttcccatctctgggccagtcccagggtgctctgtgggtttgtccccaaacgggtttgcctggctctggatctcggccacccctgcccgggtccccaggagacccacccacaaggcagggccagggccggatttggctggtgccccctgctctggatctcagctggatttggccggcgccccctgcccgcccccctttaatccccgtgacttccatgctctttcctgttcccgagacgtggggtctgcaggaaaggaggacccaccacgacagggcagacccccaatacctgctcctccttgaagtccagctccacccgaggacagacgcagccggcctccgccaggccctcctgagcagccatcgcttcagtggtgctgggtcaggcggacccaagagtcagcccgtacggaagccgcgctacgtcaggcgggagcggcccctggacagggccacggatcccgctgccttcccgggggaggcccgtatcagcaatgtctgacctggaggccgagaccacgccacgcacttggcggcagggacccggaggccgaccccttggcgggaaccagcacaaagtgttggcatcgcccggcgcccgggacagtcctgggcacagcctcggctctgagtccctccgcctcccagcgacggacgccaaagggtcccgggccgcctgaggctcctccccaccacagccatctcgtttatcggaccaggagcaggcatccatgagacctcagagcttcagatcgaggccttggggggtccgggcccccccaggaaacacggtgaggccccagcgcctgcagccaaagctggcacgatctatggggcaggtgccgctctgcctagaaaagccaggggctctgctgccgtgccctccagagcccacagcgggcaggactcctccagcaccaccacacccagtggcccgagacccctctgagaacagtgaggctggtcctcgtgccgttccagccggtgcccggccagtggggaggacacagcctaggaaccagctgcctgagaccagggtgcctctgggctgtcctcccgcgtggcggagaccccaagcacgcagccacccatttccggagctgcaggatagagcttcctcttgatctctgtttttaagcagaaattcattgtgcagaaaagtcctccagagctctgtggccccgctcggatccgctggacccccatgcctggctgatccctgcccacgtggggcaggcccacatctaacccccacaagtcactgcctcactgcacctgccaaggctgccctggcgctgagtcctggggtccctcccggagttcctgggagaaaggcgccgtcgtggccgcctcccgcacgccaggcccgggctccaccgtgggtctcagacgccctgcggcaccggcaccgtctgctttagcatgggacccccctctgaggggtggcctggccttcggggtccccacgctcctttgcgaagtccactgtgggtgccatcatggtctccgggacctgggccagcgggaacgtgggggcactgggtgtgctgatataaagtcggcattactcaagctgc

SEQ ID NO: 117846 - DNA, 842 bp, Homo sapiens
  Payload ID: 3032
  Gene Symbol: C1orf159
  Gene Name: chromosome 1 open reading frame 159
  ENST ID: ENST00000434641
  CDS Start-End: 172-842
cggggtgtacgaaagagaaacccggagggcgccggggactgggccggggtctgcagggctcagctgagcccatgagctcccagagctaacccctgaacacccaggcgggcaaagggctgatgtcggtagtccccatcctggaggggcaggctctgcgcatctgctcctggcatggcgctgcggcacctcgccctcctggctggccttctcgtgggagtcgccagcaagtccatggagaacacggcccagctgcccgagtgctgtgtggatgtggtgggcgtcaacgccagctgcccaggcgcaagtctgtgtggtccaggctgttacaggcgctggaacgcggacgggagcgccagctgcgtccgctgtgggaacggaaccctcccagcctacaacggctccgagtgtagaagctttgctggcccgggtgcgccattccccatgaacagaagctcagggacccccgggcggccacatcctggggctccgcgcgtggccgcctccctcttcctgggcacgttcttcattagctccggcctcatcctctccgtagctgggttcttctacctcaagcgctccagtaaactccccagggcctgctacagaagaaacaaagctccggccctgcagcctggcgaagccgctgcaatgatccccccgccacagtcctcagctccacccgaggacagacgcagccggcctccgccaggccctcctgagcagccatcgcttcagtggtgctgggtcaggcggacccaagagtcagcccgtacggaagccgcgctacgtcaggcgggagcggcccctggacagggccacggatcccgctgccttcccggggg

SEQ ID NO: 117847 - DNA, 575 bp, Homo sapiens
  Payload ID: 3032
  Gene Symbol: C1orf159
  Gene Name: chromosome 1 open reading frame 159
  ENST ID: ENST00000427787
  CDS Start-End: 384-575
gagtcctccggcaggctcacacctgggcagcctggtcagtttgtgaggccatgacctgaatccagcatggaatgggtgacagagtggaccgtccctgtgcggagagtggaccgtccctgtgcagagactggagctgtgtcctccagggcctccgtctccctgctgctcacagcccttgtcccaggaccccggcctaggcccatcaagaggagccccacaggcctggctgggcctcagcccccctcggggactgggccggggtctgcagggctcagctgagcccatgagctcccagagctaacccctgaacacccaggcgggcaaagggctgatgtcggtagtccccatcctggaggggcaggctctgcgcatctgctcctggcatggcgctgcggcacctcgccctcctggctggccttctcgtgggagtcgccagcaagtccatggagaacacggacactgatgtcccagccccagaggtgctgaccaggtccactgctggggtcagaggggcctgtgcctcgcagaggggagccctccgctgcctgctgggcccagctgcccgagtgctgtgt

SEQ ID NO: 117848 - DNA, 1841 bp, Homo sapiens
  Payload ID: 3032
  Gene Symbol: C1orf159
  Gene Name: chromosome 1 open reading frame 159
  Uniprot ID: Q96HA4
  ENST ID: ENST00000421241
  CDS Start-End: 175-771
gggcggggtgtacgaaagagaaacccggagggcgccggggactgggccggggtctgcagggctcagctgagcccatgagctcccagagctaacccctgaacacccaggcgggcaaagggctgatgtcggtagtccccatcctggaggggcaggctctgcgcatctgctcctggcatggcgctgcggcacctcgccctcctggctggccttctcgtgggagtcgccagcaagtccatggagaacacggcccagctgcccgagtgctgtgtggatgtggtgggcgtcaacgccagctgcccaggcgcaagtctgtgtggtccaggctgttacaggcgctggaacgcggacgggagcgccagctgcgtccgctgtgggaacggaaccctcccagcctacaacggctccgagtgtagaagctttgctggcccgggtgcgccattccccatgaacagaagctcagggacccccgggcggccacatcctggggctccgcgcgtggccgcctccctcttcctgggcacgttcttcattagctccggcctcatcctctccgtagctgggttcttctacctcaagcgctccagtaaactccccagggcctgctacagaagaaacaaagctccggccctgcagcctggcgaagccgctgcaatgatccccccgccacagtcctcagtacggaagccgcgctacgtcaggcgggagcggcccctggacagggccacggatcccgctgccttcccgggggaggcccgtatcagcaatgtctgacctggaggccgagaccacgccacgcacttggcggcagggacccggaggccgaccccttggcgggaaccagcacaaagtgttggcatcgcccggcgcccgggacagtcctgggcacagcctcggctctgagtccctccgcctcccagcgacggacgccaaagggtcccgggccgcctgaggctcctccccaccacagccatctcgtttatcggaccaggagcaggcatccatgagacctcagagcttcagatcgaggccttggggggtccgggcccccccaggaaacacggtgaggccccagcgcctgcagccaaagctggcacgatctatggggcaggtgccgctctgcctagaaaagccaggggctctgctgccgtgccctccagagcccacagcgggcaggactcctccagcaccaccacacccagtggcccgagacccctctgagaacagtgaggctggtcctcgtgccgttccagccggtgcccggccagtggggaggacacagcctaggaaccagctgcctgagaccagggtgcctctgggctgtcctcccgcgtggcggagaccccaagcacgcagccacccatttccggagctgcaggatagagcttcctcttgatctctgtttttaagcagaaattcattgtgcagaaaagtcctccagagctctgtggccccgctcggatccgctggacccccatgcctggctgatccctgcccacgtggggcaggcccacatctaacccccacaagtcactgcctcactgcacctgccaaggctgccctggcgctgagtcctggggtccctcccggagttcctgggagaaaggcgccgtcgtggccgcctcccgcacgccaggcccgggctccaccgtgggtctcagacgccctgcggcaccggcaccgtctgctttagcatgggacccccctctgaggggtggcctggccttcggggtccccacgctcctttgcgaagtccactgtgggtgccatcatggtctccgggacctgggccagcgggaacgtgggggcactgggtgtgctgatataaagtcggcattactcaa

SEQ ID NO: 117849 - DNA, 554 bp, Homo sapiens
  Payload ID: 3032
  Gene Symbol: C1orf159
  Gene Name: chromosome 1 open reading frame 159
  ENST ID: ENST00000442117
  CDS Start-End: 384-554
gagtcctccggcaggctcacacctgggcagcctggtcagtttgtgaggccatgacctgaatccagcatggaatgggtgacagagtggaccgtccctgtgcggagagtggaccgtccctgtgcagagactggagctgtgtcctccagggcctccgtctccctgctgctcacagcccttgtcccaggaccccggcctaggcccatcaagaggagccccacaggcctggctgggcctcagcccccctcggggactgggccggggtctgcagggctcagctgagcccatgagctcccagagctaacccctgaacacccaggcgggcaaagggctgatgtcggtagtccccatcctggaggggcaggctctgcgcatctgctcctggcatggcgctgcggcacctcgccctcctggctggccttctcgtgggagtcgccagcaagtccatggagaacacggcccagctgcccgagtgctgtgtggatgtggtgggcgtcaacgccagctgcccaggcgcaagtctgtgtggtccaggctgttacaggcgctggaacgcg

SEQ ID NO: 117850 - DNA, 740 bp, Homo sapiens
  Payload ID: 3032
  Gene Symbol: C1orf159
  Gene Name: chromosome 1 open reading frame 159
  ENST ID: ENST00000475119
  CDS Start-End: 482-740
gcgaggaatccgggggaatgtagtccctccgtgtcagggacccgagacatgcgctggttcttctaggactacatttcccagggcgcttcgcgccccgccccggcgccccacccacggccgcgcgcgatggtaccaccaggcgagggcggctctcgcgcgggccgccgggagttgtagttttctttgggagctgcggggcctggcgccggggccggggcggaagaaagactacaagtcccagggggcgcggcgccaccgcctgagggcggggtgtacgaaagagaaacccggagggcgccggggactgggccggggtctgcagggctcagctgagcccatgagctcccagagctaacccctgaacacccaggcgggcaaagggctgatgtcggtagtccccatcctggaggggcagccccactccatctctttggctccgcatgctcctccctgtggcaggctctgcgcatctgctcctggcatggcgctgcggcacctcgccctcctggctggccttctcgtgggagtcgccagcaagtccatggagaacacggcccagctgcccgagtgctgtgtggatgtggtgggcgtcaacgccagctgcccaggcgcaagtctgtgtggtccaggctgttacaggcgctggaacgcggacgggagcgccagctgcgtccgctgtgggaacggaaccctcccagcctacaacggctccgagtgtagaagctttgctggcccgggtg

SEQ ID NO: 117851 - DNA, 3214 bp, Homo sapiens
  Payload ID: 3032
  Gene Symbol: C1orf159
  Gene Name: chromosome 1 open reading frame 159
  ENST ID: ENST00000477196
  CDS Start-End: 166-462
gtacgaaagagaaacccggagggcgccggggactgggccggggtctgcagggctcagctgagcccatgagctcccagagctaacccctgaacacccaggcgggcaaagggctgatgtcggtagtccccatcctggaggggcaggctctgcgcatctgctcctggcatggcgctgcggcacctcgccctcctggctggccttctcgtgggagtcgccagcaagtccatggagaacacggacactgatgtcccagccccagaggtgctgaccaggtccactgctggggtcagaggggcctgtgcctcgcagaggggagccctccgctgcctgctgggtgagcgcctgctcaggaatggctgggtcaggcggggcccccacggtgaggcatcctggcccgcaatgggagcacctctgccagcggtgacagcacagcgtgccgcgcatcgctatcggggagtgtagctgcggcggctccagactcccaggcggagcgggtggagggtggggacccctcactgtcctggctggggcgtttgagggaccggacctgggcccctccctggcggtgtggattctatcccgcactccgcagtcacccctggacgccctcaccgttcactgcattcaggtcacgagaaacagcacagctgtgatcaacacacaagctgagggtaccctgagccccccaggcctgtccagtctgcctgtggtcagggaatgggccctcacacacaccgtaagtgccagcacccagcgcacctgtgcagtacctgggcacctgggcgtgaattcgtcccctgaaatgccagccaggcccgggcacttcctctgtggggtcaagcggaaacccctgatggagagcctccggagacttgcagagaatgtcggtggcgctgccatggcctgcgggtgccgcctcctgggggtggtttactcttccaggcccagcttttccttggagaccgcccacccagggtcccacagggatgtgcactgtggctgtgaggcccctccttgctcccaggcccacaggggacagagggccacccgatgctgactccagaagaggccggagctgcggacattgagatgtgctcccacggcacccctcagccgctgctgctctgggcgtgagcctgcctggcaggcgcgtcctggagtttcactgccgtgtcccctccaggcccagctgcccgagtgctgtgtggatgtggtgggcgtcaacgccagctgcccaggcgcaagtctgtgtggtccaggctgttacaggcgctggaacgcggacgggagcgccagctgcgtccgctgtgggaacggaaccctcccagcctacaacggctccgagtgtagaagctttgctggcccgggtgcgccattccccatgaacagaagctcagggacccccgggcggccacatcctggggctccgcgcgtggccgcctccctcttcctgggcacgttcttcattagctccggcctcatcctctccgtagctgggttcttctacctcaagcgctccagtaaactccccagggcctgctacagaagaaacaaagctccggccctgcagcctggcgaagccgctgcaatgatccccccgccacagtcctcaggtaacagcagctgtcgcatccccctgtggggtttcccatctctgggccagtcccagggtgctctgtgggtttgtccccaaacgggtttgcctggctctggatctcggccacccctgcccgggtccccaggagacccacccacaaggcagggccagggccggatttggctggtgccccctgctctggatctcagctggatttggccggcgccccctgcccgcccccctttaatccccgtgacttccatgctctttcctgttcccgagacgtggggtctgcaggaaaggaggacccaccacgacagggcagacccccaatacctgctcctccttgaagtccagctccacccgaggacagacgcagccggcctccgccaggccctcctgagcagccatcgcttcagtggtgctgggtcaggcggacccaagagtcagcccgtacggaagccgcgctacgtcaggcgggagcggcccctggacagggccacggatcccgctgccttcccgggggaggcccgtatcagcaatgtctgacctggaggccgagaccacgccacgcacttggcggcagggacccggaggccgaccccttggcgggaaccagcacaaagtgttggcatcgcccggcgcccgggacagtcctgggcacagcctcggctctgagtccctccgcctcccagcgacggacgccaaagggtcccgggccgcctgaggctcctccccaccacagccatctcgtttatcggaccaggagcaggcatccatgagacctcagagcttcagatcgaggccttggggggtccgggcccccccaggaaacacggtgaggccccagcgcctgcagccaaagctggcacgatctatggggcaggtgccgctctgcctagaaaagccaggggctctgctgccgtgccctccagagcccacagcgggcaggactcctccagcaccaccacacccagtggcccgagacccctctgagaacagtgaggctggtcctcgtgccgttccagccggtgcccggccagtggggaggacacagcctaggaaccagctgcctgagaccagggtgcctctgggctgtcctcccgcgtggcggagaccccaagcacgcagccacccatttccggagctgcaggatagagcttcctcttgatctctgtttttaagcagaaattcattgtgcagaaaagtcctccagagctctgtggccccgctcggatccgctggacccccatgcctggctgatccctgcccacgtggggcaggcccacatctaacccccacaagtcactgcctcactgcacctgccaaggctgccctggcgctgagtcctggggtccctcccggagttcctgggagaaaggcgccgtcgtggccgcctcccgcacgccaggcccgggctccaccgtgggtctcagacgccctgcggcaccggcaccgtctgctttagcatgggacccccctctgaggggtggcctggccttcggggtccccacgctcctttgcgaagtccactgtgggtgccatcatggtctccgggacctgggccagcgggaacgtgggggcactgggtgtgctgatataaagtcggcattactc

SEQ ID NO: 117852 - DNA, 2099 bp, Homo sapiens
  Payload ID: 3032
  Gene Symbol: C1orf159
  Gene Name: chromosome 1 open reading frame 159
  ENST ID: ENST00000467751
  CDS Start-End: 166-501
gtacgaaagagaaacccggagggcgccggggactgggccggggtctgcagggctcagctgagcccatgagctcccagagctaacccctgaacacccaggcgggcaaagggctgatgtcggtagtccccatcctggaggggcaggctctgcgcatctgctcctggcatggcgctgcggcacctcgccctcctggctggccttctcgtgggagtcgccagcaagtccatggagaacacggacactgatgtcccagccccagaggtgctgaccaggtccactgctggggtcagaggggcctgtgcctcgcagaggggagccctccgctgcctgctgggcccagctgcccgagtgctgtgtggatgtggtgggcgtcaacgccagctgcccaggcgcaagtctgtgtggtccaggctgttacaggcgctggaacgcggacgggagcgccagctgcgtccgctgtgggaacggaaccctcccagcctacaacggctccgagtgtagaagctttgctggcccgggtgcgccattccccatgaacagaagctcagggacccccgggcggccacatcctggggctccgcgcgtggccgcctccctcttcctgggcacgttcttcattagctccggcctcatcctctccgtagctgggttcttctacctcaagcgctccagtaaactccccagggcctgctacagaagaaacaaagctccggccctgcagcctggcgaagccgctgcaatgatccccccgccacagtcctcagacgtggggtctgcaggaaaggaggacccaccacgacagggcagacccccaatacctgctcctccttgaagtccagctccacccgaggacagacgcagccggcctccgccaggccctcctgagcagccatcgcttcagtggtgctgggtcaggcggacccaagagtcagcccgtacggaagccgcgctacgtcaggcgggagcggcccctggacagggccacggatcccgctgccttcccgggggaggcccgtatcagcaatgtctgacctggaggccgagaccacgccacgcacttggcggcagggacccggaggccgaccccttggcgggaaccagcacaaagtgttggcatcgcccggcgcccgggacagtcctgggcacagcctcggctctgagtccctccgcctcccagcgacggacgccaaagggtcccgggccgcctgaggctcctccccaccacagccatctcgtttatcggaccaggagcaggcatccatgagacctcagagcttcagatcgaggccttggggggtccgggcccccccaggaaacacggtgaggccccagcgcctgcagccaaagctggcacgatctatggggcaggtgccgctctgcctagaaaagccaggggctctgctgccgtgccctccagagcccacagcgggcaggactcctccagcaccaccacacccagtggcccgagacccctctgagaacagtgaggctggtcctcgtgccgttccagccggtgcccggccagtggggaggacacagcctaggaaccagctgcctgagaccagggtgcctctgggctgtcctcccgcgtggcggagaccccaagcacgcagccacccatttccggagctgcaggatagagcttcctcttgatctctgtttttaagcagaaattcattgtgcagaaaagtcctccagagctctgtggccccgctcggatccgctggacccccatgcctggctgatccctgcccacgtggggcaggcccacatctaacccccacaagtcactgcctcactgcacctgccaaggctgccctggcgctgagtcctggggtccctcccggagttcctgggagaaaggcgccgtcgtggccgcctcccgcacgccaggcccgggctccaccgtgggtctcagacgccctgcggcaccggcaccgtctgctttagcatgggacccccctctgaggggtggcctggccttcggggtccccacgctcctttgcgaagtccactgtgggtgccatcatggtctccgggacctgggccagcgggaacgtgggggcactgggtgtgctgatataaagtcggcattactc

SEQ ID NO: 117853 - DNA, 836 bp, Homo sapiens
  Payload ID: 3032
  Gene Symbol: C1orf159
  Gene Name: chromosome 1 open reading frame 159
  ENST ID: ENST00000462097
  CDS Start-End: 527-836
gaatccgggggaatgtagtccctccgtgtcagggacccgagacatgcgctggttcttctaggactacatttcccagggcgcttcgcgccccgccccggcgccccacccacggccgcgcgcgatggtaccaccaggcgagggcggctctcgcgcgggccgccgggagttgtagttttctttgggagctgcggggcctggcgccggggccggggcggaagaaagactacaagtcccagggggcgcggcgccaccgcctgagggcggggtgtacgaaagagaaacccggagggcgccgggtggttcctctggagattaaatgtacttcacagaacctcagcgagcggactccagttatattccgtgctcttgtcggcacgcatttcacttctaggactgggccggggtctgcagggctcagctgagcccatgagctcccagagctaacccctgaacacccaggcgggcaaagggctgatgtcggtagtccccatcctggaggggcaggctctgcgcatctgctcctggcatggcgctgcggcacctcgccctcctggctggccttctcgtgggagtcgccagcaagtccatggagaacacggcccagctgcccgagtgctgtgtggatgtggtgggcgtcaacgccagctgcccaggcgcaagtctgtgtggtccaggctgttacaggcgctggaacgcggacgggagcgccagctgcgtccgctgtgggaacggaaccctcccagcctacaacggctccgagtgtagaagctttgctggcccgggtgcgccattccccatgaacagaagctcagggacccccgggcggccacatcctg

SEQ ID NO: 117854 - DNA, 579 bp, Homo sapiens
  Payload ID: 3032
  Gene Symbol: C1orf159
  Gene Name: chromosome 1 open reading frame 159
  ENST ID: ENST00000480643
  CDS Start-End: 536-579
gtacgaaagagaaacccggagggcgccgggtattaccagggtgtgcagagaaggcagagctgcgtcttcctcttttatttttccgtgctctgagtgcggggcccgccgagcctgcacccacccagaactcacgctgcatgcagccccggttcccgcctgcagctctccctccacacctccctgcaagcagagggagccggctccggcctcggccagcccagagaggggctcccacagtgcagcggtgggctggagggctcctcaagtgtggccagcgtggatgctgaggcccaggaggtgctgagatggttcctctggagattaaatgtacttcacagaacctcagcgagcggactccagttatattccgtgctcttgtcggcacgcatttcacttctaggactgggccggggtctgcagggctcagctgagcccatgagctcccagagctaacccctgaacacccaggcgggcaaagggctgatgtcggtagtccccatcctggaggggcaggctctgcgcatctgctcctggcatggcgctgcggcacctcgccctcctggctggccttctcgtggg

SEQ ID NO: 117855 - DNA, 1107 bp, Homo sapiens
  Payload ID: 3033
  Gene Symbol: C1orf162
  Gene Name: chromosome 1 open reading frame 162
  Uniprot ID: Q8NEQ5
  ENST ID: ENST00000343534
  CDS Start-End: 251-718
ctgggccacagagcgagactccgtctcaaaaaataaaataaatcataatgttgacctcaaagaggaagcctaccgttgagtttagtaagatctttgctacacacaatgtgatgctggcagtggcaggggcagtaatctttatttcgtcatttttgaaacatagaagccgtaacggaagcaagtgaaatgctcagtcttagacgactgcgtcgtgctatgaccggactttttcttgaaaggggatgacagcatgggaggcaatggctccacatgtaaacccgacactgaaagacaaggcactctctccacagcagccccaacaactagccctgcaccctgtctctctaaccaccacaacaaaaaacatttaatccttgccttttgtgctggggttctactgacactgctgctgatagcctttatcttcctcatcataaagagctacagaaaatatcgaagggagaggcttcccatttccccaggcccattgctgagatgggtccctcttctttctggcaccatggcagatcactccaagccccaggccccagatcctcactcagatcctccagccaagctttcatccatcccaggggaatcacttacctatgccagcacaactttcaaactctcagaagaaaagagcaatcacttggctgagaaccattctgcagactttgaccccattgtctatgctcaaattaaagtaacaaactaactcagcttttccaatgaggcttgaatccatttcctctcatctcagccctatcttcacacatcactttcacttttttacaaattttggaccaccacctgtgtgaaactgcagtcggagttgtttagatgtgatctggcaatgctatccagcatctttggagaccaatggtcagtcttttcctggccagaggaaagattgatggccctcccacttgaactgacagcctgtgagccccttgggggcatagactgccttccttggacccttccaaagtgtgtggtacagagctcagtgcacagagtattcacccagcatcatgaatcaacttgggaggagtcaaccaaatgaacaatctaccaaaaatttcaaataaagtcaaaccccccaca

SEQ ID NO: 117856 - DNA, 915 bp, Homo sapiens
  Payload ID: 3033
  Gene Symbol: C1orf162
  Gene Name: chromosome 1 open reading frame 162
  Uniprot ID: Q8NEQ5
  ENST ID: ENST00000369718
  CDS Start-End: 174-566
gagtttagtaagatctttgctacacacaatgtgatgctggcagtggcaggggcagtaatctttatttcgtcatttttgaaacatagaagccgtaacggaagcaagtgaaatgctcagtcttagacgactgcgtcgtgctatgaccggactttttcttgaaaggggatgacagcatgggaggcaatggctccacatgtaaacccgacactgaaagacaaggcactctctccacagcagccccaacaactagccctgcaccctgtctctctaaccaccacaacaaaaaacatttaatccttgccttttgtgctggggttctactgacactgctgctgatagcctttatcttcctcatcataaagagctacagaaaatatcactccaagccccaggccccagatcctcactcagatcctccagccaagctttcatccatcccaggggaatcacttacctatgccagcacaactttcaaactctcagaagaaaagagcaatcacttggctgagaaccattctgcagactttgaccccattgtctatgctcaaattaaagtaacaaactaactcagcttttccaatgaggcttgaatccatttcctctcatctcagccctatcttcacacatcactttcacttttttacaaattttggaccaccacctgtgtgaaactgcagtcggagttgtttagatgtgatctggcaatgctatccagcatctttggagaccaatggtcagtcttttcctggccagaggaaagattgatggccctcccacttgaactgacagcctgtgagccccttgggggcatagactgccttccttggacccttccaaagtgtgtggtacagagctcagtgcacagagtattcacccagcatcatgaatcaacttgggaggagtcaaccaaatgaa

SEQ ID NO: 117857 - DNA, 2624 bp, Homo sapiens
  Payload ID: 3034
  Gene Symbol: C1orf167
  Gene Name: chromosome 1 open reading frame 167
  ENST ID: ENST00000312793
  CDS Start-End: 1-2485
ggagagggagactctgcggaaggccaccagggccacacagaggacagggagcttcccccaggcctggcactctactgctgcaggtgtagcctgggtggccccactgagcccccagcaccagagagcttggctgtgcaggtgcttcggggcgtggcagcagttcgtgcaaagagggtcccggtaccgagaccacctggctgaccgccggacggggaccctgaggaaatgcctggaacagtgggtgcggatgaagcagctccgggaatcagatggggcaaaggtgacccagctgtccctctgccggcagaaagcaggacgtgaggctgtctacaccgcaggccctggagcctgtggcctgggtgcagtgggccaggcccaggggcagcaggagcaaggccggggctccctgcaggatgcctgctggacactggccctctgctgggcgctgctgctgtggaagatgcggcttttccagcgccagtgggccaactccttcttccagggcctgcagcagcggatgctgcagcgcagcctgagatggtggcacttgagggcactgggcccagatgccacatcaagctgcaccaagaccccctcggctctggagccactgagcagcagcacactccaagactctctggagaaggttcccagggcccccaccctcccggacactctccaggggagccttctgtgggcagctgggcagcggcagcaggggcagtgccttctgctctggcaggcacgggcccagcagttccagggcacagccaggtggtaccagcatacccgccagaggcgcatcttcctcagctggagccgctgggcaacagcccaatgggcctggagagagctggcttcccaccgggcctgggatcggacctgcagggctgtgctgggcctgtggcgtcagcggctgctgcagtcacggctggtggagtggtgggcccaggagcggggctggcggctggcacgagatgccctatgccactggcactcctgttggcaggggcagcagttcctgcatgaaaagtgccagacatgggtgcaggtccacctccagggcctgcagaaggtggtgttccggagctggcagcaggcagcagctcatcagagatgcacagtgacccggccagagcagctgctactgcagagctacttccaggcctggtgtgaggttgtaagagacacgggggtgctccgggcccagcatcaagcctttcaggatggcctgaggagaagagcactgggggccgtgtttgccacatggcgggaagcccaggaagtggcagccggggcacaggagcagcgtgtggcccaggcctcccttgcccgctggagaagctgcgggcagcaaggccaggaagatgggcagcagaagaaggcccgggccccacaggccttcccagcatggccagtggccccgggcatgcaccatgaggcccagcagcaggcaggagagagcgctggggcccaggcagcccagtgctggacttggtgctgggctctgtgggtgcatgagtcctgtcggggccaggtcagccgagcccatgcttcctggaagccgcgagcctgggtcctagaggcctcggtgcagtcggcggtgcgcggcggtgtccagcgagccatcctcacccagctccggccggctgagctcaggcgcttcctgcggacagtgcagctcagggtgcggctgggactgccaggggccggcaagacccgcagctgctggacacaggccacagagctggtgcctcccgcgccatcactgcagtgcagcctgggtggacggaggaagccaaggggaacggcctgggctcagaggtgcagggaacattccctctgccctgccttccagctctggccacagtggcctggacagagtagctgggtcccaggcctgcccctgtggacgagggaccagggaccaagagcgcactccagccctgagcccagagcctgcaaagcccaaagcaaggcccataaacggaggctacggatcctggaaaagcaggcccaggcccatggctctgccctccttctggccctgaagggtcacgatgctcttggccatcaggaggaagtacctgcagcgccggtgcctcgaggcactgcttcacgggctgcggggttcccagcaggccaggtgcctggcagtggcatggcagcactgggtggatgcccaaggggcagagcagctggtgcggaccctgctcagggagtggcacctgagatgggcctggcagacgtggtggcagcggatcctgcgactgcgagtggctcagcagttacagcagcaggaagatgggcctttaagaagtggcaccaacgcctggcagccaggagcccaaggagaggagctgccagtagcccaagaccctggagcaagccaggccccaagggccccgagagtggacaggaagccgccagagcaccgcggggttgggggcttggggcagagcatggggcccagctgcagctgtgacttgttctcatagaataaaaaacagaactgaacttagccttcccagggaaggaaccatgccccacacatccagggagtgatgacagaggggacagcttgaagagctctgaaggacaataaaacccactcctcagtccta

SEQ ID NO: 117858 - DNA, 1881 bp, Homo sapiens
  Payload ID: 3034
  Gene Symbol: C1orf167
  Gene Name: chromosome 1 open reading frame 167
  ENST ID: ENST00000444493
  CDS Start-End: 1-1849
cagggcccccaccctcccggacactctccaggggagccttctgtgggcagctgggcagcggcagcaggggcagtgccttctgctctggcaggcacgggcccagcagttccagggcacagccaggtggtaccagcatacccgccagaggcgcatcttcctcagctggagccgctgggcaacagcccaatgggcctggagagagctggcttcccaccgggcctgggatcggacctgcagggctgtgctgggcctgtggcgtcagcggctgctgcagtcacggctggtggagtggtgggcccaggagcggggctggcggctggcacgagatgccctatgccactggcactcctgttggcaggggcagcagttcctgcatgaaaagtgccagacatgggtgcaggtccacctccagggcctgcagaaggtggtgttccggagctggcagcaggcagcagctcatcagagatgcacagtgacccggccagagcagctgctactgcagagctacttccaggcctggtgtgaggttgtaagagacacgggggtgctccgggcccagcatcaagcctttcaggatggcctgaggagaagagcactgggggccgtgtttgccacatggcgggaagcccaggaagtggcagccggggcacaggagcagcgtgtggcccaggcctcccttgcccgctggagaagctgcgggcagcaaggccaggaagatgggcagcagaagaaggcccgggccccacaggccttcccagcatggccagtggccccgggcatgcaccatgaggcccagcagcaggcaggagagagcgctggggcccaggcagcccagtgctggacttggtgctgggctctgtgggtgcatgagtcctgtcggggccaggtcagccgagcccatgcttcctggaagccgcgagcctgggtcctagaggcctcggtgcagtcggcggtgcgcggcggtgtccagcgagccatcctcacccagctccggccggctgagctcaggcgcttcctgcggacagtgcagctcagggtgcggctgggactgccaggggccggcaagacccgcagctgctggacacaggccacagagctggtgcctcccgcgccatcactgcagtgcagcctgggtggacggaggaagccaaggggaacggcctgggctcagaggtgcagggaacattccctctgccctgccttccagctctggccacagtggcctggacagagtagctgggtcccaggcctgcccctgtggacgagggaccagggaccaagagcgcactccagccctgagcccagagcctgcaaagcccaaagcaaggcccataaacggaggctacgtgctcgttcctgcaggatcctggaaaagcaggcccaggcccatggctctgccctccttctggccctgaagggtcacgatgctcttggccatcaggaggaagtacctgcagcgccggtgcctcgaggcactgcttcacgggctgcggggttcccagcaggccaggtgcctggcagtggcatggcagcactgggtggatgcccaaggggcagagcagctggtgcggaccctgctcagggagtggcacctgagatgggcctggcagacgtggtggcagcggatcctgcgactgcgagtggctcagcagttacagcagcaggaagatgggcctttaagaagtggcaccaacgcctggcagccaggagcccaaggagaggagctgccagtagcccaagaccctggagcaagccaggccccaagggccccgagagtggacaggaagccgccagagcaccgcggggttgggggcttggggcagagcatggggcccagctgcagctgtgacttgttctcatagaataaaaaacagaactgaa

SEQ ID NO: 117859 - DNA, 1617 bp, Homo sapiens
  Payload ID: 3034
  Gene Symbol: C1orf167
  Gene Name: chromosome 1 open reading frame 167
  ENST ID: ENST00000449278
  CDS Start-End: 1-1598
gagccgctgggcaacagcccaatgggcctggagagagctggcttcccaccgggcctgggatcggacctgcagggctgtgctgggcctgtggcgtcagcggctgctgcagtcacggctggtggagtggtgggcccaggagcggggctggcggctggcacgagatgccctatgccactggcactcctgttggcaggcagttcctgcatgaaaagtgccagacatgggtgcaggtccacctccagggcctgcagaaggtggtgttccggagctggcagcaggcagcagctcatcagagatgcacagtgacccggccagagcagctgctactgcagagctacttccaggcctggtgtgaggttgtaagagacacgggggtgctccgggcccagcatcaagcctttcaggatggcctgaggagaagagcactgggggccgtgtttgccacatggcgggaagcccaggaagtggcagccggggcacaggagcagcgtgtggcccaggcctcccttgcccgctggagaagctgcgggcagcaaggccaggaagatgggcagcagaagaaggcccgggccccacaggccttcccagcatggccagtggccccgggcatgcaccatgaggcccagcagcaggcaggagagagcgctggggcccaggcagcccagtgctggacttggtgctgggctctgtgggtgcatgagtcctgtcggggccaggtcagccgagcccatgcttcctggaagccgcgagcctgggtcctagaggcctcggtgcagtcggcggtgcgcggcggtgtccagcgagccatcctcacccagctccggccggctgagctcaggcgcttcctgcggacagtgcagctcagggtgcggctgggactgccaggggccggcaagacccgcagctgctggacacaggccacagagctggtgcctcccgcgccatcactgcagtgcagcctgggtggacggaggaagccaaggggaacggcctgggctcagaggtgcagggaacattccctctgccctgccttccagctctggccacagtggcctggacagagtagctgggtcccaggcctgcccctgtggacgagggaccagggaccaagagcgcactccagccctgagcccagagcctgcaaagcccaaagcaaggcccataaacggaggctacggaggaagtacctgcagcgccggtgcctcgaggcactgcttcacgggctgcggggttcccagcaggccaggtgcctggcagtggcatggcagcactgggtggatgcccaaggggcagagcagctggtgcggaccctgctcagggagtggcacctgagatgggcctggcagacgtggtggcagcggatcctgcgactgcgagtggctcagcagttacagcagcaggaagatgggcctttaagaagtggcaccaacgcctggcagccaggagcccaaggagaggagctgccagtagcccaagaccctggagcaagccaggccccaagggccccgagagtggacaggaagccgccagagcaccgcggggttgggggcttggggcagagcatggggcccagctgcagctgtgacttgttctcatagaataaaaaacagaactgaa

SEQ ID NO: 117860 - DNA, 4545 bp, Homo sapiens
  Payload ID: 3034
  Gene Symbol: C1orf167
  Gene Name: chromosome 1 open reading frame 167
  Uniprot ID: Q5SNV9
  ENST ID: ENST00000433342
  CDS Start-End: 1-4407
atgacccggatgtcctgcccctggggttcctaccagtgggagccgggggcatgtcctgcagccccaagaggcataggtggtggggacatggctgggggtatcccagatgtgcgggggctccaggaggcagctctaggtgcgggaaggagccaagaggaggcacgcctggtggaggaagcccagaccccagtgatgctgccacaggattcggggcagagggtggaggaggttcccggggacctgatggccaagagaatgtcgctcatcttgcacgtgcaaaagttgccctgggaccacgtgccttgcctgcggaggacccggcaaaacctgtaccaggacgtcggtggccacgcccacggctcagggctgggcggggccaagcgcggggcagcacgctctgctctccgacgtcccctcccgcccgcgacctgccgacctgcggggatcgttagcggtcccagcccccgtctagattcaaatccgactggggcccatctgattaaacagaccaggccactcactgtggagtggaccaaggatactcctgtccctgagcccatggagctaaggtctgatgccagccacaaggagaatgtgtccccaaagcctgcagcgctcccgaagccaggcaagaggcttaagcaacgaagattccggaggagcctgggcatcggcctgagtggtagacatgaccagtgggtgcccgggtgccaggtggagaggggagggcctgctgccacaccctccccaggggcagtgctagaccaggagccctgccgagtccagaccaacctggccagccctggtccccgcctgggcctagctctgaaggacacgactggccaactggtcaattcaagcttctggcaacagagcaacctgcagtccctggccaggaggcgccaagggaaggcccgagagtttgccatccagcagagcaacctgagcatcaacgagaccagcagcccccacctctgcccagagcctgggggaagctctgggccccacaagcttccctggggtcctctcctatcccaagagccactggctcgcccatcttcctgcctgaggcagtccgggctgccggccccaggcacccctagcggggacttcaggcccactgaagcctttgcccctctcgatgggcatacacagccaggcctcagatcctggggtggtctggggagctggaggtccaggctggtgggggaacctctcaccctggaggacctggctgtccccagtcagaaccagactcaggccccatcccgtgctgccgtccaccagctgctggcttctgtacattgcctggcgcaggaggcagcccgactcaggtgccaggctccccaggaaccccccgcctggggagtctcacccaagcagaaaggagaggagggggccccgagggagcgggtccacagggaggaggagaggacagctttccatctgtcagacacagtcccagcgagcagtgcgtcgaagaacaaggcacaaaacatcacagccccagagtctgaggcaatctgctggcagctgttgtccagatgttttcgatcctggaggcacttggtgaagaggcagcgggagccagcggcggcggcagtggcactgggccgctggcagctgttgcgaaagtgccttcaggccttgtggctccgggaggctcagctggaggcagcatgggggcagtacacaaaggttctgctggtccggagcttccgagaggtcagcggtctccaggttgggccagggggccgtgtgaagcagtgtccaggaagtctgagggaggaggagattgctcagcggcttctgtcacatcctaggcagagaacagacagcagacacgagagagtccagatcctgcaggccctgcaactggctgtgttcttcctgtggtgccaacagaagaaacgggccagacaggagagggagactctgcggaaggccaccagggccacacagaggacagggagcttcccccaggcctggcactctactgctgcaggtgtagcctgggtggccccactgagcccccagcaccagagagcttggctgtgcaggtgcttcggggcgtggcagcagttcgtgcaaagagggtcccggtaccgagaccacctggctgaccgccggacggggaccctgaggaaatgcctggaacagtgggtgcggatgaagcagctccgggaatcagatggggcaaaggtgacccagctgtccctctgccggcagaaagcaggacgtgaggctgtctacaccgcaggccctggagcctgtggcctgggtgcagtgggccaggcccaggggcagcaggagcaaggccggggctccctgcaggatgcctgctggacactggccctctgctgggcgctgctgctgtggaagatgcggcttttccagcgccagtgggccaactccttcttccagggcctgcagcagcggatgctgcagcgcagcctgagatggtggcacttgagggcactgggcccagatgccacatcaagctgcaccaagaccccctcggctctggagccactgagcagcagcacactccaagactctctggagaaggttcccagggcccccaccctcccggacactctccaggggagccttctgtgggcagctgggcagcggcagcaggggcagtgccttctgctctggcaggcacgggcccagcagttccagggcacagccaggtggtaccagcatacccgccagaggcgcatcttcctcagctggagccgctgggcaacagcccaatgggcctggagagagctggcttcccaccgggcctgggatcggacctgcagggctgtgctgggcctgtggcgtcagcggctgctgcagtcacggctggtggagtggtgggcccaggagcggggctggcggctggcacgagatgccctatgccactggcactcctgttggcaggggcagcagttcctgcatgaaaagtgccagacatgggtgcaggtccacctccagggcctgcagaaggtggtgttccggagctggcagcaggcagcagctcatcagagatgcacagtgacccggccagagcagctgctactgcagagctacttccaggcctggtgtgaggttgtaagagacacgggggtgctccgggcccagcatcaagcctttcaggatggcctgaggagaagagcactgggggccgtgtttgccacatggcgggaagcccaggaagtggcagccggggcacaggagcagcgtgtggcccaggcctcccttgcccgctggagaagctgcgggcagcaaggccaggaagatgggcagcagaagaaggcccgggccccacaggccttcccagcatggccagtggccccgggcatgcaccatgaggcccagcagcaggcaggagagagcgctggggcccaggcagcccagtgctggacttggtgctgggctctgtgggtgcatgagtcctgtcggggccaggtcagccgagcccatgcttcctggaagccgcgagcctgggtcctagaggcctcggtgcagtcggcggtgcgcggcggtgtccagcgagccatcctcacccagctccggccggctgagctcaggcgcttcctgcggacagtgcagctcagggtgcggctgggactgccaggggccggcaagacccgcagctgctggacacaggccacagagctggtgcctcccgcgccatcactgcagtgcagcctgggtggacggaggaagccaaggggaacggcctgggctcagaggtgcagggaacattccctctgccctgccttccagctctggccacagtggcctggacagagtagctgggtcccaggcctgcccctgtggacgagggaccagggaccaagagcgcactccagccctgagcccagagcctgcaaagcccaaagcaaggcccataaacggaggctacggatcctggaaaagcaggcccaggcccatggctctgccctccttctggccctgaagggtcacgatgctcttggccatcaggaggaagtacctgcagcgccggtgcctcgaggcactgcttcacgggctgcggggttcccagcaggccaggtgcctggcagtggcatggcagcactgggtggatgcccaaggggcagagcagctggtgcggaccctgctcagggagtggcacctgagatgggcctggcagacgtggtggcagcggatcctgcgactgcgagtggctcagcagttacagcagcaggaagatgggcctttaagaagtggcaccaacgcctggcagccaggagcccaaggagaggagctgccagtagcccaagaccctggagcaagccaggccccaagggccccgagagtggacaggaagccgccagagcaccgcggggttgggggcttggggcagagcatggggcccagctgcagctgtgacttgttctcatagaataaaaaacagaactgaacttagccttcccagggaaggaaccatgccccacacatccagggagtgatgacagaggggacagcttgaagagctctgaaggacaataaaacccactcctcagtcct

SEQ ID NO: 117861 - DNA, 3135 bp, Homo sapiens
  Payload ID: 3035
  Gene Symbol: C1orf168
  Gene Name: chromosome 1 open reading frame 168
  Uniprot ID: Q5VWT5
  ENST ID: ENST00000343433
  CDS Start-End: 82-2268
agaggaaagcggattgttggccccaggacccagctctgagaggctgggcttgtttccctgactctgccttggaggaaagcaatggaaggggaaggggtaagaaacttcaaggaacttcgagccaaatttcaaaatcttgatgctccacctcttccaggacctattaaattcccagcaggtgtttctccaaagggtgacattggaggcacacagtcaactcaaattttggccaatgggaaacccctctcatccaaccacaagcagcgcacaccatactgttccagtagtgagtcccagcctcttcaacctcagaaaataaagttggctcagaagagtgaaattccaaaatgttctaactccccagggcctctgggaaagtctactgtatgttctgcaacaagttcacagaaggcttctctgctgttagaggtgactcaatcaaatgttgagataatcactaaggaaaaagtaatggtggccaatagcttcagaaacaaactctggaactgggagaaggtttcatctcagaaaagtgaaatgtcttcagcccttctccttgccaactatggaagtaaggccatccatctggaagggcaaaaaggcatggggcttactccagaggaacccaggaaaaagctggaaacaaaaggagcccagactcttccttcccagaagcacgtggtggcccccaaaatattacataacgtctctgaagatccctcttttgtaatttctcaacatatcagaaaaagctgggaaaacccacctcctgagaggagcccggcaagcagcccctgccagcccatctatgagtgtgagcttgccagtcaggccccagaaaaacagccagatgtcaggcatcaccaccttcccaaaacaaagccattgccctccatcgactccctgggtcctcctcccccaaagccttcaagacctcccatcgtgaacctccaggcctttcagaggcagccagctgctgttcccaagactcagggggaagtgactgtggaagagggctccctgtctccagagaggcttttcaatgcagaatttgaagaaccacataattacgaggcaacaatttcatatctgagacactctggcaactccattaacctgtgcactgcaaaagaaattgctgatccaacttatgaagttggaattgaagaactccaaaagcctgggaagaattttccctatccagaacctagtgctaaacatgaagataaaaaaatgaaggaaaaacaaccatgtgaattgaaacctaaaaacacagaaaaggaaccatattcaaaccatgttttcaaggtagatgcctgtgaagggacacctgaaaaaattcagatgaccaacgtccacacaggtagaaggaacatgttggctggaaagcaagaggccatgattgacatcatccagacaaatccctgccctgagggcccaaagctggccaggcactcccaaggccactgtgggcatctggaggttttggagtcaactaaagaaactccagacctaggggtctctaagacaagttccatctcggaggagatatatgatgatgtcgagtactccaggaaagaggtaccgaagctgaactactctagctcacttgcctcaagtagtgaagaaaatagagaactgtatgaagatgtctacaaaacaaagaacaactacccaaagatagatttagatggaaaagaagcactcaaaagactgcagcaattcttcaagaaagaaaaggatagatttaaaataaagaaaaccaagtcgaaagaaaacttaagtgcattttccattttgctgcctgatttagaacttaagtctcaggaagttattatttatgatgatgtagacctgagtgaaaaagagtcaaaagatgaagataaactgaaaatgtggaagcccaagtttctgacaccaaaggaaaaaaaagagaaaaacggtgctgaagaatcagaaagtttctctcctagaaatttcttcaaaaccaagaagcaaaacttagaaaagaacagaatgaaaagagaagaaaaactatttagagaaaggtttaagtacgacaaagagattattgtcatcaatacagcagtggcctgttccaataattcaagaaatggaatatttgatttgccaataagtcctggagaagaattggaagtcattgataccaccgaacaaaatctagtgatatgtcgtaattctaaaggcaaatatggatatgtgctcattgaacatctagatttcaagcatcaaagttggtcaccttagaaaaatcaagatcaaatgctatggactgcacaaaggagaactagtcctaagatcctagtcctgcgttacatcagtttcagtttacatgtcaaaattttgagatggtggaatctgtggaaactttcgttctgaacttaaaagagaaaaataaaaacaaatcctcaacatttagatgttggttttactcctaaaaggttatctttcaatgtctatttcagtatctacttcactgtcagttcaagagaatgtgaaacagtatgtgttagcatttgagcacttatttaatgagccatatccaaagttagaaatcatgccttatggcacctagtcagttgtgcagatggttagtttgcttctaatattagtatatgagcatttgtaatttctagatgttgtgcactcaaacttggtataatttaattctgaacagtaaacagtgtaaccaaggtcttttaaatactcaagtttaaggtataatcttaattatggctcagtctttaaaaaagtataaatgtccttttactttatcacaaaaataaactcatatgaatactgttccacatttgtttcttttgggaatagtttgcagaaaaataatttattcctaaattcacccatcattttaagaagtgcccaaatgtatttaacaaaataatatatatgctgtattactttaaaacatctttttgtccaaaataagaacaattgtcattattttgtctatgcccaaataactattcaaataatagcattcatatgtactttcatttatatggaattaaataaaaatttaaaagctgacatctattctgttttttaaatgaggtgcactgcatgtcaataagagaaataaattctacatatgca

SEQ ID NO: 117862 - DNA, 1666 bp, Homo sapiens
  Payload ID: 3036
  Gene Symbol: C1orf174
  Gene Name: chromosome 1 open reading frame 174
  Uniprot ID: Q8IYL3
  ENST ID: ENST00000361605
  CDS Start-End: 100-831
gtcggacgccgccgcggcgcgctctgcagactccgggtcgccgctccgccgggacgcgttggccggggcgcgcggtgcttggctgcggtgctcacactcatgaggagccggaagctcacaggtgcagtgcggtcttcagcgcgcttgaaagcacgaagttgttcggcagccaggttggcctctgcccaggaagttgctggttccacgtctgccaagacagcatgtctgacttcctcatcccacaaagccacagacacgcgaacgtccaagaagttcaaatgtgacaaaggacatcttgtgaagtcagaattacagaagcttgtccctaagaatgacagcgcttctttgccaaaagtgacacctgagaccccttgtgaaaatgagtttgctgaaggcagtgccttgcttccaggcagcgaggctggcgtttctgtgcagcagggggctgcaagtcttcctctcggtggctgcagagttgtgagtgactctcgcttagcaaagactagagatggcctgtccgtgccaaaacacagtgccgggtccggagcagaagaatccaacagcagctccactgtgcagaagcagaatgagccagggctacagacagaggatgtgcagaagccaccacttcagatggacaacagcgtctttctagatgacgacagcaatcagccaatgcccgtgagccggttctttggaaacgttgagctcatgcaggacctcccacctgcgtcttcatcttgtccttcaatgagcagacgagagttcagaaaaatgcatttcagagccaaagatgatgatgatgacgacgacgatgatgcagaaatgtaggggccatacaaaataatgtccttgagtatttagtaccattaacaatttgacaatttagcacattacaagatttatataaaatgtatctccaagagaatgtcttaatcaaacttcagaactgacccatctaagtcaatagtgcaaagcacccaatacctgtggaggatgtactcatgggaactaaaactcaaaccatctttgaggttgcaaagctgctgtactgtgccaatgtcctttctttttttttttttttttttttccttggagacagagtttctctcttgtcgcccaggctggagtgcaatggcgcaatctcggctcactgcaacctccacctcctgggttcaagtgattctcctgcctcagcctcctgagtagctgggattacaggcatacaccaccacacccagctagtttttgtattattagtagacacgggggtttctccacgttggccaggctggtctcaaactcctgacctcgtgatacgcccgcctcagcctcccaaagtgctgggattacaggcgcgagccaccatgcccggccagtgtcctttcttatacacgtacatacatgatgatggcttgagtcagctgcagggcagtgggcttaatgagagggatctttgtaaagacagctcttcacttcagctcagtagctttggtcataggcaagtttgttttccattatcataatttgatgattcttgtgatgaattcaatgctagttcttaaagaactcttttatttctgtatgtggagctaatgtttaccttggaaattttgcaaaatacatgtaagaaagaaataaaatatattttgaaaatattttgaaa

SEQ ID NO: 117863 - DNA, 915 bp, Homo sapiens
  Payload ID: 3037
  Gene Symbol: C1orf185
  Gene Name: chromosome 1 open reading frame 185
  Uniprot ID: Q5T7R7
  ENST ID: ENST00000371759
  CDS Start-End: 1-600
atggcttcacctaaaggtttttttaattacttgacctattttcttgctgctggtgctgtcactttgggaattggtttctttgctttggcatcagctttgtggttcctgatttgcaaacgaagagaaatatttcaaaattccaaatttaaagcaattgatgagagatgcaggcaaagaccatcaatggcgaagattaaatctcattctcagtgtgtttttatttctcgaaattttcatactgggagattccaattacaggaggagcaaagaaaaaaggaagcagcacatataaaagcaattaaagatcattctaaagatgaaccccaacttgcaacaaaaaatatcatttgtgatccctcagagaccagctccacaacaaatcgcagcagtgttacattaagcttatcaacattaccatctgattcttattacagccaaagtatagaagcagctgatgactggttttctgatgattctctagtgaaaaggaactctccaatgccttctctcggggaacctctaatggaaaaagtattttcatacctgtcaaccatttcattagaagagggtactgaaagtgtactgaatgacactttatgaccatcaaaaagatgactacattaagggaaaatgttcatgaagaaacacagaggttgaaatataaaaccttcaacataatactgaatgacttttttcttttgaaaccttgtatacaatcagcttctgagtctcttaacatgtccatgctaatattgctttttttgttctttaccatagagcggctctacttcccttgctggttcttatttctagaaacaaaattaggaagaactagagtgatgtcatgaacattaagcttaacttattgtatctcatccaaagacatattaaataaaatgagtgtatgtcaacaaa

SEQ ID NO: 117864 - DNA, 747 bp, Homo sapiens
  Payload ID: 3037
  Gene Symbol: C1orf185
  Gene Name: chromosome 1 open reading frame 185
  ENST ID: ENST00000467127
  CDS Start-End: 257-673
agtctagctttttgcctgggaagaagaggaaaatatatttagacgaacaaccagaaatctatttctattctctggaagagcttgtataagtttttttaattacttgacctattttcttgctgctggtgctgtcactttgggaattggtttctttgctttggcatcagctttgtggttcctgatttgcaaacgaagagaaatatttcaaaattccaaatttaaagcaattgatgagagatgcaggcaaagaccatcaatggcgaagattaaatctcattctcagtgtgtttttatttctcgaaattttcatactgggagattccaattacaggaggagcaaagaaaaaaggaagcagcacatataaaagcaattaaagatcattctaaagatgaaccccaacttgcaacaaaaaatatcatttgtgatccctcagagaccagctccacaacaaatcgcagcagtgttacattaagcttatcaacattaccatctgattcttattacagccaaagtatagaagcagctgatgactggttttctgatgattctctagtgaaaaggaactctccaatgccttctctcggggaacctctaatggaaaaagtattttcatacctgtcaaccatttcattagaagagggtactgaaagtgtactgaatgacactttatgaccatcaaaaagatgactacattaagggaaaatgttcatgaagaaacacagaggttgaaatataaaaccttcaac

SEQ ID NO: 117865 - DNA, 899 bp, Homo sapiens
  Payload ID: 3037
  Gene Symbol: C1orf185
  Gene Name: chromosome 1 open reading frame 185
  ENST ID: ENST00000612209
  CDS Start-End: 1-588
ataggtttttttaattacttgacctattttcttgctgctggtgctgtcactttgggaattggtttctttgctttggcatcagctttgtggttcctgatttgcaaacgaagagaaatatttcaaaattccaaatttaaagcaattgatgagagatgcaggcaaagaccatcaatggcgaagattaaatctcattctcagtgtgtttttatttctcgaaattttcatactgggagattccaattacaggaggagcaaagaaaaaaggaagcagcacatataaaagcaattaaagatcattctaaagatgaaccccaacttgcaacaaaaaatatcatttgtgatccctcagagaccagctccacaacaaatcgcagcagtgttacattaagcttatcaacattaccatctgattcttattacagccaaagtatagaagcagctgatgactggttttctgatgattctctagtgaaaaggaactctccaatgccttctctcggggaacctctaatggaaaaagtattttcatacctgtcaaccatttcattagaagagggtactgaaagtgtactgaatgacactttatgaccatcaaaaagatgactacattaagggaaaatgttcatgaagaaacacagaggttgaaatataaaaccttcaacataatactgaatgacttttttcttttgaaaccttgtatacaatcagcttctgagtctcttaacatgtccatgctaatattgctttttttgttctttaccatagagcggctctacttcccttgctggttcttatttctagaaacaaaattaggaagaactagagtgatgtcatgaacattaagcttaacttattgtatctcatccaaagacatattaaataaaatgagtgtatgtcaa

SEQ ID NO: 117866 - DNA, 1665 bp, Homo sapiens
  Payload ID: 3038
  Gene Symbol: C1orf186
  Gene Name: chromosome 1 open reading frame 186
  Uniprot ID: Q6ZWK4
  ENST ID: ENST00000331555
  CDS Start-End: 640-1158
attgtatagaagaacattgtgaaactccctgccctgttctgtttctctctgaccaccggtgcatgcagcccctgtcacataccgcctgcttgctcaaatcaatcatgaccctttcatgtgaaatctttagtattgtgagcccttaaaagggacggaaattgtgcattcggggagctcggattttaaggcagtagcctgctgatgctcccagctgaataaagcccttccttctacaatttggtgtctgaggggttttgtctgcggctcgtcctgctacatttcttggttccctgaccaggaaacgaggtaactgatggacagccgaggcagccccttaggcggcttaggcctcccctgtggagcatccctgaggcggactccggccagcccgagtgacgcgatccaaagagcactcccgggtaggaaattgccccggtggaatgcctcaccagagcagcgtgtagcagttccctgtggaggattaacacagtggctgaacaccgggaaggaactggcacttggagtccggacatctgaaacttgatctccagcaccctgccggtggcactactgagagacgaggtgccagggtggttcctgaaagtgcctgagccccaacttatcagcaaggagctcatcatgctgacagaagtcatggaggtctggcatggcttagtgatcgcggtggtgtccctcttcctgcaggcctgcttcctcaccgccatcaactacctgctcagcaggcacatggcccacaagagtgaacagatactgaaagcggccagtctccaggttcccaggcccagccctggccaccatcatccacctgctgtcaaagagatgaaggagactcagacagagagagacatcccaatgtctgattccctttacaggcatgacagcgacacaccctcagatagcttggatagctcctgcagttcgcctcctgcctgccaggccacagaggatgtggattacacacaagtcgtcttttctgaccctggagaactaaaaaatgactccccgctggactatgagaacataaaggaaatcacagattatgtcaatgtcaatccagaaagacacaagcccagtttctggtattttgtcaaccctgctctgtctgagccagcggaatatgatcaagtggccatgtgaattccaaatatttttaatggggtccagttctctatggattcttacatttaatttgtagggaaatgccatttttcccccttaaacaaggcatggggctcacaagtctatggagacaggccaaaaagaatgtggagaagaaaactgataaatacacagaggtcctcaagacccatggactcctggtctgtacccaaaaaagctgttcgttcctcaaaaacaaaaacaaggcttggctgggaaaacaggccaatgccccggcaagaaaggttgagatcagatgttaggaagaactttcaggtaaagtatgagaactatggagtccatcagcagagatagtagtgaagtctctccccagggaaaattttaaaaaggttgaatcagctgttgtagagttctatttggcaatctcatggttaaatgacttccctttgagctctttaattattggcaataaacaacttctttaaaagttttaaataaaatagcaaccaccaccagttcctcttt

SEQ ID NO: 117867 - DNA, 1145 bp, Homo sapiens
  Payload ID: 3038
  Gene Symbol: C1orf186
  Gene Name: chromosome 1 open reading frame 186
  Uniprot ID: Q6ZWK4
  ENST ID: ENST00000582070
  CDS Start-End: 131-649
cctggagtcctgaccagctccttacctcttgcagatctccagcaccctgccggtggcactactgagagacgaggtgccagggtggttcctgaaagtgcctgagccccaacttatcagcaaggagctcatcatgctgacagaagtcatggaggtctggcatggcttagtgatcgcggtggtgtccctcttcctgcaggcctgcttcctcaccgccatcaactacctgctcagcaggcacatggcccacaagagtgaacagatactgaaagcggccagtctccaggttcccaggcccagccctggccaccatcatccacctgctgtcaaagagatgaaggagactcagacagagagagacatcccaatgtctgattccctttacaggcatgacagcgacacaccctcagatagcttggatagctcctgcagttcgcctcctgcctgccaggccacagaggatgtggattacacacaagtcgtcttttctgaccctggagaactaaaaaatgactccccgctggactatgagaacataaaggaaatcacagattatgtcaatgtcaatccagaaagacacaagcccagtttctggtattttgtcaaccctgctctgtctgagccagcggaatatgatcaagtggccatgtgaattccaaatatttttaatggggtccagttctctatggattcttacatttaatttgtagggaaatgccatttttcccccttaaacaaggcatggggctcacaagtctatggagacaggccaaaaagaatgtggagaagaaaactgataaatacacagaggtcctcaagacccatggactcctggtctgtacccaaaaaagctgttcgttcctcaaaaacaaaaacaaggcttggctgggaaaacaggccaatgccccggcaagaaaggttgagatcagatgttaggaagaactttcaggtaaagtatgagaactatggagtccatcagcagagatagtagtgaagtctctccccagggaaaattttaaaaaggttgaatcagctgttgtagagttctatttggcaatctcatggttaaatgacttccctttgagctctttaattattggcaataaacaacttctttaaaagttttaaataaaatagcaaccaccacc

SEQ ID NO: 117868 - DNA, 614 bp, Homo sapiens
  Payload ID: 3038
  Gene Symbol: C1orf186
  Gene Name: chromosome 1 open reading frame 186
  ENST ID: ENST00000603378
  CDS Start-End: 185-559
taggggctggagaagggtcggggagatatttccgttaggacatcgctgaaacacagactgggatcaaactgtgctcatagtcctaaggatctccagcaccctgccggtggcactactgagagacgaggtgccagggtggttcctgaaagtgcctgagccccaacttatcagcaaggagctcatcatgctgacagaagtcatggaggtctggcatggcttagtgatcgcggtggtgtccctcttcctgcaggcctgcttcctcaccgccatcaactacctgctcagcaggcacatggatgacagcgacacaccctcagatagcttggatagctcctgcagttcgcctcctgcctgccaggccacagaggatgtggattacacacaagtcgtcttttctgaccctggagaactaaaaaatgactccccgctggactatgagaacataaaggaaatcacagattatgtcaatgtcaatccagaaagacacaagcccagtttctggtattttgtcaaccctgctctgtctgagccagcggaatatgatcaagtggccatgtgaattccaaatatttttaatggggtccagttctctatggattcttacatttaatttg

SEQ ID NO: 117869 - DNA, 727 bp, Homo sapiens
  Payload ID: 3038
  Gene Symbol: C1orf186
  Gene Name: chromosome 1 open reading frame 186
  Uniprot ID: Q6ZWK4
  ENST ID: ENST00000603488
  CDS Start-End: 177-695
ggagaagggtcggggagatatttccgttaggacatcgctgaaacacagactgggatcaaactgtgctcatagtcctaaggatctccagcaccctgccggtggcactactgagagacgaggtgccagggtggttcctgaaagtgcctgagccccaacttatcagcaaggagctcatcatgctgacagaagtcatggaggtctggcatggcttagtgatcgcggtggtgtccctcttcctgcaggcctgcttcctcaccgccatcaactacctgctcagcaggcacatggcccacaagagtgaacagatactgaaagcggccagtctccaggttcccaggcccagccctggccaccatcatccacctgctgtcaaagagatgaaggagactcagacagagagagacatcccaatgtctgattccctttacaggcatgacagcgacacaccctcagatagcttggatagctcctgcagttcgcctcctgcctgccaggccacagaggatgtggattacacacaagtcgtcttttctgaccctggagaactaaaaaatgactccccgctggactatgagaacataaaggaaatcacagattatgtcaatgtcaatccagaaagacacaagcccagtttctggtattttgtcaaccctgctctgtctgagccagcggaatatgatcaagtggccatgtgaattccaaatatttttaatggggtccagttctc

SEQ ID NO: 117870 - DNA, 387 bp, Homo sapiens
  Payload ID: 3039
  Gene Symbol: C1orf189
  Gene Name: chromosome 1 open reading frame 189
  Uniprot ID: Q5VU69
  ENST ID: ENST00000368525
  CDS Start-End: 27-332
agactgtatcaagcaaatctatagacatgtctgtggaaaagatgacaaaagtagaagagagttttcaaaaggccatgggacttaagaagacggtcgacaggtggcgaaattcacatactcactgtctgtggcaaatggcattgggccagagaagaaacccgtatgccaccctaaggatgcaggacaccatggtacaggaattggcactggccaaaaagcaactactaatggtccgtcaagctgccctgcaccagctgtttgaaaaggagcatcagcagtaccagcaggaactaaatcagatgggcaaagctttttatgtagagagattctgatggcatccaaaacactgctcttccattctcaacatgcctgctaacctagccttct

SEQ ID NO: 117871 - DNA, 534 bp, Homo sapiens
  Payload ID: 3040
  Gene Symbol: C1orf194
  Gene Name: chromosome 1 open reading frame 194
  ENST ID: ENST00000369945
  CDS Start-End: 69-461
atgccagtgaggctgtgctgcggctgagcgggcctcccatccctcttaaaagagttaggcatttagccatgcctcccacccgggaccctttccagcagcctacattagataacgatgattcctacttaggagaactgcgggcttccaagataccaaaggatgacctggacttccgcttagcagccttgtacaaccaccacactgggacattcaagaacaaaagtgagatactgttaaaccagaaaaccacgcaggatacctatagaaccaagatccaattccctggagaatttttaacccctcccactccacccatcactttcctggctaacatcagacactggatcaaccctaaaaaggagtccatccacagcatccaaggatccatagtgtcccctcacactgcagccaccaatggaggctactcccgaaagaaagatggtggcttcttctccacctagtgttgacagatccctgaactaattatagtgaaacatactgcggcccacttccattaaatagatttgtgcaaga

SEQ ID NO: 117872 - DNA, 663 bp, Homo sapiens
  Payload ID: 3040
  Gene Symbol: C1orf194
  Gene Name: chromosome 1 open reading frame 194
  Uniprot ID: Q5T5A4
  ENST ID: ENST00000369948
  CDS Start-End: 77-586
gggatcttatgccagtgaggctgtgctgcggctgagcgggcctcccatccctcttaaaagagttaggcatttagccatgcctcccacccgggaccctttccagcagcctacattagataacgatgattcctacttaggagaactgcgggcttccaagaaattgccatataagaacccaacacaccttgctcagcagcaggaaccctggagtcggctcaactcaacccccacaattacttccatgaggcgggatgcctactattttgatcccgagataccaaaggatgacctggacttccgcttagcagccttgtacaaccaccacactgggacattcaagaacaaaagtgagatactgttaaaccagaaaaccacgcaggatacctatagaaccaagatccaattccctggagaatttttaacccctcccactccacccatcactttcctggctaacatcagacactggatcaaccctaaaaaggagtccatccacagcatccaaggatccatagtgtcccctcacactgcagccaccaatggaggctactcccgaaagaaagatggtggcttcttctccacctagtgttgacagatccctgaactaattatagtgaaacatactgcggcccacttccattaaatagatttgtgcaagatgaa

SEQ ID NO: 117873 - DNA, 731 bp, Homo sapiens
  Payload ID: 3040
  Gene Symbol: C1orf194
  Gene Name: chromosome 1 open reading frame 194
  Uniprot ID: Q5T5A4
  ENST ID: ENST00000369949
  CDS Start-End: 181-654
gcgcgcccggggtgcgcaaccggcccaacaggcaggcccggggctcgtgtgaagaacacagtggaagcatcctccaagccagccaacaaatttccgttttctactgccctttcgggccaggggttattttatgagcatctccgatgttgcacacgtggcgtgtgaaccgagagaaagaagatggagagatcaccctccagacgtcgtcgcctggaagaggccccaaaattgccatataagaacccaacacaccttgctcagcagcaggaaccctggagtcggctcaactcaacccccacaattacttccatgaggcgggatgcctactattttgatcccgagataccaaaggatgacctggacttccgcttagcagccttgtacaaccaccacactgggacattcaagaacaaaagtgagatactgttaaaccagaaaaccacgcaggatacctatagaaccaagatccaattccctggagaatttttaacccctcccactccacccatcactttcctggctaacatcagacactggatcaaccctaaaaaggagtccatccacagcatccaaggatccatagtgtcccctcacactgcagccaccaatggaggctactcccgaaagaaagatggtggcttcttctccacctagtgttgacagatccctgaactaattatagtgaaacatactgcggcccacttccattaaatagatttgtgcaagatgaa

SEQ ID NO: 117874 - DNA, 485 bp, Homo sapiens
  Payload ID: 3040
  Gene Symbol: C1orf194
  Gene Name: chromosome 1 open reading frame 194
  ENST ID: ENST00000462402
  CDS Start-End: 168-278
gcgcaaccggcccaacaggcaggcccggggctcgtgtgaagaacacagtggaagcatcctccaagccagccaacaaatttccgttttctactgccctttcgggccaggggttattttatgagcatctccgatgttgcacacgtggcgtgtgaaccgagagaaagaagatggagagatcaccctccagacgtcgtcgcctggaagaggccccaaaccaagatccaattccctggagaatttttaacccctcccactccacccatcactttcctggctaacatcagacactggatcaaccctaaaaaggagtccatccacagcatccaaggatccatagtgtcccctcacactgcagccaccaatggaggctactcccgaaagaaagatggtggcttcttctccacctagtgttgacagatccctgaactaattatagtgaaacatactgcggcccacttccattaaatagatttgtgcaagatgaa

SEQ ID NO: 117875 - DNA, 418 bp, Homo sapiens
  Payload ID: 3040
  Gene Symbol: C1orf194
  Gene Name: chromosome 1 open reading frame 194
  ENST ID: ENST00000460065
  CDS Start-End: 69-215
atgccagtgaggctgtgctgcggctgagcgggcctcccatccctcttaaaagagttaggcatttagccatgcctcccacccgggaccctttccagcagcctacattagataacgatgattcctacttaggagaactgcgggcttccaagaaccaagatccaattccctggagaatttttaacccctcccactccacccatcactttcctggctaacatcagacactggatcaaccctaaaaaggagtccatccacagcatccaaggatccatagtgtcccctcacactgcagccaccaatggaggctactcccgaaagaaagatggtggcttcttctccacctagtgttgacagatccctgaactaattatagtgaaacatactgcggcccacttccattaaatagatttgtgcaaga

SEQ ID NO: 117876 - DNA, 3858 bp, Homo sapiens
  Payload ID: 3041
  Gene Symbol: C1orf198
  Gene Name: chromosome 1 open reading frame 198
  Uniprot ID: Q9H425
  ENST ID: ENST00000366663
  CDS Start-End: 142-1125
tgggttggcttggagacccgggtacgcggcggtgcagggcggggttcccggagggggcggggctccgggtggcgcggggcggggcgagggcgggcacagcgaggggcggggcgcgggccgggagcggcgggcaggccgggcatggcgtccatggcggcggcgatcgcggcttcgcgctcggcggtcatgagcgggaaccggcctctggacgaccgggagcgaaagcgcttcacttacttctcgtcgctgagccccatggccaggaagatcatgcaggacaaggagaagatccgcgagaagtacgggcccgagtgggcgcggctgccgcccgcgcagcaggacgagatcatcgaccggtgcctggtggggccgcgcgccccggcgccccgagaccccggggactcggaggagctcacgcgcttccccggcttgcgcgggcccacgggccagaaggtggtgcgcttcggggacgaggatctaacttggcaagatgagcactctgcccctttctcctgggaaacaaagagtcagatggagttcagtatctccgccctatccatccaggagccgagcaacggcaccgccgccagcgagcccagaccactgtccaaagcttcccagggctcccaggccctcaagtcctcccaaggcagcaggtcctccagcctggacgccctgggccccaccaggaaggaggaggaagcgtcattctggaagatcaatgctgagcggtcccgaggggaggggcctgaggccgagttccagtcgctgacccctagccagatcaagtccatggagaagggggaaaaggtcttgcctccctgctaccggcaggaacctgccccgaaggacagggaggccaaggtggaaaggcccagcaccctccgtcaggagcagcgtcctcttcccaacgtgagcaccgaacgtgagagaccccagcctgtccaggccttcagcagtgcactgcacgaggctgccccctcccagctcgaggggaagctgccatctcctgatgtcaggcaggacgatggggaagacaccctgttctcggaacccaagtttgcacaggtcagctcaagtaatgtcgtcttgaagacgggatttgattttctggacaattggtaaaatgtattagaaaaatacaatgaagaaccctaaaatgttttccaaagtggtgtggtggaggaggataaaaagggccaccttttcctatgtattttactggtttcttgacactcttttcttaatcatttggaaactggtcaatattgccagatttttttcttttttggtagaaccagatatatatgctattttcagtgatttgataacagaagttttccatttggaatttttaaggtctgttaataattcaggagatcttgtaaataaaacttctgttcccagctccacccaactttccccctcctcaaaggatgtgtttcaaccatgtcacaaaaatcatataagtgatttccatctccttctccattattccccctcccccctccgctttttaccgtatgggttccttttggtgggtgattgagggtgatgttatcagccatgacatcagcatgctggctgtgaccccggaaagactggcccccagcgacgttctcagccagcgctcgcagctgtccggggcttctctggcagaagccatgtctctcacatcatgtgccagcctccaccctcacgccatttccagggaacagactgcgggtatgtagcagtgtagtctttaacctgctctgatacatattcagagtatggattgttgtttaaaaagagttgcatgtttaaagagttttgtactagcttttcattattttgtatctagattatcaacaatggggctaccactttccttggttttatatccatttcctcttggaagttcttgttgcttatgtgacctgttggttgttccccggactgggcacctacaggagtcagggcagacggcagatgtggctggaggtcagggctcttctgcttagttgtgttagagtcttccagcatgggactgatgggagcagtgggcattctttatcccaagggctagccaggttgcgtcatgacggaccttccccagccctgaccaccaccagaagtggaagagtggagtttgcggtcaactcagcagtgcccatggagacctgcgtggtgtcagagcagcagtatctcttggagctggtgcagacaccaaggctgcccagtggtacaacgtggtccacctcccctagggaagctgctgcactcagaggctgtcctgcccagtggcccctgagccgtgtgagcctgcaggaggcgtctgagcagagcctcaagcccggtatggcgccatctccatgttgccatcactgcgttctcacctgaagccttaatctttgcgacacctgccagtgagcgctcggtttcaataccaaagtgtgtcttcttcttttttttttttttttaaatgcctgtttcataggaccttctgaaatgatttccagaatattttatctggctccaaaataaagcacatagcaactcacctcaacccctcatcatctccaggaaagtttctgccaaagctgtggcatagccaacttttgatttggttcttgccaattgttttatgtccctaaacctcatttggatccttggggtatagttttatctttctgcttcagtgatttactgtaacttttcaaatattggttctttctgtaccatttaagtatagttgatatatgtgaggcaaaaaaaggtttcagcatggtggtgagggaaaaaggagcttagaaatcccagttggcacagcctgggcaagcgccagctcccctcagggctaacggcactgttcacacagggatcctcagaatcagcggccacctgcctccaccttctgcctggagggcatggggctgttgtagaacctatggtagcaaatgtatatgtatgagtttgtattctgtagtgttggtgtagcacagaagaaagacctgtgtcctagagagtaggccaaggtgatctgcctcttctattgggagaaattctaatttctttcccactttctcaacaagcccaatattccctccaagttcttcttggtgctgagggctgtaggaattattgaaagcttctgcctcacttagtatcgtctggggcccagcacccagcaataactctaataatgtttcttaatggtatagcctcctgagattaaatgtaaaatcaaaaattaggaaatcttggagggagtcctcaagttgtattgctttgctgtgcttttggaagaagggacgacctggaggacacaggctcctgtgtgggtcttcatcctgcctgaccggcagatcttcctctacaccttgggcaaagtctatgcgaagatggtttcttagctctccatttgccatgattttcctcccattcatcatgagggagtttctcaaaccaggagtttatatttattttttagaaaatacacacttttcaggagaaacctgagcatgattttggattctccacctccccccagtctctgcacctgggattcagctcaaggattcagtgtcttcatttttacaaaagttcccccaagaaatcagcaaccagcctctgtttcatctgggagcccctcccttggccccctgggtttgggggtgctgccctactgggaacagcgggggtctgtcacccgtctgagccgcacccccctgtgtggatttcaggaagagcctccctttctttgcgtctccctttctttaattaacattttcaaaagtaataaattcttactgacgacttgtaacttagtcatattttatacttgtagcctttaataaagccatttaaaaaatgcta

SEQ ID NO: 117877 - DNA, 3666 bp, Homo sapiens
  Payload ID: 3041
  Gene Symbol: C1orf198
  Gene Name: chromosome 1 open reading frame 198
  ENST ID: ENST00000427697
  CDS Start-End: 602-934
tttggtttgtttgcaaacgtcgaactgccaagagttctgagctccttgggttggggaaaggcacctgggccaccgggtacttcatgcacccacctggccccgaggggcggcgggagctgactttccttgagcaccagatgccccgaaccggtccagccttccaggtcgccctccagcctccgggctgccctgcgcccccggctatctgcagctcaccgcgccaggccccgggcccagcgtcctggacgggcccagagaaagcagagaagtggccacgtggcgctatggcggtcactaccgggaattaaccacggccaccctctcagagcgccgggcgcggactcagggacacgccggctaccacctgagccgggagccgagcaacggcaccgccgccagcgagcccagaccactgtccaaagcttcccagggctcccaggccctcaagtcctcccaaggcagcaggtcctccagcctggacgccctgggccccaccaggaaggaggaggaagcgtcattctggaagatcaatgctgagcggtcccgaggggaggggcctgaggccgagttccagtcgctgacccctagccagatcaagtccatggagaagggggaaaaggtcttgcctccctgctaccggcaggaacctgccccgaaggacagggaggccaaggtggaaaggcccagcaccctccgtcaggagcagcgtcctcttcccaacgtgagcaccgaacgtgagagaccccagcctgtccaggccttcagcagtgcactgcacgaggctgccccctcccagctcgaggggaagctgccatctcctgatgtcaggcaggacgatggggaagacaccctgttctcggaacccaagtttgcacaggtcagctcaagtaatgtcgtcttgaagacgggatttgattttctggacaattggtaaaatgtattagaaaaatacaatgaagaaccctaaaatgttttccaaagtggtgtggtggaggaggataaaaagggccaccttttcctatgtattttactggtttcttgacactcttttcttaatcatttggaaactggtcaatattgccagatttttttcttttttggtagaaccagatatatatgctattttcagtgatttgataacagaagttttccatttggaatttttaaggtctgttaataattcaggagatcttgtaaataaaacttctgttcccagctccacccaactttccccctcctcaaaggatgtgtttcaaccatgtcacaaaaatcatataagtgatttccatctccttctccattattccccctcccccctccgctttttaccgtatgggttccttttggtgggtgattgagggtgatgttatcagccatgacatcagcatgctggctgtgaccccggaaagactggcccccagcgacgttctcagccagcgctcgcagctgtccggggcttctctggcagaagccatgtctctcacatcatgtgccagcctccaccctcacgccatttccagggaacagactgcgggtatgtagcagtgtagtctttaacctgctctgatacatattcagagtatggattgttgtttaaaaagagttgcatgtttaaagagttttgtactagcttttcattattttgtatctagattatcaacaatggggctaccactttccttggttttatatccatttcctcttggaagttcttgttgcttatgtgacctgttggttgttccccggactgggcacctacaggagtcagggcagacggcagatgtggctggaggtcagggctcttctgcttagttgtgttagagtcttccagcatgggactgatgggagcagtgggcattctttatcccaagggctagccaggttgcgtcatgacggaccttccccagccctgaccaccaccagaagtggaagagtggagtttgcggtcaactcagcagtgcccatggagacctgcgtggtgtcagagcagcagtatctcttggagctggtgcagacaccaaggctgcccagtggtacaacgtggtccacctcccctagggaagctgctgcactcagaggctgtcctgcccagtggcccctgagccgtgtgagcctgcaggaggcgtctgagcagagcctcaagcccggtatggcgccatctccatgttgccatcactgcgttctcacctgaagccttaatctttgcgacacctgccagtgagcgctcggtttcaataccaaagtgtgtcttcttcttttttttttttttttaaatgcctgtttcataggaccttctgaaatgatttccagaatattttatctggctccaaaataaagcacatagcaactcacctcaacccctcatcatctccaggaaagtttctgccaaagctgtggcatagccaacttttgatttggttcttgccaattgttttatgtccctaaacctcatttggatccttggggtatagttttatctttctgcttcagtgatttactgtaacttttcaaatattggttctttctgtaccatttaagtatagttgatatatgtgaggcaaaaaaaggtttcagcatggtggtgagggaaaaaggagcttagaaatcccagttggcacagcctgggcaagcgccagctcccctcagggctaacggcactgttcacacagggatcctcagaatcagcggccacctgcctccaccttctgcctggagggcatggggctgttgtagaacctatggtagcaaatgtatatgtatgagtttgtattctgtagtgttggtgtagcacagaagaaagacctgtgtcctagagagtaggccaaggtgatctgcctcttctattgggagaaattctaatttctttcccactttctcaacaagcccaatattccctccaagttcttcttggtgctgagggctgtaggaattattgaaagcttctgcctcacttagtatcgtctggggcccagcacccagcaataactctaataatgtttcttaatggtatagcctcctgagattaaatgtaaaatcaaaaattaggaaatcttggagggagtcctcaagttgtattgctttgctgtgcttttggaagaagggacgacctggaggacacaggctcctgtgtgggtcttcatcctgcctgaccggcagatcttcctctacaccttgggcaaagtctatgcgaagatggtttcttagctctccatttgccatgattttcctcccattcatcatgagggagtttctcaaaccaggagtttatatttattttttagaaaatacacacttttcaggagaaacctgagcatgattttggattctccacctccccccagtctctgcacctgggattcagctcaaggattcagtgtcttcatttttacaaaagttcccccaagaaatcagcaaccagcctctgtttcatctgggagcccctcccttggccccctgggtttgggggtgctgccctactgggaacagcgggggtctgtcacccgtctgagccgcacccccctgtgtggatttcaggaagagcctccctttctttgcgtctccctttctttaattaacattttcaaaagtaataaattcttactgacgacttgtaacttagtcatattttatacttgtagcctttaataaagccatttaaaaaatgct

SEQ ID NO: 117878 - DNA, 3819 bp, Homo sapiens
  Payload ID: 3041
  Gene Symbol: C1orf198
  Gene Name: chromosome 1 open reading frame 198
  Uniprot ID: Q9H425
  ENST ID: ENST00000470540
  CDS Start-End: 217-1086
ttttgtgttcagaactatccaggcaaagaccctggataacagctgaaatgctggtttttgtttttgtttttttattttacgagtggacacaattctcacctgagtccttggccacgtggcgctatggcggtcactaccgggaattaaccacggccaccctctcagagcgccgggcgcggactcagggacacgccggctaccacctgagccggccccatggccaggaagatcatgcaggacaaggagaagatccgcgagaagtacgggcccgagtgggcgcggctgccgcccgcgcagcaggacgagatcatcgaccggtgcctggtggggccgcgcgccccggcgccccgagaccccggggactcggaggagctcacgcgcttccccggcttgcgcgggcccacgggccagaaggtggtgcgcttcggggacgaggatctaacttggcaagatgagcactctgcccctttctcctgggaaacaaagagtcagatggagttcagtatctccgccctatccatccaggagccgagcaacggcaccgccgccagcgagcccagaccactgtccaaagcttcccagggctcccaggccctcaagtcctcccaaggcagcaggtcctccagcctggacgccctgggccccaccaggaaggaggaggaagcgtcattctggaagatcaatgctgagcggtcccgaggggaggggcctgaggccgagttccagtcgctgacccctagccagatcaagtccatggagaagggggaaaaggtcttgcctccctgctaccggcaggaacctgccccgaaggacagggaggccaaggtggaaaggcccagcaccctccgtcaggagcagcgtcctcttcccaacgtgagcaccgaacgtgagagaccccagcctgtccaggccttcagcagtgcactgcacgaggctgccccctcccagctcgaggggaagctgccatctcctgatgtcaggcaggacgatggggaagacaccctgttctcggaacccaagtttgcacaggtcagctcaagtaatgtcgtcttgaagacgggatttgattttctggacaattggtaaaatgtattagaaaaatacaatgaagaaccctaaaatgttttccaaagtggtgtggtggaggaggataaaaagggccaccttttcctatgtattttactggtttcttgacactcttttcttaatcatttggaaactggtcaatattgccagatttttttcttttttggtagaaccagatatatatgctattttcagtgatttgataacagaagttttccatttggaatttttaaggtctgttaataattcaggagatcttgtaaataaaacttctgttcccagctccacccaactttccccctcctcaaaggatgtgtttcaaccatgtcacaaaaatcatataagtgatttccatctccttctccattattccccctcccccctccgctttttaccgtatgggttccttttggtgggtgattgagggtgatgttatcagccatgacatcagcatgctggctgtgaccccggaaagactggcccccagcgacgttctcagccagcgctcgcagctgtccggggcttctctggcagaagccatgtctctcacatcatgtgccagcctccaccctcacgccatttccagggaacagactgcgggtatgtagcagtgtagtctttaacctgctctgatacatattcagagtatggattgttgtttaaaaagagttgcatgtttaaagagttttgtactagcttttcattattttgtatctagattatcaacaatggggctaccactttccttggttttatatccatttcctcttggaagttcttgttgcttatgtgacctgttggttgttccccggactgggcacctacaggagtcagggcagacggcagatgtggctggaggtcagggctcttctgcttagttgtgttagagtcttccagcatgggactgatgggagcagtgggcattctttatcccaagggctagccaggttgcgtcatgacggaccttccccagccctgaccaccaccagaagtggaagagtggagtttgcggtcaactcagcagtgcccatggagacctgcgtggtgtcagagcagcagtatctcttggagctggtgcagacaccaaggctgcccagtggtacaacgtggtccacctcccctagggaagctgctgcactcagaggctgtcctgcccagtggcccctgagccgtgtgagcctgcaggaggcgtctgagcagagcctcaagcccggtatggcgccatctccatgttgccatcactgcgttctcacctgaagccttaatctttgcgacacctgccagtgagcgctcggtttcaataccaaagtgtgtcttcttcttttttttttttttttaaatgcctgtttcataggaccttctgaaatgatttccagaatattttatctggctccaaaataaagcacatagcaactcacctcaacccctcatcatctccaggaaagtttctgccaaagctgtggcatagccaacttttgatttggttcttgccaattgttttatgtccctaaacctcatttggatccttggggtatagttttatctttctgcttcagtgatttactgtaacttttcaaatattggttctttctgtaccatttaagtatagttgatatatgtgaggcaaaaaaaggtttcagcatggtggtgagggaaaaaggagcttagaaatcccagttggcacagcctgggcaagcgccagctcccctcagggctaacggcactgttcacacagggatcctcagaatcagcggccacctgcctccaccttctgcctggagggcatggggctgttgtagaacctatggtagcaaatgtatatgtatgagtttgtattctgtagtgttggtgtagcacagaagaaagacctgtgtcctagagagtaggccaaggtgatctgcctcttctattgggagaaattctaatttctttcccactttctcaacaagcccaatattccctccaagttcttcttggtgctgagggctgtaggaattattgaaagcttctgcctcacttagtatcgtctggggcccagcacccagcaataactctaataatgtttcttaatggtatagcctcctgagattaaatgtaaaatcaaaaattaggaaatcttggagggagtcctcaagttgtattgctttgctgtgcttttggaagaagggacgacctggaggacacaggctcctgtgtgggtcttcatcctgcctgaccggcagatcttcctctacaccttgggcaaagtctatgcgaagatggtttcttagctctccatttgccatgattttcctcccattcatcatgagggagtttctcaaaccaggagtttatatttattttttagaaaatacacacttttcaggagaaacctgagcatgattttggattctccacctccccccagtctctgcacctgggattcagctcaaggattcagtgtcttcatttttacaaaagttcccccaagaaatcagcaaccagcctctgtttcatctgggagcccctcccttggccccctgggtttgggggtgctgccctactgggaacagcgggggtctgtcacccgtctgagccgcacccccctgtgtggatttcaggaagagcctccctttctttgcgtctccctttctttaattaacattttcaaaagtaataaattcttactgacgacttgtaacttagtcatattttatacttgtagcctttaataaagccatttaaaaaatgcta

SEQ ID NO: 117879 - DNA, 675 bp, Homo sapiens
  Payload ID: 3041
  Gene Symbol: C1orf198
  Gene Name: chromosome 1 open reading frame 198
  ENST ID: ENST00000522201
  CDS Start-End: 195-675
ccaggcagccagcggcttggcctgaaatgctggggctttcttaggctcactggaggttgaaaaaagtttcctttgtcaagcagtggccacgtggcgctatggcggtcactaccgggaattaaccacggccaccctctcagagcgccgggcgcggactcagggacacgccggctaccacctgagccgggaagatcatgcaggacaaggagaagatccgcgagaagtacgggcccgagtgggcgcggctgccgcccgcgcagcaggacgagatcatcgaccggtgcctggtggggccgcgcgccccggcgccccgagaccccggggactcggaggagctcacgcgcttccccggcttgcgcgggcccacgggccagaaggtggtgcgcttcggggacgaggatctaacttggcaagatgagcactctgcccctttctcctgggaaacaaagagtcagatggagttcagtatctccgccctatccatccaggagccgagcaacggcaccgccgccagcgagcccagaccactgtccaaagcttcccagggctcccaggccctcaagtcctcccaaggcagcaggtcctccagcctggacgccctgggccccaccaggaaggaggaggaagcgtcattctggaagatcaatgctgagcggtcccgaggggaggggcctg

SEQ ID NO: 117880 - DNA, 1041 bp, Homo sapiens
  Payload ID: 3041
  Gene Symbol: C1orf198
  Gene Name: chromosome 1 open reading frame 198
  Uniprot ID: Q9H425
  ENST ID: ENST00000523410
  CDS Start-End: 217-810
attctgctgagaccatcaagccctcatccactcctactcatctcatctgtctgagtccattggggggcctcaccggcattccctgttgtctgtttggctggggaggggagtgtctggcagcctcagcgggaaagatgagggagcaatctgatcaagacggatctaacttggcaagatgagcactctgcccctttctcctgggaaacaaagagtcagatggagttcagtatctccgccctatccatccaggagccgagcaacggcaccgccgccagcgagcccagaccactgtccaaagcttcccagggctcccaggccctcaagtcctcccaaggcagcaggtcctccagcctggacgccctgggccccaccaggaaggaggaggaagcgtcattctggaagatcaatgctgagcggtcccgaggggaggggcctgaggccgagttccagtcgctgacccctagccagatcaagtccatggagaagggggaaaaggtcttgcctccctgctaccggcaggaacctgccccgaaggacagggaggccaaggtggaaaggcccagcaccctccgtcaggagcagcgtcctcttcccaacgtgagcaccgaacgtgagagaccccagcctgtccaggccttcagcagtgcactgcacgaggctgccccctcccagctcgaggggaagctgccatctcctgatgtcaggcaggacgatggggaagacaccctgttctcggaacccaagtttgcacaggtcagctcaagtaatgtcgtcttgaagacgggatttgattttctggacaattggtaaaatgtattagaaaaatacaatgaagaaccctaaaatgttttccaaagtggtgtggtggaggaggataaaaagggccaccttttcctatgtattttactggtttcttgacactcttttcttaatcatttggaaactggtcaatattgccagatttttttcttttttggtagaaccagatatatatgctattttcagtgatttgataacagaagttttccatttggaattttt

SEQ ID NO: 117881 - DNA, 2501 bp, Homo sapiens
  Payload ID: 3042
  Gene Symbol: C1orf204
  Gene Name: chromosome 1 open reading frame 204
  Uniprot ID: Q5VU13
  ENST ID: ENST00000368102
  CDS Start-End: 111-818
gaaaagcaccttcttctgggcctgcgaaacatcagaaagggattgcaggggcctggagggggctgcctgcagggctctccagatacgcgtggacaagccctgtctggaggatggggatgctggctccgggaccgctgcagggtcgccgacccaggaagggtcacaaaggacaagaggacgccgtggcgcccgggtgcaaggccagcgggcgcggcagccgcgtcacccacctcctggggtacccgacgcagaacgtcagccgctccctgcgccgcaagtacgcgcctcccccctgcggcggccccgaggacgtggccctggcgccctgcaccgccgccgccgcctgcgaagcgggcccctccccggtctacgtcaaggtcaagagcgcggagccggctgactgcgccgaggggccggtgcagtgcaagaacggcctcttggtctccagcccacactgtgaagagccttgtgcccacagctgtgcacatcctgggcttcctccacaccttgtccataaactgcccctcagctaccttcagacccaggatacagacgcagcctccagaagaataaatgctccattagcagctggctggagctggctgaggctctggctggtgactctggcctctggtgtagacttccctcaggtgagtgcatggatgagagctctaccttctcctgactgcccaggcctcaggacaacaggagaacagatgcaaaaactattgctcaaggaaaataaagtgaaaacgaggaaaagcaaaagaagatctggagagggctctcacctgaccacaagcatcctggagcaatgagtttcaggcaggaagactcatcctgagctgagctgcttttcttgaagttgtgcaagaacgtcctgttggctggggcaaattcagtatttcttttcctggccactgtgctggagcgtgaggaaagactctccaccctcactcccagatcctgcaggaggcgtgagagcggatggagatggtgaggatgtctattaatatggtgtttcctgcaaaacggtgcccatctcaaccatgggttgtcaaccatcctcggtgtctacaactgcaatttacctttgagggcccatgaactctgattacctgaaagtccttaggccagaaagagaaacccctgtcccccacctctcactttcacctatttctagaccttttcttacagcaatgccttggccctcaggaagcatcagatctcaaactgcagggtctggggctgaagctgatgctggcatgggtgactcagagttcctctattagttcaaatatgtaatatcttttagagcctaggactcaggctggaggcaattccttggtgccagttggttaatactttatgaatagtggtgggggagggaatgccttggactattaatgtccccatggatctggatcctggagaacttccagtgtcctggatggaatgttctgcttggctcatcttgcccagagaagagccaggatatgagaagatgggagagggaagggggaggtgtgaaacgtgctggtgcttcctgtcctcgtggtgtgatggctgcccaggctgctccttcgaggcaggacaggattcccatgggagatatgaggaccatggtgatttccaggcaccagttatgtcccagagcatcgtgtgcctgtgcagtggggttactgatagtccaggcatcagttcatattgtcctttatggcagatcctgcacaagggggttctctgtctctggacccactctgtcagcatggacatcctttttctttttccctggtaaggacatcagaaagaaagttacccctccagtgtttggagtcttggaatccttggcctgcctgcaggcctctgaatcctcagtgtgttagcccaaggtcaccttaggtaaaggaacatttctcctggtcttccaacaccctggaaagggaggctcttcaagaataggaaattcttcctagtatctaaccttggcctgcaactatgccatacatttaattgtagaaggtatggaaagttaggactgtggtggacccagttaaatcactggacagaagccatgaggcagagccagaaccagcttctggactccctgcatggagctttctactatcccaggttgttgggtcccttctcagtggccaaagatgctattttatgagccttgaggacatgacactaagtgaaaaaagcctggccaaagggccacatagtgtatagttctatttatatgaaatgtccaggaaagacaaaagcatagaggcagaaagcagactagtgctgtgggaggaatgggggatttgggaggtgatggctaaggggttatggggttttgggggaggtaatagaaatgttttaaaattggttgtgaaggtggatgcccaactctgcgaatacactaaaaggcatcgaattgtatactttaaataggtgaattgtatgctatgtgaattatatctcaataaaggtattttttccctgctgtt

SEQ ID NO: 117882 - DNA, 708 bp, Homo sapiens
  Payload ID: 3042
  Gene Symbol: C1orf204
  Gene Name: chromosome 1 open reading frame 204
  Uniprot ID: Q5VU13
  ENST ID: ENST00000621242
  CDS Start-End: 1-708
atggggatgctggctccgggaccgctgcagggtcgccgacccaggaagggtcacaaaggacaagaggacgccgtggcgcccgggtgcaaggccagcgggcgcggcagccgcgtcacccacctcctggggtacccgacgcagaacgtcagccgctccctgcgccgcaagtacgcgcctcccccctgcggcggccccgaggacgtggccctggcgccctgcaccgccgccgccgcctgcgaagcgggcccctccccggtctacgtcaaggtcaagagcgcggagccggctgactgcgccgaggggccggtgcagtgcaagaacggcctcttggtctccagcccacactgtgaagagccttgtgcccacagctgtgcacatcctgggcttcctccacaccttgtccataaactgcccctcagctaccttcagacccaggatacagacgcagcctccagaagaataaatgctccattagcagctggctggagctggctgaggctctggctggtgactctggcctctggtgtagacttccctcaggtgagtgcatggatgagagctctaccttctcctgactgcccaggcctcaggacaacaggagaacagatgcaaaaactattgctcaaggaaaataaagtgaaaacgaggaaaagcaaaagaagatctggagagggctctcacctgaccacaagcatcctggagcaatga

SEQ ID NO: 117883 - DNA, 10265 bp, Homo sapiens
  Payload ID: 3043
  Gene Symbol: C1orf21
  Gene Name: chromosome 1 open reading frame 21
  Uniprot ID: Q9H246
  ENST ID: ENST00000235307
  CDS Start-End: 436-801
cccactcccggggggacgttccgtgccgcggccgccgcggccgctgcttctttcacactttagttgggagctgcgcgccgcgctcagttactggagagctggccgcgcgccgccgcctcccgcacgcttgcacgcgggcccggcttcggggttttgggttcttactccaagcggcggggaggagggggagccccggacacactgtggggaggaggaggaagaagaggaggagggaggaagaaaaaagacgaggaggacaggggcggggggcgggaggcttgccaccttcagcccccccgcgaacgcccaaggtgcacacatcttgaccaactcagcagcaaggtggattttctttgtgtttaaagaaaaaaaatgtccctgtgtctgtagagatgatttgcagttcagcccggctgaagctgaccgaatgagactatgggctgtgcctccgccaagcatgttgccactgttcaaaatgaagaggaagcccagaaagggaaaaactaccagaacggagatgtgtttggcgatgagtataggatcaaaccagtggaagaggtcaaatacatgaaaaatggggcagaagaagagcagaaaatagcagccaggaaccaagaaaacttggaaaaaagtgccagctcaaatgtaagacttaaaactaataaagaggttccgggattagttcatcaacccagagcaaacatgcacatctctgaaagccaacaagaattcttcagaatgctggatgaaaaaattgaaaagggtcgggattactgttcggaagaagaggatatcacatagcaccaattttaccactcaaaccaggagctactactgtgtaaataggttacaccccagttgaaatctttgcaaaggtcggttctattcagcgaacagcactatagcaaaagaagatcgttccatattgtacgccccattaaattacagtgtttcttaatgaacttgcaaaggaatattgctaaaaacaaacaaaaaaaactgttatcgaactttctttgttgctgctagttaaaacttgttgcaacttttcacttctcttgtgtccaggtatgcagcaaaattctgcaatttcaccttaaagatactgttggttttacagatgctctccaacctattttctataagatgaggtagtggtgaactcagataacaaacttctcttctaaactggttctgcttctaagacaagcatctcctgccctctctccttcctccccatctctcgcacgcagtctagagatggactgagccttgcttctcactggcagtgttgagctttggagatgggatggttgctatgccaagccttgtttctctgctcagaagaagtagagaagctattatcaattaaaagcatgctgtgatgtgactcctggaagtgacgtaggagtgagtggcaggttgtttgatttaataggtatcttaatcaagaattaagcttgcaacattggctttgctcagatgcagatggaagtgtgatcacaatcattttgaatccctcttcctcacttttttttctaagaaaataaacattttactgtttttatggatccttgtcttctcccattcatccagctcagtgttttaagatgatcctgggtgcagaagttgagccctcctttgcattgacactgataattagcctatagggctccctacccttccattaagaatctaccaagcattagcaaggctgaaagtggtctaagaggtgaggggacatcctatgactttttaggaaggcctgaaaccaccttgttacctttcattttgttagcaaataaaccatcctattttgtaactctcccccttcaaaatgctacatgagccttgccacttcctttttctcttacttccagcacactagacatagcaaaagtgtttgcctactcaaaaacataatacttttatgctgatgatggtatttggagatgtgaaagccaaaagcccctggcagtggtggggaatgttgactgagtgttcagcagagtttatttttccatactatatgaagagaatgatctcttctcaaagacagaagtgatatttttaacaaatattgtcacaagtaaatagcaatcaaaaggagaaaataacttttgtatttttttaatgtgtttgatagctttgacgagggttctctttgttactttcaggggagggcatcctattaaatgccacgccagcagtccgggtctgggtttgtcccacaaaatcacaggagcactgtatgttcctctcttttggagttgtgactttgaagggcctcaatattagccacactgccgcctgcagaaggtggagagttaagatgttctatgtcaatttgctcttgccgaaaagatgagcctcgattttaaaatctatccacatccaactgatggcaccattgatgtgcaaataatgagattccctatctccttttagacctgggacggcaaaagggaagggaaggaaacttagcagagtgctattgactatagattcacatattagcaacaaaatcccgtaattcttttggccaacagcagctattttggggagcagctgtggctgttacataaatagagatgcagccaaaattttaggccttttatcctgcttctagcagaaaaatgcagggagagtcaagtagtctagggtttcaggttgcctcccctcatatggtttttggccaagtgactaaaacagttttccacaactgtaaacaaactgctaagccccacctcaaacttgttcactggggactttgcttaccgttctgtgggtgaccttttccgggatttcttgttcttatcaagcaagaattaagcacatgctaaacgtcttccatttgacttctctactcggtgtctcagacagtgtcttcccagaaaaccaccaccctctacccaaagatgaaacatgctcatgtcatttttctcatggtcacatttaacagttttgacatgttatacttgcgcatagatccaagcgtttcttgggaacctgacttttgagtgtttaataaagccggaagtggtgttgccctgaaccagcagattttcacctgggttctggctccggtgtttaacactggatacatctttgatgtgcgaaagtgagttcatcttcagacacatttggtacatccagaaatagatccaagaaatggggtggttgagtgggtccgcacgaaatgcttgattatgtcagcaacacccaacactgtctgttttccatttgttggttttaatcataaaattgtcaagtgattcgtgtttgtactttatttttttgtgccttctgaaaggatctaaaacaaaaatattttgcctttttttccccacgtgtatctgaacattaagcagattggctcagacacaatgaaaaggataatccaatgtacgtgctggtgcactctgctagttgttatctctgtagggctcaggaagctggaaggaggaagggagggtaagtggcctggtgagtggaggtagaaaaatgatgagaaatgaactgagagcattaagcagagagggttgataggctggccgtgtccggggtgaaattggaaatccagctgcctagtggccagtgggtggggcaagactgtcaacgagatttacagctggcttacacatgccttatgtcctctgagttgtagagttgtaaaagttcagcagtgtgtgcacagctttcttttggttggcagagattcaggatcatggagtactgctctcataattgaagacgtgtttgttattggcagagaaccttaaaaaaggcctttacctcagcgatgcttcctagccccaggcttgcagagaacacagagtggtgttgtggtctatttagggacaaagaaggtataaagtccagagatgagaaaactgggtcagccctcagaaactgcagcagccacgcacacagaagcctgctggaagacaggtctctctccgtccacagtgcccatcatctgagcctgggctgggatgactcaacttagcaaagacggacccaggaggagtgctggttcttcagtctttgtactggccccatcctctcctcactgtaatgtgaggaagcacctctgtgtcagggctcacctgggcatccaaagcggccacgcccacaatccgacagcccccaggagcaggtccagggatgatgcagcccccttcttggtcccatgtgatgtcatcctgctttgttatcttcttataactttatcctgctataactttatcctcttcccagcctcatccctgtttttctgttagggcaagactcttccataagcctgctaaaaaacagagatgatacctcttacaaactttacctcatagcctgtgaagcaggttggcatgtggattacaagtcctgctttgacactgggcaagaatttaagattgttctatctctactagtcatagaaaagaaacattgttaaacatgttgagttttaaaggaagaaatattttcaaattcttaatccaagaaaatactgagttggaatcttagacttcgggactctgacacgttctttatgaaaggcaaaataattggtatctaaagttctctccttcctgcctcccctaaagaaaaaggatattagattgcacactataattttacataagatctgccttccacacttccctgctggaaggcattctcagagctttatgtcttcgtacctctcagagattggactttttcttgtttaaaaccccaaccaaaaaaaataataaggcatgattggtggggagggaatgtgtatttaggggcataataaaaaggtggctcgaagcaggaactttggcctcatggtgtcatgggtggatgcctggactccagtgtgcctgtgaggggctgggttaggcagtcggctgtcacactcacatgtgcctgcaataaaccttttggaatttcatgaacgaggtctatgaattgccttttgccaatgaatggatgtatttttccaaggggggaatagtatccttgactttggcagtcacctttttgtatgtctctagaaaggggtcaaaaaactatggtaaagatgaggcttatgagtgaatacctctgggacaaaccttaggactcacaagctatgccatgtttttcaggagactcttgtaccttatctggaatctaatcttgggagaagaggaaaaaggagctaatatttgtcatttatactcactctgtgccagatactgtgctaggcattttataattgttttgtgtcatcctcatgataatcctgtgaagtagatctattacccccgtgttctaaataatagatcttaagtgtggaatgcatctatccaacataaatgcccatgttgaaagaaggaaagatgtcattcaagtatttttcaaattctttttattatgactatgcccttcgcaacactgtgaaaacaacccctgggggcatctgccttccagaatctctctctggcttctcaccagcttggtttcctcatggggagtgttttatttggcctcccctatctgagctgcacacacaccaggggaggccactggctaacagtaggacttcagtgccctgaggaaaaggctttgggaatttaggcacacgtttctctccttggaatccttctagcatctggaaaaggaacctggtatttctgcagttagataccagatgcaaccagaacaggctttcgagtgctgtgatttctttcctgggttcccaagtcttgttgtttcatcacaaactgtatctttttaaggttaaaagtcttgaccttcatgggggtctgggacaatccgatctccaagcatggaggaaaggcaatgcctggaccactgacttgcattgaaatcctttcttgtgggctagggtttgatgtctctttttcatctttggactggggatctgcatcttccaggtccatttaagcactgaaactagatgcaaatctctttcgagaccttacatgttttagatagtcatgtaatgacttggatagacatttaaataacttgttccaaggtcggaagagcccaagaactcctcagagttcctcttcttgcttcttgaatcacatcctctaaagatgactcatgtctccatagcaactgttaaaggtgctgcctagacgggacccgctcccacctttacttactttgctcgaaggaaccaaaacaatgtccttgtgtaaaggggctgtcatatccagttttcctttgaaatctggcccccaagatcctgcttctttctaacctggcagctgtcatgtcccttcaagatgatgtgggaaatggcccttacaacttgggaaccacagaaattgctgtatttcgggaagattcacctctaaactgaaggcttcattctgatagtgtctgccctctctaccctgatttcgcccttctttgcttccatttttagcccaaggctttgaatttgattgagtaagacttagaggcagtataaagaacaccataaacttaggcagaggtcccttagggtctctagagttgaaaataattctacagccttagggggacctcttggcattgactctaaagggagagaatagcccctgtgtcctggcatttcagtctagaccttcaaggactgttctctcttgacaggcaagcaagcaaagaaagttttgcaatagatttcaagccagtttttccattcaaaccaagatgcaaattcataaaattactcttttcctggaatagatccaggcagctgccttattagaactttagattcggatctattttcttaacacacatacacatacacgcgcatacatacatatacagagagatacgtggagaaaggaaatttactctatcattgcaatacttcaagaaagagctgtattttgcctttctgtaatctccaagatagtgtctaggaaagtaatagtataactatagggataccgaaacaggaaaaaccagccatcactcttgagaaagtttgagttcgactcacatgggagaatcgaggtctgctactcgtcttgctttgtgccccatctgtgcctggatgccctactacatctgcttgactcgtctgggctgctagccggggtgttgtggctgacatcctttcctggccttacacacataatagacacatccctaacggcgtgtgcctggtccagccacatacagccaccacatgtgtcacacactgtccccctcatccatgtggacttgactggcatttcagcagctccactgggatgctctaaccccagtgtgtggagttggggtcccttcatctaggttgacccaggtatagcatttttagcattgcctttccagtcttgatgattcattcattgaactcatttatttctggagcccctggtacactccaggcactgcgctaattgccagcaaagcacaactgaactaaatccaccttcaaggaacctagccataacgagggaggcagcatggaagtaccctacaggggaaagtcctgagtgctgtgggagcatctcaccgtggcagccagcccagttttggcaatcaggggcttcctgaaagaggtgacatcaaagcccggatgtgtcagaggactgagggagagtgttactaaaggactttcaggctgagaggatagcacaggactcagcccaaaggagggccagtgtggactgtccagggccagcctgcagtacagaggctggagcttggacttgtagagggagagagaagagcaagggacgtggacggggcagtgagccaggctagccacagagggttcccggggctttgctggggattcagggagcataaataagagctttaggtggtgctgtgtcctctgcagcccactgctgaggtcctccagacaggtaaggtgtggtcacaatcagggccggggtttccctgctcactgcggcagtgcaggggtgcttgctgagatgattcatcccagggtgtcctctgtcccttacccagccccaactcctcttcctctgccaaaagctatttgaattcaaggactttaacctgggccggatctggtttggagacaaaggggacagctctgggtcagcatgaccttctttagagccactaaggcgaaaaataccgtttgggaccaggctggcctagacccagggatgagaatgcaccctaaaataaatatacgggaagcagcagagggcttccctgtctagtgtgtgatcctaactaaaggcagctctcttggacagccttcccctggattaggtcacatacacctggtggccaagcctctgctgggtcccaaatacacacccgagtcctgccaaagaaaggagatttttaaaaagcacagacaaattgtatgcaagtggaaaatacccataggcctagacagctgtggagggaagacctcgtgggtacctggaggctgccagagctgggagctctgcaggtatgagtcagggaaggctcagagacaagcagaatctctctatggagacaacttgcagtgccttttaggttttccaaataacctcggagttcagagcattgggtttttttctcccctccccacccccagaaaaataattagaaaaatgtttaggagaaaggaaaagaattagatgcatcagaataccagctataagccaacactgtttccagaaactcaagaaaaagctcaaacagaagacagttcccctgagaggctggaggcgttggtgctgaaggcaattttcctagctaaggggcactgggccttgctgcaccttggggctgaccttttttgcaaaacacccacccctgccctcctggcatactcaacagcaacgccagctttctggacccttggaaagatgttagctcaaacacccactttttccagatcttcctcttgctcttcactgaggaatttgtaattctgaggctagcgatgcccactcggatattccgcaggcccaggtgtttagattagaatttgtccagcggtaatcctgatgctggaaaccaacaaacatttggcctcatattcacccatttaaaaactagagcccctggcaggtccccttagggccatgtgttcatggaatataagccaagtttgccttaggcttgttcatggaatataagccaagtttacctctccccattttctgccctggcccacttcccactcacctccacctcattgccaggaagggatcaaaatgcctccatgccagttgttaatggctacatatttgcccttcccaagggtatttgcattttatttaggaacatggccttatattcaaggaaaatctagcatcaagattacgaggcatcacctctcaatcaggtctgggaggtatcttggggcattgctcttctgaacacctgcagaggcttcctcaggtgagtgtgggagcccggaagggtggcctccctaaccactctgcctgcacatgaattctccaaagcagtgggcccccatctgtttcaattacacatgcctgtcagcaaaaacttcgtgagatgcactctctctgtgtgtttattaatttatttaaagcatatatccctttacttttgtactactatattaggcacattataaaaagtatacagcatagaaactttaaatgaataagacacaaaatattataaacagaggttctggcattttctctctgaactcctgagggggaccttgggcacctcctggtatgtgcacaccccactttgaacacccttgctttagtgcaaatcagcacgcctaaatagcatcccaaaccactgtgcgacatttggcctgcagaataagaaagtcctaaggcagaatccccaggaacttcaaatctgggagatgaggaaagaaaactcactcacaaacaacataaatgtaaataattcaaaaccctaaaggagagctgtccctagacagtagtggctacaggtgctaagcaaaagtcaggtacactggacagagccatgcgattgattgttcatcttccctctctgggtctccagaaaaggacactggcaatatccccagctctctcctgattggaattctttgaaccctcgaagtgctccagcagtactaccccccacgtagcagtgggcccatgtcgcttgaatattatttttgatttgaccaccaagatgtaatgatgattctattccattttgaaaagggtctgagaaagtgtacaggtctaattatatatacatatttatacatgtgtatttttgtttattgttacattttgacattggactttctattaaataatttttaagagttg

SEQ ID NO: 117884 - DNA, 629 bp, Homo sapiens
  Payload ID: 3044
  Gene Symbol: C1orf210
  Gene Name: chromosome 1 open reading frame 210
  Uniprot ID: Q8IVY1
  ENST ID: ENST00000423420
  CDS Start-End: 164-505
acctgtccaggttctgccggccccagccggaagcttactccgcggattgtgcacagttcttgaaggacttgtgccctggggctgcctggcatctgggggcctcctcagagccagggctctttctggttgaggctgagactcactggtgtcatcaggcccctccatgaatgagacaaacaaaacacttgttgggccttcggagctccccacagcgtctgctgtggcccctggcccaggcactggggctcgggcatggcctgtgctggtaggatttgtgctgggggctgtggtcctctcgctcctcattgcacttgctgccaaatgccacctctgccgccgataccatgccagctaccggcaccgcccactgcctgagacaggaaggggaggccgcccacaggtggctgaagatgaggatgatgatggcttcatcgaggacaattacattcagcctgggactggcgagctggggacagagggtagcagggaccacttctccctctgagctcccatctttagaccctccccactccctccatgcctgacagcttaaggacagtggttatgacatgggggccttgaacctcagggacagaggtggctggggcttaaaggttggccagggatgg

SEQ ID NO: 117885 - DNA, 1478 bp, Homo sapiens
  Payload ID: 3044
  Gene Symbol: C1orf210
  Gene Name: chromosome 1 open reading frame 210
  Uniprot ID: Q8IVY1
  ENST ID: ENST00000523677
  CDS Start-End: 235-576
tccgcggattgtgcacagttcttgaaggtgggaacagaagagaaggcccgggggggccggggagggggtacccaggctctgcacagtacccaaggggcttctggcagcaggaaggaagctacacatcagagttggggacttgtgccctggggctgcctggcatctgggggcctcctcagagccagggctctttctggttgaggctgagactcactggtgtcatcaggcccctccatgaatgagacaaacaaaacacttgttgggccttcggagctccccacagcgtctgctgtggcccctggcccaggcactggggctcgggcatggcctgtgctggtaggatttgtgctgggggctgtggtcctctcgctcctcattgcacttgctgccaaatgccacctctgccgccgataccatgccagctaccggcaccgcccactgcctgagacaggaaggggaggccgcccacaggtggctgaagatgaggatgatgatggcttcatcgaggacaattacattcagcctgggactggcgagctggggacagagggtagcagggaccacttctccctctgagctcccatctttagaccctccccactccctccatgcctgacagcttaaggacagtggttatgacatgggggccttgaacctcagggacagaggtggctggggcttaaaggttggccagggatggagtaaaccccacttccctgacactagccagcaaagtgacaatgaccctctcttgctcaataactctcaactgttccctgctgttctcaggataaagccaaacaaaggcttgagtgtggacataaggccctctgtgatcatgcctctcggcctcttggtttcttttcttgccttcccctactttactgtcgaaatcaatgttattctccctcccaccacttcccatgcagtttccccaggcacctttgctcacattggtccccctgcctacgctactcttctcctaaatcctctatgactgtgatggcctgcctacctgccagcatttcaaatatgcccagatggtaacatttgtgcaggtgaaaaccagtgccaagcttcctttttttttttttcctgagacggagtctcactctgttgcccaggctggagtgcaatggcacatcttggctcactgcaacctccgcctcctgggttcaagcgattctcctgcttcagcctcctgagtagctgggattacaggcatccgccaccacgcccagctaatttttatatttttagtagagacgaggtttcgccatattggccaggatggtctcgaactcttgacctcaggtagtccgccttcctcggcctcccaaagtgctgggattacaggcgtgagccaccatgcccggccagcttcttaatgaaatattttcctataaataaagtgggtaatccggttataatatgtttttcacaggaattaataaatctattttcattttgaataaaaa

SEQ ID NO: 117886 - DNA, 3218 bp, Homo sapiens
  Payload ID: 3045
  Gene Symbol: C1orf216
  Gene Name: chromosome 1 open reading frame 216
  Uniprot ID: Q8TAB5
  ENST ID: ENST00000270815
  CDS Start-End: 772-1461
actttagtcaagtaagcacaaaaaggaatatataattccaaattgtgataaatgctatgaagaaaaggaatgtgctctgacataaaggggggaacgaacgtgatctagggagtcagagatctctccgagaagagatctgaaataggagtaagtcgagagggggaagagaatgctagaccgagggaacagtgcgtgccaaagccgcgtggcggaaaggggcgtgtgggagggtaactgcggagagggagggtagaggacgaagccggagaggcagacgaagggcaggacgcacagagccccgcggctaccgccttaggggttgtcccggcggtggggaagccattgaggagtttaacgccggaaggtggtgactaatcagatttcacttgaaaatggcacggtgtctgcagcgaggctaactgatgggaagggcccagcgaatgccaataggagagagcaccggacctggaaggcctgggtcaacgcggccccgcgcgggggcgaagcggttccggcgcaggggcctggcgcggggctccgcggaaaaccgaaccggcccacgtgggaccggtcgctccgccctgctgcgcagacgccgcctgactccgcagtccgggactggggctgggcgcgctgcccgggagccccgcacccacgcctggaccgcggagacgcccaggccgaggaacccccagcccagggactagacaccaccagggccgggcggagccagagccagacgcgccggagcgggcgcctctacgccgctagatgttcgccatccagccagggctagctgaggggggccaattcctgggggacccacctcctggattatgtcagcccgagctccaaccagacagcaactccaacttcatggcaagtgccaaggatgctaacgagaattggcatgggatgccaggcagagtggaacctatcctgaggaggagctcctctgagtcaccctctgacaaccaagccttccaggcccctggatcccctgaggaaggggtgcgcagccccccagagggggcagagattcccggggctgagcctgagaagatgggtggtgctggcacagtctgctcccctctggaggacaacggctatgccagcagttccctgagcattgacagccgtagcagcagtcctgagcctgcctgtgggaccccgcgaggccctggccctcccgatccccttctgccctcagtggcccaggctgtgcagcacttacaagtccaggagcgctacaaagagcaggagaaggaaaagcaccacgtgcacttggtgatgtaccgtcgcctggcactgctccagtggatccggggcctgcagcatcagttgattgaccagcaggcccgactgcaggagagcttcgacaccatcctagacaaccggaaggagcttattcgctgtctccagcagagggcagcaccatccaggccccaggaccaggcctaagggtgtgcctccacaagtgtgcaagggtatatgtatatatttgcaggcatgtgtgaggcgcactagtaagtacataatttgctggcatgattgcaggtaggcatgagtgtgtatgtgctaacatgtaggctggtgtgtgtaggcatgtgtgaataagcatgtataaatgagcttaagtgtgctgtgtgcacatgtgtacacacagctaatttatctgcagacctatatgtgagcatgtaagagtgaacatatgtgtgtgtgtgtagtatgtaagaatgaggaactcggtatgtgcatgtgtagacaggtacccagcagtgtgtgtatatgcgcatgagtgaggatgtataggcagaagatgtgtgtgtctatgagtgagtttgagtgtgcaggcttgtattaggtgtatgtgaggaagcccttgtgtgtgcaggggtgcacatgtttggccacaggcatgggaggtgtatgttaggagcatgtgtgtttgtaggcagactcatgagcaggtgtgtgcaaatacatatccagctgcactgtgggtgtccacccacaccttgtgttcctcatggcctaccccagcctttcttctccactgggtcccactgttccctggagacagagggctagcatgctgtcatttatctgaaggttgtggctgacccattctcctgggatttcccaggccacctctcctttccctttccctcacttaacccagacttgctcagctgaggctattgtccctgatgttggctttacttgtaggaggtttagtggctgctctggcctgccatggaattttggctgcaattttggcagtgtgtggagaactggtatcaggaaagggaaccaggagtagtgatgaagatgatggtggggatggggacagaggacataggggactgtccctcttgaactctgcctttgggcacatgggagatggggacaggaaagatgataacagtggaaccctgtgaagaataggagaatgggaattctaaaataccagttcccaaacaaaccatctctccattggaaaaggagctgttgcaaaccgtgttcatttaagcttctgatgaaaagcaatgtatgtttataagcttgcaagtaacagacaagatgttccaaggccgatgaggaaaatatcgcttccctgtctctgcctctaccttgctgtgcctctctggctttagcagcattggatgttgaattggtttggttcatttctctgaagtcggactgtcaggaggagccagaggttggctttctgggatgtgaaggggacagtgtcagcctaagcctctggagatgcttaggatgctgaattttaaccccttctttcactgcatggcccttcaaacagggattggcaggctccgcgagttacagagtgggtgagtcttggagagaaccaacgactaaggtagcttagctctctgctttgttcttgggagccaagagaatgcaagatcctggtgggtgagcagtggtatgaagaggggacactggtgggtgaacagtggcatggaagtcactgatgcagcctctggccctcagtctccctatcggcaaagtggggggctcttcctatctctaaagagtttcatccctgacaggtggatgggtgaaagatccagagagtgggggtgaggggtgggccctgaagactttttgtctgtagctcttgcatattgagtgtataaacccggcttctggaccaacccaagatgaataaactggggcagaaaattaca

SEQ ID NO: 117887 - DNA, 702 bp, Homo sapiens
  Payload ID: 3046
  Gene Symbol: C1orf226
  Gene Name: chromosome 1 open reading frame 226
  ENST ID: ENST00000420220
  CDS Start-End: 190-702
gttaagagacccaaagcccggagagtgggctcccaggacagcttgctggagatcaccttccgctccggagccctgcccgtgctctgtgaccccacgacccctaagccagaggacctgcattcgccgccgctgggcgcgggcttggctgactttgcccaccctgcgggcagccccttagttgaccacggcatgtttgagaatttgaacacagccctcactccaaagctccaggccagccgctccttcccccacttgtccaagcccgtggcccccggctctgcccctctgggctctggtgagcctggggggccaggactctgggtgggcagcagccagcacctcaagaacctgggcaaagccatgggggccaaagtgaatgacttcctgaggagaaaggagccctccagcctgggcagtgtgggtgtgacagagatcaacaagactgcaggagcacagctggccagtgggactgacgcggctccagaggcttggctagaggatgaaaggtcagtcctgcaagaaacatttcctcggctggatcctccacctcccataaccagaaagcgaacccctcgggccctgaagaccacccaggacatgctgatttcatcacagcctgtcctcagcagtctggagtatgggacagagccatcacctgggcaggcccaggactccgctcccactgcccagcctgacgtccca

SEQ ID NO: 117888 - DNA, 1049 bp, Homo sapiens
  Payload ID: 3046
  Gene Symbol: C1orf226
  Gene Name: chromosome 1 open reading frame 226
  Uniprot ID: A1L170
  ENST ID: ENST00000426197
  CDS Start-End: 74-1021
gcctggcggttccagggtgcacaccactcctcgtagcaggtcccctgtcttgtgtgctgtgtccccccgaggtatgctggtgctggtggcccaggcaggaggtgacactctcaaagtgactggtcactacgtaaaatgtgtctttcttttgtttgtttcccacctgctttccgagcccctttctcggacagttgaccacggcatgtttgagaatttgaacacagccctcactccaaagctccaggccagccgctccttcccccacttgtccaagcccgtggcccccggctctgcccctctgggctctggtgagcctggggggccaggactctgggtgggcagcagccagcacctcaagaacctgggcaaagccatgggggccaaagtgaatgacttcctgaggagaaaggagccctccagcctgggcagtgtgggtgtgacagagatcaacaagactgcaggagcacagctggccagtgggactgacgcggctccagaggcttggctagaggatgaaaggtcagtcctgcaagaaacatttcctcggctggatcctccacctcccataaccagaaagcgaacccctcgggccctgaagaccacccaggacatgctgatttcatcacagcctgtcctcagcagtctggagtatgggacagagccatcacctgggcaggcccaggactccgctcccactgcccagcctgacgtcccagcagacgcttcacagccagaggccaccatggaaagagaagagagaggcaaagttctgcccaatggagaggtttccctgtcagtacctgacctaatccacaaggatagccaggacgaatccaagctaaagatgactgagtgcagaagggcctcctcccccagccttatcgagaggaatggcttcaaactcagcttgagccccatcagcctggctgagtcctgggaggatggcagcccccctcctcaggcacggacctccagcctcgacaatgagggccctcacccagacctgctgtcctttgaatagagcctctgctctttcctgctgagctctg

SEQ ID NO: 117889 - DNA, 4126 bp, Homo sapiens
  Payload ID: 3046
  Gene Symbol: C1orf226
  Gene Name: chromosome 1 open reading frame 226
  Uniprot ID: A1L170
  ENST ID: ENST00000458626
  CDS Start-End: 173-991
actggaaagttcaagagtgtctttgctggctctttcttgaatatttccaaagccttggaagttacaggttttgggtgtgggataaggaaaaactgaatgatagagcacaggtaccgctcccctttcctcatcatgcctctctgtcgcctctttgttcatagttgaccacggcatgtttgagaatttgaacacagccctcactccaaagctccaggccagccgctccttcccccacttgtccaagcccgtggcccccggctctgcccctctgggctctggtgagcctggggggccaggactctgggtgggcagcagccagcacctcaagaacctgggcaaagccatgggggccaaagtgaatgacttcctgaggagaaaggagccctccagcctgggcagtgtgggtgtgacagagatcaacaagactgcaggagcacagctggccagtgggactgacgcggctccagaggcttggctagaggatgaaaggtcagtcctgcaagaaacatttcctcggctggatcctccacctcccataaccagaaagcgaacccctcgggccctgaagaccacccaggacatgctgatttcatcacagcctgtcctcagcagtctggagtatgggacagagccatcacctgggcaggcccaggactccgctcccactgcccagcctgacgtcccagcagacgcttcacagccagaggccaccatggaaagagaagagagaggcaaagttctgcccaatggagaggtttccctgtcagtacctgacctaatccacaaggatagccaggacgaatccaagctaaagatgactgagtgcagaagggcctcctcccccagccttatcgagaggaatggcttcaaactcagcttgagccccatcagcctggctgagtcctgggaggatggcagcccccctcctcaggcacggacctccagcctcgacaatgagggccctcacccagacctgctgtcctttgaatagagcctctgctctttcctgctgagctctgcccttgtcttcctgctgctttctcctccactgcgcacactggccctggcctcaactccgctgtgccctttgtcttccttgtatgaggcaccagcagagagccagtcgtccatcatgggattttgcaggactggaagtccttgagtagttctagttaaagagtctatccgcagaatggctgaaggacttgatgccgttttgagcctaattttctgtaacctcctctgagtgggctgcagcccttggacattagagctcttccactcttgagcttgtcctgtcttctcagtgaattgcagggccaccagctcaggacaatggatcttacaggaattctttttgcctgtcccctacatgcgcctcctcccctgctgttctccctcccacacccctgtcccttctctctcctccttgatgggtccgatgcccctggcctcagcgggaggaaggctggatgaggaatgatgtgtttggcttgatgacaggccatggcctagaaagccacacaccctgaccacagcccagccatagctcctcttggtcccaggacagtgcaggcccctggttgccatgtttgctctgcccctggggtggaggccagaggagatgcttaccaggcctgagaccttgagagttcacccagggtttgaacgctgccacccagggttcccaaggtttctcccatctggtcagatgtcgaacacaaaatgtgggcattctgcacggaaggaaagatcaggcttctcttgctgagtgtgtgaagacagggagagccaggccccagcagatgcggcctagcacactctgatttggttttgtggggagggcccaggaacttgggggtggtcttggcattcagagctggtgctaaaaacccagagcagaagcagggagaagggagtgaggatgggacagagaagagcgaccactggggatcagaacagcttttcaggggccaccttgcagcctaaaataatgccgtttcagggcctgggcctgctgtgagagccagaatgaagcatgtacaagattggaatgtgagaagaactgtggggggaaaccagttttaattaagtggaagtgctttgtgcttgtgctgaagttgcctgggcctcctgcagctctggacctcactggagcggccccgccctgcccttgcctgcctttcttttatgctgatgctggtgggctttttcctgcttcaggatccatgtaagggactgaccaggttcatccagccttaactggttcctgcaacccacttttaggtctcccaccaggggcctattgtgctgtcttcctgtgaccagcagatcctgtaagggggtgatcctaattctggggctctttgcagcaagaggagaacgttctttttcttgaacaaggtggccggttccctgggagaaggctgggaatggcacgtccggccagggcaggcggtgcggcatcctcctcctgggattcctgtggcctcccctgttctattcattgtttggcttcccacccataagctctgggatacccagggcttgcttcccagctcttctcatctccaagcctctgctccccttcccaccaccactgccatataaaatggccatgctaactcctacacaactaggagcctcagcaggattgctaggatgtgggttccttcctgcatgcttgcttctgcagctgtgtggccttgccatggccctcccaccactttcccttctaccttgccttccattgtcttccttctcccagaaagccaggtttcaccacgtgctcaccacaaactgtctcccctccctcgtaggagtcactgcagtagggcacctgcaggccctggtagagtgagcagggcttacgtgtacattctttctcactctaaggatgtgatatctgaccctgatgtcagagaggaggtctcaggactagcattcggggtcctttgagtgttcccagaatggtttggggtatcacacaaaacaccagagctgaggatagggatagagtccccaaacacacatcctgggagcaagccacttcatctgagcttcccataccaggagcatggtttgtgctttgatgggaaacctagcaagcccctgcactctggggcttctcctctcctggagcccagggcggctctggcccgatgatatggcagccataggtacaggtattgcaggtgcagcctttcttaagtaccctgcctccactctatagcccagctgctgctggagtccaggaccttagacccaggatgagcaaaaggatcccaccaggttgtccaggaccattgccagggtgaccccagagttcttcagacctgtgtctgatactgaatacagtgccatgggaccctgctccaatctaactgcctacaacctgcccgtccccctgctgcagggatgttgctgctacctcgggaggctctctgagactggtgtctggtcttagatgctgcacatagtacctggtgctagggtctaggggctgcccaaagcccagcaggaacagctactactcatcctgcagaggccttggcccagaccagctttccatccaaagcctcacctggtttccatgtccatctcaacagtctggccttcctgtgactgtagcctggcagccacaccctcagtaatcccgcacagtgagtccagcttctctgggagcttggccttcagttagcccagtccatgagagggcagggtaatgaggaggagtaaaggacctatcttctctgtccacataaggaagttgggaccacaaggtcttttatctccttgttactccccaaccccaccataacctcctactcagcacacagctgtatcctggtagattataaggtgagcttccagaacctggcaggaggctggtgtatccccctgcacagagggaagtgtatctgaatgttgtgtatgtggctgatatggaagacatacatgtatgcaatccatcagcgtttaaagaagaagattggctccagttcggaggaggaggaggaagattacagatctattctgagtattttttagagagttaatatttatatttttagtaattttctggtagaaggaaattgcacaataaaatgatttggtttggtttgct

SEQ ID NO: 117890 - DNA, 917 bp, Homo sapiens
  Payload ID: 3047
  Gene Symbol: C1orf228
  Gene Name: chromosome 1 open reading frame 228
  ENST ID: ENST00000418644
  CDS Start-End: 572-917
tgtaggtgagaggcggctgaagagttgctgtattctgggaatgggcagggtcactcgtccgaacagagtcctatcctacgcggcggaagagtgtgccctttgacttgcatcgtctacctacctctgccatcctctaccagccgcaactgcgagggctggagtgacataaccccgctgaagaaatataaaaaagcattcagtcacaaaagttcatggaaggaggcaacaggagatgaaagaattcaacaaatatttggaaggcagaaggcaggtgcagggaggctaaccggcttgaagcagaggaaattgcaagcaactgccaacaaggggagcttaccaacaagaaaccagtcaattcagccagtttgacctctaagaggcttaatgcttgaaagcacaaattaccactgaaggtcagaaatgaggttggtccgcagtcattcacctggttcttaaggccagctagatttcgtggttatctccatcctggaggctgcgtggacgcccttctggaagcacgcatcccatgtcctctggggagtagtagagccaacttcaggactgattgatcatgacttctataaaggagcaggcagcaattagcaggctcttaagttttttacaggagtgggacaacgctggcaaagtcgcaaggagtcacatcctcgacaagttcattgaaaccaaccaaggcaagactgcccctgaactggagcaggagttttcccagggagccagtttgttcctggtacgcttgaccacctcgcttagaatcacctatatgactgactcatgtttagaaaagcttctcaggtccattggcatcttcttatcagctgtaagcagtaatcggtaccttatagaatttcttgaggttggaggtgtcctaaccctcttggaaatacttgggctagaga

SEQ ID NO: 117891 - DNA, 502 bp, Homo sapiens
  Payload ID: 3047
  Gene Symbol: C1orf228
  Gene Name: chromosome 1 open reading frame 228
  ENST ID: ENST00000453711
  CDS Start-End: 258-502
gggcagggtcactcgtccgaacagagtcctatcctacgcggcggaagagtgtgccctttgacttgcatcgtctacctacctctgccatcctctaccagccgcaactgcgagggctggaggctagagtgcagtggcgcgatctcggctcactgcaacccgcctcccgggttcaagggatttctcctgcctcagcctcccaagagctgggattacaggtgcctgccaccacgcccagccaacttcaggactgattgatcatgacttctataaaggagcaggcagcaattagcaggctcttaagttttttacaggagtgggacaacgctggcaaagtcgcaaggagtcacatcctcgacaagttcattgaaaccaaccaaggcaagactgcccctgaactggagcaggagttttcccagggagccagtttgttcctggtacgcttgaccacctcgcttagaatcacctatatgactgactcatgtttagaaaagcttctcaggtc

SEQ ID NO: 117892 - DNA, 1063 bp, Homo sapiens
  Payload ID: 3047
  Gene Symbol: C1orf228
  Gene Name: chromosome 1 open reading frame 228
  ENST ID: ENST00000445071
  CDS Start-End: 435-1063
cggctgaagagttgctgtattctgggaatgggcagggtcactcgtccgaacagagtcctatcctacgcggcggaagagtgtgccctttgacttgcatcgtctacctacctctgccatcctctaccagccgcaactgcgagggctggagtgacataaccccgctgaagaaatataaaaaagcattcagtcacaaaagttcatggaaggaggcaacaggagatgaaagaattcaacaaatatttggaaggcagaaggcaggtgcagggaggctaaccggcttgaagcagaggaaattgcaagcaactgccaacaaggggagcttaccaacaagaaaccagtcaattcagccagtttgacctctaagaggcttaatgcttgaaagcacaaattaccactgaaggtcagaaatgagccaacttcaggactgattgatcatgacttctataaaggagcaggcagcaattagcaggctcttaagttttttacaggagtgggacaacgctggcaaagtcgcaaggagtcacatcctcgacaagttcattgaaaccaaccaaggcaagactgcccctgaactggagcaggagttttcccagggagccagtttgttcctggtacgcttgaccacctcgcttagaatcacctatatgactgactcatgtttagaaaagcttctcaggtccattggcatcttcttatcagctgtaagcagtaatcggtaccttatagaatttcttgaggttggaggtgtcctaaccctcttggaaatacttgggctagagaagatcaaggaggaggccaagaaggaatctgtcaaactacttcaggttattgcgaactctggcaggacatacaaggaactcatttgtgaaagctatggtgtacgatccatagcagaatttttggcaaagtctaagtcagaagagacccaggaggaagtgcaggttctgttggattctttggtccacggcaatcccaagtaccaaaatcaagtgtataaaggtctaatagctttgctgccctgcgagtccccaaaagcccagcagctgtccctgcagactctcag

SEQ ID NO: 117893 - DNA, 490 bp, Homo sapiens
  Payload ID: 3047
  Gene Symbol: C1orf228
  Gene Name: chromosome 1 open reading frame 228
  ENST ID: ENST00000434068
  CDS Start-End: 1-490
aactggagcaggagttttcccagggagccagtttgttcctggtgtacgatccatagcagaatttttggcaaagtctaagtcagaagagacccaggaggaagtgcaggttctgttggattctttggtccacggcaatcccaagtaccaaaatcaagtgtataaaggtctaatagctttgctgccctgcgagtccccaaaagcccagcagctgtccctgcagactctcaggactgcccagccaatcattgggaccacacaccccagcatcgtggactgcgtgctgaaggtgctgggcacgatgcacctggaagtccagtatgaagccatcgagttgatcaaagacctggtcggttacgatgtgcgccaggcgctgctcaagggcctcgtggcgctgctgataccgtcggtcaaggagatctccaaactgcaggccaagatcctcagtgctcacccccagcctgccgatgtttttgcagcaggccgcggccgc

SEQ ID NO: 117894 - DNA, 747 bp, Homo sapiens
  Payload ID: 3047
  Gene Symbol: C1orf228
  Gene Name: chromosome 1 open reading frame 228
  ENST ID: ENST00000455805
  CDS Start-End: 184-363
tgtaggtgagaggcggctgaagagttgctgtattctgggaatgggcagggtcactcgtccgaacagagtcctatcctacgcggcggaagagtgtgccctttgacttgcatcgtctacctacctctgccatcctctaccagccgcaactgcgagggctggagccaacttcaggactgattgatcatgacttctataaaggagcaggcagcaattagcaggctcttaagttttttacaggagtgggacaacgctggcaaagtcgcaaggagtcacatcctcgacaagttcattgaaaccaaccaaggcaagactgcccctgaactggagcaggagttttcccagggagccagtttgttcctgtaatcggtaccttatagaatttcttgaggttggaggtgtcctaaccctcttggaaatacttgggctagagaagatcaaggaggaggccaagaaggaatctgtcaaactacttcaggttattgcgaactctggcaggacatacaaggaactcatttgtgaaagctatggtgtacgatccatagcagaatttttggcaaagtctaagtcagaagagacccaggaggaagtgcaggttctgttggattctttggtccacggcaatcccaagtaccaaaatcaagtgtataaaggtctaatagctttgctgccctgcgagtccccaaaagcccagcagctgtccctgcagactctcaggactgcccagccaatcattgggaccacacaccc

SEQ ID NO: 117895 - DNA, 836 bp, Homo sapiens
  Payload ID: 3047
  Gene Symbol: C1orf228
  Gene Name: chromosome 1 open reading frame 228
  ENST ID: ENST00000441519
  CDS Start-End: 175-836
gaggcggctgaagagttgctgtattctgggaatgggcagggtcactcgtccgaacagagtcctatcctacgcggcggaagagtgtgccctttgacttgcatcgtctacctacctctgccatcctctaccagccgcaactgcgagggctggagccaacttcaggactgattgatcatgacttctataaaggagcaggcagcaattagcaggctcttaagttttttacaggagtgggacaacgctggcaaagtcgcaaggagtcacatcctcgacaagttcattgaaaccaaccaaggcaagactgcccctgaactggagcaggagttttcccagggagccagtttgttcctggtacgcttgaccacctcgcttagaatcacctatatgactgactcatgtttagaaaagcttctcaggtccattggcatcttcttatcagctgtaagcagtaatcggtaccttatagaatttcttgaggttggaggtgtcctaaccctcttggaaatacttgggctagagaagatcaaggaggaggccaagaaggaatctgtcaaactacttcaggttattgcgaactctggcaggacatacaaggaactcatttgtgaaagctatggtgtacgatccatagcagaatttttggcaaagtctaagtcagaagagacccaggaggaagtgcaggttctgttggattctttggtccacggcaatcccaagtaccaaaatcaagtgtataaaggtctaatagctttgctgccctgcgagtccccaaaagcccagcagctgtccctgcagactctcaggactgcccagccaatcattgggaccacacaccc

SEQ ID NO: 117896 - DNA, 1818 bp, Homo sapiens
  Payload ID: 3047
  Gene Symbol: C1orf228
  Gene Name: chromosome 1 open reading frame 228
  Uniprot ID: Q6PIY5
  ENST ID: ENST00000458657
  CDS Start-End: 308-1630
tgtaggtgagaggcggctgaagagttgctgtattctgggaatgggcagggtcactcgtccgaacagagtcctatcctacgcggcggaagagtgtgccctttgacttgcatcgtctacctacctctgccatcctctaccagccgcaactgcgagggctggaggttggtccgcagtcattcacctggttcttaaggccagctagatttcgtggttatctccatcctggaggctgcgtggacgcccttctggaagcacgcatcccatgtcctctggggagtagtagagccaacttcaggactgattgatcatgacttctataaaggagcaggcagcaattagcaggctcttaagttttttacaggagtgggacaacgctggcaaagtcgcaaggagtcacatcctcgacaagttcattgaaaccaaccaaggcaagactgcccctgaactggagcaggagttttcccagggagccagtttgttcctggtacgcttgaccacctcgcttagaatcacctatatgactgactcatgtttagaaaagcttctcaggtccattggcatcttcttatcagctgtaagcagtaatcggtaccttatagaatttcttgaggttggaggtgtcctaaccctcttggaaatacttgggctagagaagatcaaggaggaggccaagaaggaatctgtcaaactacttcaggttattgcgaactctggcaggacatacaaggaactcatttgtgaaagctatggtgtacgatccatagcagaatttttggcaaagtctaagtcagaagagacccaggaggaagtgcaggttctgttggattctttggtccacggcaatcccaagtaccaaaatcaagtgtataaaggtctaatagctttgctgccctgcgagtccccaaaagcccagcagctgtccctgcagactctcaggactgcccagccaatcattgggaccacacaccccagcatcgtggactgcgtgctgaaggtgctgggcacgatgcacctggaagtccagtatgaagccatcgagttgatcaaagacctggtcggttacgatgtgcgccaggcgctgctcaagggcctcgtggcgctgctgataccgtcggtcaaggagatctccaaactgcaggccaagatcctcagtgacccctcggttctccagctcacccccagcctgccgatgtttttgcagcaggccgcggccgccaaggccatcggggtcctggcgcgcaacgacatgagcatcgccgaggagctgctgtacctgcgcgtggtgcgtggcctaatggccgccatgggcaacacggaccacagcaacagccagcggctggccagcctcacgctggagtgcttcgtgcagatgttccccttggtggcggagcacgtgcgcaagtgcatgggggaggaactctaccagctcttcctgagcaacgctgaggacttgtacatgaaaatagacagcattcaggcggacatcttggcggccaacacagtcaatgttaccaaagccctgtgcctccatggcagctcctacagcatgaacactctctatggctcgcgcgattcggctcagatggcctacctcacacacttcgaggaggatgtagaatcaaaggagtaacagcccctgtggcaaaccaggaaggccaaggctgcggggcagggaagcctggcaagaggaaggcgcctggggtcaagctcagagccactccacttggctccaggggggagacggggattaggcatcccagaggggcagaggaagagccgctggctgcgaagagtcaataaacagccttgatacctgtc

SEQ ID NO: 117897 - DNA, 1685 bp, Homo sapiens
  Payload ID: 3047
  Gene Symbol: C1orf228
  Gene Name: chromosome 1 open reading frame 228
  Uniprot ID: Q6PIY5
  ENST ID: ENST00000535358
  CDS Start-End: 175-1497
gaggcggctgaagagttgctgtattctgggaatgggcagggtcactcgtccgaacagagtcctatcctacgcggcggaagagtgtgccctttgacttgcatcgtctacctacctctgccatcctctaccagccgcaactgcgagggctggagccaacttcaggactgattgatcatgacttctataaaggagcaggcagcaattagcaggctcttaagttttttacaggagtgggacaacgctggcaaagtcgcaaggagtcacatcctcgacaagttcattgaaaccaaccaaggcaagactgcccctgaactggagcaggagttttcccagggagccagtttgttcctggtacgcttgaccacctcgcttagaatcacctatatgactgactcatgtttagaaaagcttctcaggtccattggcatcttcttatcagctgtaagcagtaatcggtaccttatagaatttcttgaggttggaggtgtcctaaccctcttggaaatacttgggctagagaagatcaaggaggaggccaagaaggaatctgtcaaactacttcaggttattgcgaactctggcaggacatacaaggaactcatttgtgaaagctatggtgtacgatccatagcagaatttttggcaaagtctaagtcagaagagacccaggaggaagtgcaggttctgttggattctttggtccacggcaatcccaagtaccaaaatcaagtgtataaaggtctaatagctttgctgccctgcgagtccccaaaagcccagcagctgtccctgcagactctcaggactgcccagccaatcattgggaccacacaccccagcatcgtggactgcgtgctgaaggtgctgggcacgatgcacctggaagtccagtatgaagccatcgagttgatcaaagacctggtcggttacgatgtgcgccaggcgctgctcaagggcctcgtggcgctgctgataccgtcggtcaaggagatctccaaactgcaggccaagatcctcagtgacccctcggttctccagctcacccccagcctgccgatgtttttgcagcaggccgcggccgccaaggccatcggggtcctggcgcgcaacgacatgagcatcgccgaggagctgctgtacctgcgcgtggtgcgtggcctaatggccgccatgggcaacacggaccacagcaacagccagcggctggccagcctcacgctggagtgcttcgtgcagatgttccccttggtggcggagcacgtgcgcaagtgcatgggggaggaactctaccagctcttcctgagcaacgctgaggacttgtacatgaaaatagacagcattcaggcggacatcttggcggccaacacagtcaatgttaccaaagccctgtgcctccatggcagctcctacagcatgaacactctctatggctcgcgcgattcggctcagatggcctacctcacacacttcgaggaggatgtagaatcaaaggagtaacagcccctgtggcaaaccaggaaggccaaggctgcggggcagggaagcctggcaagaggaaggcgcctggggtcaagctcagagccactccacttggctccaggggggagacggggattaggcatcccagaggggcagaggaagagccgctggctgcgaagagtcaataaacagccttgatacctgtc

SEQ ID NO: 117898 - DNA, 2085 bp, Homo sapiens
  Payload ID: 3048
  Gene Symbol: C1orf233
  Gene Name: chromosome 1 open reading frame 233
  Uniprot ID: F2Z333
  ENST ID: ENST00000422725
  CDS Start-End: 82-762
ggatcgcggggagcgggcagcggggacggcggcggcgcggcccgcgtgacccagcgccgcgccccgtggccccgccgcaggatgcgcgccccgccgctgctgctgctgctggccgcctgcgcgccgccgccctgcgccgcggccgccccgacgccgccgggctgggagccgacccccgacgcgccctggtgcccctacaaggtgctgcccgagggccccgaggcgggcggcgggcgcctgtgcttccgcagccccgcgcgcggcttccgctgccaggctccgggctgcgtgctgcacgccccggccggccgctccctgcgcgccagcgtcctgcgcaaccgcagcgtcctcctgcagtggcgcctggccccggccgccgcgcgccgcgtgcgcgccttcgcgctcaactgctcgtggcgcggcgcctacacgcgcttcccgtgcgagcgcgtgctcctcggggcctcctgccgcgactacctgctgcccgacgtgcacgacagcgtcctctaccgcctgtgcctgcagccgctgccgctgcgcgctgggcccgccgccgccgcgccagagacccccgagccggccgagtgcgtggagttcaccgccgagccggccggcatgcaggacatcgtggtggccatgacggcggtgggcggctccatctgcgtcatgctggtggtcatctgcctgctggtggcctacatcaccgagaacctcatgcgcccggccctcgcgcgccccggcctgcgcagacacccctgaagcgcgaggccgcccgcccatctttgcgccacctgcctgagggcgcctgagctcccaggtcctccgcccgctctcctctcctcattcctgctgcctccttaagatccccgcggaggaggacctgccggcgacggctccggcactttggcatcatcacacgccctttccagccgggcgtcagactcccagactctggccccggattggcccctgggcttgcgctgctgtgccagccgcatccagggctctccccgctctccgcaggcctttatagaggcggccagggcatggagccccttccagcaagagccatgggcactccggctcaccccgcacctccatcctgtgccgaattgtcccagacagaccgtcgccattgctcggtcactgtgctttgcaggcctggggcgcagctctccaagcctgtcctgccccgccccaccccactgggcttaggttagcttcgtgccttagtatctcgggcccactgcaggagccaacaccctctgctgtccagggggggtctgtggccctaagattggccggcctctccatgcatctggccagcgtccccttggagacaccttcaccctcaagcgctgcagaagcatgaggtgagggcctgcagcgctctgtaccgtttagggtgttggaccagccgggagcctggcaggcctggcccagcggccagggtgagtgttctcagaccccgggcagctggtggttctccagggccaggtaccccttttgtgtgtgcgacctctgactaggtccctgtgggaatggggcagatggcggccatcaccactgggtcccagggcagaagcttagataccggccttgagcagcccgaccttccaccgctgcctggatcccaagcctcagccgacccaggggaccttggtggcaacggtgtgactgacagcaccacccctagcctttgcatgcccaggggtcgagagccagtatccggcccagacaatgccacccgccatggaagaaaagctgaccctgcccacctgctgcagacccgggccccgggccgaggttgctttctgtgacgaccgcctggtgacgctggacaccaggagggttatggcactgccctcccctcctggagcccctggcactgaccacctggacttgacctgactcctggtcactggccaaacacccatcctcaccccagccaccccgggccctggctggtgccgtgtgacacctgtagcccacctgtgtgtctttgctccgcccacccctgcgtggcgccggtcaggcgcaaacctggcgccagtgtctaaatgtccatcattctcagaccaa

SEQ ID NO: 117899 - DNA, 510 bp, Homo sapiens
  Payload ID: 3049
  Gene Symbol: C1orf234
  Gene Name: chromosome 1 open reading frame 234
  Uniprot ID: H3BTG2
  ENST ID: ENST00000566855
  CDS Start-End: 78-443
atttgcccctccttccagaccctggcagccaccattctactctttgcctctatgaatttgactattgtagatagctcatgagtctccatgggatacttgcctccgcaggcaccataggagcagtggcagcttggctgatgagctataagccagccttgtttgggttcctattccttctgctgttgcttagcaactggttggtcaagtatgaacacaagctcaccctcccagagccccagcaggacgagatcctccaacggctgttgttcagtgaaatgaagatgaaggtcctagaaaatcagatgttcatcatatggaataaaatgaatcaccacgggcggtcaagcagacatcggaattttcccatgaaaaaacacagaatgaggaggcatgagtcaatttgccccaccctgtctgactgtacttcgagttcccccagctaatgaggccgaggcgggctggcctctgccgatgttaccttttacctcagtaaaacccagtcacagccta

SEQ ID NO: 117900 - DNA, 479 bp, Homo sapiens
  Payload ID: 3049
  Gene Symbol: C1orf234
  Gene Name: chromosome 1 open reading frame 234
  ENST ID: ENST00000622840
  CDS Start-End: 48-413
ctgtgtgcctccacgccataatgctggcagaactgatatttctctttaggagtctccatgggatacttgcctccgcaggcaccataggagcagtggcagcttggctgatgagctataagccagccttgtttgggttcctattccttctgctgttgcttagcaactggttggtcaagtatgaacacaagctcaccctcccagagccccagcaggacgagatcctccaacggctgttgttcagtgaaatgaagatgaaggtcctagaaaatcagatgttcatcatatggaataaaatgaatcaccacgggcggtcaagcagacatcggaattttcccatgaaaaaacacagaatgaggaggcatgagtcaatttgccccaccctgtctgactgtacttcgagttcccccagctaatgaggccgaggcgggctggcctctgccgatgttaccttttacctcagtaaaacccagtcacagcct

SEQ ID NO: 117901 - DNA, 509 bp, Homo sapiens
  Payload ID: 3049
  Gene Symbol: C1orf234
  Gene Name: chromosome 1 open reading frame 234
  ENST ID: ENST00000440767
  CDS Start-End: 1-442
ctccgcaggcaccataggagcagtggcagcttggctgatgagctataagccagccttgtttgggttcctattccttctgctgttgcttagcaactggttggtcaagtatgaacacaagctcaccctcccagagccccagcaggaggaagagaaaccaaagacttctgaaaacgactccaagaacagcaaggccgtgaacacaaaagaagtcaatagaacgcatgcctgctttgccctccaggacgagatcctccaacggctgttgttcagtgaaatgaagatgaaggtcctagaaaatcagatgttcatcatatggaataaaatgaatcaccacgggcggtcaagcagacatcggaattttcccatgaaaaaacacagaatgaggaggcatgagtcaatttgccccaccctgtctgactgtacttcgagttcccccagctaatgaggccgaggcgggctggcctctgccgatgttaccttttacctcagtaaaacccagtcacagccta

SEQ ID NO: 117902 - DNA, 3792 bp, Homo sapiens
  Payload ID: 3050
  Gene Symbol: C1orf27
  Gene Name: chromosome 1 open reading frame 27
  Uniprot ID: Q5SWX8
  ENST ID: ENST00000287859
  CDS Start-End: 126-1490
agggaatctggcccctagaggctggtacttgggcccgaaacccccatctccggcggagagaccgtccgaggtaattgtctgccacgagtgcacattctgaaaacaggagattttagttcctaaaaatgggaagaacctacattgtagaagagactgttggccagtatctttcaaacataaatctccaaggaaaggcttttgtctctggccttttaataggacagtgttcgtcacaaaaggattatgtgattcttgccactagaacgccacccaaagaggagcaaagtgagaacctcaaacatcccaaagctaagttggataacttggatgaagaatgggccacagaacatgcctgccaggtatccagaatgctaccagggggacttttagttcttggagtatttattattactactttagaactggcaaatgattttcaaaatgccctgcgtagactaatgtttgctgtggaaaagtctataaatagaaagagattgtggaatttcacagaggaggaagtctcagaacgagtgacacttcacatttgtgcttctacaaaaaaaatattttgtcgaacttatgatatccatgatccaaagagttcagcaagaccagcagattggaagtatcaaagtggattatcatcctcatggctttctttagagtgtacagttcacattaatattcacatcccactttctgctacttctgtcagctatactctggagaaaaatacaaagaatggacttacacgctgggccaaggaaatagaaaatggtgtttatttgattaatggacaagttaaagatgaagattgtgacctattagaaggacagaaaaaatcttctagaggaaatactcaagcaactagtcattcttttgatgtcagagtgctaacgcagttgctcctgaattcagaccacagatccacagccacagtccagatatgtagcggttctgtaaaccttaagggtgctgtgaaatgcagagcttatatccacagcagtaaacccaaagttaaagatgctgtgcaggcagtaaagagggatatattgaacacagttgctgatcgttgtgaaatgctatttgaggatctgcttttgaatgaaattccagaaaaaaaagattctgaaaaagagttccacgtcctcccttatcgagtctttgttccccttcctggatccactgtaatgttgtgtgattataaatttgacgatgagtcagctgaagaaatcagggaccattttatggagatgttggatcacacaattcaaatagaagatttggaaattgcagaggaaacaaacacagcttgtatgagttcttctatgaatagtcaagcttcattggacaacacagatgatgaacaaccaaaacaaccaattaaaactacaatgttattgaaaattcagcaaaacataggtgtgattgcagcatttacagttgcagtccttgctgcgggtatctcctttcattacttcagtgattagggtgaggcacaaagagtttcttgatcatccagagaacattgacagacaattatgaataataaagatgttaacaatccatctgtatttaaaacactagcagccagatctgctgccatgatgcctatttggtgtgtttctgattaaaatgaaatcacaagctgccttgtttagcctgctttacattgtaggtggcccgcatttccagaaataacgttatgcatctagatggaagctgcatgtaacaaatcattattatctatttttaaaagcttcaaaatgatgggatatgatcatagattttagtcttactaatctgaatcacatattaatcaggacattaaaaactttaacagaggcatgatggctcacacgtataatcctaatgctttgagaggctgaggtaggagcatcacctggggctgggagggagttggagaccagcctggatgacataatgagattctgtctctactggaaaaaaaaaaaattagctggacatggtggcaatcagctctagtcccaactacttggaggctgaagcaggaagatcacgtgagcccaggagtttgaggctgcagcgagctatgatcacatcactgtactccagcctgggtgacaaaatgagacattgtctctaaaatacataagtaaatttaaaaaaaaaagaataataatttgaacagtgaatgttgatgtaacatcttaataatagagcaccagaaaaatttctaccaaatgagacaacaactttaggataagttcatcctctaggagctttctaatgtgcactcagttcctgtatactgtgtgttttgttctgatcaaggggtagggaacctttccagagaagtcccattagtaagaaatgacataaaatacgtgctttctcaggttactgtataactgttataatatatttaatatataaaattaagacttttgcttccagcaagtatgttagactagatattataaaacaactagatcctgaataaaatctgcttttaataggttcactggaagtaggagaattttcaagaaccatacttcgacatttcctctgccacaaaaaatgaacgcattttaagttaggagtcatgaatactgtattgaccatacaagtggattatggttgtctggatggcagataccaatagcaacattgtcatatgcagtttgcctcaaatcagaaacaagaagacatcggaatctgagatgctgccctagagaggacagttaaagaaggttcagtggtcctcagtttgcagtgctctagctcctggcagaagcaagagggaaacattcctaatttagttccaagattcctacagattattatcaagtagtagtattttatgactagagatcacaggcacaagttgaaacaaactaacatgacaagaaagctatagaaaaaataaacattgaactcagttcttcaaggtttcatcaccaacataaggaatgaagttggaaccacaggcagatctgaaaaagaaccaaatagagctcctaaaaatgagaaatatttattgaaataagaaaaaagccctcagacatgttgaatattttattagactcagctgaagagacaagtgaactaaactataagctggatctaaagaaattacccagtgagcagtgaggagaaacaaggagctagaaaacattggaaagttaagagagttcgagggaagaattataaagactaggagtcctagaaagagaaaatttagagaataaaggagaggcagtacttgaaagataacacaattttacaaatttgttggaaaaacatgaattcataaattcaggaagcacaatatataccaaacatatatttaaataaaatccaggcctagactcaaggtattgtaaatgacaagataccaaatacaagattttaaaagcaaccatggggagaaaaagatcagtgaaagcaagacagtcaaatacttagtaggcttcctaacagcaacaatgtacccaaaagagggtagaattctgagaaaaactattagcttagaatttgcaacaagcgaaactgaaacaaacagatgctcagatgaaaaacagatgttatcctcagcacaaattcagtaaagagactacaaaaggatgatcttcaagaagggaaatgattctaaaaggattatctgaaattgaaaaactagtaagcaaataaatgataaacataagtaaatttaaactgttgtttgtataaaacaattataatgaagtgtttataagaaattgtaaacaaatgtaaaactaaataaacattgttatgcaacattaataa

SEQ ID NO: 117903 - DNA, 3754 bp, Homo sapiens
  Payload ID: 3050
  Gene Symbol: C1orf27
  Gene Name: chromosome 1 open reading frame 27
  Uniprot ID: Q5SWX8
  ENST ID: ENST00000367470
  CDS Start-End: 157-1452
gatgaattcagtggcagtgaattgagaccggagggaatctggcccctagaggctggtacttgggcccgaaacccccatctccggcggagagaccgtccgaggtaattgtctgccacgagtgcacattctgaaaacaggagattttagttcctaaaaatgggaagaacctacattgtagaagagactgttggccagtatctttcaaacataaatctccaaggaaaggcttttgtctctggccttttaataggacagtgttcgtcacaaaaggattatgtgattcttgccactagaacgccacccaaagaggagcaaagtgagaacctcaaacatcccaaagctaagttggataacttggatgaagaatgggccacagaacatgcctgccaggtatccagaatgctaccagggggacttttagttcttggagtatttattattactactttagaactggcaaatgattttcaaaatgccctgcgtagactaatgtttgctgtggaaaagtctataaatagaaagagattgtggaatttcacagaggaggaagtctcagaacgagtgacacttcacatttgtgcttctacaaaaaaaatattttgtcgaacttatgatatccatgatccaaagagttcagcaagaccagcagattggaagtatcaaagtggattatcatcctcatggctttctttagagtgtacagttcacattaatattcacatcccactttctgctacttctgtcagctatactctggagaaaaatacaaagaatggacttacacgctgggccaaggaaatagaaaatggtgtttatttgattaatggacaagttaaagatgaagattgtgacctattagaaggacagctcctgaattcagaccacagatccacagccacagtccagatatgtagcggttctgtaaaccttaagggtgctgtgaaatgcagagcttatatccacagcagtaaacccaaagttaaagatgctgtgcaggcagtaaagagggatatattgaacacagttgctgatcgttgtgaaatgctatttgaggatctgcttttgaatgaaattccagaaaaaaaagattctgaaaaagagttccacgtcctcccttatcgagtctttgttccccttcctggatccactgtaatgttgtgtgattataaatttgacgatgagtcagctgaagaaatcagggaccattttatggagatgttggatcacacaattcaaatagaagatttggaaattgcagaggaaacaaacacagcttgtatgagttcttctatgaatagtcaagcttcattggacaacacagatgatgaacaaccaaaacaaccaattaaaactacaatgttattgaaaattcagcaaaacataggtgtgattgcagcatttacagttgcagtccttgctgcgggtatctcctttcattacttcagtgattagggtgaggcacaaagagtttcttgatcatccagagaacattgacagacaattatgaataataaagatgttaacaatccatctgtatttaaaacactagcagccagatctgctgccatgatgcctatttggtgtgtttctgattaaaatgaaatcacaagctgccttgtttagcctgctttacattgtaggtggcccgcatttccagaaataacgttatgcatctagatggaagctgcatgtaacaaatcattattatctatttttaaaagcttcaaaatgatgggatatgatcatagattttagtcttactaatctgaatcacatattaatcaggacattaaaaactttaacagaggcatgatggctcacacgtataatcctaatgctttgagaggctgaggtaggagcatcacctggggctgggagggagttggagaccagcctggatgacataatgagattctgtctctactggaaaaaaaaaaaattagctggacatggtggcaatcagctctagtcccaactacttggaggctgaagcaggaagatcacgtgagcccaggagtttgaggctgcagcgagctatgatcacatcactgtactccagcctgggtgacaaaatgagacattgtctctaaaatacataagtaaatttaaaaaaaaaagaataataatttgaacagtgaatgttgatgtaacatcttaataatagagcaccagaaaaatttctaccaaatgagacaacaactttaggataagttcatcctctaggagctttctaatgtgcactcagttcctgtatactgtgtgttttgttctgatcaaggggtagggaacctttccagagaagtcccattagtaagaaatgacataaaatacgtgctttctcaggttactgtataactgttataatatatttaatatataaaattaagacttttgcttccagcaagtatgttagactagatattataaaacaactagatcctgaataaaatctgcttttaataggttcactggaagtaggagaattttcaagaaccatacttcgacatttcctctgccacaaaaaatgaacgcattttaagttaggagtcatgaatactgtattgaccatacaagtggattatggttgtctggatggcagataccaatagcaacattgtcatatgcagtttgcctcaaatcagaaacaagaagacatcggaatctgagatgctgccctagagaggacagttaaagaaggttcagtggtcctcagtttgcagtgctctagctcctggcagaagcaagagggaaacattcctaatttagttccaagattcctacagattattatcaagtagtagtattttatgactagagatcacaggcacaagttgaaacaaactaacatgacaagaaagctatagaaaaaataaacattgaactcagttcttcaaggtttcatcaccaacataaggaatgaagttggaaccacaggcagatctgaaaaagaaccaaatagagctcctaaaaatgagaaatatttattgaaataagaaaaaagccctcagacatgttgaatattttattagactcagctgaagagacaagtgaactaaactataagctggatctaaagaaattacccagtgagcagtgaggagaaacaaggagctagaaaacattggaaagttaagagagttcgagggaagaattataaagactaggagtcctagaaagagaaaatttagagaataaaggagaggcagtacttgaaagataacacaattttacaaatttgttggaaaaacatgaattcataaattcaggaagcacaatatataccaaacatatatttaaataaaatccaggcctagactcaaggtattgtaaatgacaagataccaaatacaagattttaaaagcaaccatggggagaaaaagatcagtgaaagcaagacagtcaaatacttagtaggcttcctaacagcaacaatgtacccaaaagagggtagaattctgagaaaaactattagcttagaatttgcaacaagcgaaactgaaacaaacagatgctcagatgaaaaacagatgttatcctcagcacaaattcagtaaagagactacaaaaggatgatcttcaagaagggaaatgattctaaaaggattatctgaaattgaaaaactagtaagcaaataaatgataaacataagtaaatttaaactgttgtttgtataaaacaattataatgaagtgtttataagaaattgtaaacaaatgtaaaactaaataaacattgttatgcaacattaataa

SEQ ID NO: 117904 - DNA, 1900 bp, Homo sapiens
  Payload ID: 3050
  Gene Symbol: C1orf27
  Gene Name: chromosome 1 open reading frame 27
  Uniprot ID: Q5SWX8
  ENST ID: ENST00000419367
  CDS Start-End: 157-1425
gatgaattcagtggcagtgaattgagaccggagggaatctggcccctagaggctggtacttgggcccgaaacccccatctccggcggagagaccgtccgaggtaattgtctgccacgagtgcacattctgaaaacaggagattttagttcctaaaaatgggaagaacctacattgtagaagagactgttggccagtatctttcaaacataaatctccaaggaaaggcttttgtctctggccttttaataggacagtgttcgtcacaaaaggattatgtgattcttgccactagaacgccacccaaagaggagcaaagtgagaacctcaaacatcccaaagctaagttggataacttggatgaagaatgggccacagaacatgcctgccagctaatgtttgctgtggaaaagtctataaatagaaagagattgtggaatttcacagaggaggaagtctcagaacgagtgacacttcacatttgtgcttctacaaaaaaaatattttgtcgaacttatgatatccatgatccaaagagttcagcaagaccagcagattggaagtatcaaagtggattatcatcctcatggctttctttagagtgtacagttcacattaatattcacatcccactttctgctacttctgtcagctatactctggagaaaaatacaaagaatggacttacacgctgggccaaggaaatagaaaatggtgtttatttgattaatggacaagttaaagatgaagattgtgacctattagaaggacagaaaaaatcttctagaggaaatactcaagcaactagtcattcttttgatgtcagagtgctaacgcagttgctcctgaattcagaccacagatccacagccacagtccagatatgtagcggttctgtaaaccttaagggtgctgtgaaatgcagagcttatatccacagcagtaaacccaaagttaaagatgctgtgcaggcagtaaagagggatatattgaacacagttgctgatcgttgtgaaatgctatttgaggatctgcttttgaatgaaattccagaaaaaaaagattctgaaaaagagttccacgtcctcccttatcgagtctttgttccccttcctggatccactgtaatgttgtgtgattataaatttgacgatgagtcagctgaagaaatcagggaccattttatggagatgttggatcacacaattcaaatagaagatttggaaattgcagaggaaacaaacacagcttgtatgagttcttctatgaatagtcaagcttcattggacaacacagatgatgaacaaccaaaacaaccaattaaaactacaatgttattgaaaattcagcaaaacataggtgtgattgcagcatttacagttgcagtccttgctgcgggtatctcctttcattacttcagtgattagggtgaggcacaaagagtttcttgatcatccagagaacattgacagacaattatgaataataaagatgttaacaatccatctgtatttaaaacactagcagccagatctgctgccatgatgcctatttggtgtgtttctgattaaaatgaaatcacaagctgccttgtttagcctgctttacattgtaggtggcccgcatttccagaaataacgttatgcatctagatggaagctgcatgtaacaaatcattattatctatttttaaaagcttcaaaatgatgggatatgatcatagattttagtcttactaatctgaatcacatattaatcaggacattaaaaactttaacagaggcatgatggctcacacgtataatcctaatgctttgagaggctgaggtaggagcatcacctggggctgggagggagttggagaccagcctggatgacataatgagattctgtctctactgg

SEQ ID NO: 117905 - DNA, 1427 bp, Homo sapiens
  Payload ID: 3051
  Gene Symbol: C1orf35
  Gene Name: chromosome 1 open reading frame 35
  Uniprot ID: Q9BU76
  ENST ID: ENST00000272139
  CDS Start-End: 236-1027
aggcgcagtgcgcaggcgcccaaagccgacgtggaggtgatgcgcgggagcacagatccggggcagtgcgctgcgcagaggcgcgcggcgaagccgagtgggcgcgggagtgacgtcacggcgcgcgacgcggaggcggggtcgggcctgggtccgacggtagtgggtagcgggtctcgggttgcgggttgcaggttgcaagccgcaggccccaggcaactgccttcccggcgccatgttcggctccagtcgtggaggcgtgcgcggcgggcaggaccagttcaactgggaggacgtgaagactgacaagcagcgggagaactacctgggcaactcgctgatggcgccggtaggccgctggcagaagggccgcgacctcacctggtacgccaagggccgggcgccatgcgcgggcccgagccgcgaggaggaactggcagccgtgcgggaggcggagcgcgaggcgctgctggccgcccttggctacaagaacgtgaagaagcagcccacgggcctgagcaaggaggacttcgcggaggtctgcaagcgggaaggaggcgaccccgaggagaagggcgtggaccggctgctggggctggggagcgcaagtggctccgtgggccgcgtggcgatgtcccgagaggacaaggaggccgccaaactggggctgtctgtgttcacgcatcaccgcgtagagagcggcgggcccgggacctcggcagcctcggccaggaggaagccgcgggcggaggatcagacggaaagcagttgtgagagccacaggaaaagcaagaaggagaagaagaaaaagaaaaagaggaaacacaagaaagagaagaagaagaaagacaaagagcacaggcggccagctgaggccacctcctctcccacatctcctgagaggcccaggcaccaccaccatgactccgactccaactccccctgctgtaagaggaggaagcggggacacagtggggacaggaggagcccgtctcgcaggtggcatgacagaggctctgaggcctgatggctggaccctgctcactgctgttgtgggaccctgaaccctcccttcaccttgcttgcctcctgcctcggaagctccttgggtgtgggtgaagcccgaggctgctcctgtggaagtggctctgggcaccagcctgtggggctaaagacttgacagctagctctggagcagccggcttcctggaaaacctccaggtttcgcataccagggatggcccctggcttggcctgcgaaggtgaacctgcccagatttatcagtagaggctggactccctctgtgtcctgcccatggttgcagcagccatgggcctatgagcggtctaactgtggccaagtatggtgacctctatttttctttatattgactctttgtatttcaataaatatattttaaaaggaa

SEQ ID NO: 117906 - DNA, 1610 bp, Homo sapiens
  Payload ID: 3052
  Gene Symbol: C1orf43
  Gene Name: chromosome 1 open reading frame 43
  Uniprot ID: Q9BWL3
  ENST ID: ENST00000350592
  CDS Start-End: 218-877
gtcacgtgtcagggggaagctggaaggcgtcgttctcctttcccagctctcctgcctgtccgccatgttttcaggccgggtctggcttggtcttcccccgtaaggaaatggccggggagctccaggggacccaggcgccgtcgcttcggcggagcctgggctgaccagccaggacagcggggtaaacccgaacaattctgcgcgaggtagggaggccatggcgtccggcagtaactggctctccggggtgaatgtcgtgctggtgatggcctacgggagcctggacttgaaagaggagattgatattcgactctccagggttcaggatatcaagtatgagccccagctccttgcagatgatgatgctagactactacaactggaaacccagggaaatcaaagttgctacaactatctgtataggatgaaagctctggatgccattcgtacctctgagatcccatttcattctgaaggccggcatccccgttccttaatgggcaagaatttccgctcctacctgctggatctgcgaaacactagtacgcctttcaagggtgtacgcaaagcactcattgatacccttttggatggctatgaaacagcccgctatgggacaggggtctttggccagaatgagtacctacgctatcaggaggccctgagtgagctggccactgcggttaaagcacgaattgggagctctcagcgacatcaccagtcagcagccaaagacctaactcagtcccctgaggtctccccaacaaccatccaggtgacatacctcccctccagtcagaagagtaaacgtgccaagcacttccttgaattgaagagctttaaggataactataacacattggagagtactctgtgacggagctgaaggactcttgccgtagattaagccagtcagttgcaatgtgcaagacaggctgcttgccgggccgccctcggaacatctggcccagcaggcccagactgtatccatccaagttcccgttgtatccagagttcttagagcttgtgtctaaagggtaattccccaacccttccttatgagcatttttagaacattggctaagactattttcccccagtagcgcttttttctggatttgcattcaggtgttattcttaatgtttctgtcaaagcttcttaaaaatcttcacttggtttcagccatagttcaccttccctgttccaggtttatttaattccaaaggtgagagttggagtgagatgtcttccatatctatacctttgtgcacagttgaatgggaactgtttgggtttagggcatcttagagttgattgatggaaaaagcagacaggaactggtgggaggtcaagtggggaagttggtgaatgtggaataacttacctttgtgctccacttaaaccagatgtgttgcagctttcctgacatgcaaggatctactttaattccacactctcattaataaattgaataaaagggaatgttttggcacctgatataatctgccaggctatgtgacagtaggaaggaatggtttcccctaacaagcccaatgcactggtctgactttataaattatttaataaaatgaactattatcaaataaaa

SEQ ID NO: 117907 - DNA, 1551 bp, Homo sapiens
  Payload ID: 3052
  Gene Symbol: C1orf43
  Gene Name: chromosome 1 open reading frame 43
  Uniprot ID: Q9BWL3
  ENST ID: ENST00000362076
  CDS Start-End: 213-818
gtgtcagggggaagctggaaggcgtcgttctcctttcccagctctcctgcctgtccgccatgttttcaggccgggtctggcttggtcttcccccgtaaggaaatggccggggagctccaggggacccaggcgccgtcgcttcggcggagcctgggctgaccagccaggacagcggggtaaacccgaacaattctgcgcgaggtagggaggccatggcgtccggcagtaactggctctccggggtgaatgtcgtgctggtgatggcctacgggagcctggacttgaaagaggagattgatattcgactctccagggttcaggatatcaagtatgagccccagctccttgcagatgatgatgctagactactacaactggaaacccagggaaatcaaaagatcccatttcattctgaaggccggcatccccgttccttaatgggcaagaatttccgctcctacctgctggatctgcgaaacactagtacgcctttcaagggtgtacgcaaagcactcattgatacccttttggatggctatgaaacagcccgctatgggacaggggtctttggccagaatgagtacctacgctatcaggaggccctgagtgagctggccactgcggttaaagcacgaattgggagctctcagcgacatcaccagtcagcagccaaagacctaactcagtcccctgaggtctccccaacaaccatccaggtgacatacctcccctccagtcagaagagtaaacgtgccaagcacttccttgaattgaagagctttaaggataactataacacattggagagtactctgtgacggagctgaaggactcttgccgtagattaagccagtcagttgcaatgtgcaagacaggctgcttgccgggccgccctcggaacatctggcccagcaggcccagactgtatccatccaagttcccgttgtatccagagttcttagagcttgtgtctaaagggtaattccccaacccttccttatgagcatttttagaacattggctaagactattttcccccagtagcgcttttttctggatttgcattcaggtgttattcttaatgtttctgtcaaagcttcttaaaaatcttcacttggtttcagccatagttcaccttccctgttccaggtttatttaattccaaaggtgagagttggagtgagatgtcttccatatctatacctttgtgcacagttgaatgggaactgtttgggtttagggcatcttagagttgattgatggaaaaagcagacaggaactggtgggaggtcaagtggggaagttggtgaatgtggaataacttacctttgtgctccacttaaaccagatgtgttgcagctttcctgacatgcaaggatctactttaattccacactctcattaataaattgaataaaagggaatgttttggcacctgatataatctgccaggctatgtgacagtaggaaggaatggtttcccctaacaagcccaatgcactggtctgactttataaattatttaataaaatgaactattatcaaataaaa

SEQ ID NO: 117908 - DNA, 872 bp, Homo sapiens
  Payload ID: 3052
  Gene Symbol: C1orf43
  Gene Name: chromosome 1 open reading frame 43
  ENST ID: ENST00000368516
  CDS Start-End: 222-689
ctgagtcacgtgtcagggggaagctggaaggcgtcgttctcctttcccagctctcctgcctgtccgccatgttttcaggccgggtctggcttggtcttcccccgtaaggaaatggccggggagctccaggggacccaggcgccgtcgcttcggcggagcctgggctgaccagccaggacagcggggtaaacccgaacaattctgcgcgaggtagggaggccatggcgtccggcagtaactggctctccggggtgaatgtcgtgctggtgatggcctacgggagcctggacttgaaagaggagattgatattcgactctccagggttcaggatatcaagtatgagccccagctccttgcagatgatgatgctagactactacaactggaaacccagggaaatcaaagttgctacaactatctgtataggatgaaagctctggatgccattcgtacctctgagatcccatttcattctgaaggccggcatccccgttccttaatgggcaagaatttccgctcctacctgctggatctgcgaaacactagtacgcctttcaagggtgtacgcaaagcactcattgatacccttttggatggctatgaaacagcccgctatgggacaggggtctttggccagaatgagtacctacgctatcaggaggccctgagtgagctggccactgcgtgagtttggaggggaacgtgtcagagggagctggtacagtagtgttggactgttgccacagtgcagtgaccttcataaagcatataaacaaaatccatgataccataagagttgtcaggttctagactattagatcagtctcttacattagaaagcagatgcggccgggcacagtggttcacgcct

SEQ ID NO: 117909 - DNA, 1278 bp, Homo sapiens
  Payload ID: 3052
  Gene Symbol: C1orf43
  Gene Name: chromosome 1 open reading frame 43
  Uniprot ID: Q9BWL3
  ENST ID: ENST00000368518
  CDS Start-End: 127-696
cttcccccgtaaggaaatggccggggagctccaggggacccaggcgccgtcgcttcggcggagcctgggctgaccagccaggacagcggggtaaacccgaacaattctgcgcgaggtagggaggccatggcgtccggcagtaactggctctccggggtgaatgtcgtgctggtgatggcctacgggagcctggtgtttgtactgctatttatttttgtgaagaggcaaatcatgcgctttgcaatgaaatctcgaaggggacctcatgtccctgtgggacacaatgcccccaaggacttgaaagaggagattgatattcgactctccagggttcaggatatcaagtatgagccccagctccttgcagatgatgatgctagactactacaactggaaacccagggaaatcaaagttgctacaactatctgtataggatgaaagctctggatgccattcgtacctctgagatcccatttcattctgaaggccggcatccccgttccttaatgggcaagaatttccgctcctacctgctggatctgcgaaacactagtacgcctttcaagggtgtacgcaaagcactcattgatacccttttggatggctatgaaacagcccgctatgggacaggggtctttggccagaatgagtacctacgctatcaggaggccctgagtgagctggccactgcgtgagtttggaggggaacgtgtcagagggagctggtacagtagtgttggactgttgccacagtgcagtgaccttcataaagcatataaacaaaatccatgataccataagagttgtcaggttctagactattagatcagtctcttacattagaaagcagatgcggccgggcacagtggttcacgcctataatcccagcactttgggaggccgaggcgggaggatcatctgaggttgggaatccgagaccagcctgaccaacatggagaaaccccgttctctactaaaaatacaaaattagccgggcgtggtggcgcatgcctgtaatcctagcttctggggaggctgaggcaggagaatctcttgaacccgggaggcggaggttgcggtgagccaagatcgtgccattatactccagcctgggcaacaaaagtgaaactctgtctcaaaaaaaaaaaagaagaaaagaaagcagatgcaactatacaagctagtaaaagaagtttttactagcatttttcttgtgtgcatttttcttgtcttttgtttagcccaataaaatgtcaaaattggtgtagcctagcaaa

SEQ ID NO: 117910 - DNA, 1163 bp, Homo sapiens
  Payload ID: 3052
  Gene Symbol: C1orf43
  Gene Name: chromosome 1 open reading frame 43
  ENST ID: ENST00000368519
  CDS Start-End: 179-886
ttcccagctctcctgcctgtccgccatgttttcaggccgggtctggcttggtcttcccccgtaaggaaatggccggggagctccaggggacccaggcgccgtcgcttcggcggagcctgggctgaccagccaggacagcggggtaaacccgaacaattctgcgcgaggtagggaggccatggcgtccggcagtaactggctctccggggtgaatgtcgtgctggtgatggcctacgggagcctggtgtttgtactgctatttatttttgtgaagaggcaaatcatgcgctttgcaatgaaatctcgaaggggacctcatgtccctgtgggacacaatgcccccaaggacttgaaagaggagattgatattcgactctccagggttcaggatatcaagtatgagccccagctccttgcagatgatgatgctagactactacaactggaaacccagggaaatcaaaagatcccatttcattctgaaggccggcatccccgttccttaatgggcaagaatttccgctcctacctgctggatctgcgaaacactagtacgcctttcaagggtgtacgcaaagcactcattgatacccttttggatggctatgaaacagcccgctatgggacaggggtctttggccagaatgagtacctacgctatcaggaggccctgagtgagctggccactgcggttaaagcacgaattgggagctctcagcgacatcaccagtcagcagccaaagacctaactcagtcccctgaggtctccccaacaaccatccaggtgacatacctcccctccagtcagaagagtaaacgtgccaagcacttccttgaattgaagagctttaaggataactataacacattggagagtactctgtgacggagctgaaggactcttgccgtagattaagccagtcagttgcaatgtgcaagacaggctgcttgccgggccgccctcggaacatctggcccagcaggcccagactgtatccatccaagttcccgttgtatccagagttcttagagcttgtgtctaaagggtaattccccaacccttccttatgagcatttttagaacattggctaagactattttcccccagtagcgcttttttctggatttgcattcaggtgttattcttaatgtttctgtcaaa

SEQ ID NO: 117911 - DNA, 1708 bp, Homo sapiens
  Payload ID: 3052
  Gene Symbol: C1orf43
  Gene Name: chromosome 1 open reading frame 43
  Uniprot ID: Q9BWL3
  ENST ID: ENST00000368521
  CDS Start-End: 200-961
gctggaaggcgtcgttctcctttcccagctctcctgcctgtccgccatgttttcaggccgggtctggcttggtcttcccccgtaaggaaatggccggggagctccaggggacccaggcgccgtcgcttcggcggagcctgggctgaccagccaggacagcggggtaaacccgaacaattctgcgcgaggtagggaggccatggcgtccggcagtaactggctctccggggtgaatgtcgtgctggtgatggcctacgggagcctggtgtttgtactgctatttatttttgtgaagaggcaaatcatgcgctttgcaatgaaatctcgaaggggacctcatgtccctgtgggacacaatgcccccaaggacttgaaagaggagattgatattcgactctccagggttcaggatatcaagtatgagccccagctccttgcagatgatgatgctagactactacaactggaaacccagggaaatcaaagttgctacaactatctgtataggatgaaagctctggatgccattcgtacctctgagatcccatttcattctgaaggccggcatccccgttccttaatgggcaagaatttccgctcctacctgctggatctgcgaaacactagtacgcctttcaagggtgtacgcaaagcactcattgatacccttttggatggctatgaaacagcccgctatgggacaggggtctttggccagaatgagtacctacgctatcaggaggccctgagtgagctggccactgcggttaaagcacgaattgggagctctcagcgacatcaccagtcagcagccaaagacctaactcagtcccctgaggtctccccaacaaccatccaggtgacatacctcccctccagtcagaagagtaaacgtgccaagcacttccttgaattgaagagctttaaggataactataacacattggagagtactctgtgacggagctgaaggactcttgccgtagattaagccagtcagttgcaatgtgcaagacaggctgcttgccgggccgccctcggaacatctggcccagcaggcccagactgtatccatccaagttcccgttgtatccagagttcttagagcttgtgtctaaagggtaattccccaacccttccttatgagcatttttagaacattggctaagactattttcccccagtagcgcttttttctggatttgcattcaggtgttattcttaatgtttctgtcaaagcttcttaaaaatcttcacttggtttcagccatagttcaccttccctgttccaggtttatttaattccaaaggtgagagttggagtgagatgtcttccatatctatacctttgtgcacagttgaatgggaactgtttgggtttagggcatcttagagttgattgatggaaaaagcagacaggaactggtgggaggtcaagtggggaagttggtgaatgtggaataacttacctttgtgctccacttaaaccagatgtgttgcagctttcctgacatgcaaggatctactttaattccacactctcattaataaattgaataaaagggaatgttttggcacctgatataatctgccaggctatgtgacagtaggaaggaatggtttcccctaacaagcccaatgcactggtctgactttataaattatttaataaaatgaactattatcaaataaaacgtatgaatcagtc

SEQ ID NO: 117912 - DNA, 996 bp, Homo sapiens
  Payload ID: 3053
  Gene Symbol: C1orf50
  Gene Name: chromosome 1 open reading frame 50
  Uniprot ID: Q9BV19
  ENST ID: ENST00000372525
  CDS Start-End: 44-643
cctactcgcacagcccagggagtggggaggataaggcgctgtcatggaggacgccgccgcgccggggcggaccgagggggtccttgaaaggcaaggagcgccgccagctgcaggccagggaggagccctggtggagctcaccccgacccccggcggcctggccctggtgagcccctaccacacccaccgggccggggaccccttagacctcgtggcgctcgcagagcaggtgcagaaggctgatgaattcatccgagcaaatgccaccaacaagctgacagtcatagctgagcaaatccaacatttgcaagaacaagccaggaaggtactggaagatgctcacagagatgccaacctgcaccatgtagcttgtaatatagtgaaaaaacctggcaacatttactatctctataaacgggagagtggtcagcagtatttttccatcatttctccaaaggaatgggggacaagttgtccacatgacttccttggtgcctacaaactacagcatgacttgtcctggactccgtatgaggacattgagaagcaagatgctaaaatcagcatgatggacacgttgctaagccagtcagtggccctgcctccgtgcactgaacccaacttccagggactgactcactgagagtgggctttgacaaacagctctcacaggacctggctgtcaacctccttgttgcccccactgttgccttgagaattgaagacatgtaggtgactcacaaacttcttggaaagagaccctgtgtgaatgtaaatgctgtcattatgacttttaattgggatgggaataatcattgagacagagtcactgtctttcgggatcctctttggaccacagatacccaagtcagtcagtttcagagtattggccagtgtactttccttcttcctctccatcacttcttcccttaagttaaagtgttagagaagaccttcttcccataaaaaggttggtggatcgttttccagagagaa

SEQ ID NO: 117913 - DNA, 825 bp, Homo sapiens
  Payload ID: 3053
  Gene Symbol: C1orf50
  Gene Name: chromosome 1 open reading frame 50
  ENST ID: ENST00000464081
  CDS Start-End: 21-149
ggggaggataaggcgctgtcatggaggacgccgccgcgccggggcggaccgagggggtccttgaaaggcaaggagcgccgccagctgcaggccagggaggtactggaagatgctcacagagatgccaacctgcaccatgtagcttgtaatatagtgaaaaaacctggcaacatttactatctctataaacgggagagtggtcagcagtatttttccatcatttctccaaaggaatgggggacaagttgtccacatgacttccttggtgcctacaaactacagcatgacttgtcctggactccgtatgaggacattgagaagcaagatgctaaaatcagcatgatggacacgttgctaagccagtcagtggccctgcctccgtgcactgaacccaacttccagggactgactcactgagagtgggctttgacaaacagctctcacaggacctggctgtcaacctccttgttgcccccactgttgccttgagaattgaagacatgaaatgccactatgcctcccggatgctcctggtcagcttcctgttagacatggcagtcagggcaatgaccagccacatcaacatatgctccaaattgggagccgagctgaatgactttgccgtcttcaccaccttcggcttggcctccgctctgctcctaggcgtggatggacttctgagtgggatcctggccatcatctatgtgtcagctgcttctttccacttgtgcttttattcacctggagtcccctccacatacaagggtctaccctgcccctatgcttcctgcatcttggcttccacctcccttctgaccaaaggca

SEQ ID NO: 117914 - DNA, 1011 bp, Homo sapiens
  Payload ID: 3053
  Gene Symbol: C1orf50
  Gene Name: chromosome 1 open reading frame 50
  ENST ID: ENST00000603943
  CDS Start-End: 7-336
gctgtcatggaggacgccgccgcgccggggcggaccgagggggtccttgaaaggcaaggagcgccgccagctgcaggccagggaggtatgcggggcgggagtcagcagggggaagtcagctcccgcgaggcagccggtctcggggctccgcgggaggccgacggcgggagctcacggcttgtgttcctgggtgtgtgtcgcaggagccctggtggagctcaccccgacccccggcggcctggccctggtgagcccctaccacacccaccgggccggggaccccttagacctcgtggcgctcgcagagcaggtgcagaagttttttctcacctgtaggctgatgaattcatccgagcaaatgccaccaacaagctgacagtcatagctgagcaaatccaacatttgcaagaacaagccaggaaggtactggaagatgctcacagagatgccaacctgcaccatgtagcttgtaatatagtgaaaaaacctggcaacatttactatctctataaacgggagagtggtcagcagtatttttccatcatttctccaaaggaatgggggacaagttgtccacatgacttccttggtgcctacaaactacagcatgacttgtcctggactccgtatgaggacattgagaagcaagatgctaaaatcagcatgatggacacgttgctaagccagtcagtggccctgcctccgtgcactgaacccaacttccagggactgactcactgagagtgggctttgacaaacagctctcacaggacctggctgtcaacctccttgttgcccccactgttgccttgagaattgaagacatgtaggtgactcacaaacttcttggaaagagaccctgtgtgaatgtaagggtaccagtttcttcctgagccatgaccagagccattcccagataaatgaggtttcctggaaggatgttaccagtgccttatctctggccaacatggtgctggggctcttctccatcatcttcagcttcagcaggta

SEQ ID NO: 117915 - DNA, 504 bp, Homo sapiens
  Payload ID: 3054
  Gene Symbol: C1orf52
  Gene Name: chromosome 1 open reading frame 52
  Uniprot ID: Q8N6N3
  ENST ID: ENST00000344356
  CDS Start-End: 1-504
atggcagcggaggagaaggaccctctgagctattttgcggcatacgggagcagcagctcaggctcctcggacgaggaggataacatcgagccggaggagacgagtcgcagaaccccggatccggcgaagtcggcgggcggctgtaggaacaaggcggagaagcggctcccgggacctgacgagctgtttaggagcgtgactcgcccggcctttctctacaatccgctcaacaaacagatagactgggagaggcacgtcgtcaaggcgcctgaggagcctccaaaggaattcaaaatatggaagtcaaattatgtaccacctcctgagacctacaccactgagaagaagcctccgcctccagagcttgacatggcaataaaatggtctaacatatatgaggacaatggtgatgatgctccacagaatgctaagaaagctaggcttctaccagaaggggaggagacgttggaatcagcacttgaagatcttgaaatccagaactga

SEQ ID NO: 117916 - DNA, 1219 bp, Homo sapiens
  Payload ID: 3054
  Gene Symbol: C1orf52
  Gene Name: chromosome 1 open reading frame 52
  Uniprot ID: Q8N6N3
  ENST ID: ENST00000471115
  CDS Start-End: 10-558
gcagccgtcatggcagcggaggagaaggaccctctgagctattttgcggcatacgggagcagcagctcaggctcctcggacgaggaggataacatcgagccggaggagacgagtcgcagaaccccggatccggcgaagtcggcgggcggctgtaggaacaaggcggagaagcggctcccgggacctgacgagctgtttaggagcgtgactcgcccggcctttctctacaatccgctcaacaaacagatagactgggagaggcacgtcgtcaaggcgcctgaggagcctccaaaggaattcaaaatatggaagtcaaattatgtaccacctcctgagacctacaccactgagaagaagcctccgcctccagagcttgacatggcaataaaatggtctaacatatatgaggacaatggtgatgatgctccacagaatgctaagaaagctaggcttctaccagaaggggaggagacgttggaatcagatgatgaaaaagatgagcatacttctaaaaagcgcaaagtagagccaggagaaccagcaaagaagaaaaagtagaaacaaatgaccagaatttctgtactgctaaacttgttgaaatgtttctttggacagattaagttgatattgtgggttattatgccacatctccatgaaaatgcatacgttaatgaactaataagtattgcctcaagaactttccactatagaattctttttttatttaaaacatgtatgtatttaaaactcaactggtgacttgtgattgtgaaattgataacacttggatgcattcttgctctcacagaattggtgacatgctttgagagttttgtcacatgttgacatgccaatgttcttataaaccttttataaaggaatatatttttaaagtaaatatattgtaatgtactgtgaacttgtagggtgcttttcaacagtctttgtacagtgtaaatagatcatggaaataaaattacttattcaatattactattactgtataacattaacatttgaatgtttgtctgtgacaagtaccctatttgtcgtgtgacattttaagttgtaataagaagtattaccatttaaagagtgcctcctgtgttccaggtgctttgtgcatatattttctctgatccttaaacaacctagcgcaaggtattattagtattctcattttataataaagagtgcttgagtagcttgtctgatgtta

SEQ ID NO: 117917 - DNA, 588 bp, Homo sapiens
  Payload ID: 3055
  Gene Symbol: C1orf53
  Gene Name: chromosome 1 open reading frame 53
  Uniprot ID: Q5VUE5
  ENST ID: ENST00000367393
  CDS Start-End: 4-441
ggcatggcggccaggcagatctgggcacggacgggtgccgcgctctgcaggcaaccttccgccgccccgccgccagcacctctctgggtaagagctgggttccgacagcagctcagcttaaccctctgccctgctaacgagggaaactgcggcggctccgcgcccagcacgcccggtaggccggagagagcggcgaggccttcggtgagcgaagagttaaccgcggcggagcgacagatcgcggagctgcacgctgccgcctgcgcggctggccagctaaactatgtggatccagctactggctatgtggtgctcacacagattgcccacttgcaaagaggtgaatgttgtggctctgcgtgcagacattgtccatatggtcaagtcaatgttaaagatccatctaaaaagaagcaattcaattcatatttttatgtttgacaagaatttcatctctgttccctaactgtgcttgtattttttaaaaaataaagccccaattcagaattgctggattattagtacttgaacactagtttaatcctaaatacatatattaaaagaacatcaataaaatgaaaaagctaa

SEQ ID NO: 117918 - DNA, 394 bp, Homo sapiens
  Payload ID: 3055
  Gene Symbol: C1orf53
  Gene Name: chromosome 1 open reading frame 53
  ENST ID: ENST00000436652
  CDS Start-End: 1-247
tgctaacgagggaaactgcggcggctccgcgcccagcacgcccggtaggccggagagagcggcgaggccttcggctggccagctaaactatgtggatccagctactggctatgtggtgctcacacagattgcccacttgcaaagaggtgaatgttgtggctctgcgtgcagacattgtccatatggtcaagtcaatgttaaagatccatctaaaaagaagcaattcaattcatatttttatgtttgacaagaatttcatctctgttccctaactgtgcttgtattttttaaaaaataaagccccaattcagaattgctggattattagtacttgaacactagtttaatcctaaatacatatattaaaagaacatcaataaaatgaaaaagctaa

SEQ ID NO: 117919 - DNA, 418 bp, Homo sapiens
  Payload ID: 3056
  Gene Symbol: C1orf54
  Gene Name: chromosome 1 open reading frame 54
  ENST ID: ENST00000369098
  CDS Start-End: 39-404
tccttttttactttcacagcaatagtgcagaatccagaatggatgtcctctttgtagccatctttgctgtgccacttatcctgggacaagaatatgaggatgaagaaagactgggagaggatgaatattatcaggtggtctattattatacagtcacccccagttatgatgactttagtgcagatttcaccattgattactccatatttgagtcagaggacaggctgaacaggttggataaggacataacagaagcaatagagactaccattagtcttgaaacagcacgtgcagaccatccgaagcctgtaactgtgaaaccagtaacaacggaacctgtggaagaaggctgctatgactctttggatgggagtctggcaagaggaaattggaagataaaataaataataagtgaaat

SEQ ID NO: 117920 - DNA, 600 bp, Homo sapiens
  Payload ID: 3056
  Gene Symbol: C1orf54
  Gene Name: chromosome 1 open reading frame 54
  Uniprot ID: Q8WWF1
  ENST ID: ENST00000369099
  CDS Start-End: 120-515
aggagaagagttgctgcagctccttccctgctttggaggaggaggggaggcggggtaagtttggtgggaaactctgtaatttccttttttactttcacagcaatagtgcagaatccagaatggatgtcctctttgtagccatctttgctgtgccacttatcctgggacaagaatatgaggatgaagaaagactgggagaggatgaatattatcaggtggtctattattatacagtcacccccagttatgatgactttagtgcagatttcaccattgattactccatatttgagtcagaggacaggctgaacaggttggataaggacataacagaagcaatagagactaccattagtcttgaaacagcacgtgcagaccatccgaagcctgtaactgtgaaaccagtaacaacggaacctagtccagatctgaacgatgccgtgtccagtttgcgaagtcctattcccctcctcctgtcgtgtgcctttgttcaggtggggatgtatttcatgtagaaggtggaagaaggctgctatgactctttggatgggagtctggcaagaggaaattggaagataaaataaataataagtgaaataa

SEQ ID NO: 117921 - DNA, 1251 bp, Homo sapiens
  Payload ID: 3056
  Gene Symbol: C1orf54
  Gene Name: chromosome 1 open reading frame 54
  Uniprot ID: Q8WWF1
  ENST ID: ENST00000369102
  CDS Start-End: 771-1166
aaagctgcttgaaaagtggaagttagccttccggatggttagggagacatggaccaggtagggtaactgtctccaccaagagactcatctgtagaaaagtgaacgcactggaaaggggagaaatctaattaaagagtcttcagagcgatgacagccagagtgtgcgagcacggaagggcgaggtatccgttcctggatcctcccctaaggcacctgactcggcctgcctaggtcagcacagccccctcacgagtctcggccttgggccttctctgacgtcgctgggaggaatataggaggaatctgtgagatccttggaaggtggaaaccaactgcgggaaaggacaaatctcccagacccaacccctcacctccgcccaaacttcacctccgacttatcgtccccaattcaggctcccaggcttgccccagttcctccagccccttccgcacctctctcttcgacgctctcccgcgtctcccgggccctctactcaccctgcgaccaggatgataacgcgaagcgggtccccagccacagtgatcaagaaaagcgcgaaggccgggccgaacgcgacgaaagtgcagccgaaaaacaccgcagcccccatggctggtcagctccagacagacagaagaaagggattcttttcagtctagaaaaatgctcaccccttcctcagaacatttccactgtgacgaaaagagactgatgaagcctcagagagaaaggcaactctgggtggtgatgcaatagtgcagaatccagaatggatgtcctctttgtagccatctttgctgtgccacttatcctgggacaagaatatgaggatgaagaaagactgggagaggatgaatattatcaggtggtctattattatacagtcacccccagttatgatgactttagtgcagatttcaccattgattactccatatttgagtcagaggacaggctgaacaggttggataaggacataacagaagcaatagagactaccattagtcttgaaacagcacgtgcagaccatccgaagcctgtaactgtgaaaccagtaacaacggaacctagtccagatctgaacgatgccgtgtccagtttgcgaagtcctattcccctcctcctgtcgtgtgcctttgttcaggtggggatgtatttcatgtagaaggtggaagaaggctgctatgactctttggatgggagtctggcaagaggaaattggaagataaaataaataataagtgaaataa

SEQ ID NO: 117922 - DNA, 2096 bp, Homo sapiens
  Payload ID: 3057
  Gene Symbol: C1orf56
  Gene Name: chromosome 1 open reading frame 56
  Uniprot ID: Q9BUN1
  ENST ID: ENST00000368926
  CDS Start-End: 109-1134
ggcctcggttcaaacgacccggtgggtctacagcggaagggagggagcgaaggtaggaggcagggcttgcctcactggccaccctcccaaccccaagagcccagccccatggtccccgccgccggcgcgctgctgtgggtcctgctgctgaatctgggtccccgggcggcgggggcccaaggcctgacccagactccgaccgaaatgcagcgggtcagtttacgctttgggggccccatgacccgcagctaccggagcaccgcccggactggtcttccccggaagacaaggataatcctagaggacgagaatgatgccatggccgacgccgaccgcctggctggaccagcggctgccgagctcttggccgccacggtgtccaccggctttagccggtcgtccgccattaacgaggaggatgggtcttcagaagagggggttgtgattaatgccggaaaggatagcaccagcagagagcttcccagtgcgactcccaatacagcggggagttccagcacgaggtttatagccaatagtcaggagcctgaaatcaggctgacttcaagcctgccgcgctcccccgggaggtctactgaggacctgccaggctcgcaggccaccctgagccagtggtccacacctgggtctaccccgagccggtggccgtcaccctcacccacagccatgccatctcctgaggatctgcggctggtgctgatgccctggggcccgtggcactgccactgcaagtcgggcaccatgagccggagccggtctgggaagctgcacggcctttccgggcgccttcgagttggggcgctgagccagctccgcacggagcacaagccttgcacctatcaacaatgtccctgcaaccgacttcgggaagagtgccccctggacacaagtctctgtactgacaccaactgtgcctctcagagcaccaccagtaccaggaccaccactacccccttccccaccatccacctcagaagcagtcccagcctgccacccgccagcccctgcccagccctggctttttggaaacgggtcaggattggcctggaggatatttggaatagcctctcttcagtgttcacagagatgcaaccaatagacagaaaccagaggtaatggccacttcatccacatgaggagatgtcagtatctcaacctctcttgccctttcaatcctagcacccactagatatttttagtacagaaaaacaaaactggaaaacacattgtttggtcttgtgtttctttacagaggtacctgagggaggagagacataaatcccttcatccctaagactgaactatgtaactagcagcctctggcttgttttctactccctgtccctcaggataaaatgttgatattgctcattttcctcatttccaacattgttttaaaacaagtacttcttttacaggcttgaaaaatctcaaataaacgctaagaaaagggagtaggaagaacaaggagttgagcccttgaaagatgacagtggtcttcttgccttcatgcttggccctctctcctcaaaagggcaatgttggtacaaaattccatctcagccactttcgaggagttatcttcattagctatatccatcctttaatccaacacacacctgcaatgattactgtgcaactattttgcttaattttttatttgaaaaaatgtatttaaaagtccaacaactttttaatataaattacgactctcaaacccattcccatcactttattagtgatggtagcatacatattagagaaggtagctaaaggcaagagagcaccaaaggaaaaagactgtccaaagaacaggtattagaatgaggccgaagatcacggtgaccagagatttctaggagtctctaacctttccaccctatcctgttaaccctttagatctctagtataacactcaggctactgaggtattttagagcaacaagctgggttactttcagagcaaccagcttgactggaactgagagtaaattgggaatgtatgaccaatcttagaccctgaaaaatggcagaaaatacatggaaatttgaaaaaaaaaaaaaaaaaaaaaaaaaaa

SEQ ID NO: 117923 - DNA, 688 bp, Homo sapiens
  Payload ID: 3058
  Gene Symbol: C1orf61
  Gene Name: chromosome 1 open reading frame 61
  ENST ID: ENST00000310027
  CDS Start-End: 1-423
gggccacccgaacagtctctcctcctcacagaagcctggagctgggcatccaagaagaagcagcctcatttgttttctggtgtcatcgtaggtggccacctatggcttttgggcttctcacctggggcgggtgggttctgcaccaccctcccaccctccttcctccgtgtggacgatagagccacatccagcaccacggacagctcccgggcgccttcatctcctcgtcctccaggcagcacaagccattgtggaatctccaccaggtgtacagaacggtgcctctgcgtcctgccactcaggacctctcaagtccccgatgtgatggctcctcagcatgatcaggaaccaaaaagaagaatgtacttcatctggttgggctggattccctctgataagccttcccagttgactgaaagatgaggctaggctctagcaagttgaagtcaaaccagctccttcaagaagctttgagcagaatgaagtggggaggacccagcttccagcccaggaagcccactgtacctggagccatctgggataagactttgacccatgactcccatatccacagcctgtccatcctagcccatcccagtttatcctgtatcatttgagctgggattcccacatcctctgagttggaagtcccatctcaagtcttcaataaagactcttgaatattgaa

SEQ ID NO: 117924 - DNA, 652 bp, Homo sapiens
  Payload ID: 3058
  Gene Symbol: C1orf61
  Gene Name: chromosome 1 open reading frame 61
  ENST ID: ENST00000357975
  CDS Start-End: 1-510
ccacccgaacagtctctcctcctcacagaagcctggagctgggcatccaagaagaagcagcctcatttgttttctggtgtcatcgtaggtggccacctatggcttttgggcttctcacctggggcgggtgggttctgcaccaccctcccaccctccttcctccgtgtggacgatagagccacatccagcaccacggacagctcccgggcgccttcatctcctcgtcctccaggcagcacaagccattgtggaatctccaccaggtgtacagaacggtgcctctgcgtcctgccactcaggacctctcaagtccccgatgtgatggctcctcagcatgatcaggagaaattccatgatcttgcttattcctgtcttgggaagtccttctccatgtctaaccaagatctatatggctatagcaccagctctttggctcttggcttggcatggctaagttgggagaccaaaaagaagaatgtacttcatctggttgggctggattccctctgataagccttcccagttgactgaaagatgaggctaggctctagcaagttgaagtcaaaccagctccttcaagaagctttgagcagaatgaagtggggaggacccagcttccagcccaggaagcccactgtacctggagccatct

SEQ ID NO: 117925 - DNA, 867 bp, Homo sapiens
  Payload ID: 3058
  Gene Symbol: C1orf61
  Gene Name: chromosome 1 open reading frame 61
  ENST ID: ENST00000368242
  CDS Start-End: 1-566
ctgcgcagaggggcccggggaaagccggcctcacgggcgggagggagaggcttgagcgaggggctagagccgcgaggactgaccagcaccagaggatacaagaggaggagagagacctcactggttcgggcgacatttcacccccccagcaccccagtcggcacagcttctcacctggggcgggtgggttctgcaccaccctcccaccctccttcctccgtgtggacgatagagccacatccagcaccacggacagctcccgggcgccttcatctcctcgtcctccaggcagcacaagccattgtggaatctccaccaggtgtacagaacggtgcctctgcgtcctgccactcaggacctctcaagtccccgatgtgatggctcctcagcatgatcaggagaaattccatgatcttgcttattcctgtcttgggaagtccttctccatgtctaaccaagatctatatggctatagcaccagctctttggctcttggcttggcatggctaagttgggagaccaaaaagaagaatgtacttcatctggttgggctggattccctctgataagccttcccagttgactgaaagatgaggctaggctctagcaagttgaagtcaaaccagctccttcaagaagctttgagcagaatgaagtggggaggacccagcttccagcccaggaagcccactgtacctggagccatctgggataagactttgacccatgactcccatatccacagcctgtccatcctagcccatcccagtttatcctgtatcatttgagctgggattcccacatcctctgagttggaagtcccatctcaagtcttcaataaagactcttgaatattgaatcacatta

SEQ ID NO: 117926 - DNA, 879 bp, Homo sapiens
  Payload ID: 3058
  Gene Symbol: C1orf61
  Gene Name: chromosome 1 open reading frame 61
  Uniprot ID: Q13536
  ENST ID: ENST00000368243
  CDS Start-End: 118-588
ctcctcacagaagcctggagctgggcatccaagaagaagcagcctcatttgttttctggtgtcatcgtaggtggccacctatggcttttgggaatgtaaaaagggcagctctctggcatgttcctgactgaggatctcataacatttaacttgaggaacttcctccttttccagctttgggagtcaagcttctcacctggggcgggtgggttctgcaccaccctcccaccctccttcctccgtgtggacgatagagccacatccagcaccacggacagctcccgggcgccttcatctcctcgtcctccaggcagcacaagccattgtggaatctccaccaggtgtacagaacggtgcctctgcgtcctgccactcaggacctctcaagtccccgatgtgatggctcctcagcatgatcaggagaaattccatgatcttgcttattcctgtcttgggaagtccttctccatgtctaaccaagatctatatggctatagcaccagctctttggctcttggcttggcatggctaagttgggagaccaaaaagaagaatgtacttcatctggttgggctggattccctctgataagccttcccagttgactgaaagatgaggctaggctctagcaagttgaagtcaaaccagctccttcaagaagctttgagcagaatgaagtggggaggacccagcttccagcccaggaagcccactgtacctggagccatctgggataagactttgacccatgactcccatatccacagcctgtccatcctagcccatcccagtttatcctgtatcatttgagctgggattcccacatcctctgagttggaagtcccatctcaagtcttcaataaagactcttgaatattg

SEQ ID NO: 117927 - DNA, 473 bp, Homo sapiens
  Payload ID: 3058
  Gene Symbol: C1orf61
  Gene Name: chromosome 1 open reading frame 61
  ENST ID: ENST00000400991
  CDS Start-End: 1-199
ccagccgcaggggccacccgaacagtctctcctcctcacagaagcctggagctgggcatccaagaagaagcagcctcatttgttttctggtgtcatcgtaggtggccacctatggcttttgggaccaaaaagaagaatgtacttcatctggttgggctggattccctctgataagccttcccagttgactgaaagatgaggctaggctctagcaagttgaagtcaaaccagctccttcaagaagctttgagcagaatgaagtggggaggacccagcttccagcccaggaagcccactgtacctggagccatctgggataagactttgacccatgactcccatatccacagcctgtccatcctagcccatcccagtttatcctgtatcatttgagctgggattcccacatcctctgagttggaagtcccatctcaagtcttcaataaagactcttgaatattgaatcacattaa

SEQ ID NO: 117928 - DNA, 768 bp, Homo sapiens
  Payload ID: 3058
  Gene Symbol: C1orf61
  Gene Name: chromosome 1 open reading frame 61
  Uniprot ID: Q13536
  ENST ID: ENST00000615748
  CDS Start-End: 1-471
atgttcctgactgaggatctcataacatttaacttgaggaacttcctccttttccagctttgggagtcaagcttctcacctggggcgggtgggttctgcaccaccctcccaccctccttcctccgtgtggacgatagagccacatccagcaccacggacagctcccgggcgccttcatctcctcgtcctccaggcagcacaagccattgtggaatctccaccaggtgtacagaacggtgcctctgcgtcctgccactcaggacctctcaagtccccgatgtgatggctcctcagcatgatcaggagaaattccatgatcttgcttattcctgtcttgggaagtccttctccatgtctaaccaagatctatatggctatagcaccagctctttggctcttggcttggcatggctaagttgggagaccaaaaagaagaatgtacttcatctggttgggctggattccctctgataagccttcccagttgactgaaagatgaggctaggctctagcaagttgaagtcaaaccagctccttcaagaagctttgagcagaatgaagtggggaggacccagcttccagcccaggaagcccactgtacctggagccatctgggataagactttgacccatgactcccatatccacagcctgtccatcctagcccatcccagtttatcctgtatcatttgagctgggattcccacatcctctgagttggaagtcccatctcaagtcttcaataaagactcttgaatattgaatcac

SEQ ID NO: 117929 - DNA, 3039 bp, Homo sapiens
  Payload ID: 3059
  Gene Symbol: C1orf64
  Gene Name: chromosome 1 open reading frame 64
  Uniprot ID: Q8NEQ6
  ENST ID: ENST00000329454
  CDS Start-End: 69-578
acatcctggaagagtggcctaggacagctcctctcctgccagagctaggcaggcgccgaagtagccgcatggccccgtcagaagaccccagggactggagagccaacctcaaaggcaccatccgtgagacaggcctggagaccagctccggtgggaagctggctggccatcagaagaccgtccccacggctcacctgacttttgttattgactgcacccacgggaagcagctctccctggcagcaaccgcatcaccaccccaagcccccagtcccaatcgagggcttgtcaccccaccaatgaagacctacatcgtgttctgtggggaaaactggccccatctgactcgggtgacccccatgggtgggggatgccttgcccaggccagggccaccctgccgctctgcagagggtctgtggcctcagcttccttcccagtcagcccgctctgcccccaggaggttcccgaggctaaggggaaacccgtgaaggctgcgcctgtgaggtcttcaacttggggaacagtcaaggactcactgaaagccctctcctcttgtgtctgtgggcaggccgattagctggaagggccgggctctgatgcccagaggctgcaattcccagggcctggccctgcttccccagctaagcaggagtcttttgtgcttgagccaaggaaacatcattagatccgctaaggggcatctgaaacatccgtcgagtggcagaggcaggataagtcacctgcacatgaagagactcattcattcatacagcaaatattactggtacatcttccacatgccaggccctgcaaagtgctggggagataccatggttttcctggagctggtatttttggggtggagggaacccaccctgaataaataaagtaacccaataaataaagaagatgattttgaacagcgatgaatgctctgcaggaactgaaacaggatgctagagggagagtgattggggtgaagacctttcctgatgcagtgcttggtaagggcctctctgcgcaggcaacaaagtgtgatctaaaagatgagaaggggccagccctgagaaaatccaccctccccagggccacctgctgtcatcttaccccagggcaggccagagcagtggtcagaatgccccagcatgacggggaggggcaacgggtttcttgctgccatcttggctcagaggcgagtgtgtaggtcactgcaaaggcaggggataccacgtggggagactcgagggccatgccagttggggctgggaggctcagggaagttggctccaggagactccatcccataaggcagcccaggtgggacctggggatctgagatgggaaataaggggatctggcttctcaaaagggagggaggtactcaaaaatagagtatcatgtttgaacgaatgaaaacaagacatgttatttattgagcatctactgcataccaggctcatgctgccctctagggatagcaaaaaaaaaaaaaaaaggtggggggaggaggttcacccctcagggcaatcgtgttccctgagcaggaggtggagttactggtgtgggtgtgaaggtgtctgtgagtctaaggcatgcacagcactgtgagaaaccctaaagcaacctatttaaggaagtcagtctcaaagctcccagataaaaatcactgggtttttctgtatttattttagagacagagtctcactctatcacccaggctggagtgcagtggaacaatcacagctcactgcagcctcaaactcctgggctcaagtgatcctcctgcctcagcctcccgagtagctgagactataggtgcaccactacgcccagcttgacttcttttagtagagaagaggtctcactgtgctgcccaggctggtcttgaactcctggcctcaagctatcctcccgcttcagcttccctaagtgcttggattataggtgtgagccaccgtatctggtcattaatttattcaatgactattttactaggttcctacaaatactagctgctaacatttaacatgtaattgaccatttactctgtgtcagagaaacaacatgggcactgtatttgtgaccattttatagattagagagctgaggcacagagaggttgaagaatggactcaaagttccatagactggtaccattgagattagaactcaggcaagtctggtgcccatattcttgcttgtaactgtaaggtatataccctctcatcctggtagcgtctcttctaggcagaggggacacacagaggataaatgtaaccctgtcctcaaggagctcacagccaggtgggggaggccagaaagaaagcacacaattgccatagcttctgagaagtgcaacagtaagggcaacacagaatgatgctggaggacaaccagcccactctagagagaggagatcagggaggacttcctgcaggaagtgatgccgaaaatgagatctgaccggtgactaagctatacaaaagggtggggtgggggagcaagtggggagtgctctgggcagaaggaccagtcgttcagtctggctagggtaattgtcattcattcatttattcaccaagtatttattgggcatccactgaatgccaggctttgggctaaaccatgagatggagcaatgaataagacaatgaggcccagccacaaaatagtttatcctctagttgggggagacaggcaatgcacacacacaaaacaaacagatcagaaaggtggcaggaggccaggcgcggtggctcatgcctgtaatcccagcactttgggaggccaaggagggggaggcggggggagatcacctgaggtcaggagttcgagaccagcctggccaacttggcgaaaacccgtctctactaaaaatataaaaattagctgggcgtggtggtgggcacctataatcccagctacttgggaagctgaggtgagagaattgcttgaacctagaaggcagaggttgcagtgagccgagatctcgccactgcactccggcctgggtgacagagcaagagcaagactgtctc

SEQ ID NO: 117930 - DNA, 949 bp, Homo sapiens
  Payload ID: 3060
  Gene Symbol: C1orf68
  Gene Name: chromosome 1 open reading frame 68
  Uniprot ID: Q5T750
  ENST ID: ENST00000368775
  CDS Start-End: 1-753
atgtgtgaccagcagaagcagccacagttccctccatcttgtgtgaaaggttcgggactaggggctgggcagggtagcaatggtgcctctgtgaaatgcccagttccatgccagacccaaactgtctgtgtgacaggccctgctccatgccctactcaaacttatgtgaagtaccaagttccatgccagactcaaacctacgtgaagtgcccagctccctgccagaggacctatgtgaaatacccaacaccctgccaaacctatgtgaagtgcccagctccctgccagacaacctatgtaaaatgcccaactccctgccaaacctacgtgaagtgcccagctccctgccagatgacctacatcaaaagtccagctccctgccagacccagacgtgctatgtccagggtgcttctccttgccagagctattatgttcaagctcctgcaagtggctcaacctcccagtactgtgtcactgacccatgctctgctccctgttccaccagctactgctgtctggctccccggaccttcggggtgagtcccctgagacgctggattcagcggccccagaactgcaacacaggatcatctggctgctgtgagaattcgggaagctctggatgctgtggttctgggggctgtggctgcagctgtggatgtggcagctctgggtgctgctgtttgggaattatccccatgaggtcccgaggtcctgcatgctgtgaccatgaggatgactgctgctgctaaacatacgacagctcaactccagaatgcactgccccgctaccccttctggaacatgcaccagcttctggccccctctctgttagtgccagtgatgtagaacctcatcactttgcctctgtgctttgcttctctaccaaggcagcctgccagagttagtacagtccccaaactttggcatgaataaagctctgaatgc

SEQ ID NO: 117931 - DNA, 4684 bp, Homo sapiens
  Payload ID: 3061
  Gene Symbol: C1orf74
  Gene Name: chromosome 1 open reading frame 74
  Uniprot ID: Q96LT6
  ENST ID: ENST00000294811
  CDS Start-End: 258-1067
atgcgcaagaaggtgcctgcgggactggagcagagcgggctgcgagggtcttcccagcgcaggcgggttttccagtgttacttgcggctgggcgtgggggactagctgcctttctggcagcaggcaggaagccgcaaaaagtttctgagcccccgaacctgtagcggacgtggaaaaagaacgcccctcctcaagtgtctggctgaaagatgccacccagggaagggaactcgggctagctaaggaggccattcttgatgttgcttctagatctcatgtcatcaccgagccctcagctgctggtggcagctgctcagcagacccttggcatgggaaagagacggagtccaccccaagccatctgccttcacttagctggagaggtgctggctgtggcccggggactgaagccagctgtgctctatgattgcaactgtgcaggggcatcagagctccagagctatctggaggagctgaaggggcttggcttcctgacttttggacttcacatccttgagattggagaaaacagcctgattgtcagtcctgagcatgtatgtcagcacttggagcaggtgctgcttggtaccatagcctttgtggatgtttccagctgccagcgtcacccttctgtctgctccctggaccagcttcaggacttgaaggccctcgtggctgagatcatcacacatttgcaggggctgcagagggacttatctctagcagtctcctacagcaggctccattcctcagactggaatctgtgtactgtatttgggatcctcctgggctatcctgttccctatacctttcacctgaaccagggagatgacaactgcttagctctgactccactacgagtattcactgcccggatctcatggttgctaggtcaacccccaatcctgctctattcttttagtgtcccagagagtttgttcccaggcctgagggacattctaaacacctgggagaaggacctcagaacccgatttaggactcagaatgactttgctgatctcagcatctcctctgagatagtcacactgccggctgtggccctctgactttaactctcctcccatatagaaggtactcagtaaatgatcatctctaggttggggatggcaaataatcatctcaactgccaattccaagtgtcttgaatacactaaggcacaatgctgtagatcagttggccacaaatgcaaagggcatgtaaataggtaatggtggtgctagtagcaaattggtagatagtacatacttgccatttctatactaggaagtcctcttagtggagatgttttcattttcactggataaaagatagaaggaaggagatgatagaggaaaagcagggtgatggaagacaagccaaacactcttgcatggtaaccttgtaaatatacctgctctatgtgggtgctgcatgctaggaaagtagggctgggggcttttctgcatgtttatatgcctccaactgaatttgaggagagtagaccaccagtatgcttaaatatgtgatacttgttaatgtaatacaccattcaggaataaactgagagttctgaggaacaatctggtcaggtgaagtttatttacagtaggttaagaaattaataaaaagtcagaaatcctaagtcagttggaaaacccaagctgtaatgtacccaaaccttctgagtttttcgctgagttgcttgcttctgattttcacccaaggcagttgtcacaaattattcagatcatcaggttgtctttattggccaggaacactgccagtgctgcagcaatcaccaccatcagcactgggagccatcgcccacattgcctctgtagggggacagggagacagaagaaagtggccatgagtggattggaaaagatataggcaaaaatctttcttcttcctactctagcccagtggaaaacgctgggttggtggtggagaaaaagctttttactctgtctcccattttgtcacctgtcttgggataaaaccacttaaccaatgttctctggcccagggagccgtatccatcagggaccagatatataaatactgatatgaataatgaagggtggaaaataacccagcaaaattatattctttctttgtattccccagtacttttgtgtccttctgttcttgccaccatgcttatcatcggctaaaagaacaccctttcatactttagctaagagtaagtctttccttctggcattgagagttctgtgaaagttgggctttgatggacgagccagtgtttttttcaatggttgccataatgtcagtatagtataaaccaagcacagtgggacaggatggccagttgttggcgtgggctgatatattttatgtgcaaaacttggttaaagaaggaatcgtcccatcatccagggctttatgggaaggagagaccctcttactctgggaggcagctgctggctctggttcagctcttctcgacagtgctgcagcttacgcaggcaggagagatactcgtcactgaggttgtctaattctgaatgcagttctctgcactggggagaacatcaccaaagtcatcactgtcacttctgtctaggacagagcccaggcaggggagactgccctttgtaagtttcactcatttggaatttttaccaccatcttcccttcccagccattctcagggatttgagtttgtcttttgactgtcttacattgtctggaatgtgttcatttaaatgattgacagtaatgcatattatagtattacattttatacatttaagttcttttatatgactttacgtgcaagtgctttgcaaatgagagacaccgaaaaatgaagttcttatagaacaaacgacctagaagtgaccttagtacaagtttctttcccaggagctagttgcatatcaatacttctggggatgtgtatgtttgtgagtatgtacaaaggaagagttttactctttaagagacatataaagacttaagatactcaatgtgggacgacatattgagaagttaatatttttattaaatgtgtttgagttttggtcgactttctaaaaggtaatcatttaataaaaccttgaataggagttggtataaataaggaagggaaaagattgacaagtcagcccaaaagcacagacactttatgtaggcaaatgaatgtctgtggttatccactcacaacttaaactttgaaatccctgctttttgactgcctcccaggtttctctgctatttcgcaaatgagccctcactatctcaggtcaccctctcacctccttttccttggcctggagctgcaaagtcttcttttgcagctggtctctgagatcccagtctttctccttccctgtaccctcaggctccacttcgttagggaaggactttggactccacacgggcaaagcctgatctaaaaaagcagccagattcttggtgacagtgaggcccacacctctgaggaagggccctgagggtgaaaccactaggagtggggagaggggagggaacttgggagggcgtgctcttggctagactgatggcattctctgacataaaggttaacttccagtaggcccctgctaagcttggacagacagctggaatctgagctccttgagggcaagattgggatcttttctttgtatccccagtcttatctagtgctagatagttttagtgaatacttcttaattgaatttcattggttgtatgtcacattcttcctagtttgtcaaataagtttggtaaatgctttaatacaatcccttttccctgatgtcctcatttgaaagttgtgaagatggcagtcatatcctaaaatttatcttcatatggttaaagatggttttttagccaccctgcagtcttagtcttggtgaaaagagcatggactaggagtcagaagttttggattgttgttatagctgtgttgttagtttgtgtcaccatagactttcatgttcttatccatactctgtgagcataaaaatttctgccttatctattatattatgcccaatgattgtgaagagaaaacaaaaggtcgtgtgtagtggacaggtgaggagctattgcccctctgtatacacagtgaattctcaggaaacatggacagtagactctctagggctaacagtgagttgactctggactgctatgtggtttggggctggggagttggatgtgatttggaaaatcaagtgtgtaaaaattgacatgaaatcctgagttcaaaataaatttattgaaatgttcaacacagacatgtgctttcagagagaatagaaaccctttttcacagtttatatacctcaagatagaaggctaactagttgaagtgtcctcagagccaatgatcagtccttaaaaagctcccacacatcccggacttaacagactcccagaactggctgggactccaggaggtcatgtagtccatcccgctgcctctaggcaggtaagagaagagcaatatcttagaatttgtggtaataaatttgctgacctttctttgttaagagtttctcctgttcttgaagctgtaaggattgattttgaagcaaacctgttggaaaacacaaggaacttgtctatgctagcatatttactacaaaaagttttcttttcagaactttgcttagaaccttggttattaaatatgttcccatctgc

SEQ ID NO: 117932 - DNA, 2028 bp, Homo sapiens
  Payload ID: 3062
  Gene Symbol: C1orf87
  Gene Name: chromosome 1 open reading frame 87
  Uniprot ID: Q8N0U7
  ENST ID: ENST00000371201
  CDS Start-End: 109-1749
gggtctgagagtgtcagcttcctggggagaagcacggaccgcgcacctctgagctgccagggtggggacgctgccctagcgggatctgaagggattttgaaaggaatcatgtcttcagcctggaagactccccgtggatcagatgcaatgcctgagatcatggtgaaaatcattggaagtaaacactttcaatacctcgtggagaagccaaagatcaaggagaatgacagcttgaaaacagaaacccaaacaatgcaccagaaaccaatgactgataatgcaaggcagatgagcagagacaccccagttcccattaacttcactgatcagcaaaccactgataatccagatgatgtgaaagagaaaaagcacccagagaacaaccagaaatcagaaaacaaccagaaactactaacaggggcaaacagtagcagattcctggatggcaatattcccagtcaagcaaatgtccactgcagctctgtaccaaccggagaccagtccttatcctatgtgcatggcattcccaggagaaagcttagagactggtccttggaacagatggtgagaggcagctctgaccaacctgaggatattggccagagcccaagtgggacaacaaatgaagacgcttttcttcttgccctggtcagaagagaactcaagtcacgtcctttgagttccaacttattagaaaagcttcagaaagagctgaagatcctggacccaatctcttcaggatttcttctccaatctcagctgagccgcctctttttgaagcatgaagtccctctacagttaccaacagttaaaatcctttgtcagagattttctaagaggggttctcctgaaatggtgaattatgaaaagctactctggtttttaaacagtgcagcatcagattatccacagcaaaataaagcagctgcagacctgagaaaaactgagagtcatggcactcatagccaaagcactccacctcagcactccagctcacagccagaagtgaacaggagtctgttggagattttgaagatggcactaaggacaaccaatggcagactcaacatagacaatctcaatctgagttttcgaaaagaagatcgctcgttctctggctgcctccctctacctaaggtcagggctatatgtgggaagcatggattatatctgaccctgagcctgctggaaacattgcttaaccatcaagatttgggttaccaaaatgaaataaaatggcagaattttgttgagatgctgaccagagcttcttctgatttgttatctgatttgcctacagggaagaatgaaaagaaagcccctgcccctccaatggagcctgaagtccccgagatgtctcaaagcaaaactgaacatatgaaaactccagaagaggagctgcagccagaaagctctcctgctgaaacttcagcctgcaaagatcctctgaaacctttaaagatcaggccagtctcccagcccttcgtgaatccagctgtgaagaacaaggctgaggaatgtgagacgtggatagacaggttcaggaagctggaaaatgccctctacctgtgtgatctgagtaacacaggagttctggagaaggaacgagccagacgcctcattcacaactacaatctcatttacaacctgtccctgagccctcagaaaatcgaccaggccttgcgcagattccgttcgggagaaaatatgctcttggagccagcactgcggtacttaaaggagctatgataacaagcccatattgtgagaacagatgtttcccttatctccctttttacccagacacatgtttctccccagcctaagtgtagtggcggaggcattgtcagagtggaggccgatgcagctattgtagatgcttttgatttggacttagtttctggctatgatgctcactcataagcagttcaaagtgatcagaggaaacctagttttatcttttgatgtggcaagaacccagctacttagaatctccttctgttttaataaaacttattattaatatta

SEQ ID NO: 117933 - DNA, 1307 bp, Homo sapiens
  Payload ID: 3062
  Gene Symbol: C1orf87
  Gene Name: chromosome 1 open reading frame 87
  ENST ID: ENST00000450089
  CDS Start-End: 75-1028
cggaccgcgcacctctgagctgccagggtggggacgctgccctagcgggatctgaagggattttgaaaggaatcatgtcttcagcctggaagactccccgtggatcagatgcaatgcctgagatcatggtgaaaatcattggaagtaaacactttcaatacctcgtggagaagccaaagatcaaggagaatgacagcttgaaaacagaaacccaaacaatgcaccagaaaccaatgactgataatgcaaggcagatgagcagagacaccccagttcccattaacttcactgatcagcaaaccactgataatccagatgatgtgaaagagaaaaagcacccagagaacaaccagaaatcagaaaacaaccagaaactactaacaggggcaaacagtagcagattcctggatggcaatgtcagggctatatgtgggaagcatggattatatctgaccctgagcctgctggaaacattgcttaaccatcaagatttgggttaccaaaatgaaataaaatggcagaattttgttgagatgctgaccagagcttcttctgatttgttatctgatttgcctacagggaagaatgaaaagaaagcccctgcccctccaatggagcctgaagtccccgagatgtctcaaagcaaaactgaacatatgaaaactccagaagaggagctgcagccagaaagctctcctgctgaaacttcagcctgcaaagatcctctgaaacctttaaagatcaggccagtctcccagcccttcgtgaatccagctgtgaagaacaaggctgaggaatgtgagacgtggatagacaggttcaggaagctggaaaatgccctctacctgtgtgatctgagtaacacaggagttctggagaaggaacgagccagacgcctcattcacaactacaatctcatttacaacctgtccctgagccctcagaaaatcgaccaggccttgcgcagattccgttcgggagaaaatatgctcttggagccagcactgcggtacttaaaggagctatgataacaagcccatattgtgagaacagatgtttcccttatctccctttttacccagacacatgtttctccccagcctaagtgtagtggcggaggcattgtcagagtggaggccgatgcagctattgtagatgcttttgatttggacttagtttctggctatgatgctcactcataagcagttcaaagtgatcagaggaaacctagttttatcttttgatgtggcaagaacccagctacttagaatctccttctgttttaataaaacttattattaatatta

SEQ ID NO: 117934 - DNA, 2136 bp, Homo sapiens
  Payload ID: 3063
  Gene Symbol: C1orf94
  Gene Name: chromosome 1 open reading frame 94
  Uniprot ID: Q6P1W5
  ENST ID: ENST00000373374
  CDS Start-End: 540-1766
acagctggggagccagcccggtggccctgggcgggcgaatctcctcagaatcgcgggcctggtccccacccccaacacgcttgtatgcccgcccctcccgacgccgccttgctgggtgccaagaaccaaccgaagcagccagaactcctcagtgaaaggcctgctttatgttcccggggcagtgaggagggggcttctcccttcccattgtccagactcagcccccgaaagagagggctcagccttcccaccagccctggagaggaggaagggactgactacgccagcaagctctggagctcagcagtggcaaagatgagatctccttgttggtggaacaggagttcctaagcctcaccaaagagcactcgatcctggtcgaagagagttctggggagctggaggtacccggcagctctcccgaggggaccagagagctggctccctgcattcttgcccctcctctagtggcaggcagtaatgagcgccccagagcctccatcattgtcggagacaagcttctgaagcagaaggtggccatgcccgttatcagcagcaggcaggactgtgattctgccacttctactgtcacagacattctgtgtgccgccgaggtcaagagcagcaaggggacagaggacaggggccgcatcctaggtgactccaacttgcaagtcagcaagcttctgtcccagttcccactgaagtccactgagacatccaaggtccctgacaacaagaatgtgctggacaagacaagggtcaccaaggacttcctacaggacaacctgttcagtggccctggacccaaggagcccacagggctgagcccatttctgctgctgcctccccgacctcctcctgcacgtcctgacaagctccctgagctccctgctcagaagaggcagctcccagtgtttgccaagatctgttccaagcccaaggctgaccctgctgtggagaggcaccacttgatggaatggagccctggcaccaaggagccaaaaaagggtcaagggagcctctttctcagccagtggccccagagccagaaggacgcctgtggtgaggagggttgctgtgacgcagtgggcaccgcatcactgaccctgccgcccaagaaacctacatgtccagccgagaagaacttgctctatgagttccttggggccaccaagaacccaagcgggcagccgagacttcgaaacaaagtggaagtggatgggccggagctgaaatttaacgcacctgtgacggttgctgacaagaacaacccgaagtacacagggaatgttttcactccacactttcctacagccatgacctcagcaaccctgaaccagccactctggctcaacctgaactatccacctccaccagtgttcacgaatcactctaccttcttgcagtatcagggcctgtacccacagcaggcagcgaggatgccctatcagcaggctttgcacccgcagctgggatgttactcccaacaggtgatgccatacaacccacagcagatgggacagcagatcttccgctcttcctacacccctctgctgagctacatcccttttgtccagcccaattatccctaccctcagaggacacctccaaagatgtctgccaacccccgagaccctcccctaatggcaggagatggaccgcagtacctctttccccaaggatatgggttcggctcgacatccggagggcccttgatgcacagcccctatttttcttccagtgggaatggcataaacttttagatctcctcttctcccttctcctcccttagcccttggatcaggactaggggctctgatttttggattctgcaaaagcttggtatgaagtttggaaaagcaaggttctgaccaggtcacagacaaaacagcaagaccagattcatctattggccaacactgacacaaaaatagccctcctcacacatggcacaagctacacacacacacacacacatgaccctcatattcatacttgcttgctcaaccacttatgcatctatatttagctaacatgagtgatttttgtttttgtttttgttggtaaaatagaagtaagacacttaattttagaaagtttgtattttatgataaaagtatgagctacttgaaa

SEQ ID NO: 117935 - DNA, 2287 bp, Homo sapiens
  Payload ID: 3063
  Gene Symbol: C1orf94
  Gene Name: chromosome 1 open reading frame 94
  Uniprot ID: Q6P1W5
  ENST ID: ENST00000488417
  CDS Start-End: 121-1917
ctccacccacccctcccacacaaatagaaggcctctgaacctaaccaccttgctggagcgaaagccagacagaactgacccacttctgccaagccccatcctcatctccctttctggtgaatgaggggtggtggtggttgtgttctagccctgggtggacagaggggcttccagaaagagaggaggaggatggccagcgggaatgggcttccttcatcctcggccctggtggccaagggcccctgcgccctgggcccattccccagatacatctggatccaccaggacacaccccaagacagcctagacaagacttgccatgaaatctggaagagagttcaaggcctgcctgaggcctcacagccctggacctccatggagcagctctctgtccctgtggttggaactctaagaggcaatgagctcagctttcaagaagaagctctggagctcagcagtggcaaagatgagatctccttgttggtggaacaggagttcctaagcctcaccaaagagcactcgatcctggtcgaagagagttctggggagctggaggtacccggcagctctcccgaggggaccagagagctggctccctgcattcttgcccctcctctagtggcaggcagtaatgagcgccccagagcctccatcattgtcggagacaagcttctgaagcagaaggtggccatgcccgttatcagcagcaggcaggactgtgattctgccacttctactgtcacagacattctgtgtgccgccgaggtcaagagcagcaaggggacagaggacaggggccgcatcctaggtgactccaacttgcaagtcagcaagcttctgtcccagttcccactgaagtccactgagacatccaaggtccctgacaacaagaatgtgctggacaagacaagggtcaccaaggacttcctacaggacaacctgttcagtggccctggacccaaggagcccacagggctgagcccatttctgctgctgcctccccgacctcctcctgcacgtcctgacaagctccctgagctccctgctcagaagaggcagctcccagtgtttgccaagatctgttccaagcccaaggctgaccctgctgtggagaggcaccacttgatggaatggagccctggcaccaaggagccaaaaaagggtcaagggagcctctttctcagccagtggccccagagccagaaggacgcctgtggtgaggagggttgctgtgacgcagtgggcaccgcatcactgaccctgccgcccaagaaacctacatgtccagccgagaagaacttgctctatgagttccttggggccaccaagaacccaagcgggcagccgagacttcgaaacaaagtggaagtggatgggccggagctgaaatttaacgcacctgtgacggttgctgacaagaacaacccgaagtacacagggaatgttttcactccacactttcctacagccatgacctcagcaaccctgaaccagccactctggctcaacctgaactatccacctccaccagtgttcacgaatcactctaccttcttgcagtatcagggcctgtacccacagcaggcagcgaggatgccctatcagcaggctttgcacccgcagctgggatgttactcccaacaggtgatgccatacaacccacagcagatgggacagcagatcttccgctcttcctacacccctctgctgagctacatcccttttgtccagcccaattatccctaccctcagaggacacctccaaagatgtctgccaacccccgagaccctcccctaatggcaggagatggaccgcagtacctctttccccaaggatatgggttcggctcgacatccggagggcccttgatgcacagcccctatttttcttccagtgggaatggcataaacttttagatctcctcttctcccttctcctcccttagcccttggatcaggactaggggctctgatttttggattctgcaaaagcttggtatgaagtttggaaaagcaaggttctgaccaggtcacagacaaaacagcaagaccagattcatctattggccaacactgacacaaaaatagccctcctcacacatggcacaagctacacacacacacacacacatgaccctcatattcatacttgcttgctcaaccacttatgcatctatatttagctaacatgagtgatttttgtttttgtttttgttggtaaaatagaagtaagacacttaattttagaaagtttgtattttatgataaaagtatgagctacttgaaa

SEQ ID NO: 117936 - DNA, 7705 bp, Homo sapiens
  Payload ID: 3064
  Gene Symbol: C1orf95
  Gene Name: chromosome 1 open reading frame 95
  Uniprot ID: Q69YW2
  ENST ID: ENST00000366788
  CDS Start-End: 106-531
gagctcggcgcggagcccggagcccgcagccgacagtctcctgctcccgtacgctgggcgccagctccggccgtgctgcccggctgcctgagagcgcgcccggccatggagccctcgcacaaagacgccgagacggcggcggcggcggcggcggtggcggcggcggacccccggggggcgtcctcgtccagcggggtggtggtgcaggtccgcgagaagaagggccccctgcgcgccgccatcccctacatgcccttccccgtggccgtcatctgcctcttcctcaacactttcgtgccgggactggggacattcgtctcggccttcactgtgctgtgcggggcccgcaccgacctcccggacaggcatgtgtgctgcgtcttctggctgaacattgcagcagccctcatccaaatcctcactgccatcgtcatggtgggctggatcatgagcatcttctggggcatggacatggtcatccttgccatttcccaaggctacaaggagcagggcatcccacagcagctgtgagcccacgggagccgctggggagatccaggggggccctgtgagggctgcaccaggcagctttgggcacaaggacctttacatgttcttttctgccattttctggactgggggtggaaagggggtatttttaaaaatattatttattttgaaaacgcatctgcttttctcagcaggttgtgagggctgccagcccctcctgctctggaaagcactgtgggcgcaggcaccagagcatcagagagtggggtggagatgagaacgcccacagagaggctgggatgctccggcaggctccaactggccttgctgtacccactgcccaccgcaaaggcacgccacgtctgctgggccgggccacaccgggccctgtctgggtgagcaggggctcaccaaggggacaggactgtggtagacccgtcctgtgggaccccacctgcctcaaaatctggtgccccgagtgtttactgtgtggtctcctgggggcagcaccagggtgtgggtgaggatggccaggctccaccctagcgtggaaaggcccactgtgcccacagctggcctgaggcctcggggagaagaccagtcccacaggcgtctcctgggcctgcctccctgaccgcaccccccgcctcctcgcagctgaaatctgagggctgggtgtgtcgtgacctgtgttttcctgggaaggagaggagtagctccttccctggggtgaaactgccagatgtttatacacaaagttattagactgaagcaggagtgggcagactagcaggctttcacccaatacttaacagcatttctggcccacattcctttttctgaagtcattggggccagatgtgtctccgaattgagaaattttagatttgagaaagacaatgcgatccatttatcgtacactttctaacttcccggcagagtgtggaacatctcgcctaccatcaggcacgtgaatatttctgcagagaaacatgtgactagtcccattaactgggagctatacaaactgtaaatagcctcacctcagttcagtctaattttgccactaagtaacttagggaaaaacttaccatttgagagcttttagggtttcagaattgcaagaacaattgtatggggttgtggaccttgatctgaaaatcctgcttgcaaacagatgtgttagagggtgaaattgtcggcattacacaaggactccttcagttgccaaaagaccatgggcctctttaaggagcccctctgtaagtgattgggacagggctagatccctaatgggggctaggggtggggagaatctagcagaagttgtccaggatactgtggatcaagtatcaatctgaaattaagagaaattagatactaagaggatggacatttacatgtctgtttcctttcctttcattttcattctaacataggaaatgctaacagatggggctggcccaaagtcaagcttctgactccacttgacacagtgccattgggcatgtccctctctgaagggcttgtttgtctatcagagactgtcagaactccatgagggcaggagaagggattttgcaggatgaaagtgcttgggaagtagtggccaccgttctgggggtttcagcccacctaccccatccaccgggctttctaatcacagtcctgcctgagaagcgggccctgctgcccaccccttatcatggatcccttagctactgtccgtcttccattgctgcctggggctgggctgccgtttttgaacacctggcagtgtctttgtcgcgtcctgtcctctcttcttacagaccccaacccaggcctttgccttcttctctcctgtttggaagcctctgtatcttcaaggtgtgggaacagatttggttttctctaaaaagctagaaccttctgctgtgtgcagcaggcatcctccaggctggtgctggctgctctcgaggaagctgcgtcagagtggagctgcccctctactcagataaaatagcttcagctgcaggaagccgccccctcccatgcccaccagcccacagcccttcaccccacacagcccccagagtttgcccgacaccccctgagtgatgacaggtctcaggagggggccgcccccacaaatgggaggcggaagcttattttccccgcttgggctgggggcggctgctgagggggtgaagaagagatagcaatttatgtcgcatgtttagtgacacaatccagatgcaggtgggactttcttgagtggcaggtgtcaccctgggtcccgtgtgggatggtttaatacaggggtttgtgtgtttgtgtgtgtggagggccactgcgcccccagatcctcctctcccccgagggctgcgtctctaaacctgggaaaacatcagcctcaggaggaggcccctttccgggtaactgatgtgtgggagaagccaagaggcccctgcctgtctcctgaatgaggctgtgagggttgccatgtgggcgggaccggttcaaaatagcgcccccgcccctctaaattagaccgtggtctcagcatgatcatcttcagtagataagggacagtggctgatttactccaaatagttccagctggccactcagaccagggccagagttaacttctcaaacaccagccagctgaaaattagggttctcgtgcaggcaagtgcatggttgacacacagccctttggtgacaaagctgggctttgcctgcatagtgcagacaaggctgttggttcagaggctgcagggcacattccaggttggggccttttgtcggtcggaattcaataggacattccctggctgtgggtgtttagggcaggaattacaggcttgcagagaaagtcagaggcaatgagatgctcccagtaccaaactgtgacactgggatcagggtggtcattcccttgggtcagagtgggaccctagagccagagtgagctgtgggtggcctgggtgtgtcctgtggacggcggagactgttgatttggatgttgagctctgagtcagtttcagaaccaaggatctcaggctgagaaggccaggtccccatgggagcggcaggagtctgatggctctgctgccagagcctaccccagcctgccacgccgctgaccttcccatggtaaggaaggggcaggcagcatggttcccaccctcagctgccccagacccacacatccagccccaagagcagcctcacccaggcacagtgcagggcattttagctcctgggaggggagatgcctttgtgagtttcagatgtcagaggagaagctccgagagagtaagtcatgtgcccccaaacactcagctcctaagtggcaggacaggcaagtggccaggttgggccgcccccacagcctgtgccgtccacacactcactacagcactcccagaagaaggagcagaatcgcatgcagcccagagcaggtcctgtggaggggtcctcacccctcaggagtaatagggtgattatgtcacatgtttagtgatacaatcccacctgtgtctggattgtgtcactaaacatgcaacataaattaccatctcttctccatcccctcagcagccgcccccaccccaagctgggaaaataagcttctccctcccatatgtgggggcggccccctcctgagacctgtcatcacttagggggagttgggcaaaacctcctaggaaggtcctggacgcctccaccctgccccacaaggctccgtactcccacctgcctgggcagccctcacacccatgctccctcctttaggcaggcccagaaaggtgccccttcctgagggtgttgggggatggcggcagagagacagctggtattaggagcttccccatcctaatgtgcaggaccaagttgcccgctctgccagccaggggctccagccatgctggcacaggcatctcagaggtgtgagatgaactccgcctcatgcaggatgcccagggctcggaagcagtaaggaggatgctacagaaaggaactgcagaaagaaaaaaagccacatggttaacttttcccctggagggcaaaggggtccggctctcaaaaagaaaagccaggcacagatcccaacaccaagtgtaaggcagcacaaagtgggtctgaaaccccaggaccgggtcaaaggccttccgaaggcccgaggttcttgaggaggggaagctgatagggccctggtctttctgcaccagcgtggctctttaaaatacaaaacacccacaaagccaaaaaccctgaaacatgttctttagctaaccccttccctgcccagatgcctgcaattctgagaattcacttcagttttgccagatccaacccctaggcttgagggtggagagccaggcctcctcagggtcccttctaggctcccaggcccaccttaggctttaattgcattggctgtttcttatggtgttagtgaattttgcaaagaaagccctgagcattgcataaatgcttgggggcgtgtcatttaaatggaagttctccaatagtggctgaaggcagagtttactgttatccctccctcttgctggctttgctggagggcttttatcagagagattggaggtgggagagcacttttaaagcacaccccaccccctgcacccgagcggcacctaagcttcccagagaccatgaccttgtatgtggctggaggcctcaggcttagggagcagcctgaagcctttgctgtcaaccctcccaggaaagaagccgggcctcaggctgaggaaaaacagagtttcctctccagagggctcaatgagcagccaggtagtggcctcgggcagtcctcaccagggggacacctccctgctttgcattaactcatcagcaagctcatcgagagctaacgtgggcccagcagtcctgtgcttggaaatgatgccgtcacctccacactcctgctgttccagcctctgcaggtgaagctgcaaggtgagcagaggcaggcgtggggacacactcttcaaggactgcactgccccttctccctcctgagagctctgtgcactgggtttggggatgaggcgccagcctggtcaggggaggtgactgtggtccttctgaccagcttggatctttaaaataatcacaaaaaagctcagcctgagcaggtgggtgcaaggctcaggggcctgtgtttttcatcaatcagttttcttcctgcaagattcttagagctggatgttcacgggatcatggggcatggaggtggtcacgctcagacagtcatgcaccaccctcaatcccaggccctgcagagataggaagaatcccaaccagagggattcttccccaaacgttcccttgtggcccaagagtgagttccggcctgagtgctgttatgactgccggcgtctctccgactgcctctcgcctcagtttaaccatctataggttaggaacaaagaagggcttaggcagccatcgtttccccatttctgtcagagccaagggcttggaggcccagccccatccgggcaagggctgtccgctcctgcccaggcctcacctcctcgctgcagctggcaagattctttctagcagaacagaaacactggcccccaattccactctcccctcctgatgctaccgcagagggcagaaaggtgccctgtagcgtccaccatgtgtgtgtcctgagtttccagtgcaagtcatctggatttgcatttagctagggaaactcggccctcaaaccctctccctctctgcctgaatttgccaaaatgccaaccatccgggcaggtgtggatgccacagtccatccccattgcatttcacccccacatggacagaggcacacactcgcacacattcccagcacctttgactgctgggggatgcaggccagggtctgcctggagcctcagggttgggacttatctccaaaggagcccacaccccctcttccaggatgggcactggctggcagcacttttttccctcatcacatccctgacccctgcccagcccacatgcacatgctgtttcctgtctccagggccctagcctgtggatctcttcctcccatgcactcctagggtgaatgggctcagcaccaaacctggctgtgcccattccccacaaccccagcttggcctcctgtgggaaggagaaggcagacctgcccagaggagaggggcagtgttcccacccacctgctccagcacaggaaccagggaggaaagaagggagagggaggttccattcaccgttttctgggttagcgcttgattggatgtttcaagcaagggacaaggtgatggtggctgtaataggctcctcgtgggcaccgtcaccccagaaggcctgggcacccatgagaacctgtggccagcccttttcattggctgagttccctgctgttgtgcgtggtgccattttttttttaaacaacatatataaaaacaaaacaactggttctgtgtgtatcaacttaatttgcatatgaatgagtgttgtgttgtgatttgcagtgttttgacaccgtgattggctttgtttgggtctctcttctttctgtgaaattaactgctgtgcgttttcactgttcttagagaagaccctgagctcctggggttttcttgtctcacttctaccctgacctgctgggagcccaccccaccccagtccagccatgagggtatttccagcctattccaatgactgaaacccttcttggaagaaaacgtctaatgtcggggacgtagggacgcttccagacttgccctggccggaaccctgcagcctggggccccagcccgcctgcagctcagctttccccaacaccctcaggacccagccccagccccggcagaccttccctgggagctgcttaggtggtctccacagcgccctctaggggccaagcagggttccagattctccagccttctgccagctttaaaacccttcactcaagcagcattactgtacatgcaatgaaaaatactatatatgacagtcaaaacctgtgtacatatttccatgtacatatttatacatacacacaccttcctattataaatatataaagcatgacatctctttggcattccaagtttgtgtttttttaaatccttggaaatacggctttggaaacctttttcttcctttccctcttttctatgttgtaataaacattcatgtgaccttt

SEQ ID NO: 117937 - DNA, 4093 bp, Homo sapiens
  Payload ID: 3064
  Gene Symbol: C1orf95
  Gene Name: chromosome 1 open reading frame 95
  ENST ID: ENST00000366789
  CDS Start-End: 106-531
gagctcggcgcggagcccggagcccgcagccgacagtctcctgctcccgtacgctgggcgccagctccggccgtgctgcccggctgcctgagagcgcgcccggccatggagccctcgcacaaagacgccgagacggcggcggcggcggcggcggtggcggcggcggacccccggggggcgtcctcgtccagcggggtggtggtgcaggtccgcgagaagaagggccccctgcgcgccgccatcccctacatgcccttccccgtggccgtcatctgcctcttcctcaacactttcgtgccgggactggggacattcgtctcggccttcactgtgctgtgcggggcccgcaccgacctcccggacaggcatgtgtgctgcgtcttctggctgaacattgcagcagccctcatccaaatcctcactgccatcgtcatggtgggctggatcatgagcatcttctggggcatggacatggtcatccttgccacttccacaggctacaaggagcagggcatcccacagcagctgtgagcccacgggagccgctggggagatccaggggggccctgtgagggctgcaccaggcagctttgggcacaaggacctttacatgttcttttctgccattttctggactgggggtggaaagggggtatttttaaaaatattatttattttgaaaacgcatctgcttttctcagcaggttgtgagggctgccagcccctcctgctctggaaagcactgtgggcgcaggcaccagagcatcagagagtggggtggagatgagaacgcccacagagaggctgggatgctccggcaggctccaactggccttgctgtacccactgcccaccgcaaaggcacgccacgtctgctgggccgggccacaccgggccctgtctgggtgagcaggggctcaccaaggggacaggactgtggtagacccgtcctgtgggaccccacctgcctcaaaatctggtgccccgagtgtttactgtgtggtctcctgggggcagcaccagggtgtgggtgaggatggccaggctccaccctagcgtggaaaggcccactgtgcccacagctggcctgaggcctcggggagaagaccagtcccacaggcgtctcctgggcctgcctccctgaccgcaccccccgcctcctcgcagctgaaatctgagggctgggtgtgtcgtgacctgtgttttcctgggaaggagaggagtagctccttccctggggtgaaactgccagatgtttatacacaaagttattagactgaagcaggagtgggcagactagcaggctttcacccaatacttaacagcatttctggcccacattcctttttctgaagtcattggggccagatgtgtctccgaattgagaaattttagatttgagaaagacaatgcgatccatttatcgtacactttctaacttcccggcagagtgtggaacatctcgcctaccatcaggcacgtgaatatttctgcagagaaacatgtgactagtcccattaactgggagctatacaaactgtaaatagcctcacctcagttcagtctaattttgccactaagtaacttagggaaaaacttaccatttgagagcttttagggtttcagaattgcaagaacaattgtatggggttgtggaccttgatctgaaaatcctgcttgcaaacagatgtgttagagggtgaaattgtcggcattacacaaggactccttcagttgccaaaagaccatgggcctctttaaggagcccctctgtaagtgattgggacagggctagatccctaatgggggctaggggtggggagaatctagcagaagttgtccaggatactgtggatcaagtatcaatctgaaattaagagaaattagatactaagaggatggacatttacatgtctgtttcctttcctttcattttcattctaacataggaaatgctaacagatggggctggcccaaagtcaagcttctgactccacttgacacagtgccattgggcatgtccctctctgaagggcttgtttgtctatcagagactgtcagaactccatgagggcaggagaagggattttgcaggatgaaagtgcttgggaagtagtggccaccgttctgggggtttcagcccacctaccccatccaccgggctttctaatcacagtcctgcctgagaagcgggccctgctgcccaccccttatcatggatcccttagctactgtccgtcttccattgctgcctggggctgggctgccgtttttgaacacctggcagtgtctttgtcgcgtcctgtcctctcttcttacagaccccaacccaggcctttgccttcttctctcctgtttggaagcctctgtatcttcaaggtgtgggaacagatttggttttctctaaaaagctagaaccttctgctgtgtgcagcaggcatcctccaggctggtgctggctgctctcgaggaagctgcgtcagagtggagctgcccctctactcagataaaatagcttcagctgcaggaagccgccccctcccatgcccaccagcccacagcccttcaccccacacagcccccagagtttgcccgacaccccctgagtgatgacaggtctcaggagggggccgcccccacaaatgggaggcggaagcttattttccccgcttgggctgggggcggctgctgagggggtgaagaagagatagcaatttatgtcgcatgtttagtgacacaatccagatgcaggtgggactttcttgagtggcaggtgtcaccctgggtcccgtgtgggatggtttaatacaggggtttgtgtgtttgtgtgtgtggagggccactgcgcccccagatcctcctctcccccgagggctgcgtctctaaacctgggaaaacatcagcctcaggaggaggcccctttccgggtaactgatgtgtgggagaagccaagaggcccctgcctgtctcctgaatgaggctgtgagggttgccatgtgggcgggaccggttcaaaatagcgcccccgcccctctaaattagaccgtggtctcagcatgatcatcttcagtagataagggacagtggctgatttactccaaatagttccagctggccactcagaccagggccagagttaacttctcaaacaccagccagctgaaaattagggttctcgtgcaggcaagtgcatggttgacacacagccctttggtgacaaagctgggctttgcctgcatagtgcagacaaggctgttggttcagaggctgcagggcacattccaggttggggccttttgtcggtcggaattcaataggacattccctggctgtgggtgtttagggcaggaattacaggcttgcagagaaagtcagaggcaatgagatgctcccagtaccaaactgtgacactgggatcagggtggtcattcccttgggtcagagtgggaccctagagccagagtgagctgtgggtggcctgggtgtgtcctgtggacggcggagactgttgatttggatgttgagctctgagtcagtttcagaaccaaggatctcaggctgagaaggccaggtccccatgggagcggcaggagtctgatggctctgctgccagagcctaccccagcctgccacgccgctgaccttcccatggtaaggaaggggcaggcagcatggttcccaccctcagctgccccagacccacacatccagccccaagagcagcctcacccaggcacagtgcagggcattttagctcctgggaggggagatgcctttgtgagtttcagatgtcagaggagaagctccgagagagtaagtcatgtgcccccaaacactcagctcctaagtggcaggacaggcaagtggccaggttgggccgcccccacagcctgtgccgtccacacactcactacagcactcccagaagaaggagcagaatcgcatgcagcccagagcaggtcctgtggaggggtcctcacccctcaggagtaatagggtgattatgtcacatgtttagtgatacaatcccacctgtgtctggattgtgtcactaaacatgcaacataaattaccatctcttctccatcccctc

SEQ ID NO: 117938 - DNA, 2120 bp, Homo sapiens
  Payload ID: 3065
  Gene Symbol: C10orf10
  Gene Name: chromosome 10 open reading frame 10
  Uniprot ID: Q9NTK1
  ENST ID: ENST00000298295
  CDS Start-End: 219-857
cacactgctcagggaagagcctgctacggtggactgtgagactcagtgcactgtcctcctcccagcgaccccacgctggaccccctgccggaccctccacccttcggcccccaagcttcccaggggcttcctttggactggactgtccctgctcatccattctcctgccacccccagacctcctcagctccaggttgccacctcctctcgccagagtgatgaggtcccggcttctgctctccgtggcccatctgcccacaattcgggagaccacggaggagatgctgcttgggggtcctggacaggagcccccaccctctcctagcctggatgactacgtgaggtctatatctcgactggcacagcccacctctgtgctggacaaggccacggcccagggccaacccaggccaccccacaggccagcccaggcctgccggaagggccgccctgctgtgtccctgcgagacatcaccgcacgtttcagtggccagcagcccacactgcccatggctgatactgtggaccccctggactggctttttggggagtcccaggaaaagcagccaagccagagggacctgccaaggaggactggcccctctgctggcctctggggtccacatagacagatggacagcagcaagcccatgggggcccccagagggaggctctgtgaagccaggatgcctgggcattccctggcaagaccaccgcaggatgggcagcagagctctgacctaagaagctggacttttgggcagtctgcccaagccatggcctcccgccaccgcccccgccccagcagtgtcctcagaacactctactcgcacctcccggtgatccatgaactctgacccctccccagtaaaggcttctgtagagagcatgctgggtctgcatctcctctcgtctcctccatggtggtcactgcccctggcaggtctctgaaagggaaatgcttttctgcagaggcccctgcttgggcagttcacagtgagaccgaccccctctgaatatgataacagcctgtttcacatgaggagatgttaccaatcccgttcgctctgacccttgctggctgatcaccttgagcaacttacttaacatctgtgttcctcagtttctcatgggtaatatagggataattactggcacctgcctcccaggccattctgacgtgtaaccgcatataggagcccactggctgagtagctaccatcatcgctggtggggaaactggtggtaggggtgtgagggtagtgggggtgtcagccccccaggtgtttcagaacaaggcctcgggcactcccaagtctgcctcttggctcccaccctcaaagcccatgttctgtgaggcccaagagaacacatggagtcttagcaaatgcactaatgtattccgggggactgtcacctggcaccactggggcactctgctggctacaactcatacgtcctgtggtggcattgggagagttcccccatgatgagggccaagatagaatctgtaccactcagtgctaccatccccacccctacaccacttccacacaggggcctcatggcatggtcagggtcccagctgtgggtgagagcagggcactgtccagctgtccactggggaagtcaagatgtcctaaggcccaggtcagggcatctggagtctgaaggaccctagttcctagaggcatctggcagcaagaaggtgaggcatcagggaacgggaatcaggctgggactgatcagaggtgaagggacagagagaggagaggaggaagattgagctgggggcaacagccaagctcacctgggcaggtctctgccacctccttgctctgtgagctgtcagtctaggttattctctttttttgtggctatttttaattgctttggatttgttaaatgttttctgtcttctgttaagtgtgttttctctggagatagaatgtaaaccatattaaaaggaaaaagtttcagacaagcaattacccagtttccttatctataaaatggggacatcagcaatgttcttcacaccctgcaagggctgggaatctgcgcatgtgaacttggagctgcatttatgagcactgtagacaaatgtttgtatctgtcac

SEQ ID NO: 117939 - DNA, 613 bp, Homo sapiens
  Payload ID: 3065
  Gene Symbol: C10orf10
  Gene Name: chromosome 10 open reading frame 10
  ENST ID: ENST00000448778
  CDS Start-End: 362-613
tgctacggtggactgtgagactcagtgcactgtcctcctcccagcgaccccacgctggaccccctgccggaccctccacccttcggcccccaagcttcccaggggcttcctttggactggactgtccctgctcatccattctcctgccacccccagacctcctcagctccaggaagaaaagatcccagcagtcggagctctggtctgggctctgtagacttcaaattgctctcagggcaccggattcctacaggcagccccagaggagtgtggtgacgctgaggggcggtgggacgcatggcaggccctcaccaccaggcttctgtttcccaacaggttgccacctcctctcgccagagtgatgaggtcccggcttctgctctccgtggcccatctgcccacaattcgggagaccacggaggagatgctgcttgggggtcctggacaggagcccccaccctctcctagcctggatgactacgtgaggtctatatctcgactggcacagcccacctctgtgctggacaaggccacggcccagggccaacccaggccaccccacaggccagcccaggcctgccggaagggccgccctgctgtgtccctgcgagac

SEQ ID NO: 117940 - DNA, 4730 bp, Homo sapiens
  Payload ID: 3066
  Gene Symbol: C10orf105
  Gene Name: chromosome 10 open reading frame 105
  Uniprot ID: Q8TEF2
  ENST ID: ENST00000398786
  CDS Start-End: 103-504
ctcgggcttcttgtggagaggcaggagagtgaaggcctgccgcgggtgaggcctccagtccacggacggccacaggccactgcggctggaatcacaggagccatgagcacagagggccccagcctcgccagctccccagccatcagccccctcgcctttctctcagctcccgtcactcccgggacccttgcagaggcaactgaccccctccccatgctcatcgccctggcctgcatcttcctcctgctggccacctgtctgctgttcatgacgctctgcaagccggccgcgctggacccgagccgccgcagggctcacgagtgcatgccccaccaccctgggagccccagtgagccccagctccggctctggaagcgcctgggctccttgcgcctctccctgcacagcttccgccatggccggcccaccgtccctcgacagcccctgccgggccccgaggacaaccgcagccactgtgactacatggaatctaccaagatgtaatggggtgtccacaaacatgcccccacatccccctaggtctacctgtagatcctcctgcttcagagaccggtgctgcaggctgcaggaagacagtggcccaagcagtctgggacacacactcaccccccgaagctccttgcatgcccaggccagcgccctttcccaaagatgatcctcagaagagcaccttcctctctgcagaccccctcgctgctgcttgatgaaagacttctggtcaagagatgtgcactcgtggtcatctgggcctttggcctgaggctccacagggtacaacctggggctcgtaaccacctcctagaagcagcaccctcgctcgccacagaagccttgccctccaggtgccaaagcccagcatggagaagttgccaaatggcaaaggttccctttagtcaagtgaaatgctcagcctacaccggggccaagacactgtcctggcatctgtgctggcccagtgctggggcaaaacctcggggctctcttccttgggtttcccgggtgctgccagcatctgcctggtgccctgtgggagcagctgcctccctcctggtggaacagatgcctgggtgccagctgggaggaggagcaaacagggctctccaagcatggtcttggcagccgtcttggtggcccctcttcagggcacccacgttgggatcaatcaggaagggattgaagatgatcgaggaggctcccttcagaggccagggcgggtgctgtgacagagtggcaagaggcagggcatttccagcagctggaggtgatgccacctggactcggaggaggacagctcacagcagctccacacctcacccagggaaagcggcagcctccccgagggtgggatggtctggacctctccaggacagctgtggggtcccaagtcctgcccacactagggatgctatctgtggttttggtgagtgctttgctgatgacccgtcaaagcagtcccaccccaggatgggcttctcagaatcccaaacccttgacctctcctcacaacgcgagggttaaacactttggtcaggtcccaaatttgaagggtgggcagagggaggacctgggctgcccagctcctgtcccagtcagctggccaggatcccaccacaaagctgccccacccccatcctgctgtgacccacagtgcagccagccacgtctccccaaggagtgagctctggcttgccactccccagctccaaaaccttcactggctccctaatgccaaatggatatagccaaagctcctcagcgcagtgtgcagtgccctctgggagctggctccaattaatctttctagcctcatcttgatccaaaactccaggaaaactgaaagacctgtcacccactaactgtggcttatgcttcacacacacccactctgtgaagccctcctgcctggagccgcccctactgtctcctacctctcttggggaggaaaaggaacattctcttggcagcatgggtcctttttgtctatgtcttctctttcctaccagcttgggagcttgcagagagccagacattgtccagcccctcactttgactccccagttctgtgcacagaagtatgaggcttctgtgtacagagtgaagcgtggcccagcctgggtgtgtccccaccctctgaggcaggagtcttggtggaagctggcataacacagagcctcatcttccctcagatgactctagaaagatttctctccaagcaggctctattggagaagcccactgtcccttccttccaagtcaatctgatctcaaaaagtgagtccggcttcacaagaaacttaccaagaggaccttggagaagtcatcctgagacgctgcatttctccctgagaaatgggagaactcagggctgccctatattaactcgctggctctaggatttcagtaagagtagtattgtgtaaatagaaaccaagtctttgggtttagaaagtggggcaggcctcctccctaagggttttgttccttcctcccttcctgctcagtaacctcttcctggtttgcttcccctggggcctccctgcaaatcctaggctggattcagcctgtagccatccacctcaccagcaggccctgctggccactaggcactgtcttcctggaggttggggtgggggttgaggctgccctgaggcctgaagaaggaaaagtccaggagggggagggctctcaattgggtttcaggcaccaggccaggggggtatgctccaagtcctcacaagctgaggccctgatcgagagaaccctctacttcctccttctggagctagccaccacactctcgcaaatcctcagggctttctgggctctctgtgtttctgggagtcagctccctgctccccagccctttcctgcccgcctcctggtcccgatgcagggaggggagcattgccagcctcccacgcttctgtccctcccaagcccgggagcctgccccagtgggcaggcccagattccctgtttggctcagcctccgagtcggaaaccccatagttggtaaagagactcattcactccgggcctccctccccacccagcaactgaggcctctgggcagaggtgtgggtgcacacccaaattgttttcagggtcctcccttctctccctctgagccttggagctgttgcgcctgctccctgggcaaaggagccctttcttcttgtgcctgtttacttcccaagaggggagcctcggccaagggctctgtgaaagcagctctgttctgggccttgctgggccctggctctcttctcaactcctttccgggaaattgtgacgtctctttctccccgctactctgaaaggcccttctgggtggggcgggagatatgcagggggaggccaagtcttcctcctgtttgtggggagccagagccctatcctcagctctgcaacctgggggcccacactccctgggatgggagagggcctgggtccccctttccccacagcaccttccagagcagcggacccaccctgggcccccacctgcttccgcctctggtgccactgagcatgtgccctcagggccgtgtgtggctccgcctcccccagcccaccacctgccccagaggccacgggccacctgcctgcaagatgctgtggccttcagggatgtcctcagggacgctggcctcatagctgctctgcagaaagatgggccggttgtcattcacatccaggacagtgacgaacacggtggctgtgcccgtgtgtcgcttccctacagggccgttgtctgtgggagttgaaggaagacaggtgttagcagctgcctgagagaggggcacacttcctgtgactttgcacactcccgggcaccggccagagaggtgccctgttccgccccatctgccctagcctttgcaaggggtgacttcctttttagcttaggaataacactaacagtatcaaatacttagataacaccatgtgccagccattcttctaacccattcagtcctcacagcaaccccatgaagcagacactttactgtcatccccattttacagaggaggtaactgaggcactcaagtggattgaatgatggctcccaaaaaaaacagacccatgttaaacccctgggaacctgtgaagattaatttatttgggaaaagggcctttgaaaatgtaattacgttaaggatcttgagaagtgatcatcctgggtgagctgggtggcccataaacccaatggcaagtgtccttacaagagaaaggcagagggacatttgagacagagaggaggaggccacatgcagatggaggcagaggctggagttatgctgccacaagccaccgaatgcctagcgactccagaaactgggacggtcaaggactgattctctctagagcctttggaggaagcgtgaccctgccgacaccttaatttctaacttctggccttgagaaccaggagagaatacacttctgctgttttaagtttgtggtagtttgtcgtggcaaatttaggatgcagatacaggtactaagagcaaaaagccaactgctgtcagggactggcgggtatagcacctgggtcaaacacctggatgggccccgctggaagggcagctgtcctccactccagtccacagcggacaggcagaatgtgggcccagagacaccagatcttctgatttctcatgagaaattgaacatctgagcttttaaataaaatctcctgatcttt

SEQ ID NO: 117941 - DNA, 4837 bp, Homo sapiens
  Payload ID: 3066
  Gene Symbol: C10orf105
  Gene Name: chromosome 10 open reading frame 105
  Uniprot ID: Q8TEF2
  ENST ID: ENST00000441508
  CDS Start-End: 201-602
ttctagacaaagccaggtccagctggggagtgacggggaggccactctgctggccaggctgaccgagggctgcagggcacagcagagcctggcagggctggggtcacaggcactgcccagggctccttgggcctcccttccacagctgagaagacctctccacggagctccggacggctggggtctggctctgaggagccatgagcacagagggccccagcctcgccagctccccagccatcagccccctcgcctttctctcagctcccgtcactcccgggacccttgcagaggcaactgaccccctccccatgctcatcgccctggcctgcatcttcctcctgctggccacctgtctgctgttcatgacgctctgcaagccggccgcgctggacccgagccgccgcagggctcacgagtgcatgccccaccaccctgggagccccagtgagccccagctccggctctggaagcgcctgggctccttgcgcctctccctgcacagcttccgccatggccggcccaccgtccctcgacagcccctgccgggccccgaggacaaccgcagccactgtgactacatggaatctaccaagatgtaatggggtgtccacaaacatgcccccacatccccctaggtctacctgtagatcctcctgcttcagagaccggtgctgcaggctgcaggaagacagtggcccaagcagtctgggacacacactcaccccccgaagctccttgcatgcccaggccagcgccctttcccaaagatgatcctcagaagagcaccttcctctctgcagaccccctcgctgctgcttgatgaaagacttctggtcaagagatgtgcactcgtggtcatctgggcctttggcctgaggctccacagggtacaacctggggctcgtaaccacctcctagaagcagcaccctcgctcgccacagaagccttgccctccaggtgccaaagcccagcatggagaagttgccaaatggcaaaggttccctttagtcaagtgaaatgctcagcctacaccggggccaagacactgtcctggcatctgtgctggcccagtgctggggcaaaacctcggggctctcttccttgggtttcccgggtgctgccagcatctgcctggtgccctgtgggagcagctgcctccctcctggtggaacagatgcctgggtgccagctgggaggaggagcaaacagggctctccaagcatggtcttggcagccgtcttggtggcccctcttcagggcacccacgttgggatcaatcaggaagggattgaagatgatcgaggaggctcccttcagaggccagggcgggtgctgtgacagagtggcaagaggcagggcatttccagcagctggaggtgatgccacctggactcggaggaggacagctcacagcagctccacacctcacccagggaaagcggcagcctccccgagggtgggatggtctggacctctccaggacagctgtggggtcccaagtcctgcccacactagggatgctatctgtggttttggtgagtgctttgctgatgacccgtcaaagcagtcccaccccaggatgggcttctcagaatcccaaacccttgacctctcctcacaacgcgagggttaaacactttggtcaggtcccaaatttgaagggtgggcagagggaggacctgggctgcccagctcctgtcccagtcagctggccaggatcccaccacaaagctgccccacccccatcctgctgtgacccacagtgcagccagccacgtctccccaaggagtgagctctggcttgccactccccagctccaaaaccttcactggctccctaatgccaaatggatatagccaaagctcctcagcgcagtgtgcagtgccctctgggagctggctccaattaatctttctagcctcatcttgatccaaaactccaggaaaactgaaagacctgtcacccactaactgtggcttatgcttcacacacacccactctgtgaagccctcctgcctggagccgcccctactgtctcctacctctcttggggaggaaaaggaacattctcttggcagcatgggtcctttttgtctatgtcttctctttcctaccagcttgggagcttgcagagagccagacattgtccagcccctcactttgactccccagttctgtgcacagaagtatgaggcttctgtgtacagagtgaagcgtggcccagcctgggtgtgtccccaccctctgaggcaggagtcttggtggaagctggcataacacagagcctcatcttccctcagatgactctagaaagatttctctccaagcaggctctattggagaagcccactgtcccttccttccaagtcaatctgatctcaaaaagtgagtccggcttcacaagaaacttaccaagaggaccttggagaagtcatcctgagacgctgcatttctccctgagaaatgggagaactcagggctgccctatattaactcgctggctctaggatttcagtaagagtagtattgtgtaaatagaaaccaagtctttgggtttagaaagtggggcaggcctcctccctaagggttttgttccttcctcccttcctgctcagtaacctcttcctggtttgcttcccctggggcctccctgcaaatcctaggctggattcagcctgtagccatccacctcaccagcaggccctgctggccactaggcactgtcttcctggaggttggggtgggggttgaggctgccctgaggcctgaagaaggaaaagtccaggagggggagggctctcaattgggtttcaggcaccaggccaggggggtatgctccaagtcctcacaagctgaggccctgatcgagagaaccctctacttcctccttctggagctagccaccacactctcgcaaatcctcagggctttctgggctctctgtgtttctgggagtcagctccctgctccccagccctttcctgcccgcctcctggtcccgatgcagggaggggagcattgccagcctcccacgcttctgtccctcccaagcccgggagcctgccccagtgggcaggcccagattccctgtttggctcagcctccgagtcggaaaccccatagttggtaaagagactcattcactccgggcctccctccccacccagcaactgaggcctctgggcagaggtgtgggtgcacacccaaattgttttcagggtcctcccttctctccctctgagccttggagctgttgcgcctgctccctgggcaaaggagccctttcttcttgtgcctgtttacttcccaagaggggagcctcggccaagggctctgtgaaagcagctctgttctgggccttgctgggccctggctctcttctcaactcctttccgggaaattgtgacgtctctttctccccgctactctgaaaggcccttctgggtggggcgggagatatgcagggggaggccaagtcttcctcctgtttgtggggagccagagccctatcctcagctctgcaacctgggggcccacactccctgggatgggagagggcctgggtccccctttccccacagcaccttccagagcagcggacccaccctgggcccccacctgcttccgcctctggtgccactgagcatgtgccctcagggccgtgtgtggctccgcctcccccagcccaccacctgccccagaggccacgggccacctgcctgcaagatgctgtggccttcagggatgtcctcagggacgctggcctcatagctgctctgcagaaagatgggccggttgtcattcacatccaggacagtgacgaacacggtggctgtgcccgtgtgtcgcttccctacagggccgttgtctgtgggagttgaaggaagacaggtgttagcagctgcctgagagaggggcacacttcctgtgactttgcacactcccgggcaccggccagagaggtgccctgttccgccccatctgccctagcctttgcaaggggtgacttcctttttagcttaggaataacactaacagtatcaaatacttagataacaccatgtgccagccattcttctaacccattcagtcctcacagcaaccccatgaagcagacactttactgtcatccccattttacagaggaggtaactgaggcactcaagtggattgaatgatggctcccaaaaaaaacagacccatgttaaacccctgggaacctgtgaagattaatttatttgggaaaagggcctttgaaaatgtaattacgttaaggatcttgagaagtgatcatcctgggtgagctgggtggcccataaacccaatggcaagtgtccttacaagagaaaggcagagggacatttgagacagagaggaggaggccacatgcagatggaggcagaggctggagttatgctgccacaagccaccgaatgcctagcgactccagaaactgggacggtcaaggactgattctctctagagcctttggaggaagcgtgaccctgccgacaccttaatttctaacttctggccttgagaaccaggagagaatacacttctgctgttttaagtttgtggtagtttgtcgtggcaaatttaggatgcagatacaggtactaagagcaaaaagccaactgctgtcagggactggcgggtatagcacctgggtcaaacacctggatgggccccgctggaagggcagctgtcctccactccagtccacagcggacaggcagaatgtgggcccagagacaccagatcttctgatttctcatgagaaattgaacatctgagcttttaaataaaatctcctgatctttaaactttca

SEQ ID NO: 117942 - DNA, 1685 bp, Homo sapiens
  Payload ID: 3067
  Gene Symbol: C10orf107
  Gene Name: chromosome 10 open reading frame 107
  Uniprot ID: Q8IVU9
  ENST ID: ENST00000330194
  CDS Start-End: 306-932
gagattgcggcgatgtcgcaggggacgactccctgggggccgaccccggcgggaaccacgcccgaatcggaggtacaccgcccctttcccttcccggtaccggtgccggtaccagagacctccgagcgctcattcccagtccgcggagtctgcggccaagccaaatccggtctccgaagaggcgccgcacgtctggccccggctgaaaactgagaatatttttgaatttcaaaaaccttgaaacttgtttaaaggatgccattctactagattattatgtatctggatttttgtgggctagaggaatggatttctctattattcagtattcaaaatttatgactttactagctatgtcacttcaaaatcttaaaacactacatatgtccttagaggaaagcataaaatggcttggagaagttatggctgaaataggaccaacacattcgcaaaagagtgaggactggaatatctttgatgtaaaacaagccaatgctatcattgattacttaaaaatcagcttatttcaacactacaagctatacgagtttatgttctactctgccagggaagaaattgtgataggaactgagcaagtgatagaggttgtcaagtctgcatgtggccctttcccaaatcctctggaagaaggaatctcatttgatatttattcaacattcatagagccccccacaatattggatacggaaatgaagaggttggatcaagaacaaggccctgaggagtctcagccagaaactgacacctcagacatggatcctttagttggttttaccattgaagatgtaaaatcagtgctggatcaagtcacagatgacattttaatcggcattcagaccgagataaacgaaaaactgcaaatacaggaagaggcctttaatgcacgaatagaaaaattgaaaaaggcctaaggacttggtacaaggagagtgatgctaaacttcacagaaacaaacaaaaccagccagaataacagactctctggagcgtcgtgtctccatcacttagttgtgaaaggaaaaccaagccccactttttattttcctaagtaattagaaaagtattggtcccaattttgctatctcccatcccataacagcctctgaatttattgcaccaagtgtaatgagaacattttgtatacaagagtttgaaaaattatatataaaaatacaattacttttatgatagtcctttgacgttttgactaataaatcctattcatcttcaaggagaatgaagtcaactttttaaataaccagaaataaagaaagatgataataacttcatccattttgacccaaacggactgccacgttactggaacactgtgaaaacataccagtaccacactattgaggataaaatttgttaaacaatagcaattcaaatgcatatatgaggttttttttttttttactgaaatcatttggttttcttatttaaacgtttcagtgtgaaaccaattttctgaaattatataatgcagtttgaagcactttaatttattctgtactgtatttgttatttctaatcttgttactctcccaggagaatacatgacctatataaaaagaagcaatgtataaatggttattaaagaccaacctatatatagattgtaaaaatcttaaatacaaatcaaactcatagagttcccagaa

SEQ ID NO: 117943 - DNA, 253 bp, Homo sapiens
  Payload ID: 3067
  Gene Symbol: C10orf107
  Gene Name: chromosome 10 open reading frame 107
  ENST ID: ENST00000389639
  CDS Start-End: 45-253
gggccgaccccggcgggaaccacgcccgaatcggagcactacatatgtccttagaggaaagcataaaatggcttggagaagttatggctgaaataggaccaacacattcgcaaaagagtgaggactggaatatctttgatgtaaaacaagccaatgctatcattgattacttaaaaatcagcttatttcaacactacaagctatacgagtttatgttctactctgccagggaagaaattgtgataggaactga

SEQ ID NO: 117944 - DNA, 899 bp, Homo sapiens
  Payload ID: 3068
  Gene Symbol: C10orf11
  Gene Name: chromosome 10 open reading frame 11
  Uniprot ID: Q9H2I8
  ENST ID: ENST00000372499
  CDS Start-End: 216-812
gttgaagaaagaggatctggctgaaagacccgcaactttcacttgttgagaacctttagccagcgccggcgtgcatgtgttttagttttattctttttcccttgcccccaaagccgtggagtacctgctgttgctctcatgcctcttgccaacagtggcatctgctcagtgtagccatcaagaatttgaatgtcaatatctttgccttgaaatgaatggaaaagtatttgtcactcagcggcaatcattcttcaaataaaaggtcactggaaggactgagcgcattcaggagcctggaggaactcatcttggacaacaatcagctgggggacgaccttgtgttgccagggttacccagactgcataccttaaccctcaacaagaaccgaatcactgatttggagaacctgctggatcacttggcagaagtgacaccagctctggagtacctcagtctgctgggcaacgtggcctgtcccaacgagctggtcagcttggaaaaggatgaggaagactacaagagatacagatgctttgttctgtacaagctgcccaacttgaaatttctggatgcccagaaagtaaccagacaagaacgagaggaggcgttggtcagaggagtcttcatgaaggtggtgaagcccaaggcttctagtgaggacgttgccagctccccggagcgccactacacgcccttgccttctgcttccagggaactcaccagtcaccaaggtgtcctggggaagtgtcgctacgtttactatgggaaaaactcagagggcaacaggtttatccgagatgaccagctctgaagccaacttctgtataccttcacccatttcatgaaaataaaatcaaaagggaaatcaaaaataaagaaaacgctaaagaaaaaacaa

SEQ ID NO: 117945 - DNA, 3923 bp, Homo sapiens
  Payload ID: 3068
  Gene Symbol: C10orf11
  Gene Name: chromosome 10 open reading frame 11
  ENST ID: ENST00000496424
  CDS Start-End: 877-1044
agatgccactgtgggcactggcagaactgggccccctgtagatcagatagaaacaaatgggaagctctgggccattgccttcaaaaggctttcttattccagagaggtttttgacataatcctcccctccccaccagcctctgctgtgaccagcttcttacttgaattacccttcagctccctcgctcagcttcatgctcagcatttgcccagactctgacctcttctccattgggatctttttcttggtctcttggttccagactcaccctcatccctaccttgccttttgttttcctcccaatttcttggcttctggctctagacaggatatggctgttcctgctttcaaacctgtctattattcccaacttaatctgtctgtcagtgacaccttctctcttgctttactgaaaggcatggcaccttaatctgtgagaggggtgggaagcttcagccttctacctggttctttagtttctctaacttaatccttcagaagatggcaagtctttacttttggattctggcaatgtggcccacactttcgtgttgaattacagtcatggtatgtagttttttttttgtttgtttgagacagagtctggctctgtcgcccaggctggagtggagtggcacgatctcggctcactgcaagctccgcctcctgggctcacgccattctcctgccttagcctccagaatagctgggactacaggcacccgccaccatgcctggagaagtttttgtatttttagtggagacagggtttcaccatgttaaccaggatggtctcgatctcctgacctcgtgatccacccgtctcggcctcccaaagtgctgggattacaggcgtgagccactgcgcccagcccatggcttctagtgaggacgttgccagctccccggagcgccactacacgcccttgccttctgcttccagggaactcaccagtcaccaaggtgtcctggggaagtgtcgctacgtttactatgggaaaaactcagagggcaacaggtttatccgagatgaccagctctgaagccaacttctgtataccttcacccatttcatgaaaataaaatcaaaagggaaatcaaaaataaagaaaacgctaaagaaaaaacaatagcccacattgcctctctttgggaaaagctatgacttcagcttttggtaccttccgctgactttgccaggcctgtcaagatgatccttctgccttagactgagtggtcacatagagattgacatgattgcccttaagcaggtctcatccaccagggtgacagacagcggtggcaaagcaacagggctgacagcatgaacaccatgatagattgcctggtcctgccactgctcacaggggagcagaggtcacacctggggcctccctggacatgctcagtggctgcagtcaagtgagaaagactgtcctcagctcgcctattgaattgaaatccctctgataccatcgtgctgtgggcttatttttagtgaaatagtcacagtttaggggatggccattctccctcactccttttaaatcttaacgtcctgtattctgcatatacatagctcccgtctcttcccctccaccttcctttagcatcgattttatgacaggtggtgcatttcagtttgcagtttttcggagaacaaggtataacttcccagccaggtcatacatttatggctggcttcatgttgctacaatccctttattggcgtaaatagctttccctaaatccctgactacaaaagcgtggacttttatcttgtttcattcaactctaaatccacttcttgccctgaatatgatgcagtgtaaggcataaggcatctttctcagcatgagggtttggttgcaccagggactcttatttattaatttatttttaaccgtacacacttccagtgatgcctgtggccatacttgtgcgtggggctggcttgctcctttgggtgctatttaaagggagtgaggtgatgaaagatagagtgaagggtcaggaggttaaaaaacaaaattaagactgttgaaaacacccaccagaccaaagagtttttatagaaggcacaaaccttttggattttgcatctttgtcatgacctctcagaaatcaaatccacaggttgtgagacagtgctctgtcttcctgtatgcttggctgtgcactagcactaatgtcacaaggaacataagtgtgatcattgctagttgggtgactcaaagtttatctaacttgctggtgcaccagtcaaatcactctagaagatgttcaaaaggttgattgattgttcttgacacgatagtgtttatttttctgcttcttccatttagaccaagtgttcattgtcctcccagtattaggtcagtttgatgacagcaaaacctgaaagagaatccctccaagttatagatactgagggactaggagctgctattgtaaaactatggggactcagaatccctaagctgcccaaggagaacctactttctcagctctagcccgtttacatagcctctggcccactgagtcaacacaggccttgaatgacatgtattgaggctggcaggagtccctgtttgagattacacaacctttgttaatcagttctttagacaagttaacattaaaatcctcaaaaccatgaaaaattggagaatgttgaatgtttgcatttatctctcaaatccattagtaactggatttgagtaccttttctctgtttgatctacaaaacagcactggaaaaatgctttaaattatctgcatttggtcccaccctgggtcattgtttagaagcatcaacacatgttttctccctggcataatatgggcagccagaattctgtgcaagggcagctagacgagtcagatgtcatatccaatctagccacacatatatccttgtctttataaaaggctttaaccctgcctcaaacaataaaaaagcacttgtgaactgaccacagaatttttccatctttatttttcttacttgtttactttttttaatgtcagaaccatttgtatcatgcgcaggaatgtctccctcaatgtgagctttggaggcaaaacatatttttggagtgagttattgaccacattgtttccctctctttgggttgtttattttcttccagaatggtgtaataactttaattaagattagctttaattataaattacctaaaggccatcactaaggtatattcatcttattgatagaattatagtcagctttgtttctcttaagcagggatagtgataatgaagtgctgggttggttacagttccactgtgtgttaaccaaaatttgctgtgctagagctagactttggtctgaattggcagaggtagaacccatgttgcatgtttatcctaaatctgtaggaatttcccaaaccttgtttttcaaagttgagaagtagaaagtaataaattcaatcagggcccagacatgttttgtaccccctttaccctttggtctttcttccttttatcctattccactgagcttgttctttggggattgtggtgcctgacatcactgtctttcctcccctaggacactgacttgagtggagagacctcggcaattcaaggctgtcctgcagctctctgttgcctcagcaatgtcaggacgactgtctctttcctaagtaacataattttaaagaacaatttgttcctcagggaataatgtcttggattgtggggaatcctattaaaagtacaactattgcagtcatttgcttttacttttaccagcctcactcataaaccctccatctgtttgttgctttaaatagaagcacattataagagattatcacttgatcaggctgcatgtctgagtgttgtgtgttttcacatactcatgtatactaaggaataaaagaaagcaaaccac

SEQ ID NO: 117946 - DNA, 1040 bp, Homo sapiens
  Payload ID: 3068
  Gene Symbol: C10orf11
  Gene Name: chromosome 10 open reading frame 11
  ENST ID: ENST00000611255
  CDS Start-End: 273-953
cggggtcaggccgccgtcggggcgcggggcgctgcgggccacctgttgcagcgggcggccagggctcacctgcgcggagaccgggccgaggggcggcggcggcgagcggcggagctgaggtccccgaggctagcccgcgcctccggcttccgccgggtcagctgactgcccagtgcggaactgtgcgcccgccgcgctcccctgccgcgctccccgctgctgccgccgcgcccccgcgctccgtcccgcgcgcccgcagcgtcctggccgccatggccgggctcgtggtgcgtggaactcaagtgtcctacataggccaggactgcagagaaattccagagcaccttggcagggactgtggacatttcgcaaagaggcttgatctgagctttaaccttctgaggtcactggaaggactgagcgcattcaggagcctggaggaactcatcttggacaacaatcagctgggggacgaccttgtgttgccagggttacccagactgcataccttaaccctcaacaagaaccgaatcactgatttggagaacctgctggatcacttggcagaagtgacaccagctctggagtacctcagtctgctgggcaacgtggcctgtcccaacgagctggtcagcttggaaaaggatgaggaagactacaagagatacagatgctttgttctgtacaagctgcccaacttgaaatttctggatgcccagaaagtaaccagacaagaacgagaggaggcgttggtcagaggagtcttcatgaaggtggtgaagcccaaggcttctagtgaggacgttgccagctccccggagcgccactacacgcccttgccttctgcttccagggaactcaccagtcaccaaggtgtcctggggaagtgtcgctacgtttactatgggaaaaactcagagggcaacaggtttatccgagatgaccagctctgaagccaacttctgtataccttcacccatttcatgaaaataaaatcaaaagggaaatcaaaaataaagaaaacgctaaagaaaaaacaa

SEQ ID NO: 117947 - DNA, 393 bp, Homo sapiens
  Payload ID: 3068
  Gene Symbol: C10orf11
  Gene Name: chromosome 10 open reading frame 11
  ENST ID: ENST00000611306
  CDS Start-End: 1-393
aggtcactggaaggactgagcgcattcaggagcctggaggaactcatcttggacaacaatcagctgggggacgaccttgtgttgccagggttacccagactgcataccttaaccctcaacaagaaccgaatcactgatttggagaacctgctggatcacttggcagaagtgacaccagctctggagtacctcagtctgctgggcaacgtggcctgtcccaacgagctggtcagcttggaaaaggatgaggaagactacaagagatacagatgctttgttctgtacaagctgcccaacttgaaatttctggatgcccagaaagtaaccagacaagaacgagaggaggcgttggtcagaggagtcttcatgaaggtggtgaagcccaaggtgagc

SEQ ID NO: 117948 - DNA, 579 bp, Homo sapiens
  Payload ID: 3069
  Gene Symbol: C10orf113
  Gene Name: chromosome 10 open reading frame 113
  Uniprot ID: Q5VZT2
  ENST ID: ENST00000534331
  CDS Start-End: 52-519
atgcccaaacacagcaccattttcaccattttctgataatgcaggagtaggatggctaaaagtgaaagaagaatctactctatggaaagcatggcacctgaaatttctgaagatattggctgtcctctagcttatatgagagagagtgtttgtgctttactaatcaaccagtcatttttttcttgtgtggctgaaatgtacattccagacatgaacaggcctggtaaggcagaacggagagccgagaagggcctgaggcctcccaggaagctggttggggagaccagaaggctgcaaagctggccaacgcttgccaggtggctgcggagagtcagcttcagtctctacaagccgcccatccaggcagctcctgaaccagatccaggcaactgggccaagtccccaaggctgtctctgggaccagaaggtataaccaaagggaagcatggatttaaattccagggcataaaagaaaagttcaacgtatctaagaaggtgctgaaaatgacttttttgtaaatgtctgaaggacactgtcttataccataccatatacaataaaattttaaatgagcctga

SEQ ID NO: 117949 - DNA, 614 bp, Homo sapiens
  Payload ID: 3069
  Gene Symbol: C10orf113
  Gene Name: chromosome 10 open reading frame 113
  Uniprot ID: Q5VZT2
  ENST ID: ENST00000529198
  CDS Start-End: 52-291
atgcccaaacacagcaccattttcaccattttctgataatgcaggagtaggatggctaaaagtgaaagaagaatctactctatggaaagcatggcacctgaaatttctgaagatattggctgtcctctagcttatatgagagagagtgtttgtgctttactaatcaaccagtcatttttttcttgtgtggctgaaatgtacattccagacatgaacaggcttgaagaacggacagctgcactttatcccataggcctggtaaggcagaacggagagccgagaagggcctgaggcctcccaggaagctggttggggagaccagaaggctgcaaagctggccaacgcttgccaggtggctgcggagagtcagcttcagtctctacaagccgcccatccaggcagctcctgaaccagatccaggcaactgggccaagtccccaaggctgtctctgggaccagaaggtataaccaaagggaagcatggatttaaattccagggcataaaagaaaagttcaacgtatctaagaaggtgctgaaaatgacttttttgtaaatgtctgaaggacactgtcttataccataccatatacaataaaattttaaatgagcctga

SEQ ID NO: 117950 - DNA, 4929 bp, Homo sapiens
  Payload ID: 3070
  Gene Symbol: C10orf12
  Gene Name: chromosome 10 open reading frame 12
  Uniprot ID: Q8N655
  ENST ID: ENST00000286067
  CDS Start-End: 108-3851
attgttcctcagtgaacttccaccacatccctaaaatcttggaggggcagaccactggacaagagcaagacacaaatgtgaacatatgtgaggatggtaaagaccatatgcagagttcagctttagtagaaagtctaattacagtaaaaatggcagctgagaatagtgaggaaggcaatacctgtattattcctcaaagaaatttgttcaaagctttatcagaagaggcttggaactcagggtttatggggaactcatctagaactgctgacaaagagaatactttacagtgtccaaaaacacctttgcgccaggatttagaggcaaatgaacaagatgcaaggccaaagcaagagaaccatcttcactctctgggaagaaataaggtgggttaccatttacatcccagtgataagggccagtttgatcattccaaagatggttggttaggccccggccctatgccagctgtacacaaagcggcaaatggacactcaagaaccaagatgatatcaacctccatcaagacagctcggaaaagtaaaagggcatcagggctgaggataaatgattatgataaccagtgtgatgttgtttatatcagtcaaccaataacagaatgccactttgagaatcaaaaatcaatattatcttctcggaaaacagccagaaagagtactcgaggatactttttcaatggtgactgttgtgagctgccaactgttcgtacactggccagaaatttacactcccaggaaaaagcaagctgctcagcattggcatcagaggcagttttcactcctaagcagacccttacaattccagcccctagacatacagtagatgtgcagcttcccagagaagacaaccctgaagaacctagcaaggaaatcacctctcacgaggaaggaggtggagacgtttcacctcgaaaagaacctcaagagcctgaggtttgccccacaaagattaagccgaacctgagcagctcccctaggtcagaggaaacgacagcctccagcctggtgtggcctctccctgctcaccttcctgaagaggacctgccagaaggtggctccacagtctcagctcccacagcaagtgggatgtcttctcctgaacacaaccaaccaccagttgcactgttggatacggaggagatgagtgtaccccaggactgtcacctccttccctccactgaaagcttttccgggggagtcagtgaagatgtcatttctaggcctcattctcctcctgaaatagtcagtagagaagaaagtcctcagtgctcagaaaatcagagttccccaatgggcttggagccccccatgagtctgggaaaggctgaggacaaccaaagcatcagtgctgaggttgagtctggagacacccaggagctaaatgtcgacccactcttgaaggaaagcagcacttttactgatgaaaaccccagtgaaactgaggaaagtgaggcagcaggtggtataggaaaattagagggagaggacggtgatgtaaaatgcctgtcagaaaaagacacgtatgatacaagcattgactcactcgaagagaatttggacaagaagaaaaaaggtaaaaaattccctgaggcctctgataggtgcctaagaagtcaactttcggattcttcctctgctgacagatgcctaagaaatcagagttcagattcttcctcagcttgtcttgaaatcaaagttcctaaaaatcctagtgcaaaacgttcaaaaaaagaagggcaccctggtgggacaacacctaagggccttctacctgacagtttccacacggaaactctggaggacacagaaaagccaagtgtcaatgaacgcccctctgagaaagatgctgagcaggagggcgaaggcggggggatcatcaccaggcagactttgaaaaacatgctggacaaagaagtcaaggagttacgaggagagattttccccagcagggaccccataaccacagctggacagccactgcctggagagagattggaaatctatgttcagtctaaaatggatgagaagaatgctcatatcccctcagaaagtattgcttgtaagagggacccagaacaggcaaaagaagagccagggcatattcccacacagcatgtggaggaggctgtgaatgaggtagacaacgaaaacacccagcagaaagatgatgagagtgatgccccatgcagctctcttgggttgtcgagtagtggaagtggtgatgctgctagggcaccaaaatcggtgccaaggcctaaaagattgacctcttcaacctacaacctaagacacgctcattctctgggctccttggatgcttcaaaagtgacttcagaaaaggaagctgcacaagtaaaccccataatgccaaaggaaaatggagcttcagagagtggagaccccctagatgaggacgatgttgacaccgtggtagatgaacagccaaagtttatggaatggtgtgctgaggaggagaaccaagagctcatcgccaacttcaatgcccagtacatgaaagttcagaagggctggatccagttggagaaagaaggacagccaacaccaagagcaaggaacaaatcagataaactgaaagagatttggaaaagcaagaaaaggtcacggaaatgtaggagttcattggagagtcagaagtgttctcctgttcagatgctctttatgacaaactttaaattatctaatgtttgtaaatggttcttagagacaactgaaacccggtctctagtcattgtgaagaagctcaatactcgccttccaggagacgttccccctgtcaagcatcctcttcagaaatacgctccttccagcctatatcccagttcactacaggctgagcgcttgaaaaagcacttgaagaaatttcctggagctacccctgctaagaataattggaaaatgcagaagctctgggccaaatttcgagagaatcctgatcaagtggagccagaagatggcagtgatgtcagccccggccctaattctgaagacagcatagaggaagtcaaggaagatagaaacagtcatcctccagcaaacctgcccactccagccagtacccggattcttagaaaatattccaatattcgaggaaagctcagagcccagcaacgtttaatcaagaatgagaaaatggaatgcccagatgctctggctgtggaaagtaagccaagtcgtaagagcgtatgcatcaaccctctgatgtcccccaagcttgccctgcaagtggatgcagatgggtttcctgttaagcccaagagtactgaaggaatgaagggaaggaaggggaagcaggtgtctgaaatcttgcctaaagcagaagttcagagtaaacgcaagagaacagaaggcagcagccctccagatagtaagaacaaggggcctacggtgaaagccagcaaagaaaagcatgctgatggagccaccaaaacccctgctgccaagaggccagctgcaagggacagaagcagccaaccccccaaaaagacgtctttgaaagagaataaagtgaagatccctaaaaagtccgctgggaagagctgccctccctccaggaaagaaaaagagaatacaaacaaaaggccttcccagtctattgcctcggaaacactgacgaaacctgcaaaacagaagggggccggtgaatcctcttcaaggcctcagaaagccacgaataggaagcagagtagtggaaagactcgggccagaccctcaacgaaaaccccagagagcagtgcagctcagagaaagcgaaagctgaaggcaaagctggactgttcgcacagcaaacggaggcggctggatgcaaagtgattggaaagatggtagccaagagtaaaactgttctatagaagtaaccttttattttgcattaactaaatctgcttttataagcttatcaagcctttcaaatttacagttaatggagaacaccgtaatttgagatgtcagaaaatgcatctcagatggagaagggaacttgcagagtccttctctgaggctaagggaagttatatattatattctggttgttccttgggttttaaacttggaaccaagcagttttcgtttttaaaagtacagtgccttatttatcctttttgtttttaaatttacaaaagctaaaaagctgatctatgtgattaaaggcttgtattttatacttgatgcacaagcacttgtactgtagccgagaagaccaccatcatgcacataaaaggagcttttcagcagccaccctgcagcatctgcccacgaacagatgcccttctttgcaaaccccagcagtgaacttccctctctgtcttgtttgtttgtttagatgatgtttgaaagctaaaccaaatcattttatggtatgcagaggatttataattataaaagattactatttctgttacccccttttaaaaaagatcatgttcattgttggtccctcctctcacctttgatgttttgtcatttgagagcatgtattctaaattatgtgcccatgggacaagagatatgtcacaagtgttaatttttgtttacaaactctaaaaaatcatttgcatccccaaactgtattactaattctcaccatcttcttcatttctggtcttgctagcactcctgcaaggcttccatcctacttcgggaggaaaaagcctaggattttttttttccatcttgtagctgtaatttgatgattaggatgaaaatgactcttattttctttcttacccagagtacttccatattcaaagaaagccgaactattatttccagtaatagaaaggtttaagaatatgtatgtccatgtgtgtttgggtgcatttgcatgtggttatcagccacaaatgtctcccaatcccaattttacagtaaaattttttccctatgcagtgtg

SEQ ID NO: 117951 - DNA, 1064 bp, Homo sapiens
  Payload ID: 3071
  Gene Symbol: C10orf120
  Gene Name: chromosome 10 open reading frame 120
  Uniprot ID: Q5SQS8
  ENST ID: ENST00000329446
  CDS Start-End: 33-1040
gaacacctcccgtcctagcttattgccggagtatgatcagagaatggaagaatgactgtcagaggattgaaaaacagagggctagtgacacaatggtgcaagaaaggaagaatgaaaagccagttagaatatttaataccaactcttcctttcaggatcaagccccaacgtgttgccaagaggatctgagttctgcttcaccgttgcggatatggagcaaattctacagatcagacccacggattgcccttgggaaatactcccccttggaaaaagagatcctacgtctaggtggcattcacaccatagcagcaagaaggcttttggcttacaagcaagaggaagaatgcagaatgctcaaggaactacagttgctgtctccggactacaaacaagcaatggagtataaaaagaaacattcctctccttgtgctatttgtgtacccctagaaaaaatatggacagcaaaggtgattgcgcccctggaggcatttaaaatgccacaacgagagcaggtgaacgtcagtaagcacatagagaggatgaggcttgctcgggctctgggaaatcatcagcctttaccctacattgaaaggtttacacgctcctcatttctgtctggggtgggcctgggtccaatggcaaaaaataaggccagacgaaaggaagacaactatgacacccataattgtgatgatgccaaccaagataagaaagaggaggcagagggaaaaaacacaaaaagacgagaaataaaaatgaatgtagttttcaagtcaaaagaaccaaaaaaatgtttaacataccatggaaatgatcgcaaatcattcctccccgcaaagaaaccggaacggtccatcgcaggcctaacaaaccgaaatcttttctgcatatcagaattccctggtgacttaatgctaatgaatcaggattttatatcacggagagaccacttcagtgatctggtcaagacctacagcctggaagaagagagtatctggaaagagcgcatgcgtaaagcaactccttatcattattaaagttttatttgttgcccagggtaa

SEQ ID NO: 117952 - DNA, 628 bp, Homo sapiens
  Payload ID: 3071
  Gene Symbol: C10orf120
  Gene Name: chromosome 10 open reading frame 120
  ENST ID: ENST00000432000
  CDS Start-End: 1-479
actgtcagaggattgaaaaacagagggctagtgacacaatggtgcaagaaaggaagaatgaaaagccagttagaatatttaataccaactcttcctttcaggatcaagccccaacgtgttgccaagaggatctgagttctgcttcaccgttgcggatatggagcaaattctacagatcagacccacggattgcccttgggaaatactcccccttggaaaaagagatcctacgtctaggtggcattcacaccatagcagcaagaaggcttttggcttacaagcaagaggaagaatgcagaatgctcaaggaactacagttgctgtctccggactacaaacaagcaatggagtataaaaagaaacattcctctccttgtgctatttgtgtacccctagaaaaaatatggacagcaaaggtgattgcgcccctggaggcatttaaaatgccacaacgagagcagaattccctggtgacttaatgctaatgaatcaggattttatatcacggagagaccacttcagtgatctggtcaagacctacagcctggaagaagagagtatctggaaagagcgcatgcgtaaagcaactccttatcattattaaagttttatttgttgcccagggtaa

SEQ ID NO: 117953 - DNA, 1756 bp, Homo sapiens
  Payload ID: 3072
  Gene Symbol: C10orf128
  Gene Name: chromosome 10 open reading frame 128
  Uniprot ID: Q5T292
  ENST ID: ENST00000374148
  CDS Start-End: 56-535
attgtgcctgcgctgccagcagccaggagccaggagccaagagcagagcgccagcatgaacttgggggtcagcatgctgaggatcctcttcctcctggatgtaggaggagctcaagtgctggcaacaggcaagacccctggggctgaaattgatttcaagtacgccctcatcgggactgctgtgggtgtcgccatatctgctggcttcctggccctgaagatctgcatgatcaggaggcacttatttgacgacgactcttccgacctgaaaagcacgcctgggggcctcagtgacaccatcccgctaaagaagagagccccaagagcccacgtcctcagggacggtcctgccttgggacctttgcacttgctgttttctgtaattggaatgctctttgccagaaagctgcaagcctcgaccctcttttccttcaaatccctgcttcagtgtcaccactgcatcatggagggcctatttaaggcgaaaccacaatttctccaaaaggtgagttgtaagagtgatcacttgtcttaaaaggaggacaggcagtctctgccccatggggctgcatgggttttcggcatgacctctccctcccctggccacgtgggacgggcaaccatggcatggccaggagccctcatgccaggacagctgtgagaccaggaatcagcatcaccttgggacatgatggtacttggcaagatttaacatgaagctgtggggcatttgcccagttagagctgagaaaatggttttaacaggataggtaaactttttttcattctccaagacctatcctatgatagtgtccaatctaataattagccaatttagtccatttgatgaaaaaaattcccaaacatctcttcatgtcatcatgctatcagtttggctgggtatttgcatctcagtgctgctttggggtctcggagaggacgaagcctgtatgtggagggccggtctacagaaggggacaggatctcggacccctgattgaatgagcctatggatgaagactcctaggaatgaaggcatcttcaccagggttttgagaatcatcatttcacaatccacattccccagcttggcttttcctcacctcatgccccttgcatgtgccaaacccactgagaatttgctccctgtctgaccagcccaggatggtcacacaggcctggggcaatctcttgacctcactctcctgctttatgaaaaattttcaaatccaaagaaaagttgaaagaacgggacaatcaaaatatatacacccttcacctagggtcactcactgacacggtgccccctttgctttatctctgtgtacataagccttttttgactgatctacttgcaaattagtgtagatatcatgatatttcacccctgaatacagcaccattgtgtttcctattgtgtataatcacaatacagtgaccactcctaagaaaattaatgctaatttaatatcatctattatacagtccatatttaaatttctctggttatttcagaagtatcttttattgctctattttttattgtgctattttccaatccagaaaaaatatttgtatttattttgtcttttttttaagtctctttcagtattgaacagcccctctgctttttatccttatggcattgttaattgagaagtccctaagccccgttgtcttatacaatgtcccattttctggatttgtctgatcgttttctcctgagtagattcagattgaagtttttggtcagaaa

SEQ ID NO: 117954 - DNA, 1971 bp, Homo sapiens
  Payload ID: 3072
  Gene Symbol: C10orf128
  Gene Name: chromosome 10 open reading frame 128
  ENST ID: ENST00000374151
  CDS Start-End: 83-505
acatggctcattgtgcctgcgctgccagcagccaggagccaggagccaagagcagagcgccagcatgaacttgggggtcagcatgctgaggatcctcttcctcctggatgtaggaggagctcaagtgctggcaacaggcaagacccctggggctgaaattgatttcaagtacgccctcatcgggactgctgtgggtgtcgccatatctgctggcttcctggccctgaagatctgcatgatcaggaggcacttatttgacgacgactcttccgacctgaaaagcacgcctgggggcctcagtgacaccatcccgctaaagaagagagccccaagaaagctgcaagcctcgaccctcttttccttcaaatccctgcttcagtgtcaccactgcatcatggagggcctatttaaggcgaaaccacaatttctccaaaagcatctggccagatctgtgcaaattcaccaactacagaaagtgaaaagtttcccaaaatatgcctattaacctcgaggaatgacttctctttttgtcatcaaagtggatgaagttttgtttgccttgggtttggcaggcagaaaacaacttccaggttgagctctcccctttacccagaagccactggccttcagttcctttctatgttgcacaaggaagtggcccaccttgcaggctttgctgatgagcttttatacctgtttaattgtgtgaattgcataaacacatgcaatcattagagtatagttgctctctcaataagtcttccagatggttctcttcctttccagagatgcacaggtgattgagctgtaggtgagcagtgacgtgaagaggggttctagccccgtggaaaacagcccatggttaacatctcaggatgttctgcattcaaacacccaaggctggtaatgaactttcacatggactgaatattggaggcaaataatagaaggaatagaatatacagtgcctctgtcctgaaggaaaatatcatgcctcttctggaagaaacggactgcacagaggaaggattgagcaatttagcctgcagtggaagaaggtggacaccaaaagcttcaccctgtgttggagctgttcatgcttccatgaggccatggtgtccatgtccgtggaacctaccacagaaaatggctcatgaaaaggggaatccgacccaacacacagcttcctacacactgccatcttatcaacagttaggcactactttgtagaacgattagcttcaccctcttagctgccaggagatcccttcttaaagatggactatgtgaagattcgggagtcctgaaacatggggactccgggatggtctctagccctatcgatgatgaacactggccttctggaggggaaatggcagtctgggctggcgtggtaggaagggctttggtgttcatggaatgggcctgctgctctcagaccttcaaaggatggaaccaacgaaggaccaaatgagaaagcagatgctgtgccttgcagagggccatgaatgtcagttattatttttctccttatacaattattttgtggttattattacaatgtacatggctgttgcatagaagacatgactggtggaggctgaggaaagccatgacattctacaattgccatcaggctaaggccccgtgagcatttctctcccttgtaatattaaccctgtatttctgggatcacatcacggaatattctttgcctttccactttccaggaaatctctcggactgggctaccctccttgtgtgtgatgaaagatgagctatatttcagaacaaagtgctgtgttgtcatgatttgcctggactcccagggcgtctcttacccaacttgataacgatgctgttcattagcagcctttgttaactgataaccaagagcggtaatgtgatactcataagcaattttctgtgtgtaggataaaataaaccatcttgtatgggatctgctaattg

SEQ ID NO: 117955 - DNA, 1569 bp, Homo sapiens
  Payload ID: 3072
  Gene Symbol: C10orf128
  Gene Name: chromosome 10 open reading frame 128
  Uniprot ID: Q5T292
  ENST ID: ENST00000374153
  CDS Start-End: 41-430
ccagcagccaggagccaggagccaagagcagagcgccagcatgaacttgggggtcagcatgctgaggatcctcttcctcctggatgtaggaggagctcaagtgctggcaacaggcaagacccctggggctgaaattgatttcaagtacgccctcatcgggactgctgtgggtgtcgccatatctgctggcttcctggccctgaagatctgcatgatcaggaggcacttatttgacgacgactcttccgacctgaaaagcacgcctgggggcctcagtgacaccatcccgctaaagaagagagccccaagaaagctgcaagcctcgaccctcttttccttcaaatccctgcttcagtgtcaccactgcatcatggagggcctatttaaggcgaaaccacaatttctccaaaagagatgcacaggtgattgagctgtaggtgagcagtgacgtgaagaggggttctagccccgtggaaaacagcccatggttaacatctcaggatgttctgcattcaaacacccaaggctggtaatgaactttcacatggactgaatattggaggcaaataatagaaggaatagaatatacagtgcctctgtcctgaaggaaaatatcatgcctcttctggaagaaacggactgcacagaggaaggattgagcaatttagcctgcagtggaagaaggtggacaccaaaagcttcaccctgtgttggagctgttcatgcttccatgaggccatggtgtccatgtccgtggaacctaccacagaaaatggctcatgaaaaggggaatccgacccaacacacagcttcctacacactgccatcttatcaacagttaggcactactttgtagaacgattagcttcaccctcttagctgccaggagatcccttcttaaagatggactatgtgaagattcgggagtcctgaaacatggggactccgggatggtctctagccctatcgatgatgaacactggccttctggaggggaaatggcagtctgggctggcgtggtaggaagggctttggtgttcatggaatgggcctgctgctctcagaccttcaaaggatggaaccaacgaaggaccaaatgagaaagcagatgctgtgccttgcagagggccatgaatgtcagttattatttttctccttatacaattattttgtggttattattacaatgtacatggctgttgcatagaagacatgactggtggaggctgaggaaagccatgacattctacaattgccatcaggctaaggccccgtgagcatttctctcccttgtaatattaaccctgtatttctgggatcacatcacggaatattctttgcctttccactttccaggaaatctctcggactgggctaccctccttgtgtgtgatgaaagatgagctatatttcagaacaaagtgctgtgttgtcatgatttgcctggactcccagggcgtctcttacccaacttgataacgatgctgttcattagcagcctttgttaactgataaccaagagcggtaatgtgatactcataagcaattttctgtgtgtaggataaaata

SEQ ID NO: 117956 - DNA, 730 bp, Homo sapiens
  Payload ID: 3072
  Gene Symbol: C10orf128
  Gene Name: chromosome 10 open reading frame 128
  ENST ID: ENST00000453436
  CDS Start-End: 1-348
aggatcctcttcctcctggatgtaggaggagctcaagtgctggcaacaggcaagacccctggggctgaaattgatttcaagtacgccctcatcgggactgctgtgggtgtcgccatatctgctggcttcctggccctgaagatctgcatgatcaggaggcacttatttgacgacgactcttccgacctgaaaagcacgcctgggggcctcagtggcgaaaccacaatttctccaaaagcatctggccagatctgtgcaaattcaccaactacagaaagtgaaaagtttcccaaaatatgcctattaacctcgaggaatgacttctctttttgtcatcaaagtggatgaagttttgtttgccttgggtttggcaggcagaaaacaacttccaggttgagctctcccctttacccagaagccactggccttcagttcctttctatgttgcacaaggaagtggcccaccttgcaggctttgctgatgagcttttatacctgtttaattgtgtgaattgcataaacacatgcaatcattagagtatagttgctctctcaataagtcttccagatggttctcttcctttccagagatgcacaggtgattgagctgtaggtgagcagtgacgtgaagaggggttctagccccgtggaaaacagcccatggttaacatctcaggatgttctgcattcaaacacccaaggctggtaatgaactttcacatggactgaa

SEQ ID NO: 117957 - DNA, 614 bp, Homo sapiens
  Payload ID: 3072
  Gene Symbol: C10orf128
  Gene Name: chromosome 10 open reading frame 128
  Uniprot ID: Q5T292
  ENST ID: ENST00000474718
  CDS Start-End: 24-341
ggagccaagagcagagcgccagcatgaacttgggggtcagcatgctgaggatcctcttcctcctggatgtaggaggagctcaagtgctggcaacaggcaagacccctggggctgaaattgatttcaagtacgccctcatcgggactgctgtgggtgtcgccatatctgctggcttcctggccctgaagatctgcatgatcaggaggcacttatttgacgacgactcttccgacctgaaaagcacgcctgggggcctcagtgacaccatcccgctaaagaagagagccccaaggcgaaaccacaatttctccaaaagagatgcacaggtgattgagctgtaggtgagcagtgacgtgaagaggggttctagccccgtggaaaacagcccatggttaacatctcaggatgttctgcattcaaacacccaaggctggtaatgaactttcacatggactgaatattggaggcaaataatagaaggaatagaatatacagtgcctctgtcctgaaggaaaatatcatgcctcttctggaagaaacggactgcacagaggaaggattgagcaatttagcctgcagtggaagaaggtggacaccaaaagcttcaccctgtg

SEQ ID NO: 117958 - DNA, 2070 bp, Homo sapiens
  Payload ID: 3072
  Gene Symbol: C10orf128
  Gene Name: chromosome 10 open reading frame 128
  ENST ID: ENST00000374156
  CDS Start-End: 109-540
atctggtcttgctgggccattgctctagaacctgctcagtaattagcacttgtttgagtcaattattgcccgaagtggaacatcagcctctggagccagtctgcaagaatgggacaggtggcgtgccatcctaagaagagaggacagcctctgctgaggccccgggcaagggcagcatggactacaggggttgtgcaagaggggagaatgagagatgtaggaggagctcaagtgctggcaacaggcaagacccctggggctgaaattgatttcaagtacgccctcatcgggactgctgtgggtgtcgccatatctgctggcttcctggccctgaagatctgcatgatcaggaggcacttatttgacgacgactcttccgacctgaaaagcacgcctgggggcctcagtggtgagggatgtggtgctcgggcctggctctgccccacccagcgaggcaccgagggccactctgtgatgctggctacagcaagaatgaacccacaagcgcagagcccaacaggctgtaaaggaaggcagtgacctctgcatgtttctgtctctctcactaaccctttgcctctgtttctctttcttctgtctctatctctctctgtctctctatttgtgttcctttttctgtctccctttccatgtctctgtctttctgtgtctctttccctctgtacttttcctttcagttgctcttggcagtcctgagaatcacatttcctggagaaaggtgggagaggaactaaaattggcttcacacagaaatttctgttctctcatccaaatgatgagatcaaataaacccagtcccagtaggcagcgagacaccatcccgctaaagaagagagccccaaggcgaaaccacaatttctccaaaagagatgcacaggtgattgagctgtaggtgagcagtgacgtgaagaggggttctagccccgtggaaaacagcccatggttaacatctcaggatgttctgcattcaaacacccaaggctggtaatgaactttcacatggactgaatattggaggcaaataatagaaggaatagaatatacagtgcctctgtcctgaaggaaaatatcatgcctcttctggaagaaacggactgcacagaggaaggattgagcaatttagcctgcagtggaagaaggtggacaccaaaagcttcaccctgtgttggagctgttcatgcttccatgaggccatggtgtccatgtccgtggaacctaccacagaaaatggctcatgaaaaggggaatccgacccaacacacagcttcctacacactgccatcttatcaacagttaggcactactttgtagaacgattagcttcaccctcttagctgccaggagatcccttcttaaagatggactatgtgaagattcgggagtcctgaaacatggggactccgggatggtctctagccctatcgatgatgaacactggccttctggaggggaaatggcagtctgggctggcgtggtaggaagggctttggtgttcatggaatgggcctgctgctctcagaccttcaaaggatggaaccaacgaaggaccaaatgagaaagcagatgctgtgccttgcagagggccatgaatgtcagttattatttttctccttatacaattattttgtggttattattacaatgtacatggctgttgcatagaagacatgactggtggaggctgaggaaagccatgacattctacaattgccatcaggctaaggccccgtgagcatttctctcccttgtaatattaaccctgtatttctgggatcacatcacggaatattctttgcctttccactttccaggaaatctctcggactgggctaccctccttgtgtgtgatgaaagatgagctatatttcagaacaaagtgctgtgttgtcatgatttgcctggactcccagggcgtctcttacccaacttgataacgatgctgttcattagcagcctttgttaactgataaccaagagcggtaatgtgatactcataagcaattttctgtgtgtaggataaaataaaccatcttgtatgggatctgctaa

SEQ ID NO: 117959 - DNA, 1241 bp, Homo sapiens
  Payload ID: 3073
  Gene Symbol: C10orf131
  Gene Name: chromosome 10 open reading frame 131
  Uniprot ID: A6NCD4
  ENST ID: ENST00000423344
  CDS Start-End: 197-727
gcggtggggcggttggtgatcatcctagcctgcggtagatggtgcgccctgccttccctgcccagacgtaagaaaagtgcactgtccgtccagaaagttgaaataaaaggaccatcatgaaaaaatctcaaagagaagatatttttaaaaaggttgcttccaaatcttggctcttgtgaacagtgctgcaacaaacatgggagtgcagatgtcagaagagatggataatattacagctgaagaaattatagacaagcatctccaaaaagatttagatgcagaagaaaatcaaaatgtagcaaagacattgagaggcaaagtgagagaaaagctaaaaatttctaagattaataaaggtgaaaaatcttcaactgagcagctcattgatagcgaaatacatcaaaggtccaagttgtctccacagactgaagtctcattggatgaaagtctttcatttttcattctgagtggtgaagaaggttcagctttgggcaagtcttcagagcagagaccagtaaaccgtagttatcccaaatgcttttcacttggtgttaatttacaaaatgttgctgagagtgaagaggaagagtttatgaaagaattcattttgacagatatactcaaagtaaaagctgctgactatgaagatgatcaagaacaaataaaaaaacagaaggcaaatatttttgtaccaagtagttctccaggtaacattctttcccagtaaaatattcaagtcattaacgaattatgttatgggataatagctttattgtatgctggataaataaaaaatactgatctaaaattatagtaacttttctatatttgtttttcatgacttccctgaattaagggaactgattaagagaactcattcttcatttaaaaaatgtacatatataggcatatgtatttatatatagagagagagagcgagcgagaaagtaagagacagtgagagagaggctttctgctagacttcagtagtagggtgtaattatagttgtttgtactacttatttggtcaatatccatttaatattttggactttaaagtaatatctaagttttattgttataaagtggttaaccagcgcaaactgccaaaagatatgatgccacgtattctagaagatgaaggattctatattcagagaaagccagaaatatacaaaaagacctgcaacaaaatggaaaatcgcctgcttaaactagaagaggcaagtgcaccacctaac

SEQ ID NO: 117960 - DNA, 446 bp, Homo sapiens
  Payload ID: 3073
  Gene Symbol: C10orf131
  Gene Name: chromosome 10 open reading frame 131
  ENST ID: ENST00000602648
  CDS Start-End: 263-446
gccccgcagcgtcctccccggggacgcccgctcagccgggagctcgcggccggtactcacccgctgggtatactcttcttcttcaccaggacgagagggatgagagacccacgccccaggcaaccccgctctcaggcctcctccagaacagaccccaggaaagttgaaataaaaggaccatcatgaaaaaatctcaaagagaagatatttttaaaaaggttgcttccaaatcttggctcttgtgaacagtgctgcaacaaacatgggagtgcagatgtcagaagagatggataatattacagctgaagaaattatagacaagcatctccaaaaagatttagatgcagaagaaaatcaaaatgtagcaaagacattgagaggcaaagtgagagaaaagctaaaaatttctaagattaataaaggtgaaaaatcttcaactgagcagc

SEQ ID NO: 117961 - DNA, 980 bp, Homo sapiens
  Payload ID: 3073
  Gene Symbol: C10orf131
  Gene Name: chromosome 10 open reading frame 131
  ENST ID: ENST00000618242
  CDS Start-End: 1-531
ctttttttgcagatgtcagaagagatggataatattacagctgaagaaattatagacaagcatctccaaaaagatttagatgcagaagaaaatcaaaatgtagcaaagacattgagaggcaaagtgagagaaaagctaaaaatttctaagattaataaaggtgaaaaatcttcaactgagcagctcattgatagcgaaatacatcaaaggtccaagttgtctccacagactgaagtctcattggatgaaagtctttcatttttcattctgagtggtgaagaaggttcagctttgggcaagtcttcagagcagagaccagtaaaccgtagttatcccaaatgcttttcacttggtgttaatttacaaaatgttgctgagagtgaagaggaagagtttatgaaagaattcattttgacagatatactcaaagtaaaagctgctgactatgaagatgatcaagaacaaataaaaaaacagaaggcaaatatttttgtaccaagtagttctccaggtaacattctttcccagtaaaatattcaagtcattaacgaattatgttatgggataatagctttattgtatgctggataaataaaaaatactgatctaaaattatagtaacttttctatatttgtttttcatgacttccctgaattaagggaactgattaagagaactcattcttcatttaaaaaatgtacatatataggcatatgtatttatatatagagagagagagcgagcgagaaagtaagagacagtgagagagaggctttctgctagacttcagtagtagggtgtaattatagttgtttgtactacttatttggtcaatatccatttaatattttggactttaaagtaatatctaagttttattgttataaagtggttaaccagcgcaaactgccaaaagatatgatgccacgtattctagaagatgaaggattctatattcagagaaagccagaaatataca

SEQ ID NO: 117962 - DNA, 1110 bp, Homo sapiens
  Payload ID: 3074
  Gene Symbol: C10orf142
  Gene Name: chromosome 10 open reading frame 142
  Uniprot ID: B7Z368
  ENST ID: ENST00000619243
  CDS Start-End: 12-404
gagaagacaaaatgaggatgtactcctcagatgctcacgaaaggcctccttccccttctttgggaacgacccccccccaccccctccccccaacaggcagtcccaggccgcgccaggactcggccgcaggcaactcggaggagcgggagcccaggggcctcaggagggcctcgggagtggggagcagctgtaagcgccctacagtttgcatgggaaggcaacagggacttcccttttgcactgtctgcgggtaccgctgttccagccctgagaggacgaggggacgctgcgctgtggggaaagtccgggtggcaggaggtggcggggctcctggaggaggtgctgggatgcgctgctgtggctgcagagaaagaaatataaacaaagagcttgaattattttgaaataactgttggtagctggactgtgttctcttgaccgcaacattgctctgggactgaatcgcgtgggtctctgctcttcctaagtgttacataagaatagcgaacccatgaggtcagcttctaaaccagtttcttcccataacctcctggaccaagtcccaagcaaggcccagaggagctcaaggacccactctccccgggacactcctcgctctctagttggaaggaggaaatgaatgtcccccagtaattgaaggctgctcatgtttgtgtagaaaagccaagcacaggcccatattctagagggttgcttgcggcaggcggaaggccatcgaaggcaaaacgaaacaaatgaaaaggcatcttttgaagctaatggaacagatcaggtggtcaaaaatggataaacaatggcatttggagcaaaactttcagcttcttcgttttagttcgacagccccaggagggcatggaagcttctcgccctcctcatatgtcttgccccaggcatctctgtgtctctctcctctgtaacatcctttatagtaaatgtaagtaggcctttccctgagctctgtgagctgctctagcgaattattcaagtgttaggaggcgtcctgggaacattgattcgtgggaacgccagtgggtcagaagcacaggtaagaccaccttgccattggcattggaagtggagggcaggctt

SEQ ID NO: 117963 - DNA, 1010 bp, Homo sapiens
  Payload ID: 3074
  Gene Symbol: C10orf142
  Gene Name: chromosome 10 open reading frame 142
  ENST ID: ENST00000623589
  CDS Start-End: 193-1005
gcagcatggatgctcaggcaactgacccgtcaggactgcagcaaatgaacagaagctgggggagagcgcgggctggtgctgtacggagctctggcgcagaaggcgctcaccaggggtgcccagagccggggtctgtgcgccgcgggttggatccgggtcacaggctctgggtggacagagtgagaagacaaaatgaggatgtactcctcagatgctcacgaaaggcctccttccccttctttgggaacgacccccccccaccccctccccccaacaggcagtcccaggccgcgccaggactcggccgcaggcaactcggaggagcgggagcccaggggcctcaggagggcctcgggagtggggagctgtaagcgccctacagtttgcatgggaaggcaacagggacttcccttttgcactgtctgcgggtaccgctgttccagccctgagaggacgaggggacgctgcgctgtggggaaagtccgggtggcaggaggtggcggggctcctggaggaggtgctgggatgcgctgctgtggctgcagagaaaggtcccgaggacgcaacccgtcccttcccccgaactgcgaaggagccccgcggggaggacgggcagggtctcccggagggaggaacaggggagcctggagtctcagggttgcggggagcagaggcgttctgggtggtgaacgtccccagcctgccctccctgctcactgcgaggtcgcgcaccggctctgctccaggccttccctcagccctggcctccaggcagtttccatttttgccaggtggattctgtacggcttcatttattcagaatctggatcaacaaatgaacactcagagaggaaaagggtgtttggaggggtggagaggtttccaagcaggtgcccacctgagggccccctgaaaggggacttaaagccgagtttccagctgggccaccctttttttttctttctttctttcagaaatataaacaaagagcttgaattattttgaaataa

SEQ ID NO: 117964 - DNA, 3131 bp, Homo sapiens
  Payload ID: 3075
  Gene Symbol: C10orf2
  Gene Name: chromosome 10 open reading frame 2
  Uniprot ID: Q96RR1
  ENST ID: ENST00000311916
  CDS Start-End: 186-2240
tgggcatatgtgtgaagcagcaacgtagaggggctgaagaggagaaattcatggagagaaagaatgcacctagagtgagctctgcagagtgctgcgtgggatatccctagagtttggtctagtgaaggcacgctaaccaggcacctaaggcatttcaagtagtgacttcccacatttggctaggaatgtgggtcctcctccgaagtgggtaccccctccgtatcttgttacccctgcgtggggagtggatgggtcggaggggcctgccccgaaacttggccccaggccctcctcgcagacgttacaggaaggagactctccaagccttggatatgccagtgttgcctgtaactgcaactgaaatccgccagtatttgcgggggcatgggatccccttccaggatggtcacagttgcctgcgggcactgagcccctttgcagagtcttcacagctcaaaggccagactggtgttaccacttccttcagcctcttcattgacaagaccacaggccactttctctgcatgaccagcctagcagaagggagctgggaagacttccaggccagcgtggaggggcgaggggatggggccagggaggggtttctgcttagcaaggcaccagaatttgaggacagcgaggaggtccggaggatctggaaccgagcaatacctctctgggagctgcctgatcaggaggaggttcagctggctgatacaatgtttggccttaccaaggttacagatgacacactcaagcgtttcagtgtgcgatatctgcgacctgctcgcagtcttgtcttcccttggttctcccctgggggctcaggattacgaggcctgaagctcctagaggctaaatgccagggggatggagtgagctacgaggaaaccactattccccgacccagcgcctaccacaatctgtttggattaccactgattagtcgtcgagatgctgaggtggtactgacgagtcgtgagcttgacagcctggccttgaaccagtccacggggctgcctacccttactctaccccgaggaacgacctgcttaccccctgccttactcccttacctggaacagttccggcggattgtattctggttgggggatgaccttcggtcctgggaagccgccaagttgtttgcacgaaaactgaaccccaaacgatgcttcttggtgcgaccaggagaccagcaaccccgtcccctggaggccctgaacggaggcttcaatctttctcgtattcttcgtaccgccctgcctgcctggcacaagtccatcgtatctttccggcagcttcgggaggaggtgctaggagaactgtcaaatgtggagcaagcagctggcctccgctggagccgctttccagacctcaatcgtatcttgaagggacatcgaaagggcgagctgacggtcttcacagggccaacaggcagtggaaagacgacattcatcagtgagtatgccctggatttgtgttcccagggggtgaacacactgtggggtagcttcgagatcagcaatgtgagactagcccgggtcatgctgacacagtttgccgaggggcggctggaagatcaactggacaaatatgatcactgggctgaccgctttgaggacctgcccctctatttcatgactttccatggacagcaaagcatcaggactgtaatagatacaatgcaacatgcagtctacgtctatgacatttgtcatgtgatcatcgacaacctgcagttcatgatgggtcacgagcagctgtccacagacaggatcgcagctcaagactacatcatcggggtctttcggaagtttgcaacagacaataactgccatgtgacactggtcattcacccccggaaagaggatgatgacaaggaactgcagacagcgtccatttttggctcagccaaagcaagccaggaagcagacaatgttctgatcctgcaggacaggaagctggtaaccgggccagggaaacggtatctgcaggtgtccaagaaccgctttgatggagatgtaggtgtcttcccgcttgagttcaacaagaactccctcaccttctccattccaccaaagaacaaggcccggctcaagaagatcaaggatgacactggaccagtggccaaaaagccctcttctggcaaaaagggggctacgacacagaactctgagatttgctcaggccaggcccccactcccgaccagccagacacctccaagcgttcaaagtgaaggccgtgcagagctggtcactgaaatgagcctgataggataggctggagcataaaactctgcaagggctcctctatcctgtggtcctgagctgtgtgcccttctcagtctgaggggcctaacctagagcaggtttccatagtgagaaaattcaatgtagcagactactgagaaactactgtgttgctcaggctttgtttgaggtcctgtatatacagcactgaaaagagagataaagtccctgcctgcatgcattctggcggaagagacaagcaagcaatgaacaaattagcagaaaacctagttttagtgaaaaatgctgtaaagaaaatagaaatgcgatagagtgctggcaggctagtgtagataagtggtctgaaaaggtgtctctgagccgagggcatgtgagctggggcctaaacaactagaaggagagagccacgtgaacatccggcgaaggggacccaggcagagagaaaaggaaatccaagccctgaggtaggaatgagcaggtcagattcaaggcagtgaggtcaggccgcatgaacctggaggggaatcggggacttcatgcgaaactccagcctaggctttcaaagtcaaagggtgatacagtgggtaccaagctcctctgctccccactttgtagagcctagcatgaggtggcatgtactagaattggatcctaggtgcttagccctgcaatatcagggcctcactggtgggagctgcctcgggctgggttgcttggtcatagagccatagaaggaagctgtcagcccggagtgcctgccacctagacactgatgccattgtgtgctgcctcaagactgctggagtcaggacattttatagagccttttccagttttactaaaaaatttttccattg

SEQ ID NO: 117965 - DNA, 3175 bp, Homo sapiens
  Payload ID: 3075
  Gene Symbol: C10orf2
  Gene Name: chromosome 10 open reading frame 2
  Uniprot ID: Q96RR1
  ENST ID: ENST00000370228
  CDS Start-End: 186-1934
tgggcatatgtgtgaagcagcaacgtagaggggctgaagaggagaaattcatggagagaaagaatgcacctagagtgagctctgcagagtgctgcgtgggatatccctagagtttggtctagtgaaggcacgctaaccaggcacctaaggcatttcaagtagtgacttcccacatttggctaggaatgtgggtcctcctccgaagtgggtaccccctccgtatcttgttacccctgcgtggggagtggatgggtcggaggggcctgccccgaaacttggccccaggccctcctcgcagacgttacaggaaggagactctccaagccttggatatgccagtgttgcctgtaactgcaactgaaatccgccagtatttgcgggggcatgggatccccttccaggatggtcacagttgcctgcgggcactgagcccctttgcagagtcttcacagctcaaaggccagactggtgttaccacttccttcagcctcttcattgacaagaccacaggccactttctctgcatgaccagcctagcagaagggagctgggaagacttccaggccagcgtggaggggcgaggggatggggccagggaggggtttctgcttagcaaggcaccagaatttgaggacagcgaggaggtccggaggatctggaaccgagcaatacctctctgggagctgcctgatcaggaggaggttcagctggctgatacaatgtttggccttaccaaggttacagatgacacactcaagcgtttcagtgtgcgatatctgcgacctgctcgcagtcttgtcttcccttggttctcccctgggggctcaggattacgaggcctgaagctcctagaggctaaatgccagggggatggagtgagctacgaggaaaccactattccccgacccagcgcctaccacaatctgtttggattaccactgattagtcgtcgagatgctgaggtggtactgacgagtcgtgagcttgacagcctggccttgaaccagtccacggggctgcctacccttactctaccccgaggaacgacctgcttaccccctgccttactcccttacctggaacagttccggcggattgtattctggttgggggatgaccttcggtcctgggaagccgccaagttgtttgcacgaaaactgaaccccaaacgatgcttcttggtgcgaccaggagaccagcaaccccgtcccctggaggccctgaacggaggcttcaatctttctcgtattcttcgtaccgccctgcctgcctggcacaagtccatcgtatctttccggcagcttcgggaggaggtgctaggagaactgtcaaatgtggagcaagcagctggcctccgctggagccgctttccagacctcaatcgtatcttgaagggacatcgaaagggcgagctgacggtcttcacagggccaacaggcagtggaaagacgacattcatcagtgagtatgccctggatttgtgttcccagggggtgaacacactgtggggtagcttcgagatcagcaatgtgagactagcccgggtcatgctgacacagtttgccgaggggcggctggaagatcaactggacaaatatgatcactgggctgaccgctttgaggacctgcccctctatttcatgactttccatggacagcaaagcatcaggactgtaatagatacaatgcaacatgcagtctacgtctatgacatttgtcatgtgatcatcgacaacctgcagttcatgatgggtcacgagcagctgtccacagacaggatcgcagctcaagactacatcatcggggtctttcggaagtttgcaacagacaataactgccatgtgacactggtcattcacccccggaaagaggatgatgacaaggaactgcagacagcgtccatttttggctcagccaaagtgagtggcctttagcggagctcaagctttggaaaatagagtgggcaagccaggaagcagacaatgttctgatcctgcaggacaggaagctggtaaccgggccagggaaacggtatctgcaggtgtccaagaaccgctttgatggagatgtaggtgtcttcccgcttgagttcaacaagaactccctcaccttctccattccaccaaagaacaaggcccggctcaagaagatcaaggatgacactggaccagtggccaaaaagccctcttctggcaaaaagggggctacgacacagaactctgagatttgctcaggccaggcccccactcccgaccagccagacacctccaagcgttcaaagtgaaggccgtgcagagctggtcactgaaatgagcctgataggataggctggagcataaaactctgcaagggctcctctatcctgtggtcctgagctgtgtgcccttctcagtctgaggggcctaacctagagcaggtttccatagtgagaaaattcaatgtagcagactactgagaaactactgtgttgctcaggctttgtttgaggtcctgtatatacagcactgaaaagagagataaagtccctgcctgcatgcattctggcggaagagacaagcaagcaatgaacaaattagcagaaaacctagttttagtgaaaaatgctgtaaagaaaatagaaatgcgatagagtgctggcaggctagtgtagataagtggtctgaaaaggtgtctctgagccgagggcatgtgagctggggcctaaacaactagaaggagagagccacgtgaacatccggcgaaggggacccaggcagagagaaaaggaaatccaagccctgaggtaggaatgagcaggtcagattcaaggcagtgaggtcaggccgcatgaacctggaggggaatcggggacttcatgcgaaactccagcctaggctttcaaagtcaaagggtgatacagtgggtaccaagctcctctgctccccactttgtagagcctagcatgaggtggcatgtactagaattggatcctaggtgcttagccctgcaatatcagggcctcactggtgggagctgcctcgggctgggttgcttggtcatagagccatagaaggaagctgtcagcccggagtgcctgccacctagacactgatgccattgtgtgctgcctcaagactgctggagtcaggacattttatagagccttttccagttttactaaaaaatttttccattg

SEQ ID NO: 117966 - DNA, 1065 bp, Homo sapiens
  Payload ID: 3076
  Gene Symbol: C10orf35
  Gene Name: chromosome 10 open reading frame 35
  Uniprot ID: Q96D05
  ENST ID: ENST00000373279
  CDS Start-End: 160-525
aaccgcctggagccgccgggagtggacgccgccgaggcccggagtcgcgcctgcagacacagcatctactcagcgtgggtcacctctgtgaacatcactgactgcaagcctccctcaatttctggtgcagcccatcagggacccacagcgcctgggaggatggtgcggatcttggccaatggggaaatcgtgcaggatgacgacccccgagtgaggaccactacccagccaccaagaggtagcattcctcgacagagcttcttcaacaggggccatggtgctcccccagggggtcctggcccccgccagcagcaggcaggtgccaggctgggtgctgctcagtcccccttcaatgacctcaaccggcagctggtgaacatgggctttccgcagtggcatcttggcaaccatgctgtggagccggtgacctccatcctgctcctcttcctgctcatgatgcttggtgttcgtggcctcctcctggttggccttgtctacctggtgtcccacctgagtcagcggtgacctctgagggctgataggggtgggtttgttgagagggacttgctgggccttggtgtgagagcaggcatatttggaggggatctggtggtgccttgaaggtatgatcagagaggggaccacaggtgtgtgtttcccctttgtgttaagcgtgaggcagagggagacgttagtccagcatttccaaagtgtgggtgggtccgttggttcccaagatacttttaggtggtatggggcctgcattaagtggcacaaaatcagagcaagaaagcgatgcccttcccaattctctcaatccttttatgccgagaagatctcagctggatgccaacatgttccgatgcctgtggaagacatgccgacgtctcctctgcctagggagcaggacttgggcttagggcaggtggaaaaaattccagacttttttagcactgtttttgttttaatggtatatttttattggctactttattgtttaggacaagtggtagtggcattctatttattgtgaccttttcaataaatagatttaagtaaaaatga

SEQ ID NO: 117967 - DNA, 403 bp, Homo sapiens
  Payload ID: 3076
  Gene Symbol: C10orf35
  Gene Name: chromosome 10 open reading frame 35
  ENST ID: ENST00000421716
  CDS Start-End: 94-403
gccagggccagcgggcttcaggagggggacgcgcctgtcccgggctccaggctacgggcaagaccacagggctcctgacctttttcggcatacatgtcaccagtgctatctggaatacacagcatctactcagcgtgggtcacctctgtgaacatcactgactgcaagcctccctcaatttctggtgcagcccatcagggacccacagcgcctgggaggatggtgcggatcttggccaatggggaaatcgtgcaggatgacgacccccgagtgaggaccactacccagccaccaagaggtagcattcctcgacagagcttcttcaacaggggccatggtgctcccccagggggtcctggcccccgccagcagcaggcaggtgccaggctgggtgctgctcagt

SEQ ID NO: 117968 - DNA, 799 bp, Homo sapiens
  Payload ID: 3077
  Gene Symbol: C10orf53
  Gene Name: chromosome 10 open reading frame 53
  Uniprot ID: Q8N6V4
  ENST ID: ENST00000374111
  CDS Start-End: 13-294
ggaggcctggcgatgcccaagaacgcagtggtcatcctgcgctatgggccctacagcgcggcaggcctaccggtggagcaccacaccttccgcctgcagggcctgcaagctgtgttggccatagatggacatgaggtcatcctagagaagatagaagactggaatgtggtggaactcatggtgaatgaagaagtcatcttccactgcaacattaaggacttggagttcggaggcgatggtaaactagacccactgtgtgaaaaggccaggatagccgtgctgaatgcctactgatctcctcatggaacaggcatctcaagtcggcacaacagcagctgccccagccattctatgatgcaggcagaagtggctgtgccacggtgtggacactgggctctgctagtcagaacagggcaactcgggcctgacctccagcttacgcagcctcaggattgtcacctggctgcacaggagcccacagaaataataaaaaccacatcatttataacatgtctcaatctcaacccatagggagagccctccaatatcaggtacacattgagctgaaggaaacaataaaatgcaatcaaataacaaggtgccattcctgactaataacacatagttgccagaagcatctgagattccattgtttagtactcaaagtgctcagaacaggtgaaattaaagagaggttgggggaagagtgggaataaaggcttttgaaagtctgaaccaaaagcaaatgttaatatttggaaaccttgctattcctacagatttatttctgactcctgag

SEQ ID NO: 117969 - DNA, 2130 bp, Homo sapiens
  Payload ID: 3077
  Gene Symbol: C10orf53
  Gene Name: chromosome 10 open reading frame 53
  Uniprot ID: Q8N6V4
  ENST ID: ENST00000374112
  CDS Start-End: 13-486
ggaggcctggcgatgcccaagaacgcagtggtcatcctgcgctatgggccctacagcgcggcaggcctaccggtggagcaccacaccttccgcctgcagggcctgcaagctgtgttggccatagatggacatgaggtcatcctagagaagatagaagactggaatgtggtggaactcatggtgaatgaagaagtcatcttccactgcaacattaaggacttggagttcggcaagctcaccccaagtagtgacaagaggaccaccagcagctccaggctgacatttcaccagcttagcagcccgtgtaggatgaaagtttctcctttgcaacagttcccacaaaagacccaggacctgacttgtactgtattggcccagattggatcatgtatccatttccaaaccaatctttgtgacctgggttggccaggcctggatcacatgctcatttctggactagagaagaggggaactcagccctactgaaatcgacaggacagattgtgggaaaggggttcatttcacaaaaggaaaatggtgggtctgtttccagaataagggtgaatagatgctgagtcccccaaaacaaaaattgtcccacatctcccgaacctctccagctagatgtcccacaggcaacctgtggcaaacccaacgtgattctccccagctctgagtctctacaactgtattcccgtgttgaagttatgatcgatgaactacttactcaatttgggaacttggggacagcccccaccatcttctgaagtgaactgatctgcccttttctcaacaatgccagtgctttcgccctgctttgggatttggcatctcttccccaagctgtttaactggattcctatctcgttactctgtctccattatctcctcctgcaaaccactcgccacatggctgctaaaatcatctttcccaagcattgatctgcccgtttcttccctgtgcatttattttttggctttccattgtcatgttatatttggggacctctccacactgtgagtcttggtggaaacagagtcttgacatgagcaagtaacccatgctccaccaggggaatgcactggccctagacctcaactctagggcttgtggcaaaaggatggtaagagaaggaatgatgtgttctgtggctctggcagcggcagctacatccagcttctggggtcagccagggcaatcatgccagctacgacatccagcatctagcaaggttaatggggtaagctgccgtttctggcctcggcagcatgaccatgggctccttccaggcctggttttgtggtatgacacggcctgaacctctggcttcagagcctctccttgtgtccctgtattttatccagcctgcttctccagccttctaggccagtccttgagatcctggtttcctctcaaacaattccttttgagcccatctcagccagaaccagctctgttgctcacagctataaaccttgactgagacactcctgtgtggtttcaggagaaaatttaaactcttcagccaggcataagagaccctttacgatctgagcctcactcacctgttccctggcccactgcccaccccacagccctaagtgattagcaaagcaggcctttcacatttacaggcctctgccctcctggcatccccttctccacctggtaaatgctgcccaactcaagcagcaactcctaccataatctttccccttctcccttctctcccagcagaacggtgggctcccctctctggttccctgcagccttgctctgcataggctctgatgaatgcctggcaccctatatctgtgtgtgtgtgtgtgtgtgtgtgtgtctgtgtgtgtgtgtgtgtgtgtgtgtgtctgtgtgtgtgtgtctgtgtgtcttgggagggtcatagagctcctcaaagcagcagcatgtcacctcccccacgccccacgtctttgtgcctcctaccctagagcccaccatagcacttgtcccatagtgagccctcaacaaacacacagttaacaaaggatggcaatcaatgctccatcctgccagccctggacacaacacccaacagttgctcgagggccagtgtggcattcttacttaataaaacatgttggaaaatg

SEQ ID NO: 117970 - DNA, 2415 bp, Homo sapiens
  Payload ID: 3077
  Gene Symbol: C10orf53
  Gene Name: chromosome 10 open reading frame 53
  Uniprot ID: Q8N6V4
  ENST ID: ENST00000374113
  CDS Start-End: 48-329
agcagcgtgtgtttctcccttgcctctgcggcggcggaggcctggcgatgcccaagaacgcagtggtcatcctgcgctatgggccctacagcgcggcaggcctaccggtggagcaccacaccttccgcctgcagggcctgcaagctgtgttggccatagatggacatgaggtcatcctagagaagatagaagactggaatgtggtggaactcatggtgaatgaagaagtcatcttccactgcaacattaaggacttggagttcggtaagccctttggcgatgcttccagccagcaatttgcctcctctgaggagtccctcaatttctagttgaaatgatcagtgtatcatgcctggattcaaattgggtttctttctgagtttgaaacttgtactgaaagccctgtgctttcagtggcacacacaggagagtatccaaaaccacacagtaaagtgtgtgatgctacgagtttccccaaacattggaaacaggaaggaaaatgaagtgaagccctggacttcgagggatgtgatggaattaagggataataggtttttgtactttaataatatgtattctgttattatttgctttcgaagctgctttttttccacttgtttattctatctagacttgctaagacactgagttgatatgccagcagtgcatgacactatcagcaacattcaaatgagagcttctggcctggcaggctggcactgtgcgtgcctctctgtgctcagaagttaaagctttgcaatccactaacactctattaaaaactagttaacattttaccagcccatggcctttgaaaatgcactctgggtggaagccataggtatgtctgatatgataacaaattgtatataaagctaaccaaaagacaattatatctgtttccctaggaggcgatggtaaactagacccactgtgtgaaaaggccaggatagccgtgctgaatgcctactgatctcctcatggaacaggcatctcaagtcggcacaacagcagctgccccagccattctatgatgcaggcagaagtggctgtgccacggtgtggacactgggctctgctagtcagaacagggcaactcgggcctgacctccagcttacgcagcctcaggattgtcacctggctgcacaggagcccacagaaataataaaaaccacatcatttataacatgtctcaatctcaacccatagggagagccctccaatatcaggtacacattgagctgaaggaaacaataaaatgcaatcaaataacaaggtgccattcctgactaataacacatagttgccagaagcatctgagattccattgtttagtactcaaagtgctcagaacaggtgaaattaaagagaggttgggggaagagtgggaataaaggcttttgaaagtctgaaccaaaagcaaatgttaatatttggaaaccttgctattcctacagatttatttctgactcctgagggaataaatattttaaattgctattataaaattagccaaaatcaaatcttcaatttctctcatctaaaacaagaaaatgacctgccttcttttgcattaatatcgtctgaggagggcgcaaaagagtcctcagcagaatgtgagatggttccctggtccctctggagtagaacacagccccatagagttaaagagggttttcactatgttcagtgtgaaaatcagtcatgtcgaaatgatatttttactttccactcttacgcaccaatgtgtagtatatattcttaactatagagtaacagagagggggaaatgcagatattgatctaatgacgtcaaatgggaggtcatggtaagaaggcctcacacctacggggagaaaaccagattccctaacagaaaactctggacccggggcacctgtgctgaaggagcagggctttcaggatcgctcagagacctgcggcttcacctgctctgagagcagtcctaaccatcgccccaggcagcctcaaaccctcctgcaccccagaacttcaaagaccactggggaccatgaaactgcttgcacaagttccttctcacacaggacaaagtaggggatataatttttaaaaccccagcccaagcttcacttgtcagagttgattcagggattgtgaatcacttagaactctatggaactatttaagcatctccttactgagaaactgaggctcaaaagagattcttcctcccagtgtctggtgctggttttcacatatcttttgtaaccctacatttagtccctttttttcaaaacccagtttaagttactatagatgtagcattcaatctttgtttcaatataacattttactacaagagaaatccattctcattaaagaaaaatggaaaaatacaggtaaaaataaagtacaactttagtaacattttt

SEQ ID NO: 117971 - DNA, 2090 bp, Homo sapiens
  Payload ID: 3077
  Gene Symbol: C10orf53
  Gene Name: chromosome 10 open reading frame 53
  Uniprot ID: Q8N6V4
  ENST ID: ENST00000535836
  CDS Start-End: 13-486
ggaggcctggcgatgcccaagaacgcagtggtcatcctgcgctatgggccctacagcgcggcaggcctaccggtggagcaccacaccttccgcctgcagggcctgcaagctgtgttggccatagatggacatgaggtcatcctagagaagatagaagactggaatgtggtggaactcatggtgaatgaagaagtcatcttccactgcaacattaaggacttggagttcggcaagctcaccccaagtagtgacaagaggaccaccagcagctccaggctgacatttcaccagcttagcagcccgtgtaggatgaaagtttctcctttgcaacagttcccacaaaagacccaggacctgacttgtactgtattggcccagattggatcatgtatccatttccaaaccaatctttgtgacctgggttggccaggcctggatcacatgctcatttctggactagagaagaggggaactcagccctactgaaatcgacaggacagattgtgggaaaggggttcatttcacaaaaggaaaatggtgggtctgtttccagaataagggtgaatagatgctgagtcccccaaaacaaaaattgtcccacatctcccgaacctctccagctagatgtcccacaggcaacctgtggcaaacccaacgtgattctccccagctctgagtctctacaactgtattcccgtgttgaagttatgatcgatgaactacttactcaatttgggaacttggggacagcccccaccatcttctgaagtgaactgatctgcccttttctcaacaatgccagtgctttcgccctgctttgggatttggcatctcttccccaagctgtttaactggattcctatctcgttactctgtctccattatctcctcctgcaaaccactcgccacatggctgctaaaatcatctttcccaagcattgatctgcccgtttcttccctgtgcatttattttttggctttccattgtcatgttatatttggggacctctccacactgtgagtcttggtggaaacagagtcttgacatgagcaagtaacccatgctccaccaggggaatgcactggccctagacctcaactctagggcttgtggcaaaaggatggtaagagaaggaatgatgtgttctgtggctctggcagcggcagctacatccagcttctggggtcagccagggcaatcatgccagctacgacatccagcatctagcaaggttaatggggtaagctgccgtttctggcctcggcagcatgaccatgggctccttccaggcctggttttgtggtatgacacggcctgaacctctggcttcagagcctctccttgtgtccctgtattttatccagcctgcttctccagccttctaggccagtccttgagatcctggtttcctctcaaacaattccttttgagcccatctcagccagaaccagctctgttgctcacagctataaaccttgactgagacactcctgtgtggtttcaggagaaaatttaaactcttcagccaggcataagagaccctttacgatctgagcctcactcacctgttccctggcccactgcccaccccacagccctaagtgattagcaaagcaggcctttcacatttacaggcctctgccctcctggcatccccttctccacctggtaaatgctgcccaactcaagcagcaactcctaccataatctttccccttctcccttctctcccagcagaacggtgggctcccctctctggttccctgcagccttgctctgcataggctctgatgaatgcctggcaccctatatctgtgtgtgtgtgtgtgtgtgtgtgtgtgtctgtgtgtcttgggagggtcatagagctcctcaaagcagcagcatgtcacctcccccacgccccacgtctttgtgcctcctaccctagagcccaccatagcacttgtcccatagtgagccctcaacaaacacacagttaacaaaggatggcaatcaatgctccatcctgccagccctggacacaacacccaacagttgctcgagggccagtgtggcattcttacttaataaaacatgttggaaaatg

SEQ ID NO: 117972 - DNA, 4689 bp, Homo sapiens
  Payload ID: 3078
  Gene Symbol: C10orf54
  Gene Name: chromosome 10 open reading frame 54
  Uniprot ID: Q9H7M9
  ENST ID: ENST00000394957
  CDS Start-End: 60-995
ccggccgcgtcccgcccgctccccggcaccagaagttcctctgcgcgtccgacggcgacatgggcgtccccacggccctggaggccggcagctggcgctggggatccctgctcttcgctctcttcctggctgcgtccctaggtccggtggcagccttcaaggtcgccacgccgtattccctgtatgtctgtcccgaggggcagaacgtcaccctcacctgcaggctcttgggccctgtggacaaagggcacgatgtgaccttctacaagacgtggtaccgcagctcgaggggcgaggtgcagacctgctcagagcgccggcccatccgcaacctcacgttccaggaccttcacctgcaccatggaggccaccaggctgccaacaccagccacgacctggctcagcgccacgggctggagtcggcctccgaccaccatggcaacttctccatcaccatgcgcaacctgaccctgctggatagcggcctctactgctgcctggtggtggagatcaggcaccaccactcggagcacagggtccatggtgccatggagctgcaggtgcagacaggcaaagatgcaccatccaactgtgtggtgtacccatcctcctcccaggatagtgaaaacatcacggctgcagccctggctacgggtgcctgcatcgtaggaatcctctgcctccccctcatcctgctcctggtctacaagcaaaggcaggcagcctccaaccgccgtgcccaggagctggtgcggatggacagcaacattcaagggattgaaaaccccggctttgaagcctcaccacctgcccaggggatacccgaggccaaagtcaggcaccccctgtcctatgtggcccagcggcagccttctgagtctgggcggcatctgctttcggagcccagcacccccctgtctcctccaggccccggagacgtcttcttcccatccctggaccctgtccctgactctccaaactttgaggtcatctagcccagctgggggacagtgggctgttgtggctgggtctggggcaggtgcatttgagccagggctggctctgtgagtggcctccttggcctcggccctggttccctccctcctgctctgggctcagatactgtgacatcccagaagcccagcccctcaacccctctggatgctacatggggatgctggacggctcagcccctgttccaaggattttggggtgctgagattctcccctagagacctgaaattcaccagctacagatgccaaatgacttacatcttaagaagtctcagaacgtccagcccttcagcagctctcgttctgagacatgagccttgggatgtggcagcatcagtgggacaagatggacactgggccaccctcccaggcaccagacacagggcacggtggagagacttctcccccgtggccgccttggctcccccgttttgcccgaggctgctcttctgtcagacttcctctttgtaccacagtggctctggggccaggcctgcctgcccactggccatcgccaccttccccagctgcctcctaccagcagtttctctgaagatctgtcaacaggttaagtcaatctggggcttccactgcctgcattccagtccccagagcttggtggtcccgaaacgggaagtacatattggggcatggtggcctccgtgagcaaatggtgtcttgggcaatctgaggccaggacagatgttgccccacccactggagatggtgctgagggaggtgggtggggccttctgggaaggtgagtggagaggggcacctgccccccgccctccccatcccctactcccactgctcagcgcgggccattgcaagggtgccacacaatgtcttgtccaccctgggacacttctgagtatgaagcgggatgctattaaaaactacatggggaaacaggtgcaaaccctggagatggattgtaagagccagtttaaatctgcactctgctgctcctcccccacccccaccttccactccatacaatctgggcctggtggagtcttcgcttcagagccattcggccaggtgcgggtgatgttcccatctcctgcttgtgggcatgccctggctttgtttttatacacataggcaaggtgagtcctctgtggaattgtgattgaaggattttaaagcaggggaggagagtagggggcatctctgtacactctgggggtaaaacagggaaggcagtgcctgagcatggggacaggtgaggtggggctgggcagaccccctgtagcgtttagcaggatgggggccccaggtactgtggagagcatagtccagcctgggcatttgtctcctagcagcctacactggctctgctgagctgggcctgggtgctgaaagccaggatttggggctaggcgggaagatgttcgcccaattgcttggggggttggggggatggaaaaggggagcacctctaggctgcctggcagcagtgagccctgggcctgtggctacagccagggaaccccacctggacacatggccctgcttctaagccccccagttaggcccaaaggaatggtccactgagggcctcctgctctgcctgggctgggccaggggctttgaggagagggtaaacataggcccggagatggggctgacacctcgagtggccagaatatgcccaaaccccggcttctcccttgtccctaggcagaggggggtcccttcttttgttccctctggtcaccacaatgcttgatgccagctgccataggaagagggtgctggctggccatggtggcacacacctgtcctcccagcactttgcagggctgaggtggaaggaccgcttaagcccaggtgttcaaggctgctgtgagctgtgttcgagccactacactccagcctggggacggagcaaaactttgcctcaaaacaaattttaaaaagaaagaaagaaggaaagagggtatgtttttcacaattcatgggggcctgcatggcaggagtggggacaggacacctgctgttcctggagtcgaaggacaagcccacagcccagattccggttctcccaactcaggaagagcatgccctgccctctggggaggctggcctggccccagccctcagctgctgaccttgaggcagagacaacttctaagaatttggctgccagaccccaggcctggctgctgctgtgtggagagggaggcggcccgcagcagaacagccaccgcacttcctcctcagcttcctctggtgcggccctgccctctcttctctggacccttttacaactgaacgcatctgggcttcgtggtttcctgttttcagcgaaatttactctgagctcccagttccatcttcatccatggccacaggccctgcctacaacgcactagggacgtccctccctgctgctgctggggaggggcaggctgctggagccgccctctgagttgcccgggatggtagtgcctctgatgccagccctggtggctgtgggctggggtgcatgggagagctgggtgcgagaacatggcgcctccagggggcgggaggagcactaggggctggggcaggaggctcctggagcgctggattcgtggcacagtctgaggccctgagagggaaatccatgcttttaagaactaattcattgttaggagatcaatcaggaattaggggccatcttacctatctcctgacattcacagtttaatagagacttcctgcctttattccctcccagggagaggctgaaggaatggaattgaaagcaccatttggagggttttgctgacacagcggggactgctcagcactccctaaaaacacaccatggaggccactggtgactgctggtgggcaggctggccctgcctgggggagtccgtggcgatgggcgctggggtggaggtgcaggagccccaggacctgcttttcaaaagacttctgcctgaccagagctcccactacatgcagtggcccagggcagaggggctgatacatggcctttttcagggggtgctcctcgcggggtggacttgggagtgtgcagtgggacagggggctgcaggggtcctgccaccaccgagcaccaacttggcccctggggtcctgcctcatgaatgaggccttccccagggctggcctgactgtgctgggggctgggttaacgttttctcagggaaccacaatgcacgaaagaggaactggggttgctaaccaggatgctgggaacaaaggcctcttgaagcccagccacagcccagctgagcatgaggcccagcccatagacggcacaggccacctggcccattccctgggcattccctgctttgcattgctgcttctcttcaccccatggaggctatgtcaccctaactatcctggaatgtgttgagagggattctgaatgatcaatatagcttggtgagacagtgccgagatagatagccatgtctgccttgggcacgggagagggaagtggcagcatgcatgctgtttcttggccttttctgttagaatacttggtgctttccaacacactttcacatgtgttgtaacttgtttgatccacccccttccctgaaaatcctgggaggttttattgctgccatttaacacagagggcaatagaggttctgaaaggtctgtgtcttgtcaaaacaagtaaacggtggaactacgact

SEQ ID NO: 117973 - DNA, 758 bp, Homo sapiens
  Payload ID: 3078
  Gene Symbol: C10orf54
  Gene Name: chromosome 10 open reading frame 54
  ENST ID: ENST00000470317
  CDS Start-End: 1-421
gctacctctgccagcgcctgatcaccttcccaggataagcctggctctggatgacatcacggctgcagccctggctacgggtgcctgcatcgtaggaatcctctgcctccccctcatcctgctcctggtctacaagcaaaggcaggcagcctccaaccgccgtgcccaggagctggtgcggatggacagcaacattcaagggattgaaaaccccggctttgaagcctcaccacctgcccaggggatacccgaggccaaagtcaggcaccccctgtcctatgtggcccagcggcagccttctgagtctgggcggcatctgctttcggagcccagcacccccctgtctcctccaggccccggagacgtcttcttcccatccctggaccctgtccctgactctccaaactttgaggtcatctagcccagctgggggacagtgggctgttgtggctgggtctggggcaggtgcatttgagccagggctggctctgtgagtggcctccttggcctcggccctggttccctccctcctgctctgggctcagatactgtgacatcccagaagcccagcccctcaacccctctggatgctacatggggatgctggacggctcagcccctgttccaaggattttggggtgctgagattctcccctagagacctgaaattcaccagctacagatgccaaatgacttacatcttaagaagtctcagaacgtccagcccttcagcagctctcgttctgagacatgagcct

SEQ ID NO: 117974 - DNA, 2360 bp, Homo sapiens
  Payload ID: 3079
  Gene Symbol: C10orf55
  Gene Name: chromosome 10 open reading frame 55
  Uniprot ID: Q5SWW7
  ENST ID: ENST00000412307
  CDS Start-End: 198-653
gctgatggagatgactctactgcaaaaatgacaaccagcaagaaagcgggtggtgcccgtttcctccctggggaccctcagagggccaggccattctcttccttggtgtgactgcggatccagggcccagctgaagagcatcagatctgtgggcatgttgcaccagtgaatgttggagaagtacttgttggacacacatgttcctccatttagacagtcacagttcgctggagagaacaaagccaactgttgtaggggtggatactcacatggaacttgatgaagttcattgctgccctggaagagattcgggaggaggcttcatcaaaggtcccatgctccagggactccagggtgagggtaaactggccccaatcccaaaacccactcttccctctccctctcgcctcaccctgttcgtatctagttctcaaatggaagaccatgggtttccagccaggagaaatggattgacccaagcaagcttcatctaccagatgcccgcaggctggggcagtcccggcggcctcttcctcccttgccagccagtgccaacccccgtggttctcaagcctccgctgccaccctgtcccatttcctggggagagtctggccctgctgtggatggaatccggaggaccccagctccctgagcagcccctcctctcccctggtgctgatcagaggtccttgggcagcatcagtcaaagcaagagcgcactcactttggagtcgctcacgaccaggacgcagagaagcaggcgcgccagcagggctctcatggtggcgaggtcggggcgctagacggcggctctgcaaaggaaggagaagtcagggcaagaggcggaggaacgggaaggcaggccaggcgggcgactgcagcgcaggggagatgcccgcggtgaccaggctccccagctgtctctctcctctctgggctccggactccgggcagcctggatcggcacccgcgggggacgcccgggacggggcgccttgactccgtgcagccgccggggagcccagggagcccgggcagcccagggcgggggaggcagacgctcgggagctggggccgccgcgcatccggcccggggatctcaggaccgcggcactcaccggtggctgcggcaggagggcgcgagccggcgctgcggggacaggtggaccctggcccgggctccggggctgcggtctccgcactgtgctgcgacccgcggcgcctgctctatatcagggcccgccccggcgccgcccctccctctcccgcccggctccctcccctgtcttgcagcgctcagcgacccggaccccgcgtgcttccgcaacgctcacaaagatttgggggaagcgcgatctccagcggaggggacccaacagcgtctggactgaggaatcgagaggcttgtaaattctccgtgcttcctcccatgcacctggccgggggcctgccccagtgcaaggagtccccgaattgcagagaggagagaaggcgcacaggagactctctacctcgcccagctctgaagcctcctggggtcctctaatcagttcttctgcaacttctccccgctgggccccaacttgcctaagactgcctcagacccccttgcccgcagctgatggagctgtgaagtcttcatcaacgcgacaaatgtacgagacatactctcccagaagcacagacagaaaaacccctgcctgtaggggctccctctgtgcgtctgttcagtggcagtccccagatatcaccaacacaaccagtggatggaacaaagccgggcttattgctttcggcagtaagggggtttgtttgatggtgctatcagagggggaaaggcaaggccagattactgaaaatttgcagcttggtttaaagtccgtttttgacagggcttgataaggattgggttaggtgtcgtgatatgatgttacaggattgtgggaacaaagtcctagggcataaactgttggtgcttcctattgaagtgttaacgggtcttttgggaagtttccataatgagcaattcatttatttgtgcaggcaagaataaaagtaaagacaatggaaacatgtagacagttctaactgtggaggttctggagggtgtggaagttctgttctcacctctgagtagaggaattgggagactggaggacaaaataagaggaagatttatttttcactgtttgtccttttacactcttaacattttaaaaagcacatctctgtatagcccattccaaaaagataattatgcattttttaatgcatgtgtatttagtgttttacttcatcatagagccttgtttattctattcagatagaaacaattgtttatcaaataaaattgtcctcc

SEQ ID NO: 117975 - DNA, 1208 bp, Homo sapiens
  Payload ID: 3080
  Gene Symbol: C10orf62
  Gene Name: chromosome 10 open reading frame 62
  Uniprot ID: Q5T681
  ENST ID: ENST00000370640
  CDS Start-End: 172-843
ccttggggagcctgccctttcaagcatgaatcataccaccagagatcacccagcgtgctcttagctctgcctgcctggtgtagggtcctggagaccttcttggagctcatccagcagccatcatgcaaggtggtgctggggactgccctcttgctaggaggtggaggtctcatgctgtgggttcagagaaagaggagaagaaaggaaacctctgagtgtccatcagacaaggacaagtcaccagaatcccataaagcaaagaatgaaagctggattaaatcccactttagccgcctttccgaagagaagctggccctcgacaacaatgccagcgctagtggcaatgctacccagactgagagtgggagtgaagaggtcagctccacggttcacatagagaccttcaccacgaggcacggagaagtgggctccgctctgcaccgggaatccttcaccagcaggcagaagacatctgggccctcagtgatccaagagatccaccaggagtctggaaaagccccatccactgatgaggccacgtgggccgctgtggctgcctgcaccaaggagattgacacccaggggcggcacctggctcactccatgctgcagcgggccatagcttaccagcactcaggtcacctagagtccaaggacatcaaccaggaggagctgagggccctcgaggaggtagagatgaagctgcaaaagaatttcctcacccagcgggaaaacaccatagctggtgccaatcacacacacaccttctatggccacagtcaccacagtcaccatggccacccaagccaccagagccacagcctgcctaatcgcagacactagatctgtgacttcttggaagccacctaaccatggatggagacgcccctgcccccagcaaggctggctcacacacacgtctgttttctctcctatggggccatctatgcaggccagggtgagatgctgtgcccaaatccctactttcttaggctcctcacggggattatgggctctttaaactccatgagtggggtctgccacagaagatggcccctgttggagggagagctgggaggacacagcgcaggtgagatagaccctgaggcccctgaagacccaccaagagaagacagatgggagcaggcaagagccccacactgatgtcattgcctggaacggagccaataaagctttgtgtgccttca

SEQ ID NO: 117976 - DNA, 2799 bp, Homo sapiens
  Payload ID: 3081
  Gene Symbol: C10orf67
  Gene Name: chromosome 10 open reading frame 67
  Uniprot ID: Q8IYJ2
  ENST ID: ENST00000323327
  CDS Start-End: 69-626
attttgtccaggaacgcctacgtttgtggcaggtggagacagcttattaggcagcctgctctcctcttatgatggccttggtccgggatcgcagggctcattatgtcatgagcatagttattagatgggttcactgcttttcctcctccttgagggggacctttggcacacgctgggaggccatgaaagccaaggccaccgagctgcgggtctgctgcgcgcgtaggaagcgagaagctcgggaattcaagcccccgcaaatgcgcgggtccacgagacttaacatttcagatgatttaaagattggctttttcagcacagaccatgccactcaaactgattccagtgaaatactgtcagtaaaagaattgagttcatctacgcaaaagttagcacagatgatgaaatccctccaggtagattttgggttcctcaaacaattgcttcagttgaagtttgaggaccgactgaaagaggaatctttgagtctcttcaccattctgcatgacaggatcctagaaattgaaaagcattatcaacagaatgaggataagatgagaaaatccttcaatcagcagttagctgatgccatagctgttatcaaaggaatgtaccagccactgtgaaaccaaacattgagatactctggatgtgctgaaggtagcaaggtggaaagataagaagcagaggggtccttggtaatgtcatggagccatgaaagtaaccctggacttgccctgcctctggcctcttattcatgagataacaacccctcagtgtctaagccactgttagttggcttttcagttacttgcagctgaaaacatcccaggacagattgctctgctaacgatctctgtgactctgtgccaaactgtgtttccaaaggcatctgtgacactgtctcccacttacctgctcttgtgcaatgtttctctcccatcaagaggtggaatctgattcccctcccttgaatcagggctgcccttagtgacttgctgataaacacagaatgtggaggaagtgaagctgcgtgacttttaagttaacgtcaaaagaagtcttgcaagttcatccttattcactctgaatgtttcccctctacattgtccctccctgaattgagctaccatgctgacaaaagcccatgccatatggaagatctacatgtaggtactactgggtctccaggctcatctgagcccagcctttgagtcaccccagcccaggagtcaaaaatatgagtggagaagcgtccagatgactccagctgccagccatgtagactctttttatgtgaggtcacaggtcttacagaggagagataggccatccctgctgtgcttctactaattcccgactcattgaatttgttttttttttttctttgttttgctttttatttttgggtctttttttttttttttttttttttagagacagggatctcactgtctcccaggctggaatgtagggtgtgctcatagctcactgtagccttaaacttctggactcaagtgatcctctggcctcagcctcctgagtagctgggactacaggcatgtaccagcacacccagttaatttaaatatatatatatatatgacatgggatcttgctatgttatccaggctggtcttgaactcctgtcctcaagtaatcctcctgccttagcattccagagtgctaagattacaaccatgagccactgtgctggcctaattaatatttaatggaagaagacggaaggaagaaagagaaagagggaaggagggaaaatgagcattatctgtagcagttttatatatattgattttgtaaccaaaaatcttgctaaattcttgtgtttattttaataagttttctatagactctttggggctttctatgtaaacagttatgcaactgagaataaatattttttgtcacttcatttttcatccataaaccatgtaatcatttcagcagtggcctgtctggagcagctgctgcaaagatgccggctgcagcaggggagatatggccagggctgtacactctactaagctggcaggagccaggaacaagcaggagtggtgctcaccttctgagttggtgatgggggagctccacgctcctagaggcagctgcagctgcccagccatggctgcagacccaggcatccctgtgctcttgggggcctaggaagcccccctgctcccacaggctcggaagtgcctactcctgctgcctggcctctcctcactcctggcacccactctgattttgaagcaaagttgtggccaagcccaggcgctgttatgacccagccaggtgtgtgtgtgcttgggatggtgctgacacaccagccctctgctgccttggccccctccagagtttgggtgccaacaagcatgggagggaggccaagggggcactgagggtggcacagcacaggcctgcaggtgtcccttggcatgaacagcctgggcaccatgaacagcagcaggaagcgacaggctcccgagtggaaagggatgtgtcgctggtgaagctccaccttcaacccaggggtggcctgaagcctgggggccaggctgccagttccacagactggagtgagaacttatggtgcttttttcaggcccacctatggctgcccattgaccaatcagcatgagcttcctcccctctgaagcccataaaaaccctagactcagccagactctggcagaagtggggatgacctgcctgcagagaggagttattcgctgtggggtcttctctcagctaagagctgaacagatatcaggatgacct

SEQ ID NO: 117977 - DNA, 888 bp, Homo sapiens
  Payload ID: 3081
  Gene Symbol: C10orf67
  Gene Name: chromosome 10 open reading frame 67
  ENST ID: ENST00000376500
  CDS Start-End: 1-888
ggccggaagatcatggagggcctcgaggcctctattgaacaattccagttcaaccccagacttaacatttcagatgatttaaagattggctttttcagcacagaccatgccactcaaactgattccagtgaaatactgtcagtaaaagaattgagttcatctacgcaaaagttagcacagatgatgaaatccctccaggtagattttgggttcctcaaacaattgcttcagttgaagtttgaggaccgactgaaagaggaatctttgagtctcttcaccattctgcatgacaggatcctagaaattgaaaagcattatcaacagaatgaggataagatgagaaaatccttcaatcagcagttagctgatgccatagctgttatcaaaggaatgtaccagcaattctttgaggtagaagaagagaatgtttctttgcaagatgcgagtactgtcaaaacaaatattttgttaagaaaactgaaagagaaagaagaagttattaaagaattaaaagaagaactagaccaatataaagattttggatttcacaaaatggaatcttttgccaaagaaaccagctctccaaaatcaaacctagaaaaggaaaatttggagtacaaagtggaaaatgagaggctgcttcagatcatttcagagcttgaagaagaaatccagatcaatctaaaagaaaattcaggattagaagatgaacttataagtatgaaagagatggcagaaaaggatcacaaaactattcaaaagttaatggatagtagagacagattaagagaagagcttcattatgaaaaatcattagttcaggatgtgattaataaacagaaagaggacaaggaaatgagaaaaaagtatggcagcttaagtgtaaag

SEQ ID NO: 117978 - DNA, 5230 bp, Homo sapiens
  Payload ID: 3082
  Gene Symbol: C10orf71
  Gene Name: chromosome 10 open reading frame 71
  Uniprot ID: Q711Q0
  ENST ID: ENST00000374144
  CDS Start-End: 289-4596
aagaacaccatttggtttcccccggctgggtctctatttagatgggcagtgatgacaccaaatataagcataaaaagacgttttaaaactacagatcctgaaacccagcacggcaggcacctgcagcttccagtgctgtaacagagaaaaaaaaaaatccccactttgcaattgcatctggtcaatgagaggctctagttttggggaagagggaaacacctaaccttgacagaatcatcaccagagacacctgccggctgacaaggacagctttcttggagccaacagatgatgcaaggaaataagaagtgcacagacgcgttcagcgactcctccagcatcggcagcgtgttggatgatgcagacagggaggtgagcagcctaacagaccgggcattccggagtttgtgcatctccgaggacacatccttccatgactcctatctggctgtgtccccggatatcacccgacaggtgtttgggacttttcaccagagaacagtgggccacacccagaggaaaagtggcatttggagccagttaccgtcacagggcacggaacattcgggctgggcggccaccttccaacagctacccaagtacgttcagggagaggaaaagtaccccaaaaccagccccccaccaacgccagtccagaggagactggaggtgccagtttccggcctaaggagcagcaataagcctgtctccaaagtatcaacactaattaaatctttcgacaggaccgagagccaacgttgtgagagcaggcccactgccagcaagcctccggctctgaaaaatcctcccaaattcgctcctcttccagaaaacagtgtcaacttctgcttcgattctgcctttctgacagtcaggagggtgcccgctgaagtttccaacacccatcagaacagctaccagccaggcaggaagcacggagaacaggagtcctccaagaatccagaaatggcctgtcacggctccagcagcttcctcccagcagccaatgacacggccaccttatgtgagtcaaagttcccctctccacaccacaagccagtcacgggtgagcctgggagaggcaaaggtacctttctgcacagtgaaaatagtgcttttgagtcatggaatgcccaccaaccaaagctgctggagagaaaggacacagctggaaccgtcccagaaagcaaagctcccaagcactatggggacacgaccttgctaagagaaccctgtcctcctgagcgcacagtctctccctgccaggtccaggccagctgcagtcaggaagagaacagacttgcagcaggggctctgtccacatctataccctgggggtgcagggatccaggagcccaggtatttgctgtggaaggaaaagctcccagctcacaacctgattctcaagagaagccagcccagcccccatggaggaagccaaagactggcaaaaaagggaaagaaagtctacaagatactttagaagaaaagacacagaccaaccagagaggcccacctttgtatacaaaacacaacccccaggaacagttttcagaaaacaatgctcttgacctgcctgtggaacccaatgaacattatgatcccccctttaacatcagtaagctcctgacccccatcatacccagcaagcacgccctggattcagcagacagccagccagcagagcgaaccccatcacccccaggacagctaaacggataccaagagaaggagcccagtgaatgtcagtctcgagacagctacaagtccaaagcccctagcctgctgttcaacctcaaggacgtgcggaagcgtgttaagagcacatacagttcctcacctctcttgaaagtgcttgatgagaaaactagaggtaaggttgatggaaagcaagaacctgtgagcaacggtgtcatcctccccaatgggcttgaggaaagccctccaaatgagctttctaaggagagacccgctgatgaccccactgcatcacacatcaatccccagaaggaccctacagctgaccccagtgagccctctgcagacagctatctaactcttagcacagctccgactatcgccaaagcccccttctatgtcaatggggaggctgctgagagaagcagttatgagaacaaggaggtggaaggagagttggagatgggtcctgccggatccagctggtgtccagactccagggaacaccgccccaggaaacacctctccctgaggctttgcaatagggatcctgagcctggaggggctacagagaaaatgaagacccaccagctagagaatgggctctccagatctgtgtcccaagagacagaacctgagagggaagcaggacttcagaacacacatttgaaccagaaattcttcccagggcccctctctcctgaggaggaagatgtgttttacagtgacagccaatccgattttatgccaagcctcaaaggtaaggccaaattcagcaccagctcttcagatcaatcctttgcctcatttgatgatcagcagaagatgtggtttactgagaaccagcgggaagacaggaggaaggatgtgagtgcaggtgacagtcagaaggatgagaaggagaatgtgatgcggaaggatgagctgcagtactgtgccttaagcaatgggcacgcatgcctggaaaaccgcagccagggggaagcattgcaaagagaaagggaaagtgtgtctggaggaagaaccaggaaggcatcagcagaggaagctaatttcagaggctcttggattggggaaaataagggcacaaccttttcacaggccaaagaccttactccctcaccatcttctgcttcaaacaggcacatgctgtttacgattaaagacaacaccctcagagctacccccgtaattaaacctatcatgctgcctctcctgaggaccatgtccttggaggactccctcagcagtggccacaaagaggaggaattgccaaggccagaatggggtgaggatcctgggttttgtgcccccgaaaaccaggacattcttggtacatcgacacccactaacacacggggcacacgtgtgaagtgcatggccaacgaggtcatggaggaccctgggcaggggtcgagcatggccaggatggaggcctctcagccagccccaaaggggaatttcccatctatgcctctggtgggagagggggaccgggtgaaggcaccaccagatgctgcacctggcctcgtggcaagcaattgcaagagcggttctgcagactcagggaagctggcagccccatggcacatccccaccattgctttacccgagggtgacatagaagaccagccacccccatggcagcccgaaaactgttgggaagagcaaacaccaggtttcaagagtcactttttgtccacacccagagcagggccccctggcagaagactggtccccagtgagagggcgaattcccccaaccccggctcccccggggagagcagtgcctgctcccctgctgccagcaacatttgggaggagtcttcccaggcccctggaggaccagagctgcttcccgaggagcctaatcaagccagcccctgggccagctccagtcctgccagggtcacccggagggaggacctgacccacgccctcgtgtgggagggcggctctgaccccctacttgagctgtcggcagaagacctccggaccctctctccaagaggttcattgctggatgtggccaccagcccagcaggcacctctgggagacttgagcttcctgcacagctagagaggacagcaagcaagccacctgcagtcccacccaaaacagagaaagccctgcggcgggcaaagaagctggcaagtaagaggaggaagacggatcaggctcaggagaagcatggcgagtcacaggagggaaagccctgcccggaggacttggagcagacacagcaaaggccgctgtgccccagagagaggccccgacacaatttccccgtggtccgttccctgccccctcccgtgcaccgccactccgtgtccggcttctcggagcctgtcgggaggcggcccgggggcccccagtccctcacacccctgcccgcgtaccccgccacccagaaggtcctccaggatccgcagtccggggagtactttgtcttcgacttgccactccaggtgaaaatcaagaccttctatgacccagagacgggcaagtatgtcaaggtctccatcccgtcctccgagggggcctccccagagccgcccccaccggacgccctggccgctccctatgtgctgtaccccggcttccagccagtgcccgtgacggccttgatgccgctgcgctgctcctctcagctctccgcgcccaccttcctcaggcagggccctcgtgcctccgcggcccgcgccaggacccagagtgtccacgagtctggactacagctggacccagggcctcacggtgactgcaccccgcactctgcaggccagcgccctcatggtcctccccagagcccaggagaggagggtgtagaagctccaggcctgggcatcatctccactgatgacctagaggactttgccacagaaggcatttcttgagttactgcaggctgtcccccacccccagatgaacccagaggagcttacttccccctcccccaaaacaagcaacacacacacacacacacacacacacacacacacacacgatcatcaacacatacttagcctttttagatccataaagtccagaaggcagtagggatcccaagacgacctcacccaaagggctccctggctctcctctgatggaggggcactgcttgcttggcccggtcccctccgtgccagttcccaggcgcactctactccagcccttctccctccctcccttcctccctctcctggcccaccctgctcttccctcgccctgcaaattaggtgggtgtggcaagggcaccgcctggtcccaagtgtccctctgtacccacacccacccactcacttgtaagctccttgatgagcaaacccctaaggcccccagctcagactcagcaggcattcaggtcaactcaggcagactggctaaggaccagcccagggcaattttgcagaaatgatcatttgcacagaatgggtttccttcacagggagaaacttgcctctgaaagctattttctgatcaagaaaaggcccactttttaaaaagtgaaacaagtttgcagatacggtt

SEQ ID NO: 117979 - DNA, 724 bp, Homo sapiens
  Payload ID: 3083
  Gene Symbol: C10orf76
  Gene Name: chromosome 10 open reading frame 76
  ENST ID: ENST00000311122
  CDS Start-End: 121-717
gggaggtcgggagcgcgcccgtgagcccggagcagcggcagcgtcggtggcgtcgagagcgagcgggcccgggaacggcgcgggtggtagaggaggagccgcgggctcgattctctaaccatggcacaggtagagaaacgtggaggtttgctccggaaatcttcagcctccaaaaaaccactgaaggaaaaagtggtgctgatgtatgatgagatcttcatgacagaggaccccagtaagtgcagtcctcggttttgggaggagctctttctcatgaaggtgaatttagagtacctagaaggcaagctggaatctcttgatggtgaggagttaatgaagatcaaggacaatattaattgcttattccaacactgcatccaggctctgggagaggagcatccaattcgggttgtcaatgcattgcagaccctgtgcgcactcattcgaggagtccatcaaaagaataagtctacctctgggtttgacattatcaacatgctgatgggctttgacaaggcggagctgtgcatgaaggtgaggcataagctgcagatgtgcctgtggatggcagcttctgacagctgttcctggacactatcagcagacaaatgtactcaaagatttggactcagaaagatacagatgattgaatttggccttgcatttagatgtttttatttcacagatttgctttatctgaataaaggaaaattttaaattcaaa

SEQ ID NO: 117980 - DNA, 4119 bp, Homo sapiens
  Payload ID: 3083
  Gene Symbol: C10orf76
  Gene Name: chromosome 10 open reading frame 76
  Uniprot ID: Q5T2E6
  ENST ID: ENST00000370033
  CDS Start-End: 121-2190
gggaggtcgggagcgcgcccgtgagcccggagcagcggcagcgtcggtggcgtcgagagcgagcgggcccgggaacggcgcgggtggtagaggaggagccgcgggctcgattctctaaccatggcacaggtagagaaacgtggaggtttgctccggaaatcttcagcctccaaaaaaccactgaaggaaaaagtggtgctgatgtatgatgagatcttcatgacagaggaccccagtaagtgcagtcctcggttttgggaggagctctttctcatgaaggtgaatttagagtacctagaaggcaagctggaatctcttgatggtgaggagttaatgaagatcaaggacaatattaattgcttattccaacactgcatccaggctctgggagaggagcatccaattcgggttgtcaatgcattgcagaccctgtgcgcactcattcgaggagtccatcaaaagaataagtctacctctgggtttgacattatcaacatgctgatgggctttgacaaggcggagctgtgcatgaagaacttgatggagagtttggattcattgctttgtgcagaaggttctgaaagtctgaagagtttatgtctgaaacttctcctttgcttagtgaccgtgacagataacatcagccagaacactattctcgagtatgtaatgatcaacagcatatttgaagcaattttacagatactttcccatcccccaagtcgtagggagcatgggtatgatgctgtcgtcctcttggctttgctggtgaactatagaaaatatgagtctgtgaatccttatattgtgaagctgtctatcgtggatgatgaggccacactcaatggaatgggacttgtaattgctcaggctttatctgagtacaacaggcagtataaagacaaggaagaagaacaccaaagtggttttttctctgctttaacaaatatggtgggcagcatgttcatagcagatgcccatgagaaaatctcagtacaaaccaatgaggccattcttctggcactttatgaagctgttcatttaaatcgcaacttcatcacagtattagctcagagccatccagaaatgggcttggtgacgacccctgtcagtcctgctcctacaaccccagtcacaccacttgggaccacaccgccttcctctgatgttataagttctgtggaactcccactggatgcagatgtacagaccagtaatctactgataacctttttaaagtatagctcaattgtcatgcaggacaccaaagatgaacacaggcttcacagtggcaaactctgtctgattatccttacatgtattgcagaggatcaatatgccaatgcatttttgcatgatgacaacatgaattttcgagtaaacttacatagaatgcctatgagacacaggaagaaggcagcagacaagaatcttccctgccgtcctttagtatgtgcagtactggacctgatggtagagtttattgtaacacacatgatgaaggagtttcctatggatctctatatacgctgcatccaggtagtacacaaactgctctgctaccagaagaagtgtcgggtacgcctgcattacacctggcgggagctctggtcagccttgataaatttgctgaagttccttatgtcaaatgagactgtacttttggccaaacacaacatttttacattagcccttatgattgtgaacctatttaatatgtttatcacatatggcgacacatttctgccaacccccagcagctatgatgaactttactatgagattatccgcatgcaccagagctttgacaacctctactccatggtcctgaggctttctaccaatgcaggccagtggaaggaagcagctagcaaggtgacccatgcattggttaatatcagagccatcatcaaccactttaaccccaaaattgagtcctacgctgctgtgaatcacatatcccaactgtcagaggagcaggtgctggaggtggtgagagccaactatgacacgctcacgctgaagctgcaggatggcctggaccagtatgagcgctactcagagcagcacaaggaagctgccttcttcaaagagctggttcgatccattagcaccaacgtccggagaaacctggccttccacacactcagccaagaagtcctgctcaaggagttctccactatctcctgaggccacgcctacctgagcagcctctgactgcccttacccatgaggatcatgggctggagggggagcgaggggagagggggctgcccccgaggttggagagaaacacagataccaagttctcttggtgaagaccgcacttcaatggagcttgggcagcaggggcaggagggtcaagccagggataatcttatttggggaggaatgggtgggcacagtggggagaggcctccaggaatgtggggacttccagagtgggctccctaaacagcccctcacatttccaatcttgaggttacaagctgtagctactgactaattttcgggagctggtgaggcaagcctcagggtaatgccagcaccctgaaagtcagtggctctgctcggcttctgaaaacagatcaactctcagatatagctggagctacatcctgcttcctttgggcctggggctgtgcttggcttgaaatctgtgtcccctgcctgcactggcactttgtccagtcatcgggacctttggctcagatttagggtaagataggaatagggtacctttttccttttttttctgagacggagtctcactctgtcgcccaggctggaatgcagtggcgtgatctcggctttactgcagcctccgcttcctgggttcaagcgattctcctgcctcagcctcccgagtagctgggactacaggagcgtgtgccacgcccggctaattttttgtatttttagtagagatggggtttcaccatgttacccaggatggtctcaatatcctgagttcatgatccacccaccttggcctcccaaagtgctgggattacaggcgtgagccaccacacccagccagttttcctattttctgaattcagaattgacttctctgggaaaactggagatgagaatctgcccagtgctctgctgtccagtcaccgccttttgaattttagttttggcaccaggagtaccgttagctttccccttcttctggcccatttgactcatcagcacaatagggtcaccaccttaacttttaatttctaatctgctttactgtctttagggtgtgtatgaaataaacattgacaggctttctggagccctcaaggtgcctactttgctggttccctttccagcagctcccccacctcccttagccccccctcctctggcagcctctcctgcctctgctgagctcccctccacgtgttccacccccttaccctgctgttgtttacatccaacctgcctgagaatttcctctggggaggaatctattcctgtcatggtctagtgcctgggagggagagaactttctgggggtagggtgccctccatctgaaacaggccaggtgagcatcatgcataaggcctccattctgtccgctcagattctgggtggggccacaggcaaatctcctgacttatggggagttggcttgtggttcctcccttggatagcctccatggaaccactataggctttcccaacagctgcctctgaaatagctgctgcttcgagatcctccctttttaaagcactttctaaagccctcaggatggcgggagcaaacagcactggtatattctaggagtaagtgcaggaattcagcagtgagagcatgtctgggaccacctggactgccatccatttaacctcaaatctctttgggatactcgccctccctgggaaccagagttctggctctaacattgagcagctatgcactagttccagagaagccactaacaggctgccatgtgtagatgtaggttcttaagagatcacaggctgggtcatctgatcactggatggatagctcagcctggggcatttagtgttttccctggtgataaatccccaaggcagctggatttggagctggtggcaagttgaaattattaaaaattgatttgtgtgggactgtc

SEQ ID NO: 117981 - DNA, 284 bp, Homo sapiens
  Payload ID: 3083
  Gene Symbol: C10orf76
  Gene Name: chromosome 10 open reading frame 76
  ENST ID: ENST00000456149
  CDS Start-End: 1-284
tctgtggaactcccactggatgcagatgtacagaccagtaatctactgataacctttttaaagtatagctcaattgtcatgcaggacaccaaagatgaacacaggcttcacagtggcaaactctgtctgattatccttacatgtattgcagagcctatgagacacaggaagaaggcagcagacaagaatcttccctgccgtcctttagtatgtgcagtactggacctgatggtagagtttattgtaacacacatgatgaaggagtttcctatggatctctatat

SEQ ID NO: 117982 - DNA, 994 bp, Homo sapiens
  Payload ID: 3084
  Gene Symbol: C10orf82
  Gene Name: chromosome 10 open reading frame 82
  Uniprot ID: Q8WW14
  ENST ID: ENST00000369210
  CDS Start-End: 56-520
gggcagaggccaagtgggcaccggatagcgccagccccgcccagagagcgaaatcatggagccttccaagaccttcatgagaaacctgccaatcacaccaggctatagcggctttgtgccattcctcagctgccaaggaatgtccaaggaggatgacatgaaccactgtgtgaaaaccttccaggagaaaacacagcgctataaagaacagctgcgggaattgtgctgcgcagtggccactgccccgaaactgaaacctgtcaactccgaggagacggtcctgcaggccctgcaccagtacaatctgcagtaccaccccctgatcctggaatgcaaatatgtaaagaaacctctccaggagcccccgatccctggctgggcaggctacctgccgagagccaaggtcactgaatttggctgtggcacgagatacactgtcatggccaaaaactgctacaaggacttcctggagatcacggagagggccaagaaggcacatctgaaaccatatgaagagtgaggagaaatgtctctttccttcctactaccgttttaaaaaggggatgaaatgtttgcagtggcctttctgcttagctgggccagctccctgcaactcacacggacggttcctctcctagatggaagctgccctgcccttggaaggcccctgagagaggaccccaaaactccgctgacatgtggctgtgctcagaggccaagtataccatgcagtgggaagatgtatctagagccactgtcctccgcaaagtatgcagaaggctagaagcgcagagtctcccaaggaggtgaactttaagtggggcttccaaaacctgccattctcatgttggaatcacgcccagtgagcaataaagaaatttagtaacaagaattttttaactgccgcctgcatcctgagtggttgacggttgcatgtcattaatgataaagaccgttttttgtcatgtgggaataaagaggctgcttctccgca

SEQ ID NO: 117983 - DNA, 852 bp, Homo sapiens
  Payload ID: 3084
  Gene Symbol: C10orf82
  Gene Name: chromosome 10 open reading frame 82
  ENST ID: ENST00000588184
  CDS Start-End: 41-745
gggcaccggatagcgccagccccgcccagagagcgaaatcatggagccttccaagaccttcatgagaaacctgccaatcacaccaggctatagcggctttgtgccattcctcagctgccaaggaatgtccaaggaggatgacatgaaccactgtgtgaaaaccttccaggagaaaacacagcgctataaagaacagctgcgggaattgtgctgcgcagtggccactgccccgaaactgaaacctgtcaactccgaggagacggtcctgcaggccctgcaccagtacaatctgcagtaccaccccctgatcctggaatgcaaatatgtaaagaaacctctccaggagcccccgatccctggctgggcaggctacctgccgagagccaaggtcactgaatttggctgtggcacgagatacactgtcatggccaaaaactgctacaaggacttcctggagatcacggagagggccaagaaggcacatctgaaaccatatgaagaaatatatggagttagctccacaaaaacttctgctccgtctccaaaagttttgcagcatgaagagctgctgccaaaatatcccgatttttctattccagatggaagctgccctgcccttggaaggcccctgagagaggaccccaaaactccgctgacatgtggctgtgctcagaggccaagtataccatgcagtgggaagatgtatctagagccactgtcctccgcaaagtatgcagaaggctagaagcgcagagtctcccaaggaggtgaactttaagtggggcttccaaaacctgccattctcatgttggaatcacgcccagtgagcaataaagaaatttagtaacaaga

SEQ ID NO: 117984 - DNA, 2482 bp, Homo sapiens
  Payload ID: 3085
  Gene Symbol: C10orf88
  Gene Name: chromosome 10 open reading frame 88
  Uniprot ID: Q9H8K7
  ENST ID: ENST00000481909
  CDS Start-End: 226-1563
cgacctcctccccgcacactttgaacgccgcgcctgaggccagctggcacatgcgcatgcgtgtctctggtgcctgctctccccaccaaagcaagaagcggcgggtacttgaagcggagtgagccggaagtcgctttgcctgcccatttccacgctgtaccggcggaaattcaagcactggaagagaggttccggggctgggctggcctgactgaaggcggcggaatggagacgcggaccgaggacgggggcctcacccgccgccccacgctggcctcttcttgggatgttgcaggcggggccctgacccacagcctcctcctcacccgggccggtctcggccccggtgacttcgactgggaggagctgctggcaccgcctgctccaggtcaggatctggtgattttgaagagaaaccacaacaacaaagatgaaaacccctgcttcctttacctgaggtgtggccctgatggaggtgaagaaatcgcttctattggcattttaagttcagcaagaaatatggaagtgtacttaggagaggagtactgtggaaccagtaggggcaagaatgtttgtactgtcctggatgacagtgaacatgaaaagatcattttgtataaaaaaaatctaaaattggagtcctccacacatgcttgtaaaataaagttgctctcctttggcgaaaggcagtgtgtgttcatcagtaaagttgtggtacacatgagatcagtttttgcaaattcttcaacaagctctcctgctctaggatcaaggatagaccttgacaaggtccaaaccataatggagtccatggggtcaaagttatctcctggagctcagcagttgatggatatggttaggtgtcagcagcggaattgtattcccattggagagcagcttcagtcggtgttgggcaattctggatacaagcatatgattggactacaatcctcatctaccttaggaaccttaaacaagtcgtcctccacaccttttccttttagaactggattgacatctgggaacgtgactgaaaacttacaaacttacattgataaaagtacacaactgcctggtggagagaattctaccaagcttgatgagtgtaaagttatgcctcaaaaccattcctttcttgaaaatgatcttaaaaatgcaatggcctctttcttaccaaagaaagtaagtgacaactcaaatatacccaactccgagttgctgccttttctccagaatttatgtagtcaagttaatcatctccatgtgggaaataagaccgagtgtcaggaaaacatcaccaagcatggtgaacgcattcttggtgttggaatggaagagcaatctatttgctcctacttggaaaagattctttctaaaaatatggaactgatggaaaagaaacttatggattacattgatcagcgaatacatgaactccaggagcacattgatgataagattgctttgttactggatttgctgcaaaatcctaactccccgcccactgggatacctctaagacattatgactctggagaaagactttcaaatggagaaagataagctctcaacataaacagtgtactgcagatatttattacatatttattacaaagccaaaacccaaaaatatttataaaaagcaagtatttaatgtcctttgagggatcattgtcttacacaaagtgacctcagttttcgtttttactacacttgttattttaaatccagtactgtacactgagttaatatgatacagtcaaattatttttgctcacgatatttttcagtcttacagaaatgtatgtatatttgtgttaagagtttaaaatgcttgaggatttctaatacagttcattagtttgtattgtatatgtgtttaagtataatttttatttatacaaagatcttatagtcttagaagtatgaaaaataatgcttaagagtatttgatttttttctttttctaattatcttggaaaattggatacttaagacttggagcctttacttcagattaccagtttacattttgtattgcttgtgtgagataatgaataagatgtgatatttggcatgtgtaaacttagttcactctggggttgttaatattatttgtttcattacagagtagctgtaggtaggaaagtaaacatcagaactagcctagtccttgttacgattagtactttggatttgatttttcctgtaaaacagatgcagtcatcttgtttgacctcagtaaccccagacagtttaagaaaacctctccttttgagctgatacaggttttttccccagaatccttttctggcatgtttattgtatgaaataatgaggctctccatggaaggatgaacacatatgagtcaagggattgcaattctctctgatagacttagttttcagaccttataactattgtatatgcattgaagggtgatatatttgcatataaaaataaatgcacctgctctgggaa

SEQ ID NO: 117985 - DNA, 3076 bp, Homo sapiens
  Payload ID: 3086
  Gene Symbol: C10orf90
  Gene Name: chromosome 10 open reading frame 90
  Uniprot ID: Q96M02
  ENST ID: ENST00000284694
  CDS Start-End: 122-2221
attctgagcctagccacagaggtaaactccggacatttttttctttcatgtcgccaaatacatccttgtcattaaaagacctttgaaactgagtaaaatggctttgaaacctcagtagaatatgctcaaactgtctggagaaggattacgggacagctaccacagtagaagagatcaaattgcccttaaaaatctccagtctgatgtcacagaggcaaaatctgacttcaccaaggagaccctggcatcacaaaacacaaaaatgatttcatccatagtcatctcccagatgattgatgagaataagtcaagagaaaacagggcctccttgcccctaccgtgtgccattgctcagtctcgtgcacatcacgccaagcaatctctggctaaccgcagcggagtcaacattcacagagcatttgcgttacttccgggcagattaggaatcccggcaccgtcagatgagcgaggacctgaggcagagctgccgcccaaagaggagagaccctgtgggggcccccgcagagggtttgcatccatcaccatcacggccagacgcgtgggccccccagcccgcgccctggtgtgggggactgctggggactctctgtgccccaagtgcagggctgaggacacactgttccaggcgcccccggctctggccaatggcgcccatccaggtcggcatcagagatcttttgcctgcacagagttctccagaaacagctccgtggtgcggctgaaggttcccgaggcccacactgggttgtgtgagagacgcaagtactgggtcacccatgcagacgacaaagagaccagtttttctccagacaccccactgtcaggaaagagcccgctggtgttcagttcctgtgtccacctcagggtgtctcagcagtgtccagattcaatctattacgtagacaagtctctctccgtccccattgagccacctcaaattgccagccccaaaatgcacagatccgtcctgtcgctcaacctcaattgtagttcccacagattaacagcagatggagtagatggcctagtgaacagagagccaataagcgaagccctgaagcaggagctcctggagggagaccaggacctcgtaggccagcgctggaacccaggtttacaagaaagtcacttgaaggaaaccccatcgttgaggcgggtgcatttggggaccggcgcttgtccttggagtggttcttttccattggaaaacacagaattggcaaatgtgggagctaaccaagtcactgtaagaaaaggggaaaaggaccatacaactcattgtcacgccagcgatcatgccaaccaactgtccattcacattcctggctggagttacagggcagtacacacaaaagtattttctggaagcagcaagaggcaacaaggagaagtatgtatgactgtgtctgctcctccagtggaacagaagcccactagacatttccttcccattggggatagctctccaagcgatgactgtctgtctagagacctttctgagcccacagagagacgacatcaaagcttcctgaaacccagaatcctttttcctgggtttctttgccccttacaagatgtatgtgcatctctgcaggaagacaatggtgttcagatagaaagcaagttccccaaaggagattacacatgctgtgacttggttgtaaaaataaaggaatgtaagaagagtgaggaccccaccacacctgagccctccccagcagcaccctcgccagcaccccgcgatggagcagggagccctggcctgtccgaagactgttctgagtctcagcaaacgcctgcaagatctttgaccttgcaagaagcactggaagttcgtaagcctcagttcatttctcgctcacaagaacggctgaagaagcttgaacacatggtccagcagaggaaagcccagcggaaggaggacctgaggcagaagcagagcctccttcccatccgcaccagcaagaagcagttcacgattccccatcctctgagtgataacttgttcaaacccaaagaacggtgcatttcagagaaggagatgcatatgcgatctaagagaatctatgataacttgccggaagttaaaaagaaaaaagaagaacaaaggaaaagggtgatcttacaaagtaacagactccgtgccgaagtcttcaaaaagcaattactggaccagctccttcaaaggaatgcggtctaaccacaggctgccctgctgaccacactacctggacctgggaggacttcgaatgctggataagccattaaacttagcattatcttcatcatgggaaaacacttattttactttcgattttttttttccataaaggaaaacatcacttcctgaattactgacccaagccaaacagaaacaataaccctcgagaaaataggtcaacaatctgttgtggggaaaccacctccatgtaacccactggatacagtccccttaatgtttttgcttctaaattgtaccttttgcttctgatttcttctcccctgctgtttcctgcccatcagagaggcctgatacaagcaagtttgtttacatccctggggaatcttttacatcaaacttttgggatccaaatccatctccttttaaatttcaatctcagcacctgccagttatgcaaatgccaaaatgtgggtcatcatatagtatatttgaaacctttctgaacatgtacaccacccaatgctagaggctgacttggaaaccggtgggtgcaatgcccgaggctgtggaacaatcagcccatctctttgtgacctggagcagtcagagggccctcagtcaccccgccccattcctcaccagagaaaagaatccatttctatggaagctctgacgtaacttcagtgttttctacaatactcctcctgccccgccccattaaaacagttcttttgttaagaaatagcctaatggtccaactttgctgtctgttcttccaaatgtttataatacacattatttataaatatgtctgtttgggaagctaagaacaagctagtttttacaacacaaatggaaataaatgcaattatt

SEQ ID NO: 117986 - DNA, 2995 bp, Homo sapiens
  Payload ID: 3086
  Gene Symbol: C10orf90
  Gene Name: chromosome 10 open reading frame 90
  ENST ID: ENST00000356858
  CDS Start-End: 853-2835
gggaagatggccatgtgcaggtggaggcagagattagagaggggctgtcccaagccgagggacacagaggatgccagacaccacgggacactgagaagggcaaggaagggtcctcccctagggccttcagagggagcacggtcctgacacctggatttctggcctccagaactgggaaggagtaaatccctgttgtatccagctgctccctttgtagtcacttttcacagcagcgctgggaacgaacgcaggcaccaatccagcttgggggccatgtggggtagcagcggatcgggacttccttctaagagaagcgatcttgagccgtgtcacgggtgaggagttaggagttagctcagtggggaaaaggtgaaggcagcactcacggtcatcaagccagcccctgtgggaagcaggctgggtttaaggatttctaacctgggctccttgaactcccagggtccccctacatgtgtgcttcaattttgcaccttttcttggggagaaacgaatcccttgcatttgagttttggaggaccatgtggccttcacggtcacaaactggcaatgtcaagaaggtttggcaggaccggctgggagatgaggctggtggggtcaccagcttgattgtgaccttgctgacaccagcagggcagggaggtgaactgacgcaatggagcagagcctttgtctcaggagcaaaccagccttggctttcagttggatgttggaggattacgggacagctaccacagtagaagagatcaaattgcccttaaaaatctccagtctgatgtcacagaggcaaaatctgacttcaccaaggagaccctggcatcacaaaacacaaaaatgatttcatccatagtcatctcccagatgattgatgagaataagtcaagagaaaacagggcctccttgcccctaccgtgtgccattgctcagtctcgtgcacatcacgccaagcaatctctggctaaccgcagcggagtcaacattcacagagcatttgcgttacttccgggcagattaggaatcccggcaccgtcagatgagcgaggacctgaggcagagctgccgcccaaagaggagagaccctgtgggggcccccgcagagggtttgcatccatcaccatcacggccagacgcgtgggccccccagcccgcgccctggtgtgggggactgctggggactctctgtgccccaagtgcagggctgaggacacactgttccaggcgcccccggctctggccaatggcgcccatccaggtcggcatcagagatcttttgcctgcacagagttctccagaaacagctccgtggtgcggctgaaggttcccgaggcccacactgggttgtgtgagagacgcaagtactgggtcacccatgcagacgacaaagagaccagtttttctccagacaccccactgtcaggaaagagcccgctggtgttcagttcctgtgtccacctcagggtgtctcagcagtgtccagattcaatctattacgtagacaagtctctctccgtccccattgagccacctcaaattgccagccccaaaatgcacagatccgtcctgtcgctcaacctcaattgtagttcccacagattaacagcagatggagtagatggcctagtgaacagagagccaataagcgaagccctgaagcaggagctcctggagggagaccaggacctcgtaggccagcgctggaacccaggtttacaagaaagtcacttgaaggaaaccccatcgttgaggcgggtgcatttggggaccggcgcttgtccttggagtggttcttttccattggaaaacacagaattggcaaatgtgggagctaaccaagtcactgtaagaaaaggggaaaaggaccatacaactcattgtcacgccagcgatcatgccaaccaactgtccattcacattcctggctggagttacagggcagtacacacaaaagtattttctggaagcagcaagaggcaacaaggagaagtatgtatgactgtgtctgctcctccagtggaacagaagcccactagacatttccttcccattggggatagctctccaagcgatgactgtctgtctagagacctttctgagcccacagagagacgacatcaaagcttcctgaaacccagaatcctttttcctgggtttctttgccccttacaagatgtatgtgcatctctgcaggaagacaatggtgttcagatagaaagcaagttccccaaaggagattacacatgctgtgacttggttgtaaaaataaaggaatgtaagaagagtgaggaccccaccacacctgagccctccccagcagcaccctcgccagcaccccgcgatggagcagggagccctggcctgtccgaagactgttctgagtctcagcaaacgcctgcaagatctttgaccttgcaagaagcactggaagttcgtaagcctcagttcatttctcgctcacaagaacggctgaagaagcttgaacacatggtccagcagaggaaagcccagcggaaggaggacctgaggcagaagcagagcctccttcccatccgcaccagcaagaagcagttcacgattccccatcctctgagtgataacttgttcaaacccaaagaacggtgcatttcagagaaggagatgcatatgcgatctaagagaatctatgataacttgccggaagttaaaaagaaaaaagaagaacaaaggaaaagggtgatcttacaaagtaacagactccgtgccgaagtcttcaaaaaggtaatggcctcgtcaccagcaggtgtgatgtgtgtggtgcacagatgccgaatctcaacttgacatctttgtttcccttttcctctagcaattactggaccagctccttcaaaggaatgcggtctaaccacaggctgccctgctgaccacactacctggacctgggaggacttcgaatgctggataagccattaaacttagcattatcttcatcatgggaaaa

SEQ ID NO: 117987 - DNA, 2107 bp, Homo sapiens
  Payload ID: 3086
  Gene Symbol: C10orf90
  Gene Name: chromosome 10 open reading frame 90
  ENST ID: ENST00000432642
  CDS Start-End: 122-2107
attctgagcctagccacagaggtaaactccggacatttttttctttcatgtcgccaaatacatccttgtcattaaaagacctttgaaactgagtaaaatggctttgaaacctcagtagaatatgctcaaactgtctggagaaggattacgggacagctaccacagtagaagagatcaaattgcccttaaaaatctccagtctgatgtcacagaggcaaaatctgacttcaccaaggagaccctggcatcacaaaacacaaaaatgatttcatccatagtcatctcccagatgattgatgagaataagtcaagagaaaacagggcctccttgcccctaccgtgtgccattgctcagtctcgtgcacatcacgccaagcaatctctggctaaccgcagcggagtcaacattcacagagcatttgcgttacttccgggcagattaggaatcccggcaccgtcagatgagcgaggacctgaggcagagctgccgcccaaagaggagagaccctgtgggggcccccgcagagggtttgcatccatcaccatcacggccagacgcgtgggccccccagcccgcgccctggtgtgggggactgctggggactctctgtgccccaagtgcagggctgaggacacactgttccaggcgcccccggctctggccaatggcgcccatccaggtcggcatcagagatcttttgcctgcacagagttctccagaaacagctccgtggtgcggctgaaggttcccgaggcccacactgggttgtgtgagagacgcaagtactgggtcacccatgcagacgacaaagagaccagtttttctccagacaccccactgtcaggaaagagcccgctggtgttcagttcctgtgtccacctcagggtgtctcagcagtgtccagattcaatctattacgtagacaagtctctctccgtccccattgagccacctcaaattgccagccccaaaatgcacagatccgtcctgtcgctcaacctcaattgtagttcccacagattaacagcagatggagtagatggcctagtgaacagagagccaataagcgaagccctgaagcaggagctcctggagggagaccaggacctcgtaggccagcgctggaacccaggtttacaagaaagtcacttgaaggaaaccccatcgttgaggcgggtgcatttggggaccggcgcttgtccttggagtggttcttttccattggaaaacacagaattggcaaatgtgggagctaaccaagtcactgtaagaaaaggggaaaaggaccatacaactcattgtcacgccagcgatcatgccaaccaactgtccattcacattcctggctggagttacagggcagtacacacaaaagtattttctggaagcagcaagaggcaacaaggagaagtatgtatgactgtgtctgctcctccagtggaacagaagcccactagacatttccttcccattggggatagctctccaagcgatgactgtctgtctagagacctttctgagcccacagagagacgacatcaaagcttcctgaaacccagaatcctttttcctgggtttctttgccccttacaagatgtatgtgcatctctgcaggaagacaatggtgttcagatagaaagcaagttccccaaaggagattacacatgctgtgacttggttgtaaaaataaaggaatgtaagaagagtgaggaccccaccacacctgagccctccccagcagcaccctcgccagcaccccgcgatggagcagggagccctggcctgtccgaagactgttctgagtctcagcaaacgcctgcaagatctttgaccttgcaagaagcactggaagttcgtaagcctcagttcatttctcgctcacaagaacggctgaagaagcttgaacacatggtccagcagaggaaagcccagcggaaggaggacctgaggcagaagcagagcctccttcccatccgcaccagcaagaagcagttcacgattccccatcctctgagtgataacttgttcaaacccaaagaacggtgcatttcagagaaggagatgcatatgcgatctaagagaatctatgataacttgccggaagtt

SEQ ID NO: 117988 - DNA, 1595 bp, Homo sapiens
  Payload ID: 3086
  Gene Symbol: C10orf90
  Gene Name: chromosome 10 open reading frame 90
  ENST ID: ENST00000424927
  CDS Start-End: 1-728
cttggagtggttcttttccattggaaaacacagaattggcaaatgtgggagctaaccaagtcactgtaagaaaaggggaaaaggaccatacaactcattgtcacgccagcgatcatgccaaccaactgtccattcacattcctggctggagttacagggcaggagattacacatgctgtgacttggttgtaaaaataaaggaatgtaagaagagtgaggaccccaccacacctgagccctccccagcagcaccctcgccagcaccccgcgatggagcagggagccctggcctgtccgaagactgttctgagtctcagcaaacgcctgcaagatctttgaccttgcaagaagcactggaagttcgtaagcctcagttcatttctcgctcacaagaacggctgaagaagcttgaacacatggtccagcagaggaaagcccagcggaaggaggacctgaggcagaagcagagcctccttcccatccgcaccagcaagaagcagttcacgattccccatcctctgagtgataacttgttcaaacccaaagaacggtgcatttcagagaaggagatgcatatgcgatctaagagaatctatgataacttgccggaagttaaaaagaaaaaagaagaacaaaggaaaagggtgatcttacaaagtaacagactccgtgccgaagtcttcaaaaagcaattactggaccagctccttcaaaggaatgcggtctaaccacaggctgccctgctgaccacactacctggacctgggaggacttcgaatgctggataagccattaaacttagcattatcttcatcatgggaaaacacttattttactttcgattttttttttccataaaggaaaacatcacttcctgaattactgacccaagccaaacagaaacaataaccctcgagaaaataggtcaacaatctgttgtggggaaaccacctccatgtaacccactggatacagtccccttaatgtttttgcttctaaattgtaccttttgcttctgatttcttctcccctgctgtttcctgcccatcagagaggcctgatacaagcaagtttgtttacatccctggggaatcttttacatcaaacttttgggatccaaatccatctccttttaaatttcaatctcagcacctgccagttatgcaaatgccaaaatgtgggtcatcatatagtatatttgaaacctttctgaacatgtacaccacccaatgctagaggctgacttggaaaccggtgggtgcaatgcccgaggctgtggaacaatcagcccatctctttgtgacctggagcagtcagagggccctcagtcaccccgccccattcctcaccagagaaaagaatccatttctatggaagctctgacgtaacttcagtgttttctacaatactcctcctgccccgccccattaaaacagttcttttgttaagaaatagcctaatggtccaactttgctgtctgttcttccaaatgtttataatacacattatttataaatatgtctgtttgggaagctaagaacaagctagtttttacaacacaaatggaaataaatgcaattattataaaaattcaa

SEQ ID NO: 117989 - DNA, 1025 bp, Homo sapiens
  Payload ID: 3086
  Gene Symbol: C10orf90
  Gene Name: chromosome 10 open reading frame 90
  ENST ID: ENST00000488181
  CDS Start-End: 399-1025
cgcaggggtatgctgcccgctacacagaaacggccgtgcatcggactttccagataaaaacatttagtacagagttgaaaaaccatgtgatggtcatggattttgtgaagagtaactggtttccctcccagagaagagccaaagtttgtatcatccatatgtgtcaaggcttgaagacggctgagcagacagccagcagatatgagatccacagtcgactcttctcatcccccaaagatcattctgcctgggaaagaaatgaaagtctttccaatgcaggattacgggacagctaccacagtagaagagatcaaattgcccttaaaaatctccagtctgatgtcacagaggcaaaatctgacttcaccaaggagaccctggcatcacaaaacacaaaaatgatttcatccatagtcatctcccagatgattgatgagaataagtcaagagaaaacagggcctccttgcccctaccgtgtgccattgctcagtctcgtgcacatcacgccaagcaatctctggctaaccgcagcggagtcaacattcacagagcatttgcgttacttccgggcagattaggaatcccggcaccgtcagatgagcgaggacctgaggcagagctgccgcccaaagaggagagaccctgtgggggcccccgcagagggtttgcatccatcaccatcacggccagacgcgtgggccccccagcccgcgccctggtgtgggggactgctggggactctctgtgccccaagtgcagggctgaggacacactgttccaggcgcccccggctctggccaatggcgcccatccaggtcggcatcagagatcttttgcctgcacagagttctccagaaacagctccgtggtgcggctgaaggttcccgaggcccacactgggttgtgtgagagacgcaagtactgggtcacccatgcagacgacaaagagaccagtttttctccagacaccccactgtcaggaaagagcccgctggtgttcagttcctgtgtccacctcagggtg

SEQ ID NO: 117990 - DNA, 566 bp, Homo sapiens
  Payload ID: 3086
  Gene Symbol: C10orf90
  Gene Name: chromosome 10 open reading frame 90
  ENST ID: ENST00000463082
  CDS Start-End: 147-266
aggctggaaggtggaagcctgactcattctgagcctagccacagaggtaaactccggacatttttttctttcatgtcgccaaatacatccttgtcattaaaagacctttgaaactgagtaaaatggctttgaaacctcagtagaatatgctcaaactgtctggagaaggattacgggacagctaccacagtagaagagatcaaattgcccttaaaaatctccagtctgatgtcacagaggcaaaatctgacttcaccaaggtttagagcttgtccctgggcgtgcgctagaaggctgccataagatgatgaaacactccagggactgccctgctgccctgtgactgtggctgccgagaccctggcatcacaaaacacaaaaatgatttcatccatagtcatctcccagatgattgatgagaataagtcaagagaaaacagggcctccttgcccctaccgtgtgccattgctcagtctcgtgcacatcacgccaagcaatctctggctaaccgcagcggagtcaacattcacagagcatttgcgttacttccgggcagattaggaat

SEQ ID NO: 117991 - DNA, 1012 bp, Homo sapiens
  Payload ID: 3086
  Gene Symbol: C10orf90
  Gene Name: chromosome 10 open reading frame 90
  ENST ID: ENST00000480379
  CDS Start-End: 389-700
gaggacagatgggagaggagcacggctgggggctgaggcccagccggcaaggagagcgtggagtcactgtgaaggaggggctgcggctgcagagacgctcaggatccagggatgggtctttgagcagtgaagaggagattacacatgctgtgacttggttgtaaaaataaaggaatgtaagaagagtgaggaccccaccacacctgagccctccccagcagcaccctcgccagcaccccgcgatggagcagggagccctggcctgtccgaagactgttctgagtctcagcaaacgcctgcaagatctttgaccttgcaagaagcactggaagttcgtaagcctcagttcatttctcgctcacaagaacggctgaagaagcttgaacacatggtccagcagaggaaagcccagcggaaggaggacctgaggcagaagcagagcctccttcccatccgcaccagcaagaagcagttcacgattccccatcctctgagtgataacttgttcaaacccaaagaacggtgcatttcagagaaggagatgcatatgcgatctaagagaatctatgataacttgccggaagttaaaaagaaaaaagaagaacaaaggaaaagggtgatcttacaaagtaacagactccgtgccgaagtcttcaaaaagcaattactggaccagctccttcaaaggaatgcggtctaaccacaggctgccctgctgaccacactacctggacctgggaggacttcgaatgctggataagccattaaacttagcattatcttcatcatgggaaaacacttattttactttcgattttttttttccataaaggaaaacatcacttcctgaattactgacccaagccaaacagaaacaataaccctcgagaaaataggtcaacaatctgttgtggggaaaccacctccatgtaacccactggatacagtccccttaatgtttttgcttctaaattgtaccttttgcttctgatttcttctcccctgctgtttc

SEQ ID NO: 117992 - DNA, 888 bp, Homo sapiens
  Payload ID: 3087
  Gene Symbol: C10orf99
  Gene Name: chromosome 10 open reading frame 99
  Uniprot ID: Q6UWK7
  ENST ID: ENST00000372126
  CDS Start-End: 115-360
ctctgcccattgggaaacacctctctatgactctataaatgtccaaggtggccccaagggaggacttctgcagcacagctcccttcccaggacgtgaaaatctgccttctcaccatgaggcttctagtcctttccagcctgctctgtatcctgcttctctgcttctccatcttctccacagaagggaagaggcgtcctgccaaggcctggtcaggcaggagaaccaggctctgctgccaccgagtccctagccccaactcaacaaacctgaaaggacatcatgtgaggctctgtaaaccatgcaagcttgagccagagccccgcctttgggtggtgcctggggcactcccacaggtgtagcactcccaaagcaagactccagacagcggagaacctcatgcctggcacctgaggtacccagcagcctcctgtctcccctttcagccttcacagcagtgagctgcaatgttggagggcttcatctcgggctgcaaggaccctgggaaagttccagaactccacgtccttgtctcaattgtgccatcaactttcagagctatcatgagccaacctcaccccacagggcctcagtcgccaccatgtgggcctctccagtgcaaaccaccgagcattccaccatgaccggtcacagctacaaatccagagaccatcaatcctgctagagtgcagggtggcaagcacccaagggtggctgaccaagactgcagagtctcctccatcttcaggtccattcagcctcctggcatttaactaccagcatccagtggtccccaaggaatcccttcctagcctcctgacatgagtctgctggaaagagcatccaaacaaacaagtaataaataaataaataaactcaatgcagacaca

SEQ ID NO: 117993 - DNA, 2885 bp, Homo sapiens
  Payload ID: 3088
  Gene Symbol: C11orf1
  Gene Name: chromosome 11 open reading frame 1
  Uniprot ID: Q9H5F2
  ENST ID: ENST00000260276
  CDS Start-End: 338-790
actagttgatgacgcacccatggcgcctggttgtctagacgagccggtgtaccgactccccggtggatgataactatgagtgcaaaagcaagacgcgcactttcctgtcacctcgccctttcaccccctcgggaagatcaaagtgtctttagcccaagcatggccttgagcgacttcatcacacctgcatgaggtcacaagcagtcactagcgcaggggggtgaggcgagttctgggtgaaagaaacggggcggggctgaggccaaggaagaggttggactgtgtctcgcatgctcctgacgcagaaggttttgaaccttttttcacctcgtctgaaatggctgcctcccagtgtctctgctgctcaaaatttctcttccagagacagaacctcgcctgtttcctcacaaacccacactgtggcagccttgttaatgcagatggccatggtgaagtgtggacagattggaataatatgtccaagtttttccagtatggatggcgatgcaccactaatgagaatacctattcaaaccgtaccctgatgggcaactggaaccaggaaagatatgacctgaggaatatcgtgcagcccaaacccttgccttcccagtttggacactactttgaaacaacatatgatacaagctacaacaacaaaatgccactttcaacacatagatttaagcgagagcctcactggttcccaggacatcaacctgaactggatcctccccgatacaaatgcacagaaaagtcaacttacatgaatagctattcaaagccttaaattgggcatcactcaggatgtgtataagatcttaatattgactagtttcacatccaggtttctaagaaatgataagatacttcacttttccagagtgaaatgtaggagggagcacattctaagtacagctaaaaatttagctcactgtaacacagtttcactctctgaataaataaagcaaaaaacacagtaaatattctttatccctttttttgttgttgttttaaccaagatttaaatgtcaaatttaatacagcaactcagttctacatttggggtgttgtagaagggccttaaaaagaattattttaggccaggcacggtggctcatgcctgtaatcccagcactttgggaggccgaggcaggtggatcacgtgaggtcaggagttcgagaccagcctgaccaacatggtgaaacactgtctctactaaaaacacaaaaattagctgagcatggtggctcacgcctgtaatcccagctactcaggaggctgaggcaggggaatcgcttgaacctgagaagtggaggttgtggtgagctgagatcatgccactgcactttagcctgggtgacagagcgagactctgtctcaaaaaaaaaaaaaaaaaaagaattatttctctgaagtctacaaccactgtggtcttcccttccttctgtcgtagcaagacctcagaatctagcataacttaggctaggtttggctagatgctttctgggtataagccagagtcgtatagtgcaactttgctgtgaccttagtgaacatcccctcttgaggactacaaaaacaaacgtaactttttaaaattattatggagaattttacgtaaaacaaaagtagacaggctagtctaatgaactcccatgtatcattacccagcatcaactatttatgactaatcttacctacttctactttgtcttattgaattaattttggagcagatcttagaaatagaatttaatctataaaaatcttggtgggctgggtgcggtggctcatgcctgtaatcccagcactttgggaggctgaggtgggtggatcacctgaggtcaggagtccaagaccagcctggccaatgtggtgaaactccatctcttctaaaaatacaaaaattagctggtcttggtggcgggcgcctgtaatcccagctacttgggaggctgaggcaggagaattgcttgaacccaggaagcagaggttgcagtgagctgagacggtgccattgctctccagcctgggcgacaagagcgaaactccgtctcaaaaaaaaaaaagaaaagaaaaagaaaaaaaaaatcttggtatactggctgggcacagtggctcacacctaatcccagcactttgggaggctgaggcaggaggatagcttgaggctgggagttcaaaaccagcctgggcaacatagcaagaccccatctctaccaaaaaaaatttttttaaagatttcagtatatttctcaaaaagataaggactgtcaattgtctactcccccccaacaaaggtcactaaggaaacctgttgactaaacaaagctcattaaacctattgtagtgtagcaaaggagaccatcaacttgacacagagtcttggtaatgattcaaagggaggatgttagagtaaggtatttataaggatttgagataagggtccaactggtttaaaatgagtcaaaatagggaactagtagagactgagaaagggttgtgaatagcttaggtttggtaaacttaggaaatcaacagtcttaattttaatatggttaaactgattagtatttcctatttttttatctactgtgtaagaagacactataatatatgggcattactgagagatactgcccatatgttgtcctcgtaagcaaggagatattttttatctcccatatattacctctcaaacctttgttactttagtttcgagatatagatccagaatttatgttgttactcagtagtgaggaagtttcttttttttttctaaatggctatcaagttgtcccaccattagttattgaaaagaccataattttttcactcctattcaatgccatttttattgtaaataaactatgtacatgta

SEQ ID NO: 117994 - DNA, 1437 bp, Homo sapiens
  Payload ID: 3088
  Gene Symbol: C11orf1
  Gene Name: chromosome 11 open reading frame 1
  ENST ID: ENST00000529270
  CDS Start-End: 676-1248
gtctcttggggtctggatcaggaccccttccggtaacaagaacatgctgtatttggttctctgttctgttgtaagccattttaacagactgaatcttactctgaaaacggtggaaagccactgaaagattttaaataagaagatgatacaattatactttcactttgaaaaattctcctttcctgtggagaaaggtttggagaggaacaaggctgatggcatggcaggataaaacaagaggcaactgcaataatggagacaaagctgacagtgatttgaattgaaatttggcaatgggaatggagggtggcagtctgattcaaaaatcaacaagacttagtgactggatgaaaattaaagacaagtcagagtcaaagataagccccaggcttctggcttggacaactgagtggatggtgatgtctgtcattccagccctagagacagttacacctagatctccagtatgagtaccaggcccattggactttgtggcaccagctactctggtcatcatgttgtttggtaacatcagtgcatgcatctgtcttcacaaaggcagatggtatgagggtagttacctgggatgtcatccttcaatgctgcattattggctttgtttctgcctgtggaaaggcaagtgggtggtgactcccaaatcatggccacttgcccatggtaatctgggtgattctttctttgcttggagaactgggaaagccaggtttgttgacatctttaaagaacatggaacagccaagtaaggatttctgtgactctcataagaaatcttcaaagagctcaacctactcagcatcaagttactcttcttcaggaaagagacagaacctcgcctgtttcctcacaaacccacactgtggcagccttgttaatgcagatggccatggtgaagtgtggacagattggaataatatgtccaagtttttccagtatggatggcgatgcaccactaatgagaatacctattcaaaccgtaccctgatgggcaactggaaccaggaaagatatgacctgaggaatatcgtgcagcccaaacccttgccttcccagtttggacactactttgaaacaacatatgatacaagctacaacaacaaaatgccactttcaacacatagatttaagcgagagcctcactggttcccaggacatcaacctgaactggatcctccccgatacaaatgcacagaaaagtcaacttacatgaatagctattcaaagccttaaattgggcatcactcaggatgtgtataagatcttaatattgactagtttcacatccaggtttctaagaaatgataagatacttcacttttccagagtgaaatgtaggagggagcacattctaagtacagctaaaaatttagctcactgtaacacagtttcactctctgaataaataaagcaaaaaacaca

SEQ ID NO: 117995 - DNA, 509 bp, Homo sapiens
  Payload ID: 3088
  Gene Symbol: C11orf1
  Gene Name: chromosome 11 open reading frame 1
  ENST ID: ENST00000530799
  CDS Start-End: 84-509
atggctgcctcccagtgtctctgctgctcaaaatttctcttccagaactgggaaagccaggtttgttgacatctttaaagaacatggaacagccaagtaaggatttctgtgactctcataagaaatcttcaaagagctcaacctactcagcatcaagttactcttcttcaggaaagagacagaacctcgcctgtttcctcacaaacccacactgtggcagccttgttaatgcagatggccatggtgaagtgtggacagattggaataatatgtccaagtttttccagtatggatggcgatgcaccactaatgagaatacctattcaaaccgtaccctgatgggcaactggaaccaggaaagatatgacctgaggaatatcgtgcagcccaaacccttgccttcccagtttggacactactttgaaacaacatatgatacaagctacaacaacaaaatgccactttcaacacatagatttaagcgagagcctcactggttcccaggacat

SEQ ID NO: 117996 - DNA, 534 bp, Homo sapiens
  Payload ID: 3088
  Gene Symbol: C11orf1
  Gene Name: chromosome 11 open reading frame 1
  ENST ID: ENST00000528125
  CDS Start-End: 200-514
gtttcgcagaggggcgggctcgctacctcgctcgcgcaggcactgcagattctcccaggccagtggatcccgagccaactcggccgggcgctggaggcaggtggcgagacagaacctcgcctgtttcctcacaaacccacactgtggcagccttgttaatgcagatggccatggtgaagtgtggacagattggaataatatgtccaagtttttccagtatggatggcgatgcaccactaatgagaatacctattcaaaccgtaccctgatgggcaactggaaccaggaaagatatgacctgaggaatatcgtgcagcccaaacccttgccttcccagtttggacactactttgaaacaacatatgatacaagctacaacaacaaaatgccactttcaacacatagatttaagcgagagcctcactggttcccaggacatcaacctgaactggatcctccccgatacaaatgcacagaaaagtcaacttacatgaatagctattcaaagccttaaattgggcatcactcaggatg

SEQ ID NO: 117997 - DNA, 599 bp, Homo sapiens
  Payload ID: 3088
  Gene Symbol: C11orf1
  Gene Name: chromosome 11 open reading frame 1
  ENST ID: ENST00000530214
  CDS Start-End: 20-385
ttttttcacctcgtctgaaatggctgcctcccagtgtctctgctgctcaaaatttctcttccagagacagaacctcgcctgtttcctcacaaacccacactgtggcagccttgttaatgcagatggccatggtgaagtgtggacagattggaataatatgtccaagtttttccagtatggatggcgatgcaccactaatgagaatacctattcaaaccgtaccctgatgggcaactggaaccaggaaagatatgacctgaggaatatcgtgcagcccaaacccttgccttcccaggatttaagcgagagcctcactggttcccaggacatcaacctgaactggatcctccccgatacaaatgcacagaaaagtcaacttacatgaatagctattcaaagccttaaattgggcatcactcaggatgtgtataagatcttaatattgactagtttcacatccaggtttctaagaaatgataagatacttcacttttccagagtgaaatgtaggagggagcacattctaagtacagctaaaaatttagctcactgtaacacagtttcactctctgaataaataaagcaaaaaacacagtaaa

SEQ ID NO: 117998 - DNA, 1908 bp, Homo sapiens
  Payload ID: 3089
  Gene Symbol: C11orf16
  Gene Name: chromosome 11 open reading frame 16
  Uniprot ID: Q9NQ32
  ENST ID: ENST00000326053
  CDS Start-End: 108-1511
aaccaggagtcggttgggctgagaccctgagccccaactgtcagaaggagcctgaggctgaggtggaggctgggagtttggggctgtgggtggatcctctgaaggccatggaatcctccacggggcccaggatgcctttgctcaaatactgcagcgtggccacaagcctgaaggcccctggctgggacggtgctgctccaccttgggacctctccttcacctacccctttgccctccaagcaccctggctcaccgggcacaagccccttgcaaggcatgcctcttcttgcccatgtctccacgttgccgacccagcatggcaggggcctggctggctgggaagagctggagatgctgccaacacatgggtcctagcaagaagggaagcagatggtttttactaccgggcccaaataaaggccactcccgagctggagagacagggggtcctgcttgtggaattcgaggctcctcttgtcgcaggcccaaagctgccagcccagcagcagagagtggtcttagaagaggatgtcattcctctctcaccatctgtaggatactcactgagaccaggggataaggtgctggcactctgggagccaggccaacagcagtatggccctggcactgttcttttgggcttggagatgagagatccccagagagcatcaaaggaaaaagaaatcactgttcatttctggaatggcaaagctgctaaagtgcccctaggtggggtccagtcggtgtccctgaccatctggaagaaggctgtggagaggctgcacaagtctttcaccagggagcaccccaggccccttcactgggccccttgctgctctctgctagggccaatcactgggcgcatcactaatgagcttcctccggatgctccattcctgtgccctctctgccaccatcatgcctgctgccagctactgtgccagggctgcctctgtggctgcccgccatgtggcacgacttggtggcctctaaccaggacctcagaagtcatggccagagaacttccagagttggagcccacagcacagcttttgcccctggaaggtcctaaagaggagaaagtagcaatgcacgctcccctggctgtttcttcctcctcatcctcctcctgtgaacaagacggtgtggagaatgatctggagatgggccctccccagagactgatggtgaacagtgcagtcaacacagatcccatctttcttgagatgcctctgagacagagtggcctctgccagcctgagtggaggtattggaagagaaacgggcctgagccatgccttgggaagccaggaacaagatattccaacatctgcaaagaagaaaaggatcacaaacagcagagagcacaaactgcagtagtggggactaccaaggagctggtctcgaaagcaacccacatgaagccaccgcggaccccgccaggggaagctgaacacagaaagcggagtcagagccttgcaatatgtcagtggaacaagaattcccgttagactaagagccctgaggatctaggtaaagaataaacatggtaaatattcgaggagagttatacagagtggctgacaaggccttcttcaacggaaggaggcagaggacaggccacaggtaacagtcaaataaccaccagtatctccaccccacgaagacctccctgcagataagcagcaggaaggcacctgttgtgagggctataggaatgtgggatcctgccctggggctccctgccagggccctggtgaaactgctttaagatgcctcttccgtggaagagggggtcagcctgctttgggcaaatgtgtccacagccactctgccaccttcccataaagcctagttgtacatgagtgacattttgtttcacctcttaataaaaatgaattctcttca

SEQ ID NO: 117999 - DNA, 1685 bp, Homo sapiens
  Payload ID: 3089
  Gene Symbol: C11orf16
  Gene Name: chromosome 11 open reading frame 16
  Uniprot ID: Q9NQ32
  ENST ID: ENST00000525780
  CDS Start-End: 107-1321
accaggagtcggttgggctgagaccctgagccccaactgtcagaaggagcctgaggctgaggtggaggctgggagtttggggctgtgggtggatcctctgaaggccatggaatcctccacggggcccaggatgcctttgctcaaatactgcagcgtggccacaagcctgaaggcccctggctgggacggtgctgctccaccttgggacctctccttcacctacccctttgccctccaagcaccctggctcaccgggcacaagccccttgcaaggcatgcctcttcttgcccatgtctccacgttgccgacccagcatggcaggggcctggctggctgggaagagctggagatgctgccaacacatgggtcctagcaagaagggaagcagatggtttttactaccgggcccaaataaaggccactcccgagctggagagacagggggtcctgcttgtggaattcgaggctcctcttgtcgcaggcccaaagctgccagcccagcagcagagagtggtcttagaagaggatgtcattcctctctcaccatctgtaggatactcactgagaccaggggataaggtgctggcactctgggagccaggccaacagcagtatggccctggcactgttcttttgggcttggagatgagagatccccagagagcatcaaaggaaaaagaaatcactgttcatttctggaatggcaaagctgctaaagtgcccctaggtggggtccagtcggtgtccctgaccatctggaagaaggctgtggagaggctgcacaagtctttcaccagggagcaccccaggccccttcactgggccccttgctgctctctgctagggccaatcactgggcgcatcactaatgagcttcctccggatgctccattcctgtgccctctctgccaccatcatgcctgctgccagctactgtgccagggctgcctctgtggctgcccgccatgtggcacgacttggtggcctctaaccaggacctcagaagtcatggccagagaacttccagagttggagcccacagcacagcttttgcccctggaaggtcctaaagaggagaaagtagcaatgcacgctcccctggctgtttcttcctcctcatcctcctcctgtgaacaagacggtgtggagaatgatctggagatgggccctccccagagactgatggtgaacagtgcagtcaacacagatcccatctttcttgagatgcctctgagacagagtggcctctgccagcctgagtggaggtattggaagagaaacgggcctgagccatgccttgggaagccaggtaaagaataaacatggtaaatattcgaggagagttatacagagtggctgacaaggccttcttcaacggaaggaggcagaggacaggccacaggtaacagtcaaataaccaccagtatctccaccccacgaagacctccctgcagataagcagcaggaaggcacctgttgtgagggctataggaatgtgggatcctgccctggggctccctgccagggccctggtgaaactgctttaagatgcctcttccgtggaagagggggtcagcctgctttgggcaaatgtgtccacagccactctgccaccttcccataaagcctagttgtacatgagtgacattttgtttcacctcttaataaaaatgaattctcttca

SEQ ID NO: 118000 - DNA, 593 bp, Homo sapiens
  Payload ID: 3089
  Gene Symbol: C11orf16
  Gene Name: chromosome 11 open reading frame 16
  ENST ID: ENST00000528830
  CDS Start-End: 69-455
gtcagaaggagcctgaggctgaggtggaggctgggagtttggggctgtgggtggatcctctgaaggccatggaatcctccacggggcccaggatgcctttgctcaaatactgcagcgtggccacaagcctgaaggcccctggctgggacggtgctgctccaccttgggacctctccttcacctacccctttgccctccaagcaccctggctcaccgggcacaagccccttgcaaggcatgcctcttcttgcccatgtctccacgttgccgacccagcatggcaggggcctggctggctgggaagagctggagatgctgccaacacatgggtcctagcaagaagggaagcagatggtttttactaccgggcccaaataaaggccactcccgagggcagtgctgagggcagctctgtggccacaatcgctccttgcctacatgagcctcataggtgaacaaccatcctgttggtcttggacacatccctggttggtcttggacacaggagcgacgcttcttgggggtgctggaaggaggagattgcattgagaaaaggtccagggaggacccagctggagagacagggggtcctg

SEQ ID NO: 118001 - DNA, 2956 bp, Homo sapiens
  Payload ID: 3090
  Gene Symbol: C11orf21
  Gene Name: chromosome 11 open reading frame 21
  Uniprot ID: Q9P2W6
  ENST ID: ENST00000381153
  CDS Start-End: 253-651
aggaggtaggctgcatccgcccctctgtctgtctgtcaacatcgccctaggaccgagctgctgggtgccccggaagaagggcaggcaggaaggggaggggcagtgaggttggctccccccaccacctcaccctggtgcccccagcccagcccaagacaccagggcatttgctgacatctgaggcccttcccaggaagacatggcctcgttcttggtgtggccactgaggacggcgctgagagggggaaagtcatgggcaggacctggtgtgggatgtggaggagacggcgcccggggaggaggagcgctgtgcccaggtggcctcacttgtcatctcaaagtggcgtcgaaccccctgacaggtggacgggaacccccggctggccctccagagaccaggaggcccctggctcaatgatgccacctgcagctgcccaaccctccgcccatggtgcccttgttccacctgccaccgctcatgaacctgtggatcacccagctctgcactggcttgcctgctgctgctgtctcagtttacctgggcagttgcccctggctatccggctgggatgggacttggacttagaagcaggcccctcctctggaaagctgtgtcctcgggccaggaggtggcagcctctaccttcctgagacagggacccttttctgtccatcagaggacagctgtatgaagacacagagagaaggcagccatctgtaagccaggaagagagccctcaccaagactggaatcagcagcaccttgatattggacttccagcctccagaactgcaagaaataagcacctgctgtttacatgcccagcctgcagtgcttccttatggcagattggagctaactgagacagctcccagcactcattcattcattcattcattcactcacctcatgtctactaaacagctctgggctggctctgggaagcagtgagtcacacacactgcccccagcaacgtgtgaaatatgtttagagacagtgggctacagcggaaagggtagatgccctgagaaccccagcggtgctggtcagaagcacaggccttgttgggctgaggctggcatggggtgaacctggggagcctcgggggcagaggtgatagatgtggggtgtttcaaggcagtgagacaaagaagggagatgggtggtgccccccaatgccaggcttcaccagcctcccaacacacgagtgttcacccgcctggatgagacacctctgtggacttgggagtgaaggcagtgaatttgggcaatgctggaggccgtgcaggtgggaggtgggacaggggcaagaggccggggcccaggcaggagctgacagcccaccagtggtgctcccctgagaagcaacctcagtgggtggcttggggtctgctgggctgtccccacactgacaccctggctgcagggcccccctgtgtccccagtgaggggtctcgggagctgtgtgtcctactcagggccatccctgcagcccatgctctctgggtgaccagttgccagcagtgtcccccctgccttgggcggaggctgaggaccccagggtgggagggaaggtgcggtgggggctcagccaatgctgcccagcctgagggtccctcacatgtgggccgcacccctgcgtcagccggagtgatctctgcttagggtggtttgaggtgagttctgatatctcaaacaccagcatcagggccagggcagacaaaataagagtgagctggtcaggggtgtcccagttgggagctcgctcacagtctttaaggaggcagggcacagcccagtgggggtggccacgaggccccgggcctgtggctgagatggcaactggcaccggcagtgattggaacagtccagcccatggagccctgtggccttggccggtggctcacggtgccacgggagctggagcaatgggtggcctcccttgcctggtgcctgagtgaaggaggactgggtgcccctgaggaaggaccttgccatactcctacaaatttacattattcttctttccccagtctcccctcagggacctgcagccatttgctggggtggctagtggaaagggggatcatcagactcagggggattactggactctaactctaacctgacacccactcctggggacacaaacacccatcggatctaatagtcagaggaggggcgtatggaggtcagtgggctcacggagttctagctcaggtccaaccctcggtgggtgcagaggtcacttccctagcctcagatgggtgagtaaacagacgtatgtggcagccagcagagcccccacatttgttccctgacctgagggtgggggctactatgctgggaaaggccaggtggaagccattggggtgaactctgcctaggaaaattgtcagtcaaaagcaacctgcagccctggagggactgcaaaggtcagtgccgccatcgaggacttggaagatgcagggtggtgacccccactgcagcctcgttccactcgtctaattggcttgtgtggaagacaggggggtcccggagaaagaaggacagtgaatcctggtaaacttaaccaggactccaattgcaactgctgttccagatatgactactgatcactggggcaaatcaaagcatccccggacacctggtctacagccattgatctggtgaaagctttaatttttaatatagattttattttttagagcagtttcatgtttacagagaaattgagcatatttgagagtcctcatatagcatctctccctacacacagtttcccttattattcatatcttgaattactgtgatacatctttgcaattgatgaaccaatattgacctagtcattgatcaggttacatgagggttcactcttcttgttgtacatgctgtgagttcgggcaaatgtgtaatggcatatctccactattacagtgtcacacagaatt

SEQ ID NO: 118002 - DNA, 1366 bp, Homo sapiens
  Payload ID: 3090
  Gene Symbol: C11orf21
  Gene Name: chromosome 11 open reading frame 21
  ENST ID: ENST00000456145
  CDS Start-End: 53-589
agcccaagacaccagggcatttgctgacatctgaggcccttcccaggaagacatggcctcgttcttggtgtggccactgaggacggcgctgagagggggaaagtcatgggcaggacctggtgtgggatgtggaggagacggcgcccggggaggaggagaattgtctctctccaaccttgacctccctggagctggtgaggcgggcctggagcaccacccgcttctgggacacctcttcatcagcgctgtgcccaggtggcctcacttgtcatctcaaagtggcgtcgaaccccctgacaggtggacgggaacccccggctggccctccagagaccaggaggcccctggctcaatgatgccacctgcagctgcccaaccctccgcccatggtgcccttgttccacctgccaccgctcatgaacctgtggatcacccagctctgcactggcttgcctgctgctgctgtctcagtttacctgggcagttgcccctggctatccggctgggatgggacttggacttagaagcaggcccctcctctggaaagctgtgtcctcgggccaggaggtggcagcctctaccttcctgagacagggacccttttctgtccatcagaggacagctgtatgaagacacagagagaaggcagccatctgtaagccaggaagagagccctcaccaagactggaatcagcagcaccttgatattggacttccagcctccagaactgcaagaaataagcacctgctgtttacatgcccagcctgcagtgcttccttatggcagattggagctaactgagacagctcccagcactcattcattcattcattcattcactcacctcatgtctactaaacagctctgggctggctctgggaagcagtgagtcacacacactgcccccagcaacgtgtgaaatatgtttagagacagtgggctacagcggaaagggtagatgccctgagaaccccagcggtgctggtcagaagcacaggccttgttgggctgaggctggcatggggtgaacctggggagcctcgggggcagaggtgatagatgtggggtgtttcaaggcagtgagacaaagaagggagatgggtggtgccccccaatgccaggcttcaccagcctcccaacacacgagtgttcacccgcctggatgagacacctctgtggacttgggagtgaaggcagtgaatttgggcaatgctggaggccgtgcaggtgggaggtgggacaggggcaagaggccggggcccaggcaggagctgacagcccaccagtggtgctcccctgagaagcaacctcagtgggtggcttggggtctgctgggctgtccccacactgacaccctggctgcag

SEQ ID NO: 118003 - DNA, 2063 bp, Homo sapiens
  Payload ID: 3091
  Gene Symbol: C11orf24
  Gene Name: chromosome 11 open reading frame 24
  Uniprot ID: Q96F05
  ENST ID: ENST00000304271
  CDS Start-End: 404-1753
cccggagctgcctgggttgcgctgccggccacgtccccgcgccgggcctcaggctccttcctactgtccgagggccaccaggccgccgggggcctgctgcgcccggatgcgtctgttactagagtggagagtctaccttcgtctcacatgtgccacaaaggatggcatggcccgggagtgccccaccacgtggctttcaccccctgcaaagccagacttcgcccagcgacacagtgtcaagcccacagctctccaaggaggaagatggtccaggctgggagcatccccttagcagcagcctctgatcccttggccaagcaggagggaaccattagcagcctgaggagctggctggctgggagcctcggggaccgcccagccttgctcccagctcacccacaagatgtggacagctcttgtgctcatttggattttctccttgtccttatctgaaagccatgcggcatccaacgatccacgcaactttgtccctaacaaaatgtggaagggattagtcaagaggaatgcatctgtggaaacagttgataataaaacgtctgaggatgtaaccatggcagcagcttctcctgtcacattgaccaaagggacttcggcagcccacctcaactctatggaagtcacaacagaggacacaagcaggacagatgtgagtgaaccagcaacttcaggaggtgcagctgatggtgtgacctccattgctcccacggctgtggcctccagtacgactgcggcctccattacgactgcggcctccagtatgactgtggcctccagtgctcccacgactgcagcctccagtacaactgtggcctccattgctcccacgactgcagcctccagtatgactgcggcctccagcactcccatgacacttgcactccccgcgcccacgtccacttccacagggcggaccccgtccactaccgccactgggcatccatctctcagcacagccctcgcacaagtgccaaagagcagcgcgttgccaagaacagcaaccctggccacattggccacacgtgctcagactgtagcgaccacagcaaacacaagcagccccatgagcactcgtccaagtccttccaagcacatgcccagtgacaccgcggcaagccctgtaccccctatgcgtccccaagcacaaggtcccattagccaggtgtcagtggaccagcctgtggttaacacaacaaataaatccacacccatgccctcaaacacaaccccagagcccgcccccacccccacagtggtgaccaccaccaaggcacaagccagggagccaactgccagcccagtgccagtacctcacaccagcccaatccctgagatggaggccatgtcccccacgacacagccaagccccatgccatatacccagagggccgctgggccaggcacatcccaggcaccggagcaggtagagactgaagccacaccaggtactgattccactgggccaacacccaggagctcagggggcactaagatgccagccacggactcgtgccagcccagcacccaaggccagtacatggtggtcaccactgagcccctcacccaggccgtggtagacaaaactctccttctggtggtgctgttactcggggtgacccttttcatcacagtcttggttttgtttgccctgcaggcctatgagagctacaagaagaaggactacacccaggtggactacttaatcaacgggatgtatgcggactcagaaatgtgaggggggcgggggcctggcgggaggcctggccccttcctcgtcctttccttttgcctttgagaccaaaccaagtgcttccaaattcttttggtgcaattgaggagatatgccagatgcttaaacacatttaattgctgtcagattaattccatgatcactaaagagttgctgcttttttcatatttatttttgtaaatgattctgtgcccaggagcagctgggggttccacctcagggtggggcgggcaggaccccgtctccccaggtgtcggagcctgacctgaattaaagtactgactgctcgccacaa

SEQ ID NO: 118004 - DNA, 980 bp, Homo sapiens
  Payload ID: 3091
  Gene Symbol: C11orf24
  Gene Name: chromosome 11 open reading frame 24
  ENST ID: ENST00000533310
  CDS Start-End: 600-944
gttgcgctgccggccacgtccccgcgccgggcctcaggctccttcctactgtccgagggccaccaggccgccgggggcctgctgcgcccgggtaaggggctcgcactgccgtccgggtagctgctgtcagggctccctgactggcttgggactgagagacagaggttggggggcaggaggagggttggatgggggcacgaggggcagtgggagagtgagtggggctgagagaggcaggaggaacgggacaggaggagcggcggatggggcacgcacagagtgcaagacgctgagcaatgcagatgcgtctgttactagagtggagagtctaccttcgtctcacatgtgccacaaaggatggcatggcccgggagtgccccaccacgtggctttcaccccctgcaaagccagacttcgcccagcgacacagtgtcaagcccacagctctccaaggaggaagatggtccaggctgggagcatccccttagcagcagcctctgatcccttggccaagcaggagggaaccattagcagcctgaggagctggctggctgggagcctcggggaccgcccagccttgctcccagctcacccacaagatgtggacagctcttgtgctcatttggattttctccttgtccttatctgaaagccatgcggcatccaacgatccacgcaactttgtccctaacaaaatgtggaagggattagtcaagaggaatgcatctgtggaaacagttgataataaaacgtctgaggatgtaaccatggcagcagcttctcctgtcacattgaccaaagggacttcggcagcccacctcaactctatggaagtcacaacagaggacacaagcaggacagatgcctatgagagctacaagaagaaggactacacccaggtggactacttaatcaacgggatgtatgcggactcagaaatgtgaggggggcgggggcctggcgggaggcctggccccttc

SEQ ID NO: 118005 - DNA, 533 bp, Homo sapiens
  Payload ID: 3091
  Gene Symbol: C11orf24
  Gene Name: chromosome 11 open reading frame 24
  ENST ID: ENST00000527280
  CDS Start-End: 458-533
tgggcggggcccgggcagggcgcgctgcccggagctgcctgggttgcgctgccggccacgtccccgcgccgggcctcaggctccttcctactgtccgagggccaccaggccgccgggggcctgctgcgcccgggaatgtggactttttttcaaactctagatgcgtctgttactagagtggagagtctaccttcgtctcacatgtgccacaaaggatggcatggcccgggagtgccccaccacgtggctttcaccccctgcaaagccagacttcgcccagcgacacagtgtcaagcccacagctctccaaggaggaagatggtccaggctgggagcatccccttagcagcagcctctgatcccttggccaagcaggagggaaccattagcagcctgaggagctggctggctgggagcctcggggaccgcccagccttgctcccagctcacccacaagatgtggacagctcttgtgctcatttggattttctccttgtccttatctgaaagccatgcggcatccaacgatccac

SEQ ID NO: 118006 - DNA, 5508 bp, Homo sapiens
  Payload ID: 3092
  Gene Symbol: C11orf30
  Gene Name: chromosome 11 open reading frame 30
  Uniprot ID: Q7Z589
  ENST ID: ENST00000334736
  CDS Start-End: 144-4112
gtcgccatcttgccccttcagaggcaccgcaaacaaacccaattcctggtgtcccctagtcttggcggaggagccttttagatgagccccgaaaggccgggcagggaggacaagctctttggggctaccaaacagaagcagcaatgcctgttgtgtggccaacccttctggatctcagcagggatgaatgcaaaagaattcttcgaaaattggaattggaggcatatgctggagttatcagtgcacttcgggcacagggggatctcaccaaggaaaagaaagatcttcttggagaactatcaaaagttcttagcatctcaacagaacgccaccgtgctgaagttcggagagcagtaaacgatgaacggttaacaacaattgcacataatatgtctggacctaatagctcttcagaatggtccattgaaggtcgtcgattggtaccactgatgccccggctcgttccccaaaccgcctttactgtaacagctaatgctgttgctaatgcagctatccagcataatgcatctcttccagtgcctgcagaaacaggaagcaaggaagtggtttgctattcctacacaagtaccacgtcaaccccaacctctacccctgttccaagtggcagcatagcaacggttaagtctccaagacctgccagtcctgcctccaatgtagttgtcttgccaagtggaagtactgtttatgtcaaaagtgtaagctgttcagatgaagatgaaaaacccagaaaacgaaggcgaacaaactcttccagctcctctcctgttgttctaaaggaagttccaaaggccgttgttccagtctcaaagacgatcactgtgcctgtgagtggtagtcccaagatgagcaacatcatgcagagcattgccaactccttaccaccccacatgtctcctgtaaaaataaccttcactaaaccatcaacacagacaacaaacacaacaacacagaaggttattatagtcaccacatcaccaagctcaaccttcgtgcccaacattctctccaaatcccataactatgcagcagtcactaagcttgtaccaacgtcagtcattgcttctacaacccagaagccaccagttgttataactgcttcacagtcctctctggtcagtaatagcagcagtggcagcagcagttctacaccatcacctattcctaatacagttgcagtaacagctgtggtgtcctctacaccatctgtggtcatgtcaacagtagcacaaggtgtatctacatcagcaatcaaaatggcatcaaccagacttccttcccccaaaagcttagtgagtgccccaactcagattcttgcacagttccctaaacaacatcaacagtctcctaagcagcagttatatcaagtgcaacagcagacacagcaacaagtggcccagccttctccagtatctcatcagcaacagcctcagcagtctcctttgccacctggtattaaacctaccatccaaatcaaacaggagtcaggtgttaaaatcatcacacaacaggttcaaccaagtaaaatcttacccaaaccagtgacagcaactctacccaccagtagcaattcccctattatggtggttagcagtaatggtgcaattatgacaactaaactggtaaccactcctactggcacacaagcaacctatacccggccaacagtgagcccatccattggtcggatggctgcaacccctggagctgcaacctatgtgaaaactacgagtggtagcatcattacagtagtacccaaatcattagctaccttggggggcaagataattagcagtaatatagtttctggaacgactaccaaaatcactacaatcccaatgacttccaagcccaacgtgattgttgtacaaaagactacaggaaaaggaacgaccattcaaggcctcccgggcaaaaatgttgtcacaacgttgctaaatgctggaggagaaaagactattcagacagtgccaacaggagcaaagccagctatccttactgctacaagacccatcaccaaaatgattgtaacgcagccaaaaggaataggttctacagttcaaccagcagctaaaatcatcccaacaaaaattgtttatgggcagcaagggaaaacgcaggttcttattaaacccaaaccagtgacttttcaagcgacagttgttagtgaacaaacaagacagctagtaacagaaacattacagcaagcatccagggtagcagaggctggtaattcatctattcaggaaggaaaagaagaaccacagaattatacagatagtagttcctcttctacagagtcctcccagagttcccaagattcccagcctgtagttcatgtaattgcttcccggcgtcaggattggtcagaacatgagattgcaatggagactagccctaccataatttatcaggatgtatccagtgaatcacaatcagctacttcaacaatcaaagctctgttagaactccaacagacaacagtaaaggaaaaattggaatctaaaccaagacaacccactattgacctgagtcaaatggcagtgcctattcagatgacccaggaaaagagacattctcctgagagtccatcaattgctgtggtagagtcagaactagtagctgaatacatcactactgaacgcactgatgaggggacagaggttgcttttccccttctagtcagccatcgctcccagccccaacagccttcccagccccagcggaccctgctccagcatgtggctcagtcacagaccgcaacacagacttcggtggtggtgaagtccatcccagcatcttcccctggagcaatcacccacattatgcagcaggcattaagcagtcacactgcttttaccaaacacagcgaggaacttggaactgaggagggcgaggttgaagagatggacactttagaccctcagacaggtctgttttaccgatctgccctgactcagtcacagtcagctaaacagcagaaacttagccagcccccgctggaacagactcagctgcaagtgaaaactctgcagtgcttccagactaaacagaagcagaccatccacctgcaggcagaccagctccagcacaaactcccgcaaatgccccagctttccatcaggcatcaaaaactcacccctctccagcaagaacaagcacagcccaagccagatgtacagcacacacagcatcccatggtggccaaagacaggcagcttcctaccttaatggcacagcccccgcaaactgtagtacaggtgcttgcagtgaaaaccacgcagcagctccctaaactgcagcaggctccgaaccaaccaaaaatctacgtgcaaccccaaaccccccagagccaaatgtcgctcccagcttcttcagagaaacagacggcaagccaggtggagcagccaattataacccaaggatcctctgttacaaagataacttttgaggggcgccagcctcccacagttacaaagataactggtggcagttctgtgcctaagctgacatcaccagttacaagcatatctcccattcaggcctctgagaagacagcagtgtctgacattttgaaaatgtctttgatggaagctcagattgatacaaatgtagaacatatgatagtggatcccccaaagaaggctcttgccactagcatgctcactggtgaagcaggatcattaccctccacccacatggtggtggcagggatggcgaattccactccccagcaacagaaatgtagagagtcctgttcgagtccatccactgttggctcttccctaacgacaaggaaaattgatccaccagcagtgcctgcgacaggccagttcatgcgtattcagaatgtaggccaaaagaaagctgaagagagtccagcagaaattatcatccaggctattcctcagtatgctattccttgtcactccagctccaatgtggtggtggagcccagtgggcttcttgagctaaacaacttcactagtcaacagctggatgatgaggagacagcaatggagcaggacatagacagtagcacggaggatggaactgaacccagcccttctcagagctctgctgaacggtcctagtgtttggacacaatagtgcactttaaaacctgcttggttaccaagtgtccagggaaacccttgtattttgatgactaaaaagagcactttgcccgtacttaggctgtggaccctaaaacagcagtgtttcaacaagatgttgctgcaggagcagctttttaaaacaagataaaactcacaggggaatgtacttttttaaaaaaaaatgaaaaagaaaaaaaaagctgcacatttacagtgacttaagacctggtcttctttctctgttggatcatggccggtgaaacagttttgtcttgcagtggaaagagacttcctgtgaatgtttctcaactggtttctactgagcaaaataccatctaaaaggagaatgtgaatagttgtattttgaaatgatgtgtcaggaaaagttttttaaaaacttgtatgtttttgcaaatccctggaagtgttgaattggttaaaattttacattttctcagttcataattagtttataaacacctagaataatactggcattaaagaatccttgttggatggtagaaatcagatccctaaccagtgggaggtactttttgggtggcttgtgcattcttatcagttgtgtgctaatttattgtattgttcctttgtgctctaagcagcacacttgccttctatttatttaagtgtaaacatttcaaagcaggccgtactccttctgacaaatttcttgtaaaccaggattgcctacgctttccactgtcgtcgtctccccactttccctcttcctttaagaaaacttactaaaaaatgtttcattgcgaagcagaggaaaagaaacgttttcagacctaaaggaaatgtttggtcatgttaagaaaacaaattattcattcatatgatgctttcttaacgttgaaattgcacattcacattggactgagactttgaaaataacttttacatacttttgtttaagcccctttgaaatgtataaaaagttcatttacagttctaaatgtaatgtttttaagccttctatctttttaggacacagtttgtttaagcaatatgttttggtcttgtgatcactgtctgtcacaagtagagtgaaaggggtaagggggtgggagggtaagagttttgacaagttgtggcaaaggaaactatacttttcatttttaaaaatgtaaatagaaaagtttttaacggttttatatagatttcactataaataagcattttaagactgacaaatgttgaactgtacatacatttatcagcataactgcccagtttttttggtgctgaagtactgtaagtagaattcatcaacggtctcctaatttttgcatctacatctggggggaaaaagctgtgatactatagttaataaattcccactagagtg

SEQ ID NO: 118007 - DNA, 4015 bp, Homo sapiens
  Payload ID: 3092
  Gene Symbol: C11orf30
  Gene Name: chromosome 11 open reading frame 30
  ENST ID: ENST00000524490
  CDS Start-End: 144-3818
gtcgccatcttgccccttcagaggcaccgcaaacaaacccaattcctggtgtcccctagtcttggcggaggagccttttagatgagccccgaaaggccgggcagggaggacaagctctttggggctaccaaacagaagcagcaatgcctgttgtgtggccaacccttctggatctcagcagggatgaatgcaaaagaattcttcgaaaattggaattggaggcatatgctggagttatcagtgcacttcgggcacagggggatctcaccaaggaaaagaaagatcttcttggagaactatcaaaagttcttagcatctcaacagaacgccaccgtgctgaagttcggagagcagtaaacgatgaacggttaacaacaattgcacataatatgtctggacctaatagctcttcagaatggtccattgaaggtcgtcgattggtaccactgatgccccggctcgttccccaaaccgcctttactgtaacagctaatgctgttgctaatgcagctatccagcataatgcatctcttccagtgcctgcagaaacaggaagcaaggaagtagtggtttgctattcctacacaagtaccacgtcaaccccaacctctacccctgttccaagtggcagcatagcaacggttaagtctccaagacctgccagtcctgcctccaatgtagttgtcttgccaagtggaagtactgtttatgtcaaaagtgtaagctgttcagatgaagatgaaaaacccagaaaacgaaggcgaacaaactcttccagctcctctcctgttgttctaaaggaagttccaaaggccgttgttccagtctcaaagacgatcactgtgcctgtgagtggtagtcccaagatgagcaacatcatgcagagcattgccaactccttaccaccccacatgtctcctgtaaaaataaccttcactaaaccatcaacacagacaacaaacacaacaacacagaaggttattatagtcaccacatcaccaagctcaaccttcgtgcccaacattctctccaaatcccataactatgcagcagtcactaagcttgtaccaacgtcagtcattgcttctacaacccagaagccaccagttgttataactgcttcacagtcctctctggtcagtaatagcagcagtggcagcagcagttctacaccatcacctattcctaatacagttgcagtaacagctgtggtgtcctctacaccatctgtggtcatgtcaacagtagcacaaggtgttaaaatcatcacacaacaggttcaaccaagtaaaatcttacccaaaccagtgacagcaactctacccaccagtagcaattcccctattatggtggttagcagtaatggtgcaattatgacaactaaactggtaaccactcctactggcacacaagcaacctatacccggccaacagtgagcccatccattggtcggatggctgcaacccctggagctgcaacctatgtgaaaactacgagtggtagcatcattacagtagtacccaaatcattagctaccttggggggcaagataattagcagtaatatagtttctggaacgactaccaaaatcactacaatcccaatgacttccaagcccaacgtgattgttgtacaaaagactacaggaaaaggaacgaccattcaaggcctcccgggcaaaaatgttgtcacaacgttgctaaatgctggaggagaaaagactattcagacagtgccaacaggagcaaagccagctatccttactgctacaagacccatcaccaaaatgattgtaacgcagccaaaaggaataggttctacagttcaaccagcagctaaaatcatcccaacaaaaattgtttatgggcagcaagggaaaacgcaggttcttattaaacccaaaccagtgacttttcaagcgacagttgttagtgaacaaacaagacagctagtaacagaaacattacagcaagcatccagggtagcagaggctggtaattcatctattcaggaaggaaaagaagaaccacagaattatacagatagtagttcctcttctacagagtcctcccagagttcccaagattcccagcctgtagttcatgtaattgcttcccggcgtcaggattggtcagaacatgagattgcaatggagactagccctaccataatttatcaggatgtatccagtgaatcacaatcagctacttcaacaatcaaagctctgttagaactccaacagacaacagtaaaggaaaaattggaatctaaaccaagacaacccactattgacctgagtcaaatggcagtgcctattcagatgacccaggaaaagagacattctcctgagagtccatcaattgctgtggtagagtcagaactagtagctgaatacatcactactgtcagccatcgctcccagccccaacagccttcccagccccagcggaccctgctccagcatgtggctcagtcacagaccgcaacacagacttcggtggtggtgaagtccatcccagcatcttcccctggagcaatcacccacattatgcagcaggcattaagcagtcacactgcttttaccaaacacagcgaggaacttggaactgaggagggcgaggttgaagagatggacactttagaccctcagacaggtctgttttaccgatctgccctgactcagtcacagtcagctaaacagcagaaacttagccagcccccgctggaacagactcagctgcaagtgaaaactctgcagtgcttccagactaaacagaagcagaccatccacctgcaggcagaccagctccagcacaaactcccgcaaatgccccagctttccatcaggcatcaaaaactcacccctctccagcaagaacaagcacagcccaagccagatgtacagcacacacagcatcccatggtggccaaagacaggcagcttcctaccttaatggcacagcccccgcaaactgtagtacaggtgcttgcagtgaaaaccacgcagcagctccctaaactgcagcaggctccgaaccaaccaaaaatctacgtgcaaccccaaaccccccagagccaaatgtcgctcccagcttcttcagagaaacagacggcaagccaggtggagcagccaattataacccaaggatcctctgttacaaagataacttttgaggggcgccagcctcccacagttacaaagataactggtggcagttctgtgcctaagctgacatcaccagttacaagcatatctcccattcaggcctctgagaagacagcagtgtctgacattttgaaaatgtctttgatggaagctcagattgatacaaatgtagaacatatgatagtggatcccccaaagaaggctcttgccactagcatgctcactggtgaagcaggatcattaccctccacccacatggtggtggcagggatggcgaattccactccccagcaacagaaatgtagagagtcctgttcgagtccatccactgttggctcttccctaacgacaaggaaaattgatccaccagcagtgcctgcgacaggccagttcatgcgtattcagaatgtaggccaaaagaaagctgaagagagtccagcagaaattatcatccaggctattcctcagtatgctattccttgtcactccagctccaatgtggtggtggagcccagtgggcttcttgagctaaacaacttcactagtcaacagctggatgatgaggagacagcaatggagcaggacatagacagtagcacggaggatggaactgaacccagcccttctcagagctctgctgaacggtcctagtgtttggacacaatagtgcactttaaaacctgcttggttaccaagtgtccagggaaacccttgtattttgatgactaaaaagagcactttgcccgtacttaggctgtggaccctaaaacagcagtgtttcaacaagatgttgctgcaggagcagctttttaaaacaagataaaactcacaggggaatgtactttttt

SEQ ID NO: 118008 - DNA, 4074 bp, Homo sapiens
  Payload ID: 3092
  Gene Symbol: C11orf30
  Gene Name: chromosome 11 open reading frame 30
  Uniprot ID: Q7Z589
  ENST ID: ENST00000525919
  CDS Start-End: 40-4011
ggaggacaagctctttggggctaccaaacagaagcagcaatgcctgttgtgtggccaacccttctggatctcagcagggatgaatgcaaaagaattcttcgaaaattggaattggaggcatatgctggagttatcagtgcacttcgggcacagggggatctcaccaaggaaaagaaagatcttcttggagaactatcaaaagttcttagcatctcaacagaacgccaccgtgctgaagttcggagagcagtaaacgatgaacggttaacaacaattgcacataatatgtctggacctaatagctcttcagaatggtccattgaaggtcgtcgattggtaccactgatgccccggctcgttccccaaaccgcctttactgtaacagctaatgctgttgctaatgcagctatccagcataatgcatctcttccagtgcctgcagaaacaggaagcaaggaagtagtggtttgctattcctacacaagtaccacgtcaaccccaacctctacccctgttccaagtggcagcatagcaacggttaagtctccaagacctgccagtcctgcctccaatgtagttgtcttgccaagtggaagtactgtttatgtcaaaagtgtaagctgttcagatgaagatgaaaaacccagaaaacgaaggcgaacaaactcttccagctcctctcctgttgttctaaaggaagttccaaaggccgttgttccagtctcaaagacgatcactgtgcctgtgagtggtagtcccaagatgagcaacatcatgcagagcattgccaactccttaccaccccacatgtctcctgtaaaaataaccttcactaaaccatcaacacagacaacaaacacaacaacacagaaggttattatagtcaccacatcaccaagctcaaccttcgtgcccaacattctctccaaatcccataactatgcagcagtcactaagcttgtaccaacgtcagtcattgcttctacaacccagaagccaccagttgttataactgcttcacagtcctctctggtcagtaatagcagcagtggcagcagcagttctacaccatcacctattcctaatacagttgcagtaacagctgtggtgtcctctacaccatctgtggtcatgtcaacagtagcacaaggtgtatctacatcagcaatcaaaatggcatcaaccagacttccttcccccaaaagcttagtgagtgccccaactcagattcttgcacagttccctaaacaacatcaacagtctcctaagcagcagttatatcaagtgcaacagcagacacagcaacaagtggcccagccttctccagtatctcatcagcaacagcctcagcagtctcctttgccacctggtattaaacctaccatccaaatcaaacaggagtcaggtgttaaaatcatcacacaacaggttcaaccaagtaaaatcttacccaaaccagtgacagcaactctacccaccagtagcaattcccctattatggtggttagcagtaatggtgcaattatgacaactaaactggtaaccactcctactggcacacaagcaacctatacccggccaacagtgagcccatccattggtcggatggctgcaacccctggagctgcaacctatgtgaaaactacgagtggtagcatcattacagtagtacccaaatcattagctaccttggggggcaagataattagcagtaatatagtttctggaacgactaccaaaatcactacaatcccaatgacttccaagcccaacgtgattgttgtacaaaagactacaggaaaaggaacgaccattcaaggcctcccgggcaaaaatgttgtcacaacgttgctaaatgctggaggagaaaagactattcagacagtgccaacaggagcaaagccagctatccttactgctacaagacccatcaccaaaatgattgtaacgcagccaaaaggaataggttctacagttcaaccagcagctaaaatcatcccaacaaaaattgtttatgggcagcaagggaaaacgcaggttcttattaaacccaaaccagtgacttttcaagcgacagttgttagtgaacaaacaagacagctagtaacagaaacattacagcaagcatccagggtagcagaggctggtaattcatctattcaggaaggaaaagaagaaccacagaattatacagatagtagttcctcttctacagagtcctcccagagttcccaagattcccagcctgtagttcatgtaattgcttcccggcgtcaggattggtcagaacatgagattgcaatggagactagccctaccataatttatcaggatgtatccagtgaatcacaatcagctacttcaacaatcaaagctctgttagaactccaacagacaacagtaaaggaaaaattggaatctaaaccaagacaacccactattgacctgagtcaaatggcagtgcctattcagatgacccaggaaaagagacattctcctgagagtccatcaattgctgtggtagagtcagaactagtagctgaatacatcactactgaacgcactgatgaggggacagaggttgcttttccccttctagtcagccatcgctcccagccccaacagccttcccagccccagcggaccctgctccagcatgtggctcagtcacagaccgcaacacagacttcggtggtggtgaagtccatcccagcatcttcccctggagcaatcacccacattatgcagcaggcattaagcagtcacactgcttttaccaaacacagcgaggaacttggaactgaggagggcgaggttgaagagatggacactttagaccctcagacaggtctgttttaccgatctgccctgactcagtcacagtcagctaaacagcagaaacttagccagcccccgctggaacagactcagctgcaagtgaaaactctgcagtgcttccagactaaacagaagcagaccatccacctgcaggcagaccagctccagcacaaactcccgcaaatgccccagctttccatcaggcatcaaaaactcacccctctccagcaagaacaagcacagcccaagccagatgtacagcacacacagcatcccatggtggccaaagacaggcagcttcctaccttaatggcacagcccccgcaaactgtagtacaggtgcttgcagtgaaaaccacgcagcagctccctaaactgcagcaggctccgaaccaaccaaaaatctacgtgcaaccccaaaccccccagagccaaatgtcgctcccagcttcttcagagaaacagacggcaagccaggtggagcagccaattataacccaaggatcctctgttacaaagataacttttgaggggcgccagcctcccacagttacaaagataactggtggcagttctgtgcctaagctgacatcaccagttacaagcatatctcccattcaggcctctgagaagacagcagtgtctgacattttgaaaatgtctttgatggaagctcagattgatacaaatgtagaacatatgatagtggatcccccaaagaaggctcttgccactagcatgctcactggtgaagcaggatcattaccctccacccacatggtggtggcagggatggcgaattccactccccagcaacagaaatgtagagagtcctgttcgagtccatccactgttggctcttccctaacgacaaggaaaattgatccaccagcagtgcctgcgacaggccagttcatgcgtattcagaatgtaggccaaaagaaagctgaagagagtccagcagaaattatcatccaggctattcctcagtatgctattccttgtcactccagctccaatgtggtggtggagcccagtgggcttcttgagctaaacaacttcactagtcaacagctggatgatgaggagacagcaatggagcaggacatagacagtagcacggaggatggaactgaacccagcccttctcagagctctgctgaacggtcctagtgtttggacacaatagtgcactttaaaacctgcttggttaccaagtgtccagggaaacccttg

SEQ ID NO: 118009 - DNA, 653 bp, Homo sapiens
  Payload ID: 3092
  Gene Symbol: C11orf30
  Gene Name: chromosome 11 open reading frame 30
  ENST ID: ENST00000524451
  CDS Start-End: 1-653
ggagaaaagactattcagacagtgccaacaggagcaaagccagctatccttactgctacaagacccatcaccaaaatgattgtaacgcagccaaaaggaataggttctacagttcaaccagcagctaaaatcatcccaacaaaaattgtttatgggcagcaagggaaaacgcaggttcttattaaacccaaaccagtgacttttcaagcgacagttgttagtgaacaaacaagacagctagtaacagaaacattacagcaagcatccagggtagcagaggctggtaattcatctattcaggaaggaaaagaagaaccacagaattatacagatagtagttcctcttctacagagtcctcccagagttcccaagtcagccatcgctcccagccccaacagccttcccagccccagcggaccctgctccagcatgtggctcagtcacagaccgcaacacagacttcggtggtggtgaagtccatcccagcatcttcccctggagcaatcacccacattatgcagcaggcattaagcagtcacactgcttttaccaaacacagcgaggaacttggaactgaggagggcgaggttgaagagatggacactttagaccctcagacaggtctgttttaccgatctgccctgactcagtc

SEQ ID NO: 118010 - DNA, 6848 bp, Homo sapiens
  Payload ID: 3092
  Gene Symbol: C11orf30
  Gene Name: chromosome 11 open reading frame 30
  Uniprot ID: Q7Z589
  ENST ID: ENST00000529032
  CDS Start-End: 1-3969
atgcctgttgtgtggccaacccttctggatctcagcagggatgaatgcaaaagaattcttcgaaaattggaattggaggcatatgctggagttatcagtgcacttcgggcacagggggatctcaccaaggaaaagaaagatcttcttggagaactatcaaaagttcttagcatctcaacagaacgccaccgtgctgaagttcggagagcagtaaacgatgaacggttaacaacaattgcacataatatgtctggacctaatagctcttcagaatggtccattgaaggtcgtcgattggtaccactgatgccccggctcgttccccaaaccgcctttactgtaacagctaatgctgttgctaatgcagctatccagcataatgcatctcttccagtgcctgcagaaacaggaagcaaggaagtggtttgctattcctacacaagtaccacgtcaaccccaacctctacccctgttccaagtggcagcatagcaacggttaagtctccaagacctgccagtcctgcctccaatgtagttgtcttgccaagtggaagtactgtttatgtcaaaagtgtaagctgttcagatgaagatgaaaaacccagaaaacgaaggcgaacaaactcttccagctcctctcctgttgttctaaaggaagttccaaaggccgttgttccagtctcaaagacgatcactgtgcctgtgagtggtagtcccaagatgagcaacatcatgcagagcattgccaactccttaccaccccacatgtctcctgtaaaaataaccttcactaaaccatcaacacagacaacaaacacaacaacacagaaggttattatagtcaccacatcaccaagctcaaccttcgtgcccaacattctctccaaatcccataactatgcagcagtcactaagcttgtaccaacgtcagtcattgcttctacaacccagaagccaccagttgttataactgcttcacagtcctctctggtcagtaatagcagcagtggcagcagcagttctacaccatcacctattcctaatacagttgcagtaacagctgtggtgtcctctacaccatctgtggtcatgtcaacagtagcacaaggtgtatctacatcagcaatcaaaatggcatcaaccagacttccttcccccaaaagcttagtgagtgccccaactcagattcttgcacagttccctaaacaacatcaacagtctcctaagcagcagttatatcaagtgcaacagcagacacagcaacaagtggcccagccttctccagtatctcatcagcaacagcctcagcagtctcctttgccacctggtattaaacctaccatccaaatcaaacaggagtcaggtgttaaaatcatcacacaacaggttcaaccaagtaaaatcttacccaaaccagtgacagcaactctacccaccagtagcaattcccctattatggtggttagcagtaatggtgcaattatgacaactaaactggtaaccactcctactggcacacaagcaacctatacccggccaacagtgagcccatccattggtcggatggctgcaacccctggagctgcaacctatgtgaaaactacgagtggtagcatcattacagtagtacccaaatcattagctaccttggggggcaagataattagcagtaatatagtttctggaacgactaccaaaatcactacaatcccaatgacttccaagcccaacgtgattgttgtacaaaagactacaggaaaaggaacgaccattcaaggcctcccgggcaaaaatgttgtcacaacgttgctaaatgctggaggagaaaagactattcagacagtgccaacaggagcaaagccagctatccttactgctacaagacccatcaccaaaatgattgtaacgcagccaaaaggaataggttctacagttcaaccagcagctaaaatcatcccaacaaaaattgtttatgggcagcaagggaaaacgcaggttcttattaaacccaaaccagtgacttttcaagcgacagttgttagtgaacaaacaagacagctagtaacagaaacattacagcaagcatccagggtagcagaggctggtaattcatctattcaggaaggaaaagaagaaccacagaattatacagatagtagttcctcttctacagagtcctcccagagttcccaagattcccagcctgtagttcatgtaattgcttcccggcgtcaggattggtcagaacatgagattgcaatggagactagccctaccataatttatcaggatgtatccagtgaatcacaatcagctacttcaacaatcaaagctctgttagaactccaacagacaacagtaaaggaaaaattggaatctaaaccaagacaacccactattgacctgagtcaaatggcagtgcctattcagatgacccaggaaaagagacattctcctgagagtccatcaattgctgtggtagagtcagaactagtagctgaatacatcactactgaacgcactgatgaggggacagaggttgcttttccccttctagtcagccatcgctcccagccccaacagccttcccagccccagcggaccctgctccagcatgtggctcagtcacagaccgcaacacagacttcggtggtggtgaagtccatcccagcatcttcccctggagcaatcacccacattatgcagcaggcattaagcagtcacactgcttttaccaaacacagcgaggaacttggaactgaggagggcgaggttgaagagatggacactttagaccctcagacaggtctgttttaccgatctgccctgactcagtcacagtcagctaaacagcagaaacttagccagcccccgctggaacagactcagctgcaagtgaaaactctgcagtgcttccagactaaacagaagcagaccatccacctgcaggcagaccagctccagcacaaactcccgcaaatgccccagctttccatcaggcatcaaaaactcacccctctccagcaagaacaagcacagcccaagccagatgtacagcacacacagcatcccatggtggccaaagacaggcagcttcctaccttaatggcacagcccccgcaaactgtagtacaggtgcttgcagtgaaaaccacgcagcagctccctaaactgcagcaggctccgaaccaaccaaaaatctacgtgcaaccccaaaccccccagagccaaatgtcgctcccagcttcttcagagaaacagacggcaagccaggtggagcagccaattataacccaaggatcctctgttacaaagataacttttgaggggcgccagcctcccacagttacaaagataactggtggcagttctgtgcctaagctgacatcaccagttacaagcatatctcccattcaggcctctgagaagacagcagtgtctgacattttgaaaatgtctttgatggaagctcagattgatacaaatgtagaacatatgatagtggatcccccaaagaaggctcttgccactagcatgctcactggtgaagcaggatcattaccctccacccacatggtggtggcagggatggcgaattccactccccagcaacagaaatgtagagagtcctgttcgagtccatccactgttggctcttccctaacgacaaggaaaattgatccaccagcagtgcctgcgacaggccagttcatgcgtattcagaatgtaggccaaaagaaagctgaagagagtccagcagaaattatcatccaggctattcctcagtatgctattccttgtcactccagctccaatgtggtggtggagcccagtgggcttcttgagctaaacaacttcactagtcaacagctggatgatgaggagacagcaatggagcaggacatagacagtagcacggaggatggaactgaacccagcccttctcagagctctgctgaacggtcctagtgtttggacacaatagtgcactttaaaacctgcttggttaccaagtgtccagggaaacccttgtattttgatgactaaaaagagcactttgcccgtacttaggctgtggaccctaaaacagcagtgtttcaacaagatgttgctgcaggagcagctttttaaaacaagataaaactcacaggggaatgtacttttttaaaaaaaaatgaaaaagaaaaaaaaagctgcacatttacagtgacttaagacctggtcttctttctctgttggatcatggccggtgaaacagttttgtcttgcagtggaaagagacttcctgtgaatgtttctcaactggtttctactgagcaaaataccatctaaaaggagaatgtgaatagttgtattttgaaatgatgtgtcaggaaaagttttttaaaaacttgtatgtttttgcaaatccctggaagtgttgaattggttaaaattttacattttctcagttcataattagtttataaacacctagaataatactggcattaaagaatccttgttggatggtagaaatcagatccctaaccagtgggaggtactttttgggtggcttgtgcattcttatcagttgtgtgctaatttattgtattgttcctttgtgctctaagcagcacacttgccttctatttatttaagtgtaaacatttcaaagcaggccgtactccttctgacaaatttcttgtaaaccaggattgcctacgctttccactgtcgtcgtctccccactttccctcttcctttaagaaaacttactaaaaaatgtttcattgcgaagcagaggaaaagaaacgttttcagacctaaaggaaatgtttggtcatgttaagaaaacaaattattcattcatatgatgctttcttaacgttgaaattgcacattcacattggactgagactttgaaaataacttttacatacttttgtttaagcccctttgaaatgtataaaaagttcatttacagttctaaatgtaatgtttttaagccttctatctttttaggacacagtttgtttaagcaatatgttttggtcttgtgatcactgtctgtcacaagtagagtgaaaggggtaagggggtgggagggtaagagttttgacaagttgtggcaaaggaaactatacttttcatttttaaaaatgtaaatagaaaagtttttaacggttttatatagatttcactataaataagcattttaagactgacaaatgttgaactgtacatacatttatcagcataactgcccagtttttttggtgctgaagtactgtaagtagaattcatcaacggtctcctaatttttgcatctacatctggggggaaaaagctgtgatactatagttaataaattcccactagagtgacactgaagatttaaacacaagcattcataagatgcgctgatctctggtggttgtcactagttctgctaggtgataatgatttacccatagatggagctgttggatattattttattgtacaaattcatgtttaaaaaactttgtgactgtttctagttaagtaattttttaacctttcttgggtcatagacttctttggtaaactatgaactctcaccaaaaagatacacatgcaacatgttaaatacatgttagactttgcatacaattttaggggctcatgggcctctaagcctatccatgtattccaggttaagccctctgttatgatcaatccattacttacagattaagtttttataaaataaagtatcttttaaatattcatggatcaagtaacaagagcaaacttgaataaagttatgttctacatattttggcagcatagcatacctgtgtcccttgagaatttagccttcatatgtttctgcaattggaatggcaaataaaagtgctatcatctacatttttttaaagaattacaaatattaagaaattatcaagtgaaatttaaaatttttcttttaaaggtgttaattccaaatagagcatgcattcatttatttattcaacaaatattaattgagcatcttctgtatgacaagtagtattctgtgcactggggataccatagtgaacaaacaggaaatcctatccttatgaagtttataaacagggcttcctgctcatgaaatggatacaaggaatgaagacaggagaaaataagaacaatacttaggtttttttataaagtggatagatgatgatgccatatatggattttcagacatccctttactgaaagtcttagcattatatctattagtattccacatttaagtacataatttaaaagtaatttaaagtcatctctttgaaggatattaacaaattacaatgcaaatgctacagaatttttagaatcctaacaactattaggcagtgataagaaaaatccatttggcttaaagtaaactttaataagtgcctagtattgcagatgcagtttatggtgaacttagaggattaaaaaccaaagggggcttcattgagatattcacatgccataaactctcccatttaaagtataccgtttaatggttttagtatatccacagagttgggcaagccattaccacaatcaatttgagaacattttcattaatcacaaaagaaatcctgaaatgaaaccaccaccaccatcgctccagccctgggtggccactcctctactttctgcctcttatggatgtgccataagaaatgtggacatttcatataaatgagattatataatatgtggtcttttgtgacttctttcacttagcgtattttcaaggttcatccgtgttgtagaatgtgtcagtactacatttctttttatggccattccattgtgtgaaatatatcacattttgttta

SEQ ID NO: 118011 - DNA, 4116 bp, Homo sapiens
  Payload ID: 3092
  Gene Symbol: C11orf30
  Gene Name: chromosome 11 open reading frame 30
  Uniprot ID: Q7Z589
  ENST ID: ENST00000524767
  CDS Start-End: 40-4053
ggaggacaagctctttggggctaccaaacagaagcagcaatgcctgttgtgtggccaacccttctggatctcagcagggatgaatgcaaaagaattcttcgaaaattggaattggaggcatatgctggagttatcagtgcacttcgggcacagggggatctcaccaaggaaaagaaagatcttcttggagaactatcaaaagttcttagcatctcaacagaacgccaccgtgctgaagttcggagagcagtaaacgatgaacggttaacaacaattgcacataaaatgaatttatccttatatttgggtgaaagaccaagttacagtatgtctggacctaatagctcttcagaatggtccattgaaggtcgtcgattggtaccactgatgccccggctcgttccccaaaccgcctttactgtaacagctaatgctgttgctaatgcagctatccagcataatgcatctcttccagtgcctgcagaaacaggaagcaaggaagtagtggtttgctattcctacacaagtaccacgtcaaccccaacctctacccctgttccaagtggcagcatagcaacggttaagtctccaagacctgccagtcctgcctccaatgtagttgtcttgccaagtggaagtactgtttatgtcaaaagtgtaagctgttcagatgaagatgaaaaacccagaaaacgaaggcgaacaaactcttccagctcctctcctgttgttctaaaggaagttccaaaggccgttgttccagtctcaaagacgatcactgtgcctgtgagtggtagtcccaagatgagcaacatcatgcagagcattgccaactccttaccaccccacatgtctcctgtaaaaataaccttcactaaaccatcaacacagacaacaaacacaacaacacagaaggttattatagtcaccacatcaccaagctcaaccttcgtgcccaacattctctccaaatcccataactatgcagcagtcactaagcttgtaccaacgtcagtcattgcttctacaacccagaagccaccagttgttataactgcttcacagtcctctctggtcagtaatagcagcagtggcagcagcagttctacaccatcacctattcctaatacagttgcagtaacagctgtggtgtcctctacaccatctgtggtcatgtcaacagtagcacaaggtgtatctacatcagcaatcaaaatggcatcaaccagacttccttcccccaaaagcttagtgagtgccccaactcagattcttgcacagttccctaaacaacatcaacagtctcctaagcagcagttatatcaagtgcaacagcagacacagcaacaagtggcccagccttctccagtatctcatcagcaacagcctcagcagtctcctttgccacctggtattaaacctaccatccaaatcaaacaggagtcaggtgttaaaatcatcacacaacaggttcaaccaagtaaaatcttacccaaaccagtgacagcaactctacccaccagtagcaattcccctattatggtggttagcagtaatggtgcaattatgacaactaaactggtaaccactcctactggcacacaagcaacctatacccggccaacagtgagcccatccattggtcggatggctgcaacccctggagctgcaacctatgtgaaaactacgagtggtagcatcattacagtagtacccaaatcattagctaccttggggggcaagataattagcagtaatatagtttctggaacgactaccaaaatcactacaatcccaatgacttccaagcccaacgtgattgttgtacaaaagactacaggaaaaggaacgaccattcaaggcctcccgggcaaaaatgttgtcacaacgttgctaaatgctggaggagaaaagactattcagacagtgccaacaggagcaaagccagctatccttactgctacaagacccatcaccaaaatgattgtaacgcagccaaaaggaataggttctacagttcaaccagcagctaaaatcatcccaacaaaaattgtttatgggcagcaagggaaaacgcaggttcttattaaacccaaaccagtgacttttcaagcgacagttgttagtgaacaaacaagacagctagtaacagaaacattacagcaagcatccagggtagcagaggctggtaattcatctattcaggaaggaaaagaagaaccacagaattatacagatagtagttcctcttctacagagtcctcccagagttcccaagattcccagcctgtagttcatgtaattgcttcccggcgtcaggattggtcagaacatgagattgcaatggagactagccctaccataatttatcaggatgtatccagtgaatcacaatcagctacttcaacaatcaaagctctgttagaactccaacagacaacagtaaaggaaaaattggaatctaaaccaagacaacccactattgacctgagtcaaatggcagtgcctattcagatgacccaggaaaagagacattctcctgagagtccatcaattgctgtggtagagtcagaactagtagctgaatacatcactactgaacgcactgatgaggggacagaggttgcttttccccttctagtcagccatcgctcccagccccaacagccttcccagccccagcggaccctgctccagcatgtggctcagtcacagaccgcaacacagacttcggtggtggtgaagtccatcccagcatcttcccctggagcaatcacccacattatgcagcaggcattaagcagtcacactgcttttaccaaacacagcgaggaacttggaactgaggagggcgaggttgaagagatggacactttagaccctcagacaggtctgttttaccgatctgccctgactcagtcacagtcagctaaacagcagaaacttagccagcccccgctggaacagactcagctgcaagtgaaaactctgcagtgcttccagactaaacagaagcagaccatccacctgcaggcagaccagctccagcacaaactcccgcaaatgccccagctttccatcaggcatcaaaaactcacccctctccagcaagaacaagcacagcccaagccagatgtacagcacacacagcatcccatggtggccaaagacaggcagcttcctaccttaatggcacagcccccgcaaactgtagtacaggtgcttgcagtgaaaaccacgcagcagctccctaaactgcagcaggctccgaaccaaccaaaaatctacgtgcaaccccaaaccccccagagccaaatgtcgctcccagcttcttcagagaaacagacggcaagccaggtggagcagccaattataacccaaggatcctctgttacaaagataacttttgaggggcgccagcctcccacagttacaaagataactggtggcagttctgtgcctaagctgacatcaccagttacaagcatatctcccattcaggcctctgagaagacagcagtgtctgacattttgaaaatgtctttgatggaagctcagattgatacaaatgtagaacatatgatagtggatcccccaaagaaggctcttgccactagcatgctcactggtgaagcaggatcattaccctccacccacatggtggtggcagggatggcgaattccactccccagcaacagaaatgtagagagtcctgttcgagtccatccactgttggctcttccctaacgacaaggaaaattgatccaccagcagtgcctgcgacaggccagttcatgcgtattcagaatgtaggccaaaagaaagctgaagagagtccagcagaaattatcatccaggctattcctcagtatgctattccttgtcactccagctccaatgtggtggtggagcccagtgggcttcttgagctaaacaacttcactagtcaacagctggatgatgaggagacagcaatggagcaggacatagacagtagcacggaggatggaactgaacccagcccttctcagagctctgctgaacggtcctagtgtttggacacaatagtgcactttaaaacctgcttggttaccaagtgtccagggaaacccttg

SEQ ID NO: 118012 - DNA, 3798 bp, Homo sapiens
  Payload ID: 3092
  Gene Symbol: C11orf30
  Gene Name: chromosome 11 open reading frame 30
  Uniprot ID: Q7Z589
  ENST ID: ENST00000533248
  CDS Start-End: 40-3735
ggaggacaagctctttggggctaccaaacagaagcagcaatgcctgttgtgtggccaacccttctggatctcagcagggatgaatgcaaaagaattcttcgaaaattggaattggaggcatatgctggagttatcagtgcacttcgggcacagggggatctcaccaaggaaaagaaagatcttcttggagaactatcaaaagttcttagcatctcaacagaacgccaccgtgctgaagttcggagagcagtaaacgatgaacggttaacaacaattgcacataaaatgaatttatccttatatttgggtgaaagaccaagttacagtatgtctggacctaatagctcttcagaatggtccattgaaggtcgtcgattggtaccactgatgccccggctcgttccccaaaccgcctttactgtaacagctaatgctgttgctaatgcagctatccagcataatgcatctcttccagtgcctgcagaaacaggaagcaaggaagtggtttgctattcctacacaagtaccacgtcaaccccaacctctacccctgttccaagtggcagcatagcaacggttaagtctccaagacctgccagtcctgcctccaatgtagttgtcttgccaagtggaagtactgtttatgtcaaaagtgtaagctgttcagatgaagatgaaaaacccagaaaacgaaggcgaacaaactcttccagctcctctcctgttgttctaaaggaagttccaaaggccgttgttccagtctcaaagacgatcactgtgcctgtgagtggtagtcccaagatgagcaacatcatgcagagcattgccaactccttaccaccccacatgtctcctgtaaaaataaccttcactaaaccatcaacacagacaacaaacacaacaacacagaaggttattatagtcaccacatcaccaagctcaaccttcgtgcccaacattctctccaaatcccataactatgcagcagtcactaagcttgtaccaacgtcagtcattgcttctacaacccagaagccaccagttgttataactgcttcacagtcctctctggtcagtaatagcagcagtggcagcagcagttctacaccatcacctattcctaatacagttgcagtaacagctgtggtgtcctctacaccatctgtggtcatgtcaacagtagcacaaggtgtatctacatcagcaatcaaaatggcatcaaccagacttccttcccccaaaagcttagtgagtgccccaactcagattcttgcacagttccctaaacaacatcaacagtctcctaagcagcagttatatcaagtgcaacagcagacacagcaacaagtggcccagccttctccagtatctcatcagcaacagcctcagcagtctcctttgccacctggtattaaacctaccatccaaatcaaacaggagtcaggtgttaaaatcatcacacaacaggttcaaccaagtaaaatcttacccaaaccagtgacagcaactctacccaccagtagcaattcccctattatggtggttagcagtaatggtgcaattatgacaactaaactggtaaccactcctactggcacacaagcaacctatacccggccaacagtgagcccatccattggtcggatggctgcaacccctggagctgcaacctatgtgaaaactacgagtggtagcatcattacagtagtacccaaatcattagctaccttggggggcaagataattagcagtaatatagtttctggaacgactaccaaaatcactacaatcccaatgacttccaagcccaacgtgattgttgtacaaaagactacaggaaaaggaacgaccattcaaggcctcccgggcaaaaatgttgtcacaacgttgctaaatgctggaggagaaaagactattcagacagtgccaacaggagcaaagccagctatccttactgctacaagacccatcaccaaaatgattgtaacgcagccaaaaggaataggttctacagttcaaccagcagctaaaatcatcccaacaaaaattgtttatgggcagcaagggaaaacgcaggttcttattaaacccaaaccagtgacttttcaagcgacagttgttagtgaacaaacaagacagctagtaacagaaacattacagcaagcatccagggtagcagaggctggtaattcatctattcaggaaggaaaagaagaaccacagaattatacagatagtagttcctcttctacagagtcctcccagagttcccaagatgctgtggtgatttctggagaaatatcatcacctcctctattttcagtcagccatcgctcccagccccaacagccttcccagccccagcggaccctgctccagcatgtggctcagtcacagaccgcaacacagacttcggtggtggtgaagtccatcccagcatcttcccctggagcaatcacccacattatgcagcaggcattaagcagtcacactgcttttaccaaacacagcgaggaacttggaactgaggagggcgaggttgaagagatggacactttagaccctcagacaggtctgttttaccgatctgccctgactcagtcacagtcagctaaacagcagaaacttagccagcccccgctggaacagactcagctgcaagtgaaaactctgcagtgcttccagactaaacagaagcagaccatccacctgcaggcagaccagctccagcacaaactcccgcaaatgccccagctttccatcaggcatcaaaaactcacccctctccagcaagaacaagcacagcccaagccagatgtacagcacacacagcatcccatggtggccaaagacaggcagcttcctaccttaatggcacagcccccgcaaactgtagtacaggtgcttgcagtgaaaaccacgcagcagctccctaaactgcagcaggctccgaaccaaccaaaaatctacgtgcaaccccaaaccccccagagccaaatgtcgctcccagcttcttcagagaaacagacggcaagccaggtggagcagccaattataacccaaggatcctctgttacaaagataacttttgaggggcgccagcctcccacagttacaaagataactggtggcagttctgtgcctaagctgacatcaccagttacaagcatatctcccattcaggcctctgagaagacagcagtgtctgacattttgaaaatgtctttgatggaagctcagattgatacaaatgtagaacatatgatagtggatcccccaaagaaggctcttgccactagcatgctcactggtgaagcaggatcattaccctccacccacatggtggtggcagggatggcgaattccactccccagcaacagaaatgtagagagtcctgttcgagtccatccactgttggctcttccctaacgacaaggaaaattgatccaccagcagtgcctgcgacaggccagttcatgcgtattcagaatgtaggccaaaagaaagctgaagagagtccagcagaaattatcatccaggctattcctcagtatgctattccttgtcactccagctccaatgtggtggtggagcccagtgggcttcttgagctaaacaacttcactagtcaacagctggatgatgaggagacagcaatggagcaggacatagacagtagcacggaggatggaactgaacccagcccttctcagagctctgctgaacggtcctagtgtttggacacaatagtgcactttaaaacctgcttggttaccaagtgtccagggaaacccttg

SEQ ID NO: 118013 - DNA, 840 bp, Homo sapiens
  Payload ID: 3092
  Gene Symbol: C11orf30
  Gene Name: chromosome 11 open reading frame 30
  ENST ID: ENST00000531998
  CDS Start-End: 1-324
atcacacaacaggttcaaccaagtaaaatcttacccaaaccagtgacagcaactctacccaccagtagcaattcccctattatggtggttagcagtaatggtgcaattatgacaactaaactggtaaccactcctactggcacacaagcaacctatacccggccaacagtgagcccatccattggtcggatggctgcaacccctggagctgcaacctatgtgaaaactacgagtggtagcatcattacagtagtacccaaatcattagctaccttggggggcaagataattagcagtaatatagtttctggtaggtatatctgaaatatgttaaaggtataggtggccttcattgagaggaaaaaaaaaacttacttcattgaaggattatatttgatctcaattttttgcttagaaatctaaagctttgttttagtccttatgtttcatgattaaataaagtttttagttttaatattcaatattcacatataaagcttttgatagttttaaaatggaaagaacctttagttgcttttagtcagagtggaaagattatagtttaaatttgcatagagatttttcatttgcaaagtatccttctatttgtcaacctattcagaccccataacaactctgaggtggttgctattgtgctgaatttacaaatgaagatagatttggctttagagagatcaaattgacctgtccaagaccaattagagttagaaagtggaagaactcttatttgttctgaatatgttttagggaacatatctcataatttcaattactgatgtcactttagtttattaaaaataaaaatatttgaatacttta

SEQ ID NO: 118014 - DNA, 452 bp, Homo sapiens
  Payload ID: 3092
  Gene Symbol: C11orf30
  Gene Name: chromosome 11 open reading frame 30
  ENST ID: ENST00000533972
  CDS Start-End: 125-452
agaggcaccgcaaacaaacccaattcctggtgtcccctagtcttggcggaggagccttttagatgagccccgaaaggccgggcagggaggacaagctctttggggctaccaaacagaagcagcaatgcctgttgtgtggccaacccttctggatctcagcagggatgaatgcaaaagaattcttcgaaaattgggtgttaaaatcatcacacaacaggttcaaccaagtaaaatcttacccaaaccagtgacagcaactctacccaccagtagcaattcccctattatggtggttagcagtaatggtgcaattatgacaactaaactggtaaccactcctactggcacacaagcaacctatacccggccaacagtgagcccatccattggtcggatggctgcaacccctggagctgcaacctatgtgaaaactacgagtggtagcatcatta

SEQ ID NO: 118015 - DNA, 934 bp, Homo sapiens
  Payload ID: 3092
  Gene Symbol: C11orf30
  Gene Name: chromosome 11 open reading frame 30
  Uniprot ID: Q7Z589
  ENST ID: ENST00000533988
  CDS Start-End: 147-395
cctgtcgccatcttgccccttcagaggcaccgcaaacaaacccaattcctggtgtcccctagtcttggcggaggagccttttagatgagccccgaaaggccgggcagggaggacaagctctttggggctaccaaacagaagcagcaatgcctgttgtgtggccaacccttctggatctcagcagggatgaatgcaaaagaattcttcgaaaattggaattggaggcatatgctggagttatcagtgcacttcgggcacagggggatctcaccaaggaaaagaaagatcttcttggagaactatcaaaagttcttagcatctcaacagaacgccaccgtgctgaagttcggagagcagtaaacgatgaacggttaacaacaattgcacataagtaagccattagtcgtaccatccctgattttttatgacatagtataacacagttttgaaacagtcttcctattgtgtagcagattcctgagtcttttaagtaacaatatctctatactcagggatcctgatcatagcagtaaaagtgatattaactgtttattcagttgggtttttttttgcatttggttaggcaagctttaagtactcaggtcaaatcctgttacaatgtaatctctgtctaactaaaaatcaccacaatttagcagatgattcacttacttgaggccaagttcagtaacaaagtattgtgacccctaaaattgaaagccctttagaggttctttgtaatggtatttgatatgttattaccttataaataggcgttgtaacttttttgatatctgactcattatttcatgtattttgagattcagaaaaaaatgtaaaatttgtgttctgtctttaagaaatatgaatataacatctcttaatttatttttaaaaagccaaaaaaataaaacgattaaagattcttaccaaa

SEQ ID NO: 118016 - DNA, 478 bp, Homo sapiens
  Payload ID: 3092
  Gene Symbol: C11orf30
  Gene Name: chromosome 11 open reading frame 30
  ENST ID: ENST00000531793
  CDS Start-End: 1-478
agaagacagcagtgtctgacattttgaaaatgtctttgatggaagctcagattgatacaaatgtagaacatatgatagtggatcccccaaagaaggctcttgccactagcatgctcactggtgaagcaggatcattaccctccacccacatggtggtggcagggatggcgaattccactccccagcaacagaaatgtagagagtcctgttcgagtccatccactgttggctcttccctaacgacaaggaaaattgatccaccagcagtgcctgcgacaggccagttcatgcgtattcagaatgtaggccaaaagaaagctgaagagagtccagcagaaattatcatccaggtcaagactaaagaattactgagtccaggctaccccttagaagttgtattttatctccctctctccttgcaaggctattcctcagtatgctattccttgtcactccagctccaatgtggtggtggagc

SEQ ID NO: 118017 - DNA, 1105 bp, Homo sapiens
  Payload ID: 3092
  Gene Symbol: C11orf30
  Gene Name: chromosome 11 open reading frame 30
  ENST ID: ENST00000532719
  CDS Start-End: 1-888
cagccttcccagccccagcggaccctgctccagcatgtggctcagtcacagaccgcaacacagacttcggtggtggtgaagtccatcccagcatcttcccctggagcaatcacccacattatgcagcaggcattaagcagtcacactgcttttaccaaacacagcgaggaacttggaactgaggagggcgaggttgaagagatggacactttagaccctcagacaggtctgttttaccgatctgccctgactcagtcacagtcagctaaacagcagaaacttagccagcccccgctggaacagactcagctgcaagtgaaaactctgcagtgcttccagactaaacagaagcagaccatccacctgcaggcagaccagctccagcacaaactcccgcaaatgccccagctttccatcaggcatcaaaaactcacccctctccagcaagaacaagcacagcccaagccagatgtacagcacacacagcatcccatggtggccaaagacaggcagcttcctaccttaatggcacagcccccgcaaactgtagtacaggtgcttgcagtgaaaaccacgcagcagctccctaaactgcagcaggctccgaaccaaccaaaaatctacgtgcaaccccaaaccccccagagccaaatgtcgctcccagcttcttcagagaaacagacggcaagccaggctattcctcagtatgctattccttgtcactccagctccaatgtggtggtggagcccagtgggcttcttgagctaaacaacttcactagtcaacagctggatgatgaggagacagcaatggagcaggacatagacagtagcacggaggatggaactgaacccagcccttctcagagctctgctgaacggtcctagtgtttggacacaatagtgcactttaaaacctgcttggttaccaagtgtccagggaaacccttgtattttgatgactaaaaagagcactttgcccgtacttaggctgtggaccctaaaacagcagtgtttcaacaagatgttgctgcaggagcagctttttaaaacaagataaaactcacaggggaatgtacttttttaaaaaaaaatgaaaaagaaa

SEQ ID NO: 118018 - DNA, 4376 bp, Homo sapiens
  Payload ID: 3092
  Gene Symbol: C11orf30
  Gene Name: chromosome 11 open reading frame 30
  Uniprot ID: Q7Z589
  ENST ID: ENST00000525038
  CDS Start-End: 40-4011
ggaggacaagctctttggggctaccaaacagaagcagcaatgcctgttgtgtggccaacccttctggatctcagcagggatgaatgcaaaagaattcttcgaaaattggaattggaggcatatgctggagttatcagtgcacttcgggcacagggggatctcaccaaggaaaagaaagatcttcttggagaactatcaaaagttcttagcatctcaacagaacgccaccgtgctgaagttcggagagcagtaaacgatgaacggttaacaacaattgcacataaaatgaatttatccttatatttgggtgaaagaccaagttacagtatgtctggacctaatagctcttcagaatggtccattgaaggtcgtcgattggtaccactgatgccccggctcgttccccaaaccgcctttactgtaacagctaatgctgttgctaatgcagctatccagcataatgcatctcttccagtgcctgcagaaacaggaagcaaggaagtagtggtttgctattcctacacaagtaccacgtcaaccccaacctctacccctgttccaagtggcagcatagcaacggttaagtctccaagacctgccagtcctgcctccaatgtagttgtcttgccaagtggaagtactgtttatgtcaaaagtgtaagctgttcagatgaagatgaaaaacccagaaaacgaaggcgaacaaactcttccagctcctctcctgttgttctaaaggaagttccaaaggccgttgttccagtctcaaagacgatcactgtgcctgtgagtggtagtcccaagatgagcaacatcatgcagagcattgccaactccttaccaccccacatgtctcctgtaaaaataaccttcactaaaccatcaacacagacaacaaacacaacaacacagaaggttattatagtcaccacatcaccaagctcaaccttcgtgcccaacattctctccaaatcccataactatgcagcagtcactaagcttgtaccaacgtcagtcattgcttctacaacccagaagccaccagttgttataactgcttcacagtcctctctggtcagtaatagcagcagtggcagcagcagttctacaccatcacctattcctaatacagttgcagtaacagctgtggtgtcctctacaccatctgtggtcatgtcaacagtagcacaaggtgtatctacatcagcaatcaaaatggcatcaaccagacttccttcccccaaaagcttagtgagtgccccaactcagattcttgcacagttccctaaacaacatcaacagtctcctaagcagcagttatatcaagtgcaacagcagacacagcaacaagtggcccagccttctccagtatctcatcagcaacagcctcagcagtctcctttgccacctggtattaaacctaccatccaaatcaaacaggagtcaggtgttaaaatcatcacacaacaggttcaaccaagtaaaatcttacccaaaccagtgacagcaactctacccaccagtagcaattcccctattatggtggttagcagtaatggtgcaattatgacaactaaactggtaaccactcctactggcacacaagcaacctatacccggccaacagtgagcccatccattggtcggatggctgcaacccctggagctgcaacctatgtgaaaactacgagtggtagcatcattacagtagtacccaaatcattagctaccttggggggcaagataattagcagtaatatagtttctggaacgactaccaaaatcactacaatcccaatgacttccaagcccaacgtgattgttgtacaaaagactacaggaaaaggaacgaccattcaaggcctcccgggcaaaaatgttgtcacaacgttgctaaatgctggaggagaaaagactattcagacagtgccaacaggagcaaagccagctatccttactgctacaagacccatcaccaaaatgattgtaacgcagccaaaaggaataggttctacagttcaaccagcagctaaaatcatcccaacaaaaattgtttatgggcagcaagggaaaacgcaggttcttattaaacccaaaccagtgacttttcaagcgacagttgttagtgaacaaacaagacagctagtaacagaaacattacagcaagcatccagggtagcagaggctggtaattcatctattcaggaaggaaaagaagaaccacagaattatacagatagtagttcctcttctacagagtcctcccagagttcccaagattcccagcctgtagttcatgtaattgcttcccggcgtcaggattggtcagaacatgagattgcaatggagactagccctaccataatttatcaggatgtatccagtgaatcacaatcagctacttcaacaatcaaagctctgttagaactccaacagacaacagtaaaggaaaaattggaatctaaaccaagacaacccactattgacctgagtcaaatggcagtgcctattcagatgacccaggaaaagagacattctcctgagagtccatcaattgctgtggtagagtcagaactagtagctgaatacatcactactgtcagccatcgctcccagccccaacagccttcccagccccagcggaccctgctccagcatgtggctcagtcacagaccgcaacacagacttcggtggtggtgaagtccatcccagcatcttcccctggagcaatcacccacattatgcagcaggcattaagcagtcacactgcttttaccaaacacagcgaggaacttggaactgaggagggcgaggttgaagagatggacactttagaccctcagacaggtctgttttaccgatctgccctgactcagtcacagtcagctaaacagcagaaacttagccagcccccgctggaacagactcagctgcaagtgaaaactctgcagtgcttccagactaaacagaagcagaccatccacctgcaggcagaccagctccagcacaaactcccgcaaatgccccagctttccatcaggcatcaaaaactcacccctctccagcaagaacaagcacagcccaagccagatgtacagcacacacagcatcccatggtggccaaagacaggcagcttcctaccttaatggcacagcccccgcaaactgtagtacaggtgcttgcagtgaaaaccacgcagcagctccctaaactgcagcaggctccgaaccaaccaaaaatctacgtgcaaccccaaaccccccagagccaaatgtcgctcccagcttcttcagagaaacagacggcaagccaggtggagcagccaattataacccaaggatcctctgttacaaagataacttttgaggggcgccagcctcccacagttacaaagataactggtggcagttctgtgcctaagctgacatcaccagttacaagcatatctcccattcaggcctctgagaagacagcagtgtctgacattttgaaaatgtctttgatggaagctcagattgatacaaatgtagaacatatgatagtggatcccccaaagaaggctcttgccactagcatgctcactggtgaagcaggatcattaccctccacccacatggtggtggcagggatggcgaattccactccccagcaacagaaatgtagagagtcctgttcgagtccatccactgttggctcttccctaacgacaaggaaaattgatccaccagcagtgcctgcgacaggccagttcatgcgtattcagaatgtaggccaaaagaaagctgaagagagtccagcagaaattatcatccaggctattcctcagtatgctattccttgtcactccagctccaatgtggtggtggagcccagtgggcttcttgagctaaacaacttcactagtcaacagctggatgatgaggagacagcaatggagcaggacatagacagtagcacggaggatggaactgaacccagcccttctcagagctctgctgaacggtcctagtgtttggacacaatagtgcactttaaaacctgcttggttaccaagtgtccagggaaacccttgtattttgatgactaaaaagagcactttgcccgtacttaggctgtggaccctaaaacagcagtgtttcaacaagatgttgctgcaggagcagctttttaaaacaagataaaactcacaggggaatgtacttttttaaaaaaaaatgaaaaagaaaaaaaaagctgcacatttacagtgacttaagacctggtcttctttctctgttggatcatggccggtgaaacagttttgtcttgcagtggaaagagacttcctgtgaatgtttctcaactggtttctactgagcaaaataccatctaaaa

SEQ ID NO: 118019 - DNA, 833 bp, Homo sapiens
  Payload ID: 3093
  Gene Symbol: C11orf31
  Gene Name: chromosome 11 open reading frame 31
  Uniprot ID: Q8IZQ5
  ENST ID: ENST00000388857
  CDS Start-End: 25-393
attctcggccgggctctaggcgccatggctccccgcgggaggaagcgtaaggctgaggccgcggtggtcgccgtagccgagaagcgagagaagctggcgaacggcggggagggaatggaggaggcgaccgttgttatcgagcattgcactagctgacgcgtctatgggcgcaacgccgcggccctgagccaggcgctgcgcctggaggccccagagcttccagtaaaggtgaacccgacgaagccccggaggggcagcttcgaggtgacgctgctgcgcccggacggcagcagtgcggagctctggactgggattaagaaggggcccccacgcaaactcaaattccctgagcctcaagaggtggtggaagagttgaagaagtacctgtcgtagggagatttgggtagaagccctcatgctgaggtttgaaatgggaagtggggggcgcgaccgctgttgaggaagagaaggcattgatcttggtgtggctacaagtacccacctggcgtgggtagctcacgcctgcaatcccagcactctgggaggtcgaggcaggagtggatggccaacacagggagaccctatttgaaaacaaaaaacaaaaaaaagacacaatattgttttctgtctagtgtgccctaagtggaatttatgtcctttgggagactgtagttgacttgccctgggggtatggacaagttttccatttggaagtttatttcatgttacttcatttatgcttatccctaccctcttctgtttggttcttgggtgttctgttactgtcctgtgttaacactgcattacaataccattaaatttggttacaagga

SEQ ID NO: 118020 - DNA, 818 bp, Homo sapiens
  Payload ID: 3093
  Gene Symbol: C11orf31
  Gene Name: chromosome 11 open reading frame 31
  Uniprot ID: Q8IZQ5
  ENST ID: ENST00000534355
  CDS Start-End: 244-612
gtggttccgtcaggcgcttcccgcaccttcccgctccctgcttgcaaagtggttgtgccccaaggtccgcctccaggccacgtgggtgctgcgggccaagctttcccttcctttgagagaggtttccgctgtaggagcagagcttccgggctgcgctcttcgttgcccagtttccgctcagtggtcgcgtctccgccccccacccaccagtcccgctgcattctcggccgggctctaggcgccatggctccccgcgggaggaagcgtaaggctgaggccgcggtggtcgccgtagccgagaagcgagagaagctggcgaacggcggggagggaatggaggaggcgaccgttgttatcgagcattgcactagctgacgcgtctatgggcgcaacgccgcggccctgagccaggcgctgcgcctggaggccccagagcttccagtaaaggtgaacccgacgaagccccggaggggcagcttcgaggtgacgctgctgcgcccggacggcagcagtgcggagctctggactgggattaagaaggggcccccacgcaaactcaaattccctgagcctcaagaggtggtggaagagttgaagaagtacctgtcgtagggagatttgggtagaagccctcatgctgagctttgtgtccctggtgatgttggaacattaatgatggaacatggccaaacttcagtcatgatcctgaagccatggtttcttccctgccagaaatgaaggttcagttatgaggcaaccctctagtaaggcattgtaaaagttactggatttggtttaataaaagttgaaataaagta

SEQ ID NO: 118021 - DNA, 469 bp, Homo sapiens
  Payload ID: 3093
  Gene Symbol: C11orf31
  Gene Name: chromosome 11 open reading frame 31
  ENST ID: ENST00000528798
  CDS Start-End: 1-283
gggaatggaggaggcgaccgttgttatcgagcattgcactagctgacgcgtctatgggcgcaacgccgcggccctgagccaggcgctgcgcctggaggccccagagcttccagtaaaggtgaacccgacgaagccccggaggggcagcttcgaggtgacgctgctgcgcccggacggcagcagtgcggagctctggactgggattaagaaggggcccccacgcaaactcaaattccctgagcctcaagaggtggtggaagagttgaagaagtacctgtcgtagggagatttggctttgtgtccctggtgatgttggaacattaatgatggaacatggccaaacttcagtcatgatcctgaagccatggtttcttccctgccagaaatgaaggttcagttatgaggcaaccctctagtaaggcattgtaaaagttactggatttggtttaataaaagttgaaataaagta

SEQ ID NO: 118022 - DNA, 1291 bp, Homo sapiens
  Payload ID: 3093
  Gene Symbol: C11orf31
  Gene Name: chromosome 11 open reading frame 31
  ENST ID: ENST00000622257
  CDS Start-End: 347-712
aaaagattgcgcgaagcgaggctagcagtcggacctagtctccgccccttcctgctgtgttcaccatcccagcgtcccctgtcccctccacccgaagcgatgggtggttccgtcaggcgcttcccgcaccttcccgctccctgcttgcaaagtggttgtgccccaaggtccgcctccaggccacgtgggtgctgcgggccaagctttcccttcctttgagagaggtttccgctgtaggagcagagcttccgggctgcgctcttcgttgcccagtttccgctcagtggtcgcgtctccgccccccacccaccagtcccgctgcattctcggccgggctctaggcgccatggctccccgcgggaggaagcgtaaggctgaggccgcggtggtcgccgtagccgagaagcgagagaagctggcgaacggcggggagggaatggaggaggcgaccgttgttatcgagcattgcactagccgcgtctatgggcgcaacgccgcggccctgagccaggcgctgcgcctggaggccccagagcttccagtaaaggtgaacccgacgaagccccggaggggcagcttcgaggtgacgctgctgcgcccggacggcagcagtgcggagctctggactgggattaagaaggggcccccacgcaaactcaaattccctgagcctcaagaggtggtggaagagttgaagaagtacctgtcgtagggagatttgggtagaagccctcatgctgagctttgtgtccctggtgatgttggaacattaatgatggaacatggccaaacttcagtcatgatcctgaagccatggtttcttccctgccagaaatgaaggttcagttatgaggcaaccctctagtaaggcattgtaaaagttactggatttggtttaataaaagttgaaataaagtatttgagtaatagagtaaaacttaatcttaagggatggacaaagccagccttgtggagttggtagtccttgtgtttttcatagcccaagatagccatgtgacctggaacttttaaaaaaaaatttttttttaagagccagagtctcactttgtcacccatgctggagtatagtggtgctatctcggctcactgcaaccattgtctcccaggttcaagcgatactcctgcctcagtctcctgagtagctgggatcacaggtgcacaccaccacgcctggctaatttttttatttttatttttagtaaaggcggggtttcaccatgttggccaggctggtctcaaactcctgacctcaagtgatatgcctgccttg

SEQ ID NO: 118023 - DNA, 654 bp, Homo sapiens
  Payload ID: 3094
  Gene Symbol: C11orf40
  Gene Name: chromosome 11 open reading frame 40
  Uniprot ID: Q8WZ69
  ENST ID: ENST00000307616
  CDS Start-End: 1-654
atggctctagtgcaggcgctggtgcccagagaaagagagccaaagctgtccattttgcagatggacagaggggacccacaacacagctcacactggtgcccagagagagaaaaagttaagctgctgaccctgaagccaagggaaacatccaaaaatatccttataaacttctacagagcctttaacttagataaggatgtgttcatacaccaggccaaccacccactaacagtgccgtctagtgtggtgatgggtgataacggccacaccttggcagaagatgacaaaagaccttgctttagggtactaccttgctatctggaacgtgtttccagtggaatctctatttcctggatctcagcccctctacctgtgggagcaatgaaacaccagcttctatgtgacttaatggatcttatcacgctttctttctggttagcaggtcagtgtatgagccttaaagctaccaacatgcaacactgcaagtgttcaatagccacaagtgactgggccattgaattggaccgcactgattacaaaacacttccatcagaatattccatcctagcactgctccaggtctttgcagggaaaaactgtatggatcgtgttctacttcatgtggatgtgaactacttgaagtccctgccctga

SEQ ID NO: 118024 - DNA, 1142 bp, Homo sapiens
  Payload ID: 3095
  Gene Symbol: C11orf42
  Gene Name: chromosome 11 open reading frame 42
  Uniprot ID: Q8N5U0
  ENST ID: ENST00000316375
  CDS Start-End: 51-1052
ggggttcctgcagcagccactgccctgcccaatccctcccataccccaccatgttggtgggtacccccaacctgctgacactggatgaagctgatgccacctggaccctcatcaaggataaggtcatcgaggagcactttgggcccaatgcagtagcagtacctttcctgtcagatgcagcctgctatgacctactgggtgtgctggtaaaacagtcccgcccagcccatacccgcctggctttgccaggtcggcagggccggagggcactgaaaccagtggggccactaccaagcctcctggagcaggcaggatctgagggtgccttcgcccactgcactcgggaatactcaccaaatggccgagcagagagagcctatgaagagacgcgaatgttggatggacagccctgcaagatccgcctacatatgggtgacctgcgcaagaaggttgccttcctgttgctgccaccagggcaggtgagcctacagcagactcttccctggctccgaagcacccacagcatctatgtcatctaccaggtcttctcttgttcctggctgcagctggggctgacgtctacagcccgtgagccccagctcctccggctacttcggtcattacctgttgccttctcctgcctcaagttttcactgcagtctaagggcgtgctgggaccacagaagcctctcactaaagacccattgccccatggggccaactgggtcagacccaacctcagcatcatgccgcctctggcccccacatcagcacctgctgatacaactgaagctgctgatgtgcccccacctgtcccagccccacctacgccacctccccaggaagggccagaggacaaacccaccagattctcctacaagggccgaaaccccttctggagggggccccagatactgtcagagaactggctcttcagcccccgcagccctccaccaggagcccagggtgggggccccagggaccccgacgggcactccatgtccctgcccctgctgcagggtctatcctcagagttcgacagtgacgactgaagctgaagcaaaagattccgggggcaaagcccccaagatctggcataggggtactggtctctaataaacatcagctgctgctcccccaaa

SEQ ID NO: 118025 - DNA, 3624 bp, Homo sapiens
  Payload ID: 3096
  Gene Symbol: C11orf45
  Gene Name: chromosome 11 open reading frame 45
  Uniprot ID: Q8TAV5
  ENST ID: ENST00000310799
  CDS Start-End: 195-632
cccacgcctaaggtccaggtcccagggctttcccttgcaccttcatccctggccctgcagaggcctgcttctcgcttccggggtcgccagagcgcccctcccgccaccccgccatctcttggccggatcgtgcgagagaaggggaggaggtctggggtttccagagtccgcggttttgctaagaagccgcagtgatgttgacgcggctggtcctcagtgcacacctgagtagcacgacctctccgccctggacgcacgctgccatcagctgggagctggacaacgtgctgatgcctagtcccagaatctggccccaggtgactccaacaggcaggtctgcctctgtcaggagtgagggtaacacctcctcactctggaatttctcagctgggcaggatgtgcatgccatagtaaccagaacctgtgagtctgtgctgagctctgccgtctacacccacggctgtggctgtgtgaggtctgccacaaacattacctgtcagtcctcaggacaacaaaggcaggcggcccggcaggaagaggagaactcaatctgcaaggcccatgatagtagagagggccgcctgggctaccccctcagtgcccatcagcctggttccggtggtcctaactagccctgtctccttgccaatagccctgtgctccccagccccctcccccatgcagacggctgctatgacatccctgttccttaaagtgcggggttcctcgctgccttctcctccctaactggcaccctgtgcaaacctgctgcagagaacagtgtcttgggcagtgcgatagtcctccagttcaccaacagtaaaaatggtctcaatggggagagatgtctgactgcaagcgctgagtccttccagaggagggctggagggacaggagggcggatcaggtggcctcctgagctggttcctggcgccgatgtaatggatgctgattaccagcggtgagggcatcgtggaagggactgcagaggtgtgcgagatgagtggaatgaggccccaggtgctgatttttatgcccaggatgctcctggctgtcatgggctcccaggggctccaggcatgcacagctcttccgcctcttctcgaagcagaatgccccagaaagggcacctttactatccagggtggctagagtcgccggtggctgtgcgtgggggctgagggctagaatcagggcaaggggctttcagtgaaacgcagagccaggcagggacagcgcggatctcagaacagtctttgtcagatgggacacttcatccccgcggagctgtccgtgcacacagcgttctctgattgccaagctgttaagcactctgcggaagggagctgctgggaaggcggacgaggcatctcaggtgggtgaggggctccgctgcatcagcgttgctcagacccaccatccctggggagctgtcactgacgcccaggtttccccttctcagtacatcctgtgcctcctttctgggctgcctcagtccctcaaaggggagctccccacatgggtgggattattgttgagaacagtcagggtgttgacgaggatgcaggactgaggttgctcccagagtcactcagtgtccctcgttttgctcggagacatcctgacctgggcaagctctttagggagcatctttcctgtctgtgccgcattctccatggcctttgcactctttttgcttttgttttaaacacgtcatcaattcattgcctgcagcagcttgtactgccttttggtttttctttgcagaacagctctggaagtgaagtgtgtgtgtgtgtgtttgcgtgcactactctggactgggtgccttacacgtgttaacacacttgatcagctcagcaacactgtggaataagtgtaatgtgtccattattcagatcaggagactgagattcagagcagggagggaacttgccagagaccacatggcttgcaagcagcagaacctgggtttgaactgacagcggcctgacttcagaacccacgctttcccaccctcctacttcacacccatttgagtccagccatcttggttctgaatcataaccctgactctcctggccacatcctatgctccacattacatgttactctacaggttaccaccctgggtctctttcctatataagaaatagaaatatttgtggaaatcctaatgttcatgacatctctgccattttatcaggaaaaattctatcctaccaaatactggtataatgtacttggcccccctggattggattggtataggttaagagcagatataaggtctgaaataatcccggtattcctagtatgtggaattattatcatggaatcataatggcagtttgcacctctgttgggctctttcaactcctgtgttggctcaggagaatcctatcacattagtccccttttgtagttggatagttgggcttgccagaaggcacacaaatttgggttaactcatttccaggattctggcattgtagacacagaaacaccgactgtgaagttttatgtaatacaaacactgggagatttagcaataggcctgccaggcggccctggcttctggctgcacaacaaaggggggtggctggtgctgaatggggcaacagaaggtgagtttggggcctgcagagcctcgggtagcccagaggagcgagagagtattggctgttcattttaactccatccttggaggattccccaccacaagcctaaggaagtaataaaacctcatgcattattttttgatatctggagagaaacacgtaccctagaaatgctgtggactaattccatggttactttgtcattaaagaaaccaaaatactgagaggtcaccataaacacaaaaaggcagagagagaaggattaaatggtgtttcatgtaaggatctttaaagggagacagaattctagtctgaaaggagcgcaggcagatctggcattttgcttggggagttcaattctttggagaaaatacagagacaaaaagaccattttgatggtatttaaaatatccctctgcccagtgtatctaagtgagtctaaatatattcagcaattttttaaagggcagatattaggcccgattcaaggtatggaatatagattcgaaagggttagtgataggtgagtgcctttcaggtagctttgcatcacagaccaagcccattattgaggactgtacgtatggagcaggcccgtgagcttgtgactgagtttcccaacctgccaggctcccatttgcttaggatgaatatttttctgccctccctggtgagccactgtgggccactcgccactccttacaccccttccctttaatacctcgcttggcttacttgcaaaatccacatgcatcctcctggatctcacagaagatgtatgaaaagtcatggccatgaaaagggcacggaaatcaaattaattaattttgctttttccccacgtttgtttctgtctgtctggtacttttcctttttaagcctgccatctctttgaaagtgagccgcacagtgataatccattttcttcattgtaaccccacagtgtatgtattccacattaaataataaaagggattaataattaaatcaaaatgaaaaacca

SEQ ID NO: 118026 - DNA, 609 bp, Homo sapiens
  Payload ID: 3096
  Gene Symbol: C11orf45
  Gene Name: chromosome 11 open reading frame 45
  Uniprot ID: Q8TAV5
  ENST ID: ENST00000524878
  CDS Start-End: 172-609
gtgcttcaaacgccttgaggataaggaaggagaatcagcaagtcccgagttcctacggtgtgtcagcatcgtgctcccactcccgggagagaggcattatcttcagtttacaaaaggggaaaacaggtctggggtttccagagtccgcggttttgctaagaagccgcagtgatgttgacgcggctggtcctcagtgcacacctgagtagcacgacctctccgccctggacgcacgctgccatcagctgggagctggacaacgtgctgatgcctagtcccagaatctggccccaggtgactccaacaggcaggtctgcctctgtcaggagtgagggtaacacctcctcactctggaatttctcagctgggcaggatgtgcatgccatagtaaccagaacctgtgagtctgtgctgagctctgccgtctacacccacggctgtggctgtgtgaggtctgccacaaacattacctgtcagtcctcaggacaacaaaggcaggcggcccggcaggaagaggagaactcaatctgcaaggcccatgatagtagagagggccgcctgggctaccccctcagtgcccatcagcctggttccggtggtcctaactag

SEQ ID NO: 118027 - DNA, 1645 bp, Homo sapiens
  Payload ID: 3097
  Gene Symbol: C11orf49
  Gene Name: chromosome 11 open reading frame 49
  Uniprot ID: Q9H6J7
  ENST ID: ENST00000278460
  CDS Start-End: 60-1055
cggcaacctgggttccggaagccggagagctggagctttgaagccaccccggtcaaaggatgctgagtccggagcgcctagccctaccggactacgagtatctggctcagcgacatgtcctcacctacatggaggatgcagtgtgccagctgctagaaaacagggaagatattagccaatatggaattgccaggttcttcactgaatattttaacagtgtatgccagggaacacacattctctttcgagaattcagcttcgtccaagccaccccccacaatagggtatcatttttacgggccttctggagatgcttccgaactgtgggcaaaaatggcgatttgctgaccatgaaagaatatcactgtttgctgcaattactgtgtcctgatttcccgctggagctcactcagaaagcagccaggattgtgctcatggacgatgccatggactgcttgatgtctttttcagatttcctctttgccttccagatccagttttactactcagaattcctggacagtgtggctgccatctatgaggacctgctgtcaggcaagaaccccaacacagtgattgtgccgacgtcgtccagtgggcagcaccgccaacgacctgccttgggcggggccggcacgctggagggcgtggaggcgtcgctgttctaccagtgtctggaaaacctgtgtgatcggcacaagtacagctgcccacccccagcacttgtcaaagaggccctcagcaatgttcagagactgaccttctatggattcctcatggctctctcaaagcaccgtggaatcaaccaagccctcggagctttgcctgacaagggggatctgatgcacgacccagcaatggatgaagagctggaacggctgctggcccaggtcccaggcctggtcaactcggtcacagccagtccagaggccagttgcctgccttcccggacccctccccgggttggctctccctggagacctctccatcattcccgaaaagtggatggagagagtgatggctccactgaagagacagacgagtcggagacttgaggagtccaaagggtcctgcccacagcgccctgtacctgctcccacccagcccttggtgtgcccacccagcctcctctccagcaccttgctgtgctgccctctgctgctgacaaggtgaataacagccccaagaccagccagaggggctctgatgatcagcccagccagtggccccggaaggtgaatggcctgctctccctggccctatcagcctgtgaacttcacttaggccccaagctgacagactgtgctgaggccaccttgtcacgccgtagcctgttagtcctcctaacctcttaagagcagtctcttctgagccagcctctgcgggtcccccaataaggttcatctcctcacagcaactccattaagggggagaacccgaatagccacgcagggccttgcaccatcaagggtgacacctgcgacgcaagtaccaggaggacataaccgctgtggcctgttggagaacagccagtagccttggtaatatgaagggtgggccagaagatgatttcacttgcaaaaactgcttcaagtcttgacccctttgtgtctaatagctaaacaaacatgtgaaacgaataaaa

SEQ ID NO: 118028 - DNA, 1651 bp, Homo sapiens
  Payload ID: 3097
  Gene Symbol: C11orf49
  Gene Name: chromosome 11 open reading frame 49
  Uniprot ID: Q9H6J7
  ENST ID: ENST00000378615
  CDS Start-End: 29-1042
ggagctttgaagccaccccggtcaaaggatgctgagtccggagcgcctagccctaccggactacgagtatctggctcagcgacatgtcctcacctacatggaggatgcagtgtgccagctgctagaaaacagggaagatattagccaatatggaattgccaggttcttcactgaatattttaacagtgtatgccagggaacacacattctctttcgagaattcagcttcgtccaagccaccccccacaatagggtatcatttttacgggccttctggagatgcttccgaactgtgggcaaaaatggcgatttgctgaccatgaaagaatatcactgtttgctgcaattactgtgtcctgatttcccgctggagctcactcagaaagcagccaggattgtgctcatggacgatgccatggactgcttgatgtctttttcagatttcctctttgccttccagatccagttttactactcagaattcctggacagtgtggctgccatctatgaggacctgctgtcaggcaagaaccccaacacagtgattgtgccgacgtcgtccagtgggcagcaccgccaacgacctgccttgggcggggccggcacgctggagggcgtggaggcgtcgctgttctaccagtgtctggaaaacctgtgtgatcggcacaagtacagctgcccacccccagcacttgtcaaagaggccctcagcaatgttcagagactgaccttctatggattcctcatggctctctcaaagcaccgtggaatcaaccaagccctcggagctttgcctgacaagggggatctgatgcacgacccagcaatggatgaagagctggaacggctgcttcttcccttcttcaggctggcccaggtcccaggcctggtcaactcggtcacagccagtccagaggccagttgcctgccttcccggacccctccccgggttggctctccctggagacctctccatcattcccgaaaagtggatggagagagtgatggctccactgaagagacagacgagtcggagacttgaggagtccaaagggtcctgcccacagcgccctgtacctgctcccacccagcccttggtgtgcccacccagcctcctctccagcaccttgctgtgctgccctctgctgctgacaaggtgaataacagccccaagaccagccagaggggctctgatgatcagcccagccagtggccccggaaggtgaatggcctgctctccctggccctatcagcctgtgaacttcacttaggccccaagctgacagactgtgctgaggccaccttgtcacgccgtagcctgttagtcctcctaacctcttaagagcagtctcttctgagccagcctctgcgggtcccccaataaggttcatctcctcacagcaactccattaagggggagaacccgaatagccacgcagggccttgcaccatcaagggtgacacctgcgacgcaagtaccaggaggacataaccgctgtggcctgttggagaacagccagtagccttggtaatatgaagggtgggccagaagatgatttcacttgcaaaaactgcttcaagtcttgacccctttgtgtctaatagctaaacaaacatgtgaaacgaataaaaagtccctcatgtctggtaa

SEQ ID NO: 118029 - DNA, 1166 bp, Homo sapiens
  Payload ID: 3097
  Gene Symbol: C11orf49
  Gene Name: chromosome 11 open reading frame 49
  Uniprot ID: Q9H6J7
  ENST ID: ENST00000378618
  CDS Start-End: 53-1033
ctgggttccggaagccggagagctggagctttgaagccaccccggtcaaaggatgctgagtccggagcgcctagccctaccggactacgagtatctggctcagcgacatgtcctcacctacatggaggatgcagtgtgccagctgctagaaaacagggaagatattagccaatatggaattgccaggttcttcactgaatattttaacagtgtatgccagggaacacacattctctttcgagaattcagcttcgtccaagccaccccccacaatagggtatcatttttacgggccttctggagatgcttccgaactgtgggcaaaaatggcgatttgctgaccatgaaagaatatcactgtttgctgcaattactgtgtcctgatttcccgctggagctcactcagaaagcagccaggattgtgctcatggacgatgccatggactgcttgatgtctttttcagatttcctctttgccttccagatccagttttactactcagaattcctggacagtgtggctgccatctatgaggacctgctgtcaggcaagaaccccaacacagtgattgtgccgacgtcgtccagtgggcagcaccgccaacgacctgccttgggcggggccggcacgctggagggcgtggaggcgtcgctgttctaccagtgtctggaaaacctgtgtgatcggcacaagtacagctgcccacccccagcacttgtcaaagaggccctcagcaatgttcagagactgaccttctatggattcctcatggctctctcaaagcaccgtggaatcaaccaagccctcggagctttgcctgacaagggggatctgatgcacgacccagcaatggatgaagagctggaacggctggtggtgaggtcgaagctgcaccggacctcacggcagcacagagccaaggagccaggggcctttggctttcagagaagagagaagcaggaggccctggagagagtgtcctcagcttcggtaccgacgccctaccattaccggtgggagcccagagagtgaggccaggggccggcactgggcagggaggcaggatccagaggacactgcttcactcagaccaacagggagccaggccctgcaggggctttattttgacaccactttgtttcaatacaaacagtccagaaagaaa

SEQ ID NO: 118030 - DNA, 1916 bp, Homo sapiens
  Payload ID: 3097
  Gene Symbol: C11orf49
  Gene Name: chromosome 11 open reading frame 49
  Uniprot ID: Q9H6J7
  ENST ID: ENST00000395460
  CDS Start-End: 39-863
ccggagagctggagctttgaagccaccccggtcaaaggatgctgagtccggagcgcctagccctaccggactacgagtatctggctcagcgacatgtcctcacctacatggaggatgcagtgtgccagctgctagaaaacagggaagatattagccaatatggaattgccaggttcttcactgaatattttaacagtgtatgccagggaacacacattctctttcgagaattcagcttcgtccaagccaccccccacaatagggtatcatttttacgggccttctggagatgcttccgaactgtgggcaaaaatggcgatttgctgaccatgaaagaatatcactgtttgctgcaattactgtgtcctgatttcccgctggagctcactcagaaagcagccaggattgtgctcatggacgatgccatggactgcttgatgtctttttcagatttcctctttgccttccagatccagttttactactcagaattcctggacagtgtggctgccatctatgaggacctgctgtcaggcaagaaccccaacacagtgattgtgccgacgtcgtccagtgggcagcaccgccaacgacctgccttgggcggggccggcacgctggagggcgtggaggcgtcgctgttctaccagtgtctggaaaacctgtgtgatcggcacaagtacagctgcccacccccagcacttgtcaaagaggccctcagcaatgttcagagactgaccttctatggattcctcatggctctctcaaagcaccgtggaatcaaccaagccctcggagctttgcctgacaagggggatctgatgcacgacccagcaatggatgaagagctggaacggctgtaagtgtcaagtgggaggatactgcccccttgtgggggccagacgggtcggacacggctgtgccccatctggggccaacaccacttgtctgtaacatcccacatctgccagggaagggtctgggggccagtggaggcctgaggtgtccctccctctgagtcctttgggggctgcagcccaggggtttaccctagtgttaagagtgggcatggaggccctgctctctgtacaggaggcctctcgctgccctccaggcttcttcccttcttcaggctggcccaggtcccaggcctggtcaactcggtcacagccagtccagaggccagttgcctgccttcccggacccctccccgggttggctctccctggagacctctccatcattcccgaaaagtggatggagagagtgatggctccactgaagagacagacgagtcggagacttgaggagtccaaagggtcctgcccacagcgccctgtacctgctcccacccagcccttggtgtgcccacccagcctcctctccagcaccttgctgtgctgccctctgctgctgacaaggtgaataacagccccaagaccagccagaggggctctgatgatcagcccagccagtggccccggaaggtgaatggcctgctctccctggccctatcagcctgtgaacttcacttaggccccaagctgacagactgtgctgaggccaccttgtcacgccgtagcctgttagtcctcctaacctcttaagagcagtctcttctgagccagcctctgcgggtcccccaataaggttcatctcctcacagcaactccattaagggggagaacccgaatagccacgcagggccttgcaccatcaagggtgacacctgcgacgcaagtaccaggaggacataaccgctgtggcctgttggagaacagccagtagccttggtaatatgaagggtgggccagaagatgatttcacttgcaaaaactgcttcaagtcttgacccctttgtgtctaatagctaaacaaacatgtgaaacgaataaaaagtccctcatgtctggtaa

SEQ ID NO: 118031 - DNA, 560 bp, Homo sapiens
  Payload ID: 3097
  Gene Symbol: C11orf49
  Gene Name: chromosome 11 open reading frame 49
  ENST ID: ENST00000525279
  CDS Start-End: 77-226
atggcaacggagagagacggcaacctgggttccggaagccggagagctggagctttgaagccaccccggtcaaaggatgctgagtccggagcgcctagccctaccggactacgagtatctggctcagcgacatgtcctcacctacatggaggatgcagtgtgccagctgctagaaaacagggaagatattagccaatatggaattgccaggttcttcactgaataaagctggacctcctgaactgtgtgacctacttcagtggtacctcaggttctacatgttttaacagtgtatgccagggaacacacattctctttcgagaattcagcttcgtccaagccaccccccacaatagggtatcatttttacgggccttctggagatgcttccgaactgtgggcaaaaatggcgatttgctgaccatgaaagaatatcactgtttgctgcaattactgtgtcctgatttcccgctggagctcactcagaaagcagccaggattgtgctcatggacgatgccatggactgcttgatgtctttttcagatttcctctttgcctt

SEQ ID NO: 118032 - DNA, 1527 bp, Homo sapiens
  Payload ID: 3097
  Gene Symbol: C11orf49
  Gene Name: chromosome 11 open reading frame 49
  ENST ID: ENST00000525895
  CDS Start-End: 28-213
gagctttgaagccaccccggtcaaaggatgctgagtccggagcgcctagccctaccggactacgagtatctggttttaacagtgtatgccagggaacacacattctctttcgagaattcagcttcgtccaagccaccccccacaatagggtatcatttttacgggccttctggagatgcttccgaactgtgggcaaaaatggcgatttgctgaccatgaaagaatatcactgtttgctgcaattactgtgtcctgatttcccgctggagctcactcagaaagcagccaggattgtgctcatggacgatgccatggactgcttgatgtctttttcagatttcctctttgccttccagatccagttttactactcagaattcctggacagtgtggctgccatctatgaggacctgctgtcaggcaagaaccccaacacagtgattgtgccgacgtcgtccagtgggcagcaccgccaacgacctgccttgggcggggccggcacgctggagggcgtggaggcgtcgctgttctaccagtgtctggaaaacctgtgtgatcggcacaagtacagctgcccacccccagcacttgtcaaagaggccctcagcaatgttcagagactgaccttctatggattcctcatggctctctcaaagcaccgtggaatcaaccaagccctcggagctttgcctgacaagggggatctgatgcacgacccagcaatggatgaagagctggaacggctgctggcccaggtcccaggcctggtcaactcggtcacagccagtccagaggccagttgcctgccttcccggacccctccccgggttggctctccctggagacctctccatcattcccgaaaagtggatggagagagtgatggctccactgaagagacagacgagtcggagacttgaggagtccaaagggtcctgcccacagcgccctgtacctgctcccacccagcccttggtgtgcccacccagcctcctctccagcaccttgctgtgctgccctctgctgctgacaaggtgaataacagccccaagaccagccagaggggctctgatgatcagcccagccagtggccccggaaggtgaatggcctgctctccctggccctatcagcctgtgaacttcacttaggccccaagctgacagactgtgctgaggccaccttgtcacgccgtagcctgttagtcctcctaacctcttaagagcagtctcttctgagccagcctctgcgggtcccccaataaggttcatctcctcacagcaactccattaagggggagaacccgaatagccacgcagggccttgcaccatcaagggtgacacctgcgacgcaagtaccaggaggacataaccgctgtggcctgttggagaacagccagtagccttggtaatatgaagggtgggccagaagatgatttcacttgcaaaaactgcttcaagtcttgacccctttgtgtctaatagctaaacaaacatgtgaaacgaataaaaagtccctcatgtctggt

SEQ ID NO: 118033 - DNA, 626 bp, Homo sapiens
  Payload ID: 3097
  Gene Symbol: C11orf49
  Gene Name: chromosome 11 open reading frame 49
  ENST ID: ENST00000534249
  CDS Start-End: 1-205
ccacaatagggtatcatttttacgggccttctggagatgcttccgaactgtgggcaaaaatggcgatttgctgaccatgaaagaatatcactgtttgctgcaattactgtgtcctgatttcccgctggagctcactcagaaagcagccagattctctctttccccttcaggattgtgctcatggacgatgccatggactgcttgatgtctttttcagatttcctctttgccttccagatccagttttactactcagaattcctggacagtgtggctgccatctatgaggacctgctgtcaggcaagaaccccaacacagtgattgtgccgacgtcgtccagtgggcagcaccgccaacgacctgccttgggcggggccggcacgctggagggcgtggaggcgtcgctgttctaccagtgtctggaaaacctgtgtgatcggcacaagtacagctgcccacccccagcacttgtcaaagaggccctcagcaatgttcagagactgaccttctatggattcctcatggctctctcaaagcaccgtggaatcaaccaagccctcggagctttgcctgacaagggggatctgatgcacgacccagcaatggatgaagagctggaacggct

SEQ ID NO: 118034 - DNA, 714 bp, Homo sapiens
  Payload ID: 3097
  Gene Symbol: C11orf49
  Gene Name: chromosome 11 open reading frame 49
  ENST ID: ENST00000526827
  CDS Start-End: 1-582
agggtatcatttttacgggccttctggagatgcttccgaactgtgggcaaaaatggcgatttgctgaccatgaaagaatatcactgtttgctgcaattactgtgtcctgatttcccgctggagctcactcagaaagcagccaggattgtgctcatggacgatgccatggactgcttgatgtctttttcagatttcctctttgccttccagatccagttttactactcagaattcctggacagtgtggctgccatctatgaggacctgctgtcaggcaagaaccccaacacagtgattgtgccgacgtcgtccagtgggcagcaccgccaacgacctgccttgggcggggccggcacgctggagggcgtggaggcgtcgctgttctaccagtgtctggaaaacctgtgtgatcggcacaagtacagctgcccacccccagcacttgtcaaagaggccctcagcaatgttcagagactgaccttctatggattcctcatggctctctcaaagcaccgtggaatcaaccaagccctcgcagccactaggaaggagaagccaattagcaactgggtcacagcctgaagtaacctcatcccccttttctaagggcctttaaaaaggacactggctgggtgtggtggctcacgcctgtaatcccaacactttgggaggccgaggcggcggatcacctgaggtcaggagttcgagaccagc

SEQ ID NO: 118035 - DNA, 556 bp, Homo sapiens
  Payload ID: 3097
  Gene Symbol: C11orf49
  Gene Name: chromosome 11 open reading frame 49
  ENST ID: ENST00000526424
  CDS Start-End: 28-282
gagctttgaagccaccccggtcaaaggatgctgagtccggagcgcctagccctaccggactacgagtatctgggcatgcttgaaacaataacacttttgaatgtaagatatatgaaaggccacacgtcttcggctttgcttgtcaaatggagaggctgccagaaccggtcggctccatggttctcatgccccaaagtcctgcaaattgacacctcagcgacatgtcctcacctacatggaggatgcagtgtgccagctgctagaaaacagggaagatattagccaatatggaattgccaggttcttcactgaatattttaacagtgtatgccagggaacacacattctctttcgagaattcagcttcgtccaagccaccccccacaatagggtatcatttttacgggccttctggagatgcttccgaactgtgggcaaaaatggcgggtctcactcttgcctaggctggagtaaagtggtgctatctcagctcactgtaacctctgcctcctgagttcatgcgattcttgtgcttcagcctcctgagtagctggga

SEQ ID NO: 118036 - DNA, 530 bp, Homo sapiens
  Payload ID: 3097
  Gene Symbol: C11orf49
  Gene Name: chromosome 11 open reading frame 49
  ENST ID: ENST00000527667
  CDS Start-End: 27-176
agctttgaagccaccccggtcaaaggatgctgagtccggagcgcctagccctaccggactacgagtatctggctcagcgacatgtcctcacctacatggaggatgcagtgtgccagctgctagaaaacagggaagatattagccaatatggaattgccaggttcttcactgaataaacagacaagtgaactgacaagcctacgggtcaagtttctataccatttaatctgtaccagcactcttgaggctccttgccaagtgaaatatgactcttctggggttttaacagtgtatgccagggaacacacattctctttcgagaattcagcttcgtccaagccaccccccacaatagggtatcatttttacgggccttctggagatgcttccgaactgtgggcaaaaatggcgatttgctgaccatgaaagaatatcactgtttgctgcaattactgtgtcctgatttcccgctggagctcactcagaaagcagccaggattgtgctcatggacgatgccatggactgcttg

SEQ ID NO: 118037 - DNA, 1069 bp, Homo sapiens
  Payload ID: 3097
  Gene Symbol: C11orf49
  Gene Name: chromosome 11 open reading frame 49
  ENST ID: ENST00000527784
  CDS Start-End: 27-176
agctttgaagccaccccggtcaaaggatgctgagtccggagcgcctagccctaccggactacgagtatctggctcagcgacatgtcctcacctacatggaggatgcagtgtgccagctgctagaaaacagggaagatattagccaatatggaattgccaggttcttcactgaataatttgctgaccatgaaagaatatcactgtttgctgcaattactgtgtcctgatttcccgctggagctcactcagaaagcagccaggattgtgctcatggacgatgccatggactgcttgatgtctttttcagatttcctctttgccttccagatccagttttactactcagaattcctggacagtgtggctgccatctatgaggacctgctgtcaggcaagaaccccaacacagtgattgtgccgacgtcgtccagtgggcagcaccgccaacgacctgccttgggcggggccggcacgctggagggcgtggaggcgtcgctgttctaccagtgtctggaaaacctgtgtgatcggcacaagtacagctgcccacccccagcacttgtcaaagaggccctcagcaatgttcagagactgaccttctatggattcctcatggctctctcaaagcaccgtggaatcaaccaagccctcggagctttgcctgacaagggggatctgatgcacgacccagcaatggatgaagagctggaacggctgctggcccaggtcccaggcctggtcaactcggtcacagccagtccagaggccagttgcctgccttcccggacccctccccgggttggctctccctggagacctctccatcattcccgaaaagtggatggagagagtgatggctccactgaagagacagacgagtcggagacttgaggagtccaaagggtcctgcccacagcgccctgtacctgctcccacccagcccttggtgtgcccacccagcctcctctccagcaccttgctgtgctgccctctgctgctgacaaggtgaataacagccccaagaccagccagaggggctctgatgatcagcccagccagtggccccgga

SEQ ID NO: 118038 - DNA, 1623 bp, Homo sapiens
  Payload ID: 3097
  Gene Symbol: C11orf49
  Gene Name: chromosome 11 open reading frame 49
  ENST ID: ENST00000528488
  CDS Start-End: 110-418
cagctcccgtcccccttccgccgcgtgggtgccatggcaacggagagagacggcaacctgggttccggaagccggagagctggagctttgaagccaccccggtcaaaggatgctgagtccggagcgcctagccctaccggactacgagtatctggctcagcgacatgtcctcacctacatggaggatgcagtgtgccagctgctagaaaacagggaagatattagccaatatggaattgccaggttcttcactgaatattttaacagtgtatgccagggaacacacattctctttcgagaattcagcttcgtccaagccaccccccacaatagggtatcatttttacgggccttctggagatgcttccgaactgtgggcaaaaatggcgatttttatatacaaggaaaaccaaactaaagaagactgatgaaggtgcctctcttgtttgctctcttcacccgaccaattttcataccagtgaagctcctttggtcaaaatggtgtaactggatgcctcccaccctggaaaagctttgtagaaatactgatcttaaaatctcacacctggaggttagagactagcatacccttcacactgacttgcttttaaaagaacagctctaccaagaccagatttgctgaccatgaaagaatatcactgtttgctgcaattactgtgtcctgatttcccgctggagctcactcagaaagcagccaggattgtgctcatggacgatgccatggactgcttgatgtctttttcagatttcctctttgccttccagatccagttttactactcagaattcctggacagtgtggctgccatctatgaggacctgctgtcaggcaagaaccccaacacagtgattgtgccgacgtcgtccagtgggcagcaccgccaacgacctgccttgggcggggccggcacgctggagggcgtggaggcgtcgctgttctaccagtgtctggaaaacctgtgtgatcggcacaagtacagctgcccacccccagcacttgtcaaagaggccctcagcaatgttcagagactgaccttctatggattcctcatggctctctcaaagcaccgtggaatcaaccaagccctcggagctttgcctgacaagggggatctgatgcacgacccagcaatggatgaagagctggaacggctgctggcccaggtcccaggcctggtcaactcggtcacagccagtccagaggccagttgcctgccttcccggacccctccccgggttggctctccctggagacctctccatcattcccgaaaagtggatggagagagtgatggctccactgaagagacagacgagtcggagacttgaggagtccaaagggtcctgcccacagcgccctgtacctgctcccacccagcccttggtgtgcccacccagcctcctctccagcaccttgctgtgctgccctctgctgctgacaaggtgaataacagccccaagaccagccagaggggctctgatgatcagcccagccagtggccccggaaggtgaatggcctgctctccctggccctatcagcctgtgaacttcacttaggccccaagctgacagactgtgctgaggccaccttgtcacgccgt

SEQ ID NO: 118039 - DNA, 597 bp, Homo sapiens
  Payload ID: 3097
  Gene Symbol: C11orf49
  Gene Name: chromosome 11 open reading frame 49
  ENST ID: ENST00000532633
  CDS Start-End: 29-178
ggagctttgaagccaccccggtcaaaggatgctgagtccggagcgcctagccctaccggactacgagtatctggctcagcgacatgtcctcacctacatggaggatgcagtgtgccagctgctagaaaacagggaagatattagccaatatggaattgccaggttcttcactgaataagacgggtctcattttattgctcaaactggtcttgaactcctgggctcatgttatgctcctgcctcagcctcccaaaatgctagaattacagttttaacagtgtatgccagggaacacacattctctttcgagaattcagcttcgtccaagccaccccccacaatagggtatcatttttacgggccttctggagatgcttccgaactgtgggcaaaaatggcgatttttatatacaaggaaaaccaaactaaagaagactgatgaaggtgcctctcttgtttgctctcttcacccgaccaattttcataccagtgaagctcctttggtcaaaatggtgtaactggatgcctcccaccctggaaaagctttgtagaaatactgatcttaaaatctcacacctggaggttagagactagcat

SEQ ID NO: 118040 - DNA, 1141 bp, Homo sapiens
  Payload ID: 3098
  Gene Symbol: C11orf52
  Gene Name: chromosome 11 open reading frame 52
  Uniprot ID: Q96A22
  ENST ID: ENST00000278601
  CDS Start-End: 97-468
tccgggagctgccgcggaaagctcaaccaggaacccggaaatgcacaagcctcttgatgcataaaaacagctgggctcccttggagacagagcgccatgggaaaccgggtctgctgcggaggaagctggagctgcccatcaactttccagaagaaaaagaaaacaggaagccaaacaagacggacactgaagccgcagccacaacagctgcagcagaatctcccaaagggccatgaaacaacaggacatacgtatgaacgggtgttacagcagcaagggtctcaagagaggagtccaggcctcatgtcggaagacagcaacttacattatgctgacattcaagtgtgcagccgtccccatgcccgggaagtgaaacacgtgcatttagaaaacgctacagagtatgcgacccttcgcttcccccaggccacacctcgctatgacagcaagaacgggaccctggtgtgagcgcttgggaggaaggcccagtccatcgttaaccactacacctgtgggggagaacctactgctttggggaattgggtggcaacccagggatgttgtccacgttttaagcttaaagaactccaaagcccctggaattgtgggcgtcccattttctcccctggcctcttacttgccactgttaggttggagttaatagttggtttagctatgggtggatagctaaacttagctatccacatgaggttaggtggagtgtgcagggaggtaggtcttcgaccccaccattgttgctcctgctcttgcaaagtgcagaaagagcaggtaaaaagttagcccataagcacgtgggctgatcttgttggactttaattaatggtatcctttttcacacaccttaaactccaaagctgaaggggaggtgctccggaaaagcattctgagcttttacattcagacactagggctggcttgggccatttcctcagtggctgagtcaggttccagaccttaacagacaaatgggggaagggggctgaggcgtggaggaaacgctttcaggacctcaagtcagtgataaccgacagcacagtgaggcctggaaacttccctcggagggactgttggctctcgcaggtgcggggccgctaggatcaataaacggcctgagaaacat

SEQ ID NO: 118041 - DNA, 551 bp, Homo sapiens
  Payload ID: 3098
  Gene Symbol: C11orf52
  Gene Name: chromosome 11 open reading frame 52
  ENST ID: ENST00000529342
  CDS Start-End: 420-551
cagagctgagtggtgggccctgaacatccacttaaaggacaataaccaggcatccgaggaaaacactaaaaatggggtgagagaactgaacacaagaatgatgggtttcacagattctcgtagagcccatattttctactgcttgaagctcaagttcatggcttcatcaaaagacgcttcaaatcctgaagttgagatagctctcacctggagcccgtgtgttgttctaccctttggctgggaacacagtcacctgggaatcattccagcaggtggcttcaaaagtccaacctgctaggttgaaatctgacactgacacagactccgggagctgccgcggaaagctcaaccaggaacccggaaatgcacaagcctcttgatgcataaaaacagctgggctcccttggagacagagcgccatgggaaaccgggtctgctgcggaggaagctggagctgcccatcaactttccagaagaaaaagaaaacaggaagccaaacaagacggacactgaagccgcagccacaacagctgcagcagaatctcccaaag

SEQ ID NO: 118042 - DNA, 1205 bp, Homo sapiens
  Payload ID: 3099
  Gene Symbol: C11orf53
  Gene Name: chromosome 11 open reading frame 53
  Uniprot ID: Q8IXP5
  ENST ID: ENST00000280325
  CDS Start-End: 148-858
gtcccaggagactacagcaaacgagtgtatcaaggagtgagagtgaagcatacagtcaaagatctcctggcagaaaaacgatccgggcagacaagtaactcaagacttaatggcagcgtcagttcctctcagtctccatttgtgcagatgccaggttcgccggtcacgtcaggttactacggtgtcagaagatctttcttatctgactcagacttccacaacagtaaacagttttcaaatgacgtctacacctccagcgtggggaagccgtttccctgtgagtcctccgcagggcagagccatgcggctctcctggagccctacttcccccaggagccctacggagactaccggcctccggcgctgacgcccaacgcgggctctctgttcagcgcctcgcccctaccgccgctcctgccaccgcccttccccggagacccagctcacttcctatttagggactcatgggagcagacgttgcctgacggtctcagccagcctgaccctgtgtctgccgatgccctgctgaccttgccacccagcacgagttgcctctcccagcttgagtccgggagcatcgcccagcacaggggctcaagctgggggtcatccctggctggggctcagtcatactcgctgcatgctctggaagatctgcaccacactccggggtaccctaccccgcctccttaccccttcacccctttcatgacggtgtcaaatgacctaccgcccaaggtggggccactctccccagatgaggaagcagacaccggttccctccatgacccttccccttgggtgaaagaagatgggagtattgcctgggggtcatatgaatgccgcagagcttattgaggggagggccaaatgacttctgggtttttctttaacttgaggtgtattccaaagattgttttaggtgtgtcagcccattcaggactggattttcagaataagcctcaatgctgctctttgttagtggacgagggcatttatttgtaatcctctccactgtaaccccactgaaataaaacagaatgttaattaaatgtgtcagagaccgtattctagtaagataaccttacaatgtggtctttttggaactgttgtaacccattacgttctgaatcttctgttatctttgaagtatcatttttggcactgatttttcttaaattacattaaaaagtttatgcagatca

SEQ ID NO: 118043 - DNA, 2522 bp, Homo sapiens
  Payload ID: 3100
  Gene Symbol: C11orf54
  Gene Name: chromosome 11 open reading frame 54
  Uniprot ID: Q9H0W9
  ENST ID: ENST00000331239
  CDS Start-End: 180-1127
ggagctctagctcgcgtattctgaggaggcggggttggcctaggcgaagatccggactctgggtgttttgctaccgtgaccgtttagaaactgttcatacttggtgcgctgtggactcttgtgataattaaccaagagtagctctatttgtccaacctcacacctaaagaagaaagaaaatggcttgtgctgagttttcttttcatgtaccaagtcttgaagagcttgctggagttatgcagaaggggttaaaagataactttgctgatgtccaggtctctgtagttgattgccctgatttgactaaggaaccctttacctttcctgtaaaaggcatctgtgggaaaactagaattgcagaagttggaggtgtgccttacttattgcctcttgtaaaccaaaaaaaagtttatgatctgaataaaattgcaaaagaaatcaagctgcctggagcctttattcttggagcaggagcaggtccatttcagactctcgggttcaattctgagtttatgccagttattcagacagaaagtgaacacaagcctcctgtaaatggaagttactttgcccatgtgaaccctgcagatggagggtgcctactggagaaatacagtgagaaatgtcatgattttcagtgtgcattactggctaatctttttgccagtgaaggccaacctggcaaggtaattgaggtgaaagccaaaagaagaactggaccacttaactttgtgacttgtatgagagagaccctggaaaaacattatggaaataagcctataggaatgggaggtactttcataattcagaagggaaaagtgaagtctcacattatgcctgcagaattttcttcctgccccttgaactctgatgaagaagtgaataaatggttgcatttttatgaaatgaaagctcctttggtttgtctaccagtttttgtctccagagacccagggtttgatttgcgactggagcacactcatttttttagtcgtcatggagaaggtggacactaccattatgacactactccagatatagtggaatatcttggatacttcttacctgcagagtttctctatcgcattgatcaaccaaaagagacgcattcaattgggcgagattaaatcagctgatacttatttagaaaaagaaataattaaggttaattaattgattgacttattaattaatactgatataaaaccaatagaaatgatcccacaggccaggcacaatggctcatgcctataatcccagcactttgggaggctgaggcaggaagcacactggagcccaggagtttgagaccagcttgggcaacatagcaagaccctgtctatttttttaaaaaagtaaaaaatagaaattatctcactacttaaatcccatttttttcacttcatatgaaagaacatattgatagtatattctatattatttcatagatctgtctgaaagagattgggaacaaaaatatctaattgagatattctttaattttttacatagcagctttattttttttattctgtagtatcagcgaaatcagtcatgtttataccttgaatataaatatcaggaatcatgcaattatttctactatgtatttagtagtatcttatatttgtataacattattacattttgcaaattagtatcacaactgctaagtagatgtttctgagtattagaaaaatcagtgttattacctgcaggatattaaaaaacatttgaaaaagagaaaaagaaaaatcagtgtttagaaatgttgatagttattgaatctttgaattgaattttaaaaatccattctagtaatcagagtatactttttttatagaacaaggtggcaggtggggagccctttacccttctggtgaagttaaaccatagaagtttacaatttgcctttcacaaacattagcagtccgggcatggtggctgaagcctgtgatcccagcatgttgggaggccgagtgggaggattgcctgagcctaggagtttaaaccagcctgggcaccatggtgagaccccatctctattatttaaaatgtttcttaaataaaaaaaacacaaacattagcaactagttggctagccataattcctcccttgtttcgattgccagttagaagcaatttttatttcactggttatttgcaagagaaggggtaaaaaaacagcatcagagtgcaacactgaagtgagcttactttaatttgtaagtgaagctgttgctgaacatgaccactatcgttgctgaaatataaaattatactcactgattgtaatggttgaaattttcctgaataatcattagccaaagatcaactctctaatggtgctaatggcaatctagctaatgtgcaaatttaggaagtcttcagtactaagtacataattttcaaataatattttttaattgtctactttggatgttagctatgtcttgtgagtataaattccaattttaagcactattttgatgcaaaaaaatgaataaaaaatttaatttatg

SEQ ID NO: 118044 - DNA, 1733 bp, Homo sapiens
  Payload ID: 3100
  Gene Symbol: C11orf54
  Gene Name: chromosome 11 open reading frame 54
  Uniprot ID: Q9H0W9
  ENST ID: ENST00000354421
  CDS Start-End: 158-1105
ggcggggttggcctaggcgaagatccggactctgggtgttttgctaccgtgaccgtttagaacagaaactgttcatacttggtgcgctgtggactcttgtgataattaaccaagagtagctctatttgtccaacctcacacctaaagaagaaagaaaatggcttgtgctgagttttcttttcatgtaccaagtcttgaagagcttgctggagttatgcagaaggggttaaaagataactttgctgatgtccaggtctctgtagttgattgccctgatttgactaaggaaccctttacctttcctgtaaaaggcatctgtgggaaaactagaattgcagaagttggaggtgtgccttacttattgcctcttgtaaaccaaaaaaaagtttatgatctgaataaaattgcaaaagaaatcaagctgcctggagcctttattcttggagcaggagcaggtccatttcagactctcgggttcaattctgagtttatgccagttattcagacagaaagtgaacacaagcctcctgtaaatggaagttactttgcccatgtgaaccctgcagatggagggtgcctactggagaaatacagtgagaaatgtcatgattttcagtgtgcattactggctaatctttttgccagtgaaggccaacctggcaaggtaattgaggtgaaagccaaaagaagaactggaccacttaactttgtgacttgtatgagagagaccctggaaaaacattatggaaataagcctataggaatgggaggtactttcataattcagaagggaaaagtgaagtctcacattatgcctgcagaattttcttcctgccccttgaactctgatgaagaagtgaataaatggttgcatttttatgaaatgaaagctcctttggtttgtctaccagtttttgtctccagagacccagggtttgatttgcgactggagcacactcatttttttagtcgtcatggagaaggtggacactaccattatgacactactccagatatagtggaatatcttggatacttcttacctgcagagtttctctatcgcattgatcaaccaaaagagacgcattcaattgggcgagattaaatcagctgatacttatttagaaaaagaaataattaaggttaattaattgattgacttattaattaatactgatataaaaccaatagaaatgatcccacaggccaggcacaatggctcatgcctataatcccagcactttgggaggctgaggcaggaagcacactggagcccaggagtttgagaccagcttgggcaacatagcaagaccctgtctatttttttaaaaaagtaaaaaatagaaattatctcactacttaaatcccatttttttcacttcatatgaaagaacatattgatagtatattctatattatttcatagatctgtctgaaagagattgggaacaaaaatatctaattgagatattctttaattttttacatagcagctttattttttttattctgtagtatcagcgaaatcagtcatgtttataccttgaatataaatatcaggaatcatgcaattatttctactatgtatttagtagtatcttatatttgtataacattattacattttgcaaattagtatcacaactgctaagtagatgtttctgagtattagaaaaatcagtgttattacctgcaggatattaaaaaacatttgaaaaagagaaaaagaaaaa

SEQ ID NO: 118045 - DNA, 4094 bp, Homo sapiens
  Payload ID: 3100
  Gene Symbol: C11orf54
  Gene Name: chromosome 11 open reading frame 54
  Uniprot ID: Q9H0W9
  ENST ID: ENST00000528288
  CDS Start-End: 236-1033
cgtgggggcgccatttttctcgccgcgcagggaggactgactaacgtgggcggagctctagctcgcgtattctgaggaggcggggttggcctaggcgaagatccggactctgggtgttttgctaccgtgaccgtttagaacagaaactgttcatacttggtgcgctgtggactcttgtgataattaaccaagagtagctctatttgtccaacctcacacctaaagaagaaagaaaatggcttgtgctgagttttcttttcatgtaccaagtcttgaagagcttgctggagttatgcagaaggggttaaaagataactttgctgatgtccaggtctctgtagttgattgccctgatttgactaaggaaccctttacctttcctgtaaaaggcatctgtgggaaaactagaattgcagaagttggaggtgtgccttacttattgcctcttgtaaaccaaaaaaaagtttatgatctgaataaaattgcaaaagaaatcaagctgcctggagcctttattcttggagcaggagcaggtccatttcagactctcgggttcaattctgagtttatgccagttattcagacagaaagtgaacacaagcctcctgtaaatggaagttactttgcccatgtgaaccctgcagatggagggtgcctactggagaaatacagtgagaaatgtcatgattttcagtgtgcattactggctaatctttttgccagtgaaggccaacctggcaagcctgcagaattttcttcctgccccttgaactctgatgaagaagtgaataaatggttgcatttttatgaaatgaaagctcctttggtttgtctaccagtttttgtctccagagacccagggtttgatttgcgactggagcacactcatttttttagtcgtcatggagaaggtggacactaccattatgacactactccagatatagtggaatatcttggatacttcttacctgcagagtttctctatcgcattgatcaaccaaaagagacgcattcaattgggcgagattaaatcagctgatacttatttagaaaaagaaataattaaggttaattaattgattgacttattaattaatactgatataaaaccaatagaaatgatcccacaggccaggcacaatggctcatgcctataatcccagcactttgggaggctgaggcaggaagcacactggagcccaggagtttgagaccagcttgggcaacatagcaagaccctgtctatttttttaaaaaagtaaaaaatagaaattatctcactacttaaatcccatttttttcacttcatatgaaagaacatattgatagtatattctatattatttcatagatctgtctgaaagagattgggaacaaaaatatctaattgagatattctttaattttttacatagcagctttattttttttattctgtagtatcagcgaaatcagtcatgtttataccttgaatataaatatcaggaatcatgcaattatttctactatgtatttagtagtatcttatatttgtataacattattacattttgcaaattagtatcacaactgctaagtagatgtttctgagtattagaaaaatcagtgttattacctgcaggatattaaaaaacatttgaaaaagagaaaaagaaaaatcagtgtttagaaatgttgatagttattgaatctttgaattgaattttaaaaatccattctagtaatcagagtatactttttttatagaacaaggtggcaggtggggagccctttacccttctggtgaagttaaaccatagaagtttacaatttgcctttcacaaacattagcagtccgggcatggtggctgaagcctgtgatcccagcatgttgggaggccgagtgggaggattgcctgagcctaggagtttaaaccagcctgggcaccatggtgagaccccatctctattatttaaaatgtttcttaaataaaaaaaacacaaacattagcaactagttggctagccataattcctcccttgtttcgattgccagttagaagcaatttttatttcactggttatttgcaagagaaggggtaaaaaaacagcatcagagtgcaacactgaagtgagcttactttaatttgtaagtgaagctgttgctgaacatgaccactatcgttgctgaaatataaaattatactcactgattgtaatggttgaaattttcctgaataatcattagccaaagatcaactctctaatggtgctaatggcaatctagctaatgtgcaaatttaggaagtcttcagtactaagtacataattttcaaataatattttttaattgtctactttggatgttagctatgtcttgtgagtataaattccaattttaagcactattttgatgcaaaaaaatgaataaaaaatttaatttatgatatgtttgtaatatcttacctccagacaaaataatattaatagtctatcatttaacaaatatgtattgaacacctacccttctctctggagtgtacacttcatgtgggcaagggccttgttcacgactgtagcactagtgcctttaactgctagcaaagtagccactcggatgattataccaaacactttactaaagctggggatctgtctagtggggaagacaaacaataaatatataatatgtcaggtggtattaaatgctatgaaaagaaaggagtagatggactgtaaaggaggatgctatttttttgtggccatcccgcactgagacaggatgcattccacactcaaaatttggttcacatgtccagactgatagccaagttcagtggctcacgcctgtaatcctagtacttagggagaccaaggcaggaggatcacttgaggccaggagttcaaggccagcctgggcaacagagagagacccccatctctgcaaaaaaagaaaaaaaattttttaattatctgggcatggttgtgcacacctgttgtcccagctgctcaggaggctgaggcacgagaatcacttgagcccagaagttggaggctacagtgagctatgattgtttcattgcactgtagcctgggcaacacagtgagaccctgtctcaaaaagaaaaaaaaaatgactgatgaagccacacacacaccaacagagtatgaaagggttgttactcacataatgaagctttctggggaaagcagggcagctcctaagcaggatttgacaacagggaaggagactgacttggagttttttggtggttagggagtagggccagagtgatgtttcttgcatgtggtttgaatttcccactggtatcaaagaaggaaacacccaggcttgcttgctttatttttttaaagagatggtgtctcactatgttgcccaggctgggctcaagtcatcttcctgcctcggcctcccaaagtgctgggattacaggcatgggccaccatgtctggcgagcacccaggctttcttagcttgccagaggtgtagggcataaggggacgaggggtgggataaggcttaaaagccaccagcagtcaaacataaattaagtcagattcttaattacagatttcagatctgatttcagatcagagcttatttcaggtcagattccaggtgtagagatcatctgaagcagtcctgggcctcttcacactacagataccaacactgcctttactcttccattagtgtcctccaaaatggggtgcatggacagcaggtacacatgaccttccaaggggtgtgggaatattagaacatctatttatatattttatttcgtccttttaagtttctgtggttttgtgtacatttcttacgttagggatttcagttcaaaattgtattgctgatagacacaattcaaaaagcttggagaccaggtacattcacaccatctaatagagatgggggaaaagatcaaaatgcttttctttttaaattttttcttagttttctttctttatagagacagagtttcgccgtgttggccaggctgttctcgaactcctggcctcaagtgatctgcccgtctcagcctctcaaattgctgggattacaggcatgaggcactgcacctcaccca

SEQ ID NO: 118046 - DNA, 903 bp, Homo sapiens
  Payload ID: 3100
  Gene Symbol: C11orf54
  Gene Name: chromosome 11 open reading frame 54
  ENST ID: ENST00000533154
  CDS Start-End: 341-903
acaggtgtgtgccaccacgcccagctaatttttgtatttttagtagagacaggttttcaccatgttggccaggatggtcttgatctcttctcttgacctcgtgatccgccccccttggcctcccaaagtgctgggattacaggcatgagccacagcgcccggcctataaatgttttccaagttttttatgtctaaaattaaatattatgtattttatgttctcttattaggacttgaactaaaatgtcttaaaaggattaaatgttttgtaacattattcaagatattctctttgcagagatacaaagattgactaattgcctcactttcttttcagtttatgccagttattcagacagaaagtgaacacaagcctcctgtaaatggaagttactttgcccatgtgaaccctgcagatggagggtgcctactggagaaatacagtgagaaatgtcatgattttcagtgtgcattactggctaatctttttgccagtgaaggccaacctggcaaggtaattgaggtgaaagccaaaagaagaactggaccacttaactttgtgacttgtatgagagagaccctggaaaaacattatggaaataagcctataggaatgggaggtactttcataattcagaagggaaaagtgaagtctcacattatgcctgcagaattttcttcctgccccttgaactctgatgaagaagtgaataaatggttgcatttttatgaaatgaaagctcctttggtttgtctaccagtttttgtctccagagacccagggtttgatttgcgactggagcacactcatttttttagtcgtcatggagaaggtggacactaccattatgacactactccagatatagtggaatatcttggatacttcttacctgcagagtt

SEQ ID NO: 118047 - DNA, 552 bp, Homo sapiens
  Payload ID: 3100
  Gene Symbol: C11orf54
  Gene Name: chromosome 11 open reading frame 54
  ENST ID: ENST00000530279
  CDS Start-End: 266-552
aagatccggactctgggtgttttgctaccgtgaccgtttagaaacccttgtgtgttaaaatattggagaaggctcattctttgaccatgactcgaagtgtgtaacctttgtgctggacgccagtgttattccatagcacgcccaggtctcctccccacttttgcacctgtttcaaactgttcatacttggtgcgctgtggactcttgtgataattaaccaagagtagctctatttgtccaacctcacacctaaagaagaaagaaaatggcttgtgctgagttttcttttcatgtaccaagtcttgaagagcttgctggagttatgcagaaggggttaaaagataactttgctgatgtccaggtctctgtagttgattgccctgatttgactaaggaaccctttacctttcctgtaaaaggcatctgtgggaaaactagaattgcagaagttggaggtgtgccttacttattgcctcttgtaaaccaaaaaaaagtttatgatctgaataaaattgcaaaagaaatcaagctgcctggagcctttattcttgg

SEQ ID NO: 118048 - DNA, 552 bp, Homo sapiens
  Payload ID: 3100
  Gene Symbol: C11orf54
  Gene Name: chromosome 11 open reading frame 54
  ENST ID: ENST00000527003
  CDS Start-End: 323-552
aggcgaagatccggactctgggtgttttgctaccgtgaccgtttagaaacccttgtgtgttaaaatattggagaaggctcattctttgaccatgactcgaagtgtgtaacctttgtgctggacgccagtgttattccatagcacgcccaggtctcctccccacttttgcacctgtttcgtaagctcaccctttctgcctcccaggagttggctaacatgtcacaaaacagaaactgttcatacttggtgcgctgtggactcttgtgataattaaccaagagtagctctatttgtccaacctcacacctaaagaagaaagaaaatggcttgtgctgagttttcttttcatgtaccaagtcttgaagagcttgctggagttatgcagaaggggttaaaagataactttgctgatgtccaggtctctgtagttgattgccctgatttgactaaggaaccctttacctttcctgtaaaaggcatctgtgggaaaactagaattgcagaagttggaggtgtgccttacttattgcctcttgtaaaccaaaaaaaagt

SEQ ID NO: 118049 - DNA, 779 bp, Homo sapiens
  Payload ID: 3100
  Gene Symbol: C11orf54
  Gene Name: chromosome 11 open reading frame 54
  ENST ID: ENST00000530620
  CDS Start-End: 62-779
gcggggttggcctaggcgaagatccggactctgggtgttttgctaccgtgaccgtttagttatgcagaaggggttaaaagataactttgctgatgtccaggtctctgtagttgattgccctgatttgactaaggaaccctttacctttcctgtaaaaggcatctgtgggaaaactagaattgcagaagttggaggtgtgccttacttattgcctcttgtaaaccaaaaaaaagtttatgatctgaataaaattgcaaaagaaatcaagctgcctggagcctttattcttggagcaggagcaggtccatttcagactctcgggttcaattctgagtttatgccagttattcagacagaaagtgaacacaagcctcctgtaaatggaagttactttgcccatgtgaaccctgcagatggagggtgcctactggagaaatacagtgagaaatgtcatgattttcagtgtgcattactggctaatctttttgccagtgaaggccaacctggcaaggtaattgaggtgaaagccaaaagaagaactggaccacttaactttgtgacttgtatgagagagaccctggaaaaacattatggaaataagcctataggaatgggaggtactttcataattcagaagggaaaagtgaagtctcacattatgcctgcagaattttcttcctgccccttgaactctgatgaagaagtgaataaatggttgcatttttatgaaatgaaagctcctttggtttgtctaccagtttttgtctccagagacccag

SEQ ID NO: 118050 - DNA, 695 bp, Homo sapiens
  Payload ID: 3100
  Gene Symbol: C11orf54
  Gene Name: chromosome 11 open reading frame 54
  ENST ID: ENST00000531650
  CDS Start-End: 141-695
cgaagatccggactctgggtgttttgctaccgtgaccgtttagaacagaaactgttcatacttggtgcgctgtggactcttgtgataattaaccaagagtagctctatttgtccaacctcacacctaaagaagaaagaaaatggcttgtgctgagttttcttttcatgtaccaagtcttgaagagcttgctggagttatgcagaaggggttaaaagataactttgctgatgtccaggtctctgtagttgattgccctgatttgactaaggaaccctttacctttcctgtaaaaggcatctgtgggaaaactagaattgcagaagttggaggtgtgccttacttattgcctcttgtaaaccaaaaaaaagtttatgatctgaataaaattgcaaaagaaatcaagctgcctggagcctttattcttggagcaggagcaggtccatttcagactctcgggttcaattctgaggtaattgaggtgaaagccaaaagaagaactggaccacttaactttgtgacttgtatgagagagaccctggaaaaacattatggaaataagcctataggaatgggaggtactttcataattcagaagggaaaagtgaagtctcacattatgcctgcagaattttcttcctgccccttgaactctgatgaagaagtgaataaatggttgcatttttatgaaatgaaa

SEQ ID NO: 118051 - DNA, 1862 bp, Homo sapiens
  Payload ID: 3100
  Gene Symbol: C11orf54
  Gene Name: chromosome 11 open reading frame 54
  Uniprot ID: Q9H0W9
  ENST ID: ENST00000528099
  CDS Start-End: 300-1247
attctgaggaggcggggttggcctaggcgaagatccggactctgggtgttttgctaccgtgaccgtttagaaacccttgtgtgttaaaatattggagaaggctcattctttgaccatgactcgaagtgtgtaacctttgtgctggacgccagtgttattccatagcacgcccaggtctcctccccacttttgcacctgtttcaacagaaactgttcatacttggtgcgctgtggactcttgtgataattaaccaagagtagctctatttgtccaacctcacacctaaagaagaaagaaaatggcttgtgctgagttttcttttcatgtaccaagtcttgaagagcttgctggagttatgcagaaggggttaaaagataactttgctgatgtccaggtctctgtagttgattgccctgatttgactaaggaaccctttacctttcctgtaaaaggcatctgtgggaaaactagaattgcagaagttggaggtgtgccttacttattgcctcttgtaaaccaaaaaaaagtttatgatctgaataaaattgcaaaagaaatcaagctgcctggagcctttattcttggagcaggagcaggtccatttcagactctcgggttcaattctgagtttatgccagttattcagacagaaagtgaacacaagcctcctgtaaatggaagttactttgcccatgtgaaccctgcagatggagggtgcctactggagaaatacagtgagaaatgtcatgattttcagtgtgcattactggctaatctttttgccagtgaaggccaacctggcaaggtaattgaggtgaaagccaaaagaagaactggaccacttaactttgtgacttgtatgagagagaccctggaaaaacattatggaaataagcctataggaatgggaggtactttcataattcagaagggaaaagtgaagtctcacattatgcctgcagaattttcttcctgccccttgaactctgatgaagaagtgaataaatggttgcatttttatgaaatgaaagctcctttggtttgtctaccagtttttgtctccagagacccagggtttgatttgcgactggagcacactcatttttttagtcgtcatggagaaggtggacactaccattatgacactactccagatatagtggaatatcttggatacttcttacctgcagagtttctctatcgcattgatcaaccaaaagagacgcattcaattgggcgagattaaatcagctgatacttatttagaaaaagaaataattaaggttaattaattgattgacttattaattaatactgatataaaaccaatagaaatgatcccacaggccaggcacaatggctcatgcctataatcccagcactttgggaggctgaggcaggaagcacactggagcccaggagtttgagaccagcttgggcaacatagcaagaccctgtctatttttttaaaaaagtaaaaaatagaaattatctcactacttaaatcccatttttttcacttcatatgaaagaacatattgatagtatattctatattatttcatagatctgtctgaaagagattgggaacaaaaatatctaattgagatattctttaattttttacatagcagctttattttttttattctgtagtatcagcgaaatcagtcatgtttataccttgaatataaatatcaggaatcatgcaattatttctactatgtatttagtagtatcttatatttgtataacattattacattttgcaaattagtatcacaactgctaagtagatgtttctgagtattagaaaaatcagtgttattacctgcaggatattaaaaaacatttgaaaaag

SEQ ID NO: 118052 - DNA, 574 bp, Homo sapiens
  Payload ID: 3100
  Gene Symbol: C11orf54
  Gene Name: chromosome 11 open reading frame 54
  ENST ID: ENST00000533585
  CDS Start-End: 274-574
gtattctgaggaggcggggttggcctaggcgaagatccggactctgggtgttttgctaccgtgaccgtttagaaacccttgtgtgttaaaatattggagaaggctcattctttgaccatgactcgaagtgtgtaacctttgtgctggacgccagtgttattccatagcacgcccagaacagaaactgttcatacttggtgcgctgtggactcttgtgataattaaccaagagtagctctatttgtccaacctcacacctaaagaagaaagaaaatggcttgtgctgagttttcttttcatgtaccaagtcttgaagagcttgctggagttatgcagaaggggttaaaagataactttgctgatgtccaggtctctgtagttgattgccctgatttgactaaggaaccctttacctttcctgtaaaaggcatctgtgggaaaactagaattgcagaagttggaggtgtgccttacttattgcctcttgtaaaccaaaaaaaagtttatgatctgaataaaattgcaaaagaaatcaagctgcctggagcctttattcttggagcaggagcaggtc
